(19) United States
(12) Patent Application Publication
(10) Pub. No.: US 2003/0109690 A1
(43) Pub. Date: Jun. 12, 2003

(54) Colon and colon cancer associated polynucleotides and polypeptides

(75) Inventors: Steven M. Ruben, Olney, MD (US); Steve C. Barash, Rockville, MD (US); Charles E. Birse, North Potomac, MD (US); Craig A. Rosen, Laytonsville, MD (US)

Correspondence Address: HUMAN GENOME SCIENCES INC, 9410 KEY WEST AVENUE, ROCKVILLE, MD, 20850

(73) Assignee: Human Genome Sciences, Inc., Rockville, MD (US)

(21) Appl. No.: 10/106,698

(22) Filed: Mar. 27, 2002

Related U.S. Application Data
(63) Continuation-in-part of application No. PCT/US00/26524, filed on Sep. 28, 2000.
(60) Provisional application No. 60/157,137, filed on Sep. 29, 1999.
(60) Provisional application No. 60/163,280, filed on Nov. 3, 1999.

(51) Int. Cl. C07H 21/02; C07H 21/04

(52) U.S. Cl. 536/23.1

(57) ABSTRACT

The present invention relates to novel colon or colon cancer related polynucleotides and the polypeptides encoded by these polynucleotides herein collectively known as “colon or colon cancer antigens,” and the use of such colon or colon cancer antigens for detecting disorders of the colon, particularly the presence of colon cancer and colon cancer metastases. More specifically, isolated colon or colon cancer associated nucleic acid molecules are provided encoding novel colon or colon cancer associated polypeptides. Novel colon or colon cancer polypeptides and antibodies that bind to these polypeptides are provided. Also provided are vectors, host cells, and recombinant and synthetic methods for producing human colon or colon cancer associated polynucleotides and/or polypeptides. The invention further relates to diagnostic and therapeutic methods useful for diagnosing, treating, preventing and/or prognosing disorders related to the colon, including colon cancer, and therapeutic methods for treating such disorders. The invention further relates to screening methods for identifying agonists and antagonists of polynucleotides and polypeptides of the invention. The present invention further relates to methods and/or compositions for inhibiting the production and function of the polypeptides of the present invention.

### CROSS REFERENCE TO RELATED APPLICATIONS

[0001] This application is a continuation-in-part of, and claims priority under 35 U.S.C. §120 to International Application No: PCT/US00/26524, filed Sep. 28, 2000, which claims benefit under 35 U.S.C. §119(e) of U.S. Provisional Application Nos. 60/157,137, filed on Sep. 29, 1999, and 60/163,280, filed on Nov. 3, 1999. Each of the above referenced applications is hereby incorporated by reference herein in its entirety.

### STATEMENT UNDER 37 C.F.R. §1.77 (b)(4)

[0002] This application refers to a “Sequence Listing” and Tables listed below, which are provided as electronic documents on two identical compact discs (CD-R), labeled “Copy 1” and “Copy 2.” These compact discs each contain the following files, which are hereby incorporated in their entirety herein:

| | | | Date of |
|---|---|---|---|
| Document | File Name | Size in bytes | Creation |
| Sequence Listing | PA005P1_seqList.txt | 10,582,591 | 03/26/02 |
| Table 1A | PA005P1_table1A.txt | 4,391,170 | 03/21/02 |
| Table 2 | PA005P1_table2.txt | 623,017 | 03/21/02 |
| Table 3 | PA005P1_table3.txt | 4,941,626 | 03/21/02 |
| Table 4 | PA005P1_table4.txt | 408,186 | 03/21/02 |

### FIELD OF THE INVENTION

[0003] The present invention relates to novel colon and colon cancer related polynucleotides, the polypeptides encoded by these polynucleotides herein collectively referred to as “colon or colon cancer antigens,” and antibodies that immunospecifically bind these polypeptides, and the use of such colon or colon cancer polynucleotides, antigens, and antibodies for detecting, treating, preventing and/or prognosing disorders of the colon, including, but not limited to, the presence of colon cancer and colon cancer metastases. More specifically, isolated colon or colon cancer nucleic acid molecules are provided encoding novel colon or colon cancer polypeptides. Novel colon or colon cancer polypeptides and antibodies that bind to these polypeptides are provided. Also provided are vectors, host cells, and recombinant and synthetic methods for producing human colon or colon cancer polynucleotides, polypeptides, and/or antibodies. The invention further relates to diagnostic and therapeutic methods useful for diagnosing, treating, preventing and/or prognosing disorders related to the colon, including colon cancer, and therapeutic methods for treating such disorders. The invention further relates to screening methods for identifying agonists and antagonists of polynucleotides and polypeptides of the invention. The invention further relates to methods and/or compositions for inhibiting or promoting the production and/or function of the polypeptides of the invention.

### BACKGROUND OF THE INVENTION

[0004] The human colon, a portion of the large intestine, extends from the end of the small intestine and cecum up the right side of the abdomen (ascending colon), across to the left side (transverse colon), down the left side (descending colon), and loops (simoid flexure or sigmoid colon) to join the rectum. In humans, the colon has no digestive function, but instead lubricates waste products, adsorbs remaining fluids and salts, and stores waste products unti they are ready to be passed from the body. Most adsorption occurs in the ascending and transverse regions, where the liquid material received from the small intestine is dehydrated to form a fecal mass.

[0005] The inner wall of the colon consists of a mucous membrane that adsorbs the fluids and gives off mucus to lubricate the waste materials. The deeper muscle layer is composed of circular and longitudinal muscles. Circular muscles produce the mild churning and mixing motions of the intestine, while the longitudinal ones create the strong massive muscle contractions that actually move the feces. Disorders and diseases associated with the colon range from constipation, diarrhea, gas discomfort, and colitis (inflammation of the colon), to the more serious megacolon (enlarged colon) and cancer. Some of these are discussed in more detail below.

[0006] Disorders of the colon include congenital abnormalities, such as atresia and stenosis, Meckel diverticulum, congenital aganglionic megacolon or Hirschsprung's Disease. Abnormal rotation of the colon is fairly frequent and occasionally leads to disorders. Unusually long mesenteries (the supporting tissues of the large intestine) may permit recurrent twisting, cutting off the blood supply to the involved loop. Brain disease, metabolic failure, or drugs can dull the normal signals that give rise to the urge to defecate. Poor abdominal musculature or a poor pelvic floor makes it difficult to mobilize effective pressures to bring about defecation.

[0007] Aganglionic megacolon, or Hirschsprung's disease is an idiopathic condition analogous to achalasia of the esophagus. It is characterized by the absence of ganglion cells and normal nerve fibres from the distal (or lower) portion of the large intestine, which results in reduced neuromuscular transmission and ceased peristalsis. The entire colon slowly becomes more and more distended and thick-walled. A related disorder, acquired megacolon, is commonly caused by a combination of faulty toilet training and emotional disorders during childhood, in which the child withholds defecation. This starts a cycle of the administration of increasing amounts of laxatives with, ultimately, damage to the intrinsic innervation in the intestinal wall. A huge, dilated rectum full of feces develops over the years and act as an obstruction, leading to voluminus dilatation of the whole colon in some cases. The same phenomenon is occasionally encountered in those with schizophrenia and severe depression.

[0008] Arteries penetrate the muscular walls of the colon from its outside covering, the serosa, and distribute themselves in the submucosa. With aging, and perhaps in persons predisposed to the disorder, the channels in which these arteries lie may become larger and potentially herniate. If the peristaltic activity of the colon maintains a high pressure within its lumen, as in patients straining to defecate, the mucous membrane of the colon may be driven slowly into these channels and eventually may follow the arteries back to their site of colonic entrance in the serosa. At such time, the outward-pushing mucosa becomes a budding sac, or diverticulum. In the Western world, multiple colonic diverticula occur in as many as 30 percent of persons older than 50 years. Diverticula are particularly common in those whose diets are deficient in fibre (roughage), and they are rare in countries where high-fibre diets are usual.

[0009] The principal dangers of diverticulosis are massive hemorrhage and inflammation. Hemorrhage results from the action of hard stools against the aging, less elastic, arteries of the colon that are exposed and unsupported because of diverticula. Diverticulitis, on the other hand, occurs when the narrow necks of the diverticula become plugged with debris or inedible foodstuff and bacteria (uninhibited by the usual motor activity that keeps the intestine clean) which proliferate in the blind sacs. When the sacs enlarge, the adjacent intestinal wall becomes inflamed and irritable, muscle spasms occur, and the patient experiences abdominal pain and fever. If the sacs continue to enlarge, they may rupture into the peritoneum, giving rise to peritonitis, or an inflammation of the peritoneum. More commonly they fix themselves to neighbouring organs and produce localized abscesses, which may prove difficult to treat surgically. Mild diverticulitis responds well to conservative treatment and to antibiotics; massive hemorrhages often require emergency surgery. Recurrent diverticulitis requires resection of the affected area of the colon.

[0010] Fungal and bacterial infections are also common causes of colon disorders. The colon may become inflammed and ulcerate because of invasion by pathogenic bacteria (e.g., Shigella spp., Salmonella spp., Vibrio cholerae, Escherichia coli, Yersinia enterocolitica), parasites or protozoa (e.g., amoeba), or viral infection (e.g., cytomegalic virus, rotovirus). For example, Shigella species may attack the mucous membrane of the colon and produce an intense but rather superficial hemorrhage; Salmonella species may damage the lymph follicles of the colon, but do not produce a generalized inflammation of the colon; cytomegalic virus can cause a severe colitis producing ulcerations; Lymphopathia venereum can cause a more generalized and superficial colitis. The most important parasite producing disease in the human colon is the protozoan Entamoeba histolytica lodge in the cecum and ascending colon, undermine the mucosal coat, and may create large ulcerations that bleed impressively. Stools contain blood, but there is little pus or other evidence of reaction by the colon to the invading organism. In more generalized amoebic colitis, the rectum and sigmoid colon are invaded by E. histolytica, which manifest their presence by numerous discrete ulcerations separated from each other by a relatively normal-appearing mucous membrane. The amoebas may enter the portal circulation and be carried to the liver, where abscesses form and sometimes rupture into the chest or the abdominal cavity.

[0011] Inflammatory bowel disease (IBD) is a blanket term for diseases that cause swelling and inflammation in the digestive tract wall. There are two types of IBD: Crohn's disease and ulcerative colitis. Ulcerative colitis causes inflammation and sores (ulcers) in the top layers of the lining of the lower intestine, or colon, often including the rectum. Crohn's disease—an equally common illness—leads to sores that extend deeper in the digestive tract wall and can affect any portion of the gastrointestinal tract, from mouth to anus. For some people, inflammatory bowel disease is little more than a nuisance, but many patients face serious threats to their health. Extreme cases of Crohn's disease can produce holes in the intestine, causing air and stool to leak into the abdominal cavity, leading to an inflammation there that is known as peritonitis. Or the sores can tunnel through the bowel wall to penetrate other organs, such as the bladder or skin, to form what doctors call fistulas. In still other people, the intestines become blocked by scar tissue or even partially paralyzed; the latter condition, known as toxic megacolon (far more common with ulcerative colitis than Crohn's disease), can lead to rupture of the colon. In many of these more serious cases, emergency surgery may be necessary to save the affected person's life. IBD can also raise a person's risk of developing colon cancer.

[0012] Tumors of the colon are usually polyps or cancers. A peculiar form of polyp is the villous adenoma, often a slowly growing, fernlike structure that spreads along the surface of the colon for some distance. In the West, cancer of the colon is a more common tumor than is cancer of the stomach, and it occurs about equally in both sexes. Cancers compress the colonic lumen to produce obstruction, they attach to neighbouring structures to produce pain, and they perforate to give rise to peritonitis. Cancers also may metastasize to distant organs before local symptoms appear.

[0013] Colorectal cancers are among the most common cancers in men and women in the U.S. and are one of the leading causes of death. Other than surgical resection no other systemic or adjuvant therapy is available. Vogelstein and colleagues have described the sequence of genetic events that appear to be associated with the multistep process of colon cancer development in humans (Trends Genet 9(4):138-41 (1993)). An understanding of the molecular genetics of carcinogenesis, however, has not led to preventative or therapeutic measures. It can be expected that advances in molecular genetics will lead to better risk assessment and early diagnosis but colorectal cancers will remain a deadly disease for a majority of patients due to the lack of an adjuvant therapy. Adjuvant or systemic treatments are likely to arise from a better understanding of the autocrine factors responsible for the continued proliferation of cancer cells.

[0014] Colorectal carcinoma is a malignant neoplastic disease. Many patients with colorectal carcinoma eventually die from this disease. In fact, it is estimated that 62,000 persons in the United States alone die of colorectal carcinoma annually. At the present time the only systemic treatment available for colon cancer is chemotherapy. However, chemotherapy has not proven to be very effective for the treatment of colon cancers for several reasons, the most important of which is the fact that colon cancers express high levels of the MDR gene (that codes for multi-drug resistance gene products). The MDR gene products actively transport the toxic substances out of the cell before the chemotherapeutic agents can damage the DNA machinery of the cell. These toxic substances harm the normal cell populations more than they harm the colon cancer cells for the above reasons.

[0015] There is no effective systemic treatment for treating colon cancers other than surgically removing the cancers. In the case of several other cancers, including breast cancers, the knowledge of growth promoting factors (such as EGF, estradiol, IGF-11) that appear to be expressed or affect the growth of the cancer cells, has been translated for treatment purposes. But in the case of colon cancers this knowledge has not been applied and therefore the treatment outcome for colon cancers remains bleak.

[0016] There is a need, therefore, for identification and characterization of such factors that modulate activation and differentiation of colon cells, both normally and in disease states. In particular, there is a need to isolate and characterize additional molecules that mediate apoptosis, DNA repair, tumor-mediated angiogenesis, genetic imprinting, immune responses to tumors and tumor antigens and, among other things, that can play a role in detecting, preventing, ameliorating or correcting dysfunctions or diseases of the colon.

[0017] The discovery of new human colon and colon cancer associated polynucleotides, the polypeptides encoded by them, and antibodies that immunospecifically bind these polypeptides, satisfies a need in the art by providing new compositions which are useful in the diagnosis, treatment, prevention and/or prognosis of disorders of the colon, including, but not limited to, congenital abnormalities, such as atresia and stenosis, Meckel diverticulum, congential aganglionic megacolon or Hirschsprung disease; colonic diverticulitis, colonic diverticulosis, toxic megacolon, constipation, disorders caused by parasites and protozoa (e.g., amoebic colitis, anisakiasis, balantidiasis, blastocystis infections, cryptosporidiosis, dientamoebiasis, amoebic dysentery, giardiasis, Lymphopathia venereum, Entamoeba histolytica), bacteria infection (e.g., Shigella, Salmonella, Yersinia, E. coli, Clostridium difficile), viral infection (e.g., cytomegalic virus, rotovirus); inflammatory bowel disease (e.g., ulcerative colitis, Crohn's disease, eosinophilic colitis); neoplastic disorders, such as, polyps (e.g., sessile polyp, adenomatous polyp, inflammatory polyps), adenomas (e.g., tubular adenoma, tubovillous adenomas, villous adenoma, Gardner syndrome, Peutz-Jeghers syndrome), hyperplastic, polyposis, villous, pseudopolyps, leiomyomas, carcinoids, lipomas, and angiomas, cancers, such as, rectal cancer, adenocarcinoma, colorectal carcinoma, colon cancer, colon carcinoma, colorectal cancer; colonic diseases; miscellaneous intestinal inflammatory disorders, including acquired immunodeficiency syndrome, HIV enteropathy, transplantation, drug-induced intestinal injury, radiation enterocolitis, neutropenic colitis, diverticular colon disease (DCD), inflammatory colonic disease, ischemic colitis, radiation proctitis, non-inflammatory bowel disease (non-IBD), colonic inflammation; colitis (e.g., infectious enterocolitis, necrotizing enterocolitis, antibiotic-associated colitis (pseudomembranous colitis), and collagenous and lymphocytic colitis); diarrhea and dysentary, malabsorption syndromes (e.g., blind loop syndrome, lactose intolerance, short bowl syndrome, whipple's disease), mesenteric vascular occlusion, pneumatosis cystoides intestinalis, protein-losing enteropathies (intestinal lymphagiectasis); intestinal obstruction (e.g., afferent loop syndrome, impacted feces, intestinal pseudo-obstruction [cecal volvulus], intussusception), intestinal perforation, sigmoid diseases (e.g., proctocolitis, sigmoin neoplasms), and/or as described under “Gastrointestinal Disorders” below.

### SUMMARY OF THE INVENTION

[0018] The present invention relates to novel colon and colon cancer related polynucleotides, the polypeptides encoded by these polynucleotides herein collectively referred to as “colon or colon cancer antigens,” and antibodies that immunospecifically bind these polypeptides, and the use of such colon or colon cancer polynucleotides, antigens, and antibodies for detecting, treating, preventing and/or prognosing disorders of the colon, including, but not limited to, the presence of colon cancer and colon cancer metastases. More specifically, isolated colon or colon cancer nucleic acid molecules are provided encoding novel colon or colon cancer polypeptides. Novel colon or colon cancer polypeptides and antibodies that bind to these polypeptides are provided. Also provided are vectors, host cells, and recombinant and synthetic methods for producing human colon or colon cancer polynucleotides, polypeptides, and/or antibodies. The invention further relates to diagnostic and therapeutic methods useful for diagnosing, treating, preventing and/or prognosing disorders related to the colon, including colon cancer, and therapeutic methods for treating such disorders. The invention further relates to screening methods for identifying agonists and antagonists of polynucleotides and polypeptides of the invention. The invention further relates to methods and/or compositions for inhibiting or promoting the production and/or function of the polypeptides of the invention.

### DETAILED DESCRIPTION

[0019] Tables

[0020] Table 1A summarizes some of the polynucleotides encompassed by the invention (including cDNA clones related to the sequences (Clone ID NO:Z), contig sequences (contig identifier (Contig ID:) and contig nucleotide sequence identifier (SEQ ID NO:X)) and further summarizes certain characteristics of these polynucleotides and the polypeptides encoded thereby. The first column, “Gene No.”, numbers each disclosed cDNA clone related to the sequences sequentially. The second column provides a unique clone identifier, “Clone ID NO:Z”, for a cDNA plasmid related to each colon cancer associated contig sequence disclosed in Table 1A. The third column provides a unique contig identifier, “Contig ID:” for each of the contig sequences disclosed in Table 1A. The fourth column provides the sequence identifier, “SEQ ID NO:X”, for each of the contig polynucleotide sequences disclosed in Table 1A. The fifth column, “ORF (From-To)”, provides the location (i.e., nucleotide position numbers) within the polynucleotide sequence of SEQ ID NO:X that delineate the preferred open reading frame (ORF) shown in the sequence listing and referenced in Table 1A as SEQ ID NO:Y (column 6). Column 7 lists residues comprising predicted epitopes contained in the polypeptides encoded by each of the preferred ORFs (SEQ ID NO:Y). Identification of potential immunogenic regions was performed according to the method of Jameson and Wolf (CABIOS, 4:181-186 (1988)); specifically, the Genetics Computer Group (GCG) implementation of this algorithm, embodied in the program PEPTIDESTRUCTURE (Wisconsin Package v10.0, Genetics Computer Group (GCG), Madison, Wis.). This method returns a measure of the probability that a given residue is found on the surface of the protein. Regions where the antigenic index score is greater than 0.9 over at least 6 amino acids are indicated in Table 1A as “Predicted Epitopes.” In particular embodiments, colon or colon cancer associated polypeptides of the invention comprise, or alternatively consist of, one, two, three, four, five or more of the predicted epitopes described in Table 1A. It will be appreciated that depending on the analytical criteria used to predict antigenic determinants, the exact address of the determinant may vary slightly. Column 8, “Tissue Distribution” shows the expression profile of tissue, cells, and/or cell line libraries which express the polynucleotides of the invention. The first number in column 8 (preceding the colon), represents the tissue/cell source identifier code corresponding to the code and description provided in Table 4. Expression of these polynucleotides was not observed in the other tissues and/or cell libraries tested. For those identifier codes in which the first two letters are not “AR”, the second number in column 8 (following the colon), represents the number of times a sequence corresponding to the reference polynucleotide sequence (e.g., SEQ ID NO:X) was identified in the tissue/cell source. Those tissue/cell source identifier codes in which the first two letters are “AR” designate information generated using DNA array technology. Utilizing this technology, cDNAs were amplified by PCR and then transferred, in duplicate, onto the array. Gene expression was assayed through hybridization of first strand cDNA probes to the DNA array. cDNA probes were generated from total RNA extracted from a variety of different tissues and cell lines. Probe synthesis was performed in the presence of ³³P dCTP, using oligo(dT) to prime reverse transcription. After hybridization, high stringency washing conditions were employed to remove non-specific hybrids from the array. The remaining signal, emanating from each gene target, was measured using a Phosphorimager. Gene expression was reported as Phosphor Stimulating Luminescence (PSL) which reflects the level of phosphor signal generated from the probe hybridized to each of the gene targets represented on the array. A local background signal subtraction was performed before the total signal generated from each array was used to normalize gene expression between the different hybridizations. The value presented after “[array code]:” represents the mean of the duplicate values, following background subtraction and probe normalization. One of skill in the art could routinely use this information to identify normal and/or diseased tissue(s) which show a predominant expression pattern of the corresponding polynucleotide of the invention or to identify polynucleotides which show predominant and/or specific tissue and/or cell expression. Column 9, “Cytologic Band,” provides the chromosomal location of polynucleotides corresponding to SEQ ID NO:X. Chromosomal location was determined by finding exact matches to EST and cDNA sequences contained in the NCBI (National Center for Biotechnology Information) UniGene database. Given a presumptive chromosomal location, disease locus association was determined by comparison with the Morbid Map, derived from Online Mendelian Inheritance in Man (Online Mendelian Inheritance in Man, OMIM™. McKusick-Nathans Institute for Genetic Medicine, Johns Hopkins University (Baltimore, Md.) and National Center for Biotechnology Information, National Library of Medicine (Bethesda, Md.) 2000. World Wide Web URL: http://www.ncbi.nlm.nih.gov/omim/). If the putative chromosomal location of the Query overlapped with the chromosomal location of a Morbid Map entry, an OMIM identification number is provided in column 10 labeled “OMIM Disease Reference(s)”. A key to the OMIM reference identification numbers is provided in Table 5.

[0021] Table 2 summarizes homology and features of some of the polypeptides of the invention. The first column provides a unique clone identifier, “Clone ID NO:Z”, corresponding to a cDNA disclosed in Table 1A. The second column provides the unique contig identifier, “Contig ID:” corresponding to contigs in Table 1A and allowing for correlation with the information in Table 1A. The third column provides the sequence identifier, “SEQ ID NO:X”, for the contig polynucleotide sequences. The fourth column provides the analysis method by which the homology/identity disclosed in the row was determined. Comparisons were made between polypeptides encoded by the polynucleotides of the invention and either a non-redundant protein database (herein referred to as “NR”), or a database of protein families (herein referred to as “PFAM”) as further described below. The fifth column provides a description of PFAM/NR hits having significant matches to a polypeptide of the invention. Column six provides the accession number of the PFAM/NR hit disclosed in the fifth column. Column seven, “Score/Percent Identity”, provides a quality score or the percent identity, of the hit disclosed in column five. Columns 8 and 9, “NT From” and “NT To” respectively, delineate the polynucleotides in “SEQ ID NO:X” that encode a polypeptide having a significant match to the PFAM/NR database as disclosed in the fifth column. In specific embodiments, polypeptides of the invention comprise, or alternatively consist of, an amino acid sequence encoded by the polynucleotides in SEQ ID NO:X as delineated in columns 8 and 9, or fragments or variants thereof.

[0022] Table 3 provides polynucleotide sequences that may be disclaimed according to certain embodiments of the invention. The first column provides a unique clone identifier, “Clone ID NO:Z”, for a cDNA clone related to colon cancer associated contig sequences disclosed in Table 1A. The second column provides the sequence identifier, “SEQ ID NO:X”, for contig polynucleotide sequences disclosed in Table 1A. The third column provides the unique contig identifier, “Contig ID”, for contigs disclosed in Table 1A. The fourth column provides a unique integer ‘a’ where ‘a’ is any integer between 1 and the final nucleotide minus 15 of SEQ ID NO:X, represented as “Range of a”, and the fifth column provides a unique integer ‘b’ where ‘b’ is any integer between 15 and the final nucleotide of SEQ ID NO:X, represented as “Range of b”, where both a and b correspond to the positions of nucleotide residues shown in SEQ ID NO:X, and where b is greater than or equal to a +14. For each of the polynucleotides shown as SEQ ID NO:X, the uniquely defined integers can be substituted into the general formula of a-b, and used to describe polynucleotides which may be preferably excluded from the invention. In certain embodiments, preferably excluded from the polynucleotides of the invention (including polynucleotide fragments and variants as described herein and diagnostic and/or therapeutic uses based on these polynucleotides) are at least one, two, three, four, five, ten, or more of the polynucleotide sequence(s) having the accession number(s) disclosed in the sixth column of this Table. In further embodiments, preferably excluded from the invention are the specific polynucleotide sequence(s) contained in the clones corresponding to at least one, two, three, four, five, ten, or more of the available material having the accession numbers identified in the sixth column of this Table (including for example, the actual sequence contained in an identified BAC clone).

[0023] Table 4 provides a key to the tissue/cell source identifier code disclosed in Table 1A, column 8. Column 1 provides the key to the tissue/cell source identifier code disclosed in Table 1A, Column 8. Columns 2-5 provide a description of the tissue or cell source. Codes corresponding to diseased tissues are indicated in column 6 with the word “disease”. The use of the word “disease” in column 6 is non-limiting. The tissue or cell source may be specific (e.g. a neoplasm), or may be disease-associated (e.g., a tissue sample from a normal portion of a diseased organ). Furthermore, tissues and/or cells lacking the “disease” designation may still be derived from sources directly or indirectly involved in a disease state or disorder, and therefore may have a further utility in that disease state or disorder. In numerous cases where the tissue/cell source is a library, column 7 identifies the vector used to generate the library.

[0024] Table 5 provides a key to the OMIM™ reference identification numbers disclosed in Table 1A, column 10. OMIM reference identification numbers (Column 1) were derived from Online Mendelian Inheritance in Man (Online Mendelian Inheritance in Man, OMIM™. McKusick-Nathans Institute for Genetic Medicine, Johns Hopkins University (Baltimore, Md.) and National Center for Biotechnology Information, National Library of Medicine, (Bethesda, Md.) 2000. World Wide Web URL: http://www.ncbi.nlm.nih.gov/omim/). Column 2 provides diseases associated with the cytologic band disclosed in Table 1A, column 9, as determined from the Morbid Map database.

[0025] Table 6 summarizes ATCC Deposits, Deposit dates, and ATCC designation numbers of deposits made with the ATCC in connection with the present application.

[0026] Table 7 shows the cDNA libraries sequenced, tissue source description, vector information and ATCC designation numbers relating to these cDNA libraries. Definitions

[0027] The following definitions are provided to facilitate understanding of certain terms used throughout this specification.

[0028] In the present invention, “isolated” refers to material removed from its original environment (e.g., the natural environment if it is naturally occurring), and thus is altered “by the hand of man” from its natural state. For example, an isolated polynucleotide could be part of a vector or a composition of matter, or could be contained within a cell, and still be “isolated” because that vector, composition of matter, or particular cell is not the original environment of the polynucleotide. The term “isolated” does not refer to genomic or cDNA libraries, whole cell total or mRNA preparations, genomic DNA preparations (including those separated by electrophoresis and transferred onto blots), sheared whole cell genomic DNA preparations or other compositions where the art demonstrates no distinguishing features of the polynucleotide sequences of the present invention.

[0029] As used herein, a “polynucleotide” refers to a molecule having a nucleic acid sequence encoding SEQ ID NO:Y or a fragment or variant thereof; a nucleic acid sequence contained in SEQ ID NO:X (as described in column 4 of Table 1A) or the complement thereof; or a cDNA sequence contained in Clone ID NO:Z (as described in column 2 of Table 1A and contained within a library deposited with the ATCC). For example, the polynucleotide can contain the nucleotide sequence of the full length cDNA sequence, including the 5′ and 3′ untranslated sequences, the coding region, as well as fragments, epitopes, domains, and variants of the nucleic acid sequence. Moreover, as used herein, a “polypeptide” refers to a molecule having an amino acid sequence encoded by a polynucleotide of the invention as broadly defined (obviously excluding poly-Phenylalanine or poly-Lysine peptide sequences which result from translation of a polyA tail of a sequence corresponding to a cDNA).

[0030] As used herein, a “colon or colon cancer antigen” refers collectively to any polynucleotide disclosed herein (e.g., a nucleic acid sequence contained in SEQ ID NO:X or the complement therof, and fragments or variants thereof as described herein) or any polypeptide disclosed herein (e.g., an amino acid sequence contained in SEQ ID NO:Y, an amino acid sequence encoded by SEQ ID NO:X, or the complement thereof an amino acid sequence encoded by the cDNA sequence contained in Clone ID NO:Z, or the complement thereof, and fragments or variants thereof as described herein). These colon or colon cancer antigens have been determined to be predominantly expressed in colon tissues, including normal or diseased tissues (as shown in Table 1A column 8 and Table 4).

[0031] In the present invention, “SEQ ID NO:X” was often generated by overlapping sequences contained in multiple clones (contig analysis). A representative clone containing all or most of the sequence for SEQ ID NO:X is deposited at Human Genome Sciences, Inc. (HGS) in a catalogued and archived library. As shown, for example, in column 2 of Table 1A, each clone is identified by a cDNA Clone ID (identifier generally referred to herein as Clone ID NO:Z). Each Clone ID is unique to an individual clone and the Clone ID is all the information needed to retrieve a given clone from the HGS library. Furthermore, certain clones disclosed in this application have been deposited with the ATCC on May 20, 1997, having the ATCC designation numbers 209059, 209060, 209061, 209062, 209063, 209064, 209065, 209066, 209067, 209068, and 209069; on Jan. 12, 1998, having the ATCC designation numbers 209578 and 209579; on Jul. 16, 1998, having the ATCC designation numbers 203067 and 203068; on Feb. 1, 1999, having the ATCC designation numbers 203609 and 203610; on Nov. 17, 1998, having the ATCC designation number 203485; on Jun. 19, 1999, having the ATCC designation numbers PTA-252 and PTA-253; and on Oct. 28, 1999, having the ATCC designation numbers PA-005 Phage and PA005. In addition to the individual cDNA clone deposits, most of the cDNA libraries from which the clones were derived were deposited at the American Type Culture Collection (hereinafter “ATCC”). Table 7 provides a list of the deposited cDNA libraries. One can use the Clone ID NO:Z to determine the library source by reference to Tables 6 and 7. Table 7 lists the deposited cDNA libraries by name and links each library to an ATCC Deposit. Library names contain four characters, for example, “HTWE.” The name of a cDNA clone (Clone ID NO:Z) isolated from that library begins with the same four characters, for example “HTWEP07”. As mentioned below, Table 1A correlates the Clone ID NO:Z names with SEQ ID NO:X. Thus, starting with an SEQ ID NO:X, one can use Tables 1, 6 and 7 to determine the corresponding Clone ID NO:Z, which library it came from and which ATCC deposit the library is contained in. Furthermore, it is possible to retrieve a given cDNA clone from the source library by techniques known in the art and described elsewhere herein. The ATCC is located at 10801 University Boulevard, Manassas, Va. 20110-2209, USA. The ATCC deposits were made pursuant to the terms of the Budapest Treaty on the international recognition of the deposit of microorganisms for the purposes of patent procedure.

[0032] In specific embodiments, the polynucleotides of the invention are at least 15, at least 30, at least 50, at least 100, at least 125, at least 500, or at least 1000 continuous nucleotides but are less than or equal to 300 kb, 200 kb, 100 kb, 50 kb, 15 kb, 10 kb, 7.5 kb, 5 kb, 2.5 kb, 2.0 kb, or 1 kb, in length. In a further embodiment, polynucleotides of the invention comprise a portion of the coding sequences, as disclosed herein, but do not comprise all or a portion of any intron. In another embodiment, the polynucleotides comprising coding sequences do not contain coding sequences of a genomic flanking gene (i.e., 5′ or 3′ to the gene of interest in the genome). In other embodiments, the polynucleotides of the invention do not contain the coding sequence of more than 1000, 500, 250, 100, 50, 25, 20, 15, 10, 5, 4, 3, 2, or 1 genomic flanking gene(s).

[0033] A “polynucleotide” of the present invention also includes those polynucleotides capable of hybridizing, under stringent hybridization conditions, to sequences contained in SEQ ID NO:X, or the complement thereof (e.g., the complement of any one, two, three, four, or more of the polynucleotide fragments described herein), the polynucleotide sequence delineated in columns 8 and 9 of Table 2 or the complement thereof, and/or cDNA sequences contained in Clone ID NO:Z (e.g., the complement of any one, two, three, four, or more of the polynucleotide fragments, or the cDNA clone within the pool of cDNA clones deposited with the ATCC, described herein) or the complement thereof. “Stringent hybridization conditions” refers to an overnight incubation at 42 degree C. in a solution comprising 50% formamide, 5× SSC (750 mM NaCl, 75 mM trisodium citrate), 50 mM sodium phosphate (pH 7.6), 5× Denhardt's solution, 10% dextran sulfate, and 20 μg/ml denatured, sheared salmon sperm DNA, followed by washing the filters in 0.1× SSC at about 65 degree C.

[0034] Also contemplated are nucleic acid molecules that hybridize to the polynucleotides of the present invention at lower stringency hybridization conditions. Changes in the stringency of hybridization and signal detection are primarily accomplished through the manipulation of formamide concentration (lower percentages of formamide result in lowered stringency), salt conditions, or temperature. For example, lower stringency conditions include an overnight incubation at 37 degree C. in a solution comprising 6× SSPE (20× SSPE=3M NaCl; 0.2M NaH₂PO₄; 0.02M EDTA, pH 7.4), 0.5% SDS, 30% formamide, 100 ug/ml salmon sperm blocking DNA; followed by washes at 50 degree C. with 1× SPE, 0.1% SDS. In addition, to achieve even lower stringency, washes performed following stringent hybridization can be done at higher salt concentrations (e.g. 5× SSC).

[0035] Note that variations in the above conditions may be accomplished through the inclusion and/or substitution of alternate blocking reagents used to suppress background in hybridization experiments. Typical blocking reagents include Denhardt's reagent, BLOTTO, heparin, denatured salmon sperm DNA, and commercially available proprietary formulations. The inclusion of specific blocking reagents may require modification of the hybridization conditions described above, due to problems with compatibility.

[0036] Of course, a polynucleotide which hybridizes only to polyA+ sequences (such as any 3′ terminal polyA+ tract of a cDNA shown in the sequence listing), or to a complementary stretch of T (or U) residues, would not be included in the definition of “polynucleotide,” since such a polynucleotide would hybridize to any nucleic acid molecule containing a poly (A) stretch or the complement thereof (e.g., practically any double-stranded cDNA clone generated using oligo dT as a primer).

[0037] The polynucleotide of the present invention can be composed of any polyribonucleotide or polydeoxribonucleotide, which may be unmodified RNA or DNA or modified RNA or DNA. For example, polynucleotides can be composed of single- and double-stranded DNA, DNA that is a mixture of single- and double-stranded regions, single- and double-stranded RNA, and RNA that is mixture of single- and double-stranded regions, hybrid molecules comprising DNA and RNA that may be single-stranded or, more typically, double-stranded or a mixture of single- and double-stranded regions. In addition, the polynucleotide can be composed of triple-stranded regions comprising RNA or DNA or both RNA and DNA. A polynucleotide may also contain one or more modified bases or DNA or RNA backbones modified for stability or for other reasons. “Modified” bases include, for example, tritylated bases and unusual bases such as inosine. A variety of modifications can be made to DNA and RNA; thus, “polynucleotide” embraces chemically, enzymatically, or metabolically modified forms.

[0038] The polypeptide of the present invention can be composed of amino acids joined to each other by peptide bonds or modified peptide bonds, i.e., peptide isosteres, and may contain amino acids other than the 20 gene-encoded amino acids. The polypeptides may be modified by either natural processes, such as posttranslational processing, or by chemical modification techniques which are well known in the art. Such modifications are well described in basic texts and in more detailed monographs, as well as in a voluminous research literature. Modifications can occur anywhere in a polypeptide, including the peptide backbone, the amino acid side-chains and the amino or carboxyl termini. It will be appreciated that the same type of modification may be present in the same or varying degrees at several sites in a given polypeptide. Also, a given polypeptide may contain many types of modifications. Polypeptides may be branched, for example, as a result of ubiquitination, and they may be cyclic, with or without branching. Cyclic, branched, and branched cyclic polypeptides may result from posttranslation natural processes or may be made by synthetic methods. Modifications include acetylation, acylation, ADP-ribosylation, amidation, covalent attachment of flavin, covalent attachment of a heme moiety, covalent attachment of a nucleotide or nucleotide derivative, covalent attachment of a lipid or lipid derivative, covalent attachment of phosphotidylinositol, cross-linking, cyclization, disulfide bond formation, demethylation, formation of covalent cross-links, formation of cysteine, formation of pyroglutamate, formylation, gamma-carboxylation, glycosylation, GPI anchor formation, hydroxylation, iodination, methylation, myristoylation, oxidation, pegylation, proteolytic processing, phosphorylation, prenylation, racemization, selenoylation, sulfation, transfer-RNA mediated addition of amino acids to proteins such as arginylation, and ubiquitination. (See, for instance, PROTEINS—STRUCTURE AND MOLECULAR PROPERTIES, 2nd Ed., T. E. Creighton, W. H. Freeman and Company, New York (1993); POSTTRANSLATIONAL COVALENT MODIFICATION OF PROTEINS, B. C. Johnson, Ed., Academic Press, New York, pgs. 1-12 (1983); Seifter et al., Meth. Enzymol. 182:626-646 (1990); Rattan et al., Ann. N.Y. Acad. Sci. 663:48-62 (1992).)

[0039] “SEQ ID NO:X” refers to a polynucleotide sequence described, for example, in Tables 1 or 2, while “SEQ ID NO:Y” refers to a polypeptide sequence described in column 6 of Table 1A. SEQ ID NO:X is identified by an integer specified in column 4 of Table 1A. The polypeptide sequence SEQ ID NO:Y is a translated open reading frame (ORF) encoded by polynucleotide SEQ ID NO:X. “Clone ID NO:Z” refers to a cDNA clone described in column 2 of Table 1A.

[0040] “A polypeptide having biological activity” refers to a polypeptide exhibiting activity similar to, but not necessarily identical to, an activity of a polypeptide of the present invention, including mature forms, as measured in a particular biological assay, with or without dose dependency. In the case where dose dependency does exist, it need not be identical to that of the polypeptide, but rather substantially similar to the dose-dependence in a given activity as compared to the polypeptide of the present invention (i.e., the candidate polypeptide will exhibit greater activity or not more than about 25-fold less and, preferably, not more than about tenfold less activity, and most preferably, not more than about three-fold less activity relative to the polypeptide of the present invention).

[0041] Table 1A summarizes some of the polynucleotides encompassed by the invention (including contig sequences (SEQ ID NO:X) and clones (Clone ID NO:Z) and further summarizes certain characteristics of these polynucleotides and the polypeptides encoded thereby.

[0042] Polynucleotides and Polypeptides

[0043] Table 1A

[0044] Table 1A is provided on CD-R, hereby incorporated by reference herein.

[0045] The first column in Table 1A, “Gene No.”, numbers each disclosed cDNA clone related to the sequences sequentially. The second column in Table 1A provides a unique “Clone ID NO:Z” for a cDNA clone related to each contig sequence disclosed in Table 1A. This clone ID references the cDNA clone which contains at least the 5′ most sequence of the assembled contig, and at least a portion of SEQ ID NO:X was determined by directly sequencing the referenced clone. The reference clone may have more sequence than described in the sequence listing or the clone may have less. In the vast majority of cases, however, the clone is believed to encode a full-length polypeptide. In the case where a clone is not full-length, a full-length cDNA can be obtained by methods known in the art and/or as described elsewhere herein.

[0046] The third column in Table 1A provides a unique “Contig ID” identification for each contig sequence. The fourth column provides the “SEQ ID NO:X” identifier for each of the colon cancer associated contig polynucleotide sequences disclosed in Table 1A. The fifth column, “ORF (From-To)”, provides the location (i.e., nucleotide position numbers) within the polynucleotide sequence “SEQ ID NO:X” that delineate the preferred open reading frame (ORF) shown in the sequence listing and referenced in Table 1A, column 6, as SEQ ID NO:Y. Where the nucleotide position number “To” is lower than the nucleotide position number “From”, the preferred ORF is the reverse complement of the referenced polynucleotide sequence.

[0047] The six column in Table 1A provides the corresponding SEQ ID NO:Y for the polypeptide sequence encoded by the preferred ORF delineated in column 5. In one embodiment, the invention provides an amino acid sequence comprising, or alternatively consisting of, a polypeptide encoded by the portion of SEQ ID NO:X delineated by “ORF (From-To)”. Also provided are polynucleotides encoding such amino acid sequences and the complementary strand thereto.

[0048] Column 7 in Table 1A lists residues comprising epitopes contained in the polypeptides encoded by the preferred ORF (SEQ ID NO:Y), as predicted using the algorithm of Jameson and Wolf, (1988) Comp. Appl. Biosci. 4:181-186. The Jameson-Wolf antigenic analysis was performed using the computer program PROTEAN (Version 3.11 for the Power MacIntosh, DNASTAR, Inc., 1228 South Park Street Madison, Wis.). In specific embodiments, polypeptides of the invention comprise, or alternatively consist of, at least one, two, three, four, five or more of the predicted epitopes as described in Table 1A. It will be appreciated that depending on the analytical criteria used to predict antigenic determinants, the exact address of the determinant may vary slightly.

[0049] Column 8 in Table 1A provides an expression profile and library code: count for each of the contig sequences (SEQ ID NO:X) disclosed in Table 1A, which can routinely be combined with the information provided in Table 4 and used to determine the normal or diseased tissues, cells, and/or cell line libraries which predominantly express the polynucleotides of the invention. The first number in column 8 (preceding the colon), represents the tissue/cell source identifier code corresponding to the code and description provided in Table 4. For those identifier codes in which the first two letters are not “AR”, the second number in column 8 (following the colon) represents the number of times a sequence corresponding to the reference polynucleotide sequence was identified in the tissue/cell source. Those tissue/cell source identifier codes in which the first two letters are “AR” designate information generated using DNA array technology. Utilizing this technology, cDNAs were amplified by PCR and then transferred, in duplicate, onto the array. Gene expression was assayed through hybridization of first strand cDNA probes to the DNA array. cDNA probes were generated from total RNA extracted from a variety of different tissues and cell lines. Probe synthesis was performed in the presence of ³³P dCTP, using oligo(dT) to prime reverse transcription. After hybridization, high stringency washing conditions were employed to remove non-specific hybrids from the array. The remaining signal, emanating from each gene target, was measured using a Phosphorimager. Gene expression was reported as Phosphor Stimulating Luminescence (PSL) which reflects the level of phosphor signal generated from the probe hybridized to each of the gene targets represented on the array. A local background signal subtraction was performed before the total signal generated from each array was used to normalize gene expression between the different hybridizations. The value presented after “[array code]:” represents the mean of the duplicate values, following background subtraction and probe normalization. One of skill in the art could routinely use this information to identify normal and/or diseased tissue(s) which show a predominant expression pattern of the corresponding polynucleotide of the invention or to identify polynucleotides which show predominant and/or specific tissue and/or cell expression. The sequences disclosed herein have been determined to be predominantly expressed in colon and/or rectal tissues, including normal and diseased colon tissues (See Table 1A, column 8 and Table 4).

[0050] Column 9 in Table 1A provides a chromosomal map location for certain polynucleotides of the invention. Chromosomal location was determined by finding exact matches to EST and cDNA sequences contained in the NCBI (National Center for Biotechnology Information) UniGene database. Each sequence in the UniGene database is assigned to a “cluster”; all of the ESTs, cDNAs, and STSs in a cluster are believed to be derived from a single gene. Chromosomal mapping data is often available for one or more sequence(s) in a UniGene cluster; this data (if consistent) is then applied to the cluster as a whole. Thus, it is possible to infer the chromosomal location of a new polynucleotide sequence by determining its identity with a mapped UniGene cluster.

[0051] A modified version of the computer program BLASTN (Altshul et al., J. Mol. Biol. 215:403-410 (1990), and Gish et al., Nat. Genet. 3:266-272 (1993)) was used to search the UniGene database for EST or cDNA sequences that contain exact or near-exact matches to a polynucleotide sequence of the invention (the ‘Query’). A sequence from the UniGene database (the ‘Subject’) was said to be an exact match if it contained a segment of 50 nucleotides in length such that 48 of those nucleotides were in the same order as found in the Query sequence. If all of the matches that met this criteria were in the same UniGene cluster, and mapping data was available for this cluster, it is indicated in Table 1A under the heading “Cytologic Band”. Where a cluster had been further localized to a distinct cytologic band, that band is disclosed; where no banding information was available, but the gene had been localized to a single chromosome, the chromosome is disclosed.

[0052] Once a presumptive chromosomal location was determined for a polynucleotide of the invention, an associated disease locus was identified by comparison with a database of diseases which have been experimentally associated with genetic loci. The database used was the Morbid Map, derived from OMIM™ (supra). If the putative chromosomal location of a polynucleotide of the invention (Query sequence) was associated with a disease in the Morbid Map database, an OMIM reference identification number was noted in column 10, Table 1A, labeled “OMIM Disease Reference(s)”. Table 5 is a key to the OMIM reference identification numbers (column 1), and provides a description of the associated disease in Column 2.

[0053] Table 2

[0054] Table 2 is provided on CD-R, hereby incorporated by reference herein.

[0055] Table 2 further characterizes certain encoded polypeptides of the invention, by providing the results of comparisons to protein and protein family databases. The first column provides a unique clone identifier, “Clone ID NO:”, corresponding to a cDNA clone disclosed in Table 1A. The second column provides the unique contig indentifier, “Contig ID:” which allows correlation with the information in Table 1A. The third column provides the sequence identifier, “SEQ ID NO:X”, for the contig polynucleotide sequences. The fourth column provides the analysis method by which the homology/identity disclosed in the row was determined. The fifth column provides a description of PFam/NR hits having significant matches identified by each analysis. Column six provides the accession number of the PFam/NR hit disclosed in the fifth column. Column seven, “Score/Percent Identity”, provides a quality score or the percent identity, of the hit disclosed in column five. Comparisons were made between polypeptides encoded by polynucleotides of the invention and a non-redundant protein database (herein referred to as “NR”), or a database of protein families (herein referred to as “PFam”), as described below.

[0056] The NR database, which comprises the NBRF PIR database, the NCBI GenPept database, and the SIB SwissProt and TrEMBL databases, was made non-redundant using the computer program nrdb2 (Warren Gish, Washington University in Saint Louis). Each of the polynucleotides shown in Table 1A, column 4 (e.g., SEQ ID NO:X or the ‘Query’ sequence) was used to search against the NR database. The computer program BLASTX was used to compare a 6-frame translation of the Query sequence to the NR database (for information about the BLASTX algorithm please see Altshul et al., J. Mol. Biol. 215:403-410 (1990), and Gish et al., Nat. Genet. 3:266-272 (1993)). A description of the sequence that is most similar to the Query sequence (the highest scoring ‘Subject’) is shown in column five of Table 2 and the database accession number for that sequence is provided in column six. The highest scoring ‘Subject’ is reported in Table 2 if (a) the estimated probability that the match occurred by chance alone is less than 1.0e-07, and (b) the match was not to a known repetitive element. BLASTX returns alignments of short polypeptide segments of the Query and Subject sequences which share a high degree of similarity; these segments are known as High-Scoring Segment Pairs or HSPs. Table 2 reports the degree of similarity between the Query and the Subject for each HSP as a percent identity in Column 7. The percent identity is determined by dividing the number of exact matches between the two aligned sequences in the HSP, dividing by the number of Query amino acids in the HSP and multiplying by 100. The polynucleotides of SEQ ID NO:X which encode the polypeptide sequence that generates an HSP are delineated by columns 8 and 9 of Table 2.

[0057] The PFam database, PFam version 5.2, (Sonnhammer et al., Nucl. Acids Res., 26:320-322, (1998)) consists of a series of multiple sequence alignments; one alignment for each protein family. Each multiple sequence alignment is converted into a probability model called a Hidden Markov Model, or HMM, that represents the position-specific variation among the sequences that make up the multiple sequence alignment (see, e.g., R. Durbin et al., Biological sequence analysis: probabilistic models of proteins and nucleic acids, Cambridge University Press, 1998 for the theory of HMMs). The program HMMER version 1.8 (Sean Eddy, Washington University in Saint Louis) was used to compare the predicted protein sequence for each Query sequence (SEQ ID NO:Y in Table 1A) to each of the HMMs derived from PFam version 5.2. A HMM derived from PFam version 5.2 was said to be a significant match to a polypeptide of the invention if the score returned by HMMER 1.8 was greater than 0.8 times the HMMER 1.8 score obtained with the most distantly related known member of that protein family. The description of the PFam family which shares a significant match with a polypeptide of the invention is listed in column 5 of Table 2, and the database accession number of the PFam hit is provided in column 6. Column 7 provides the score returned by HMMER version 1.8 for the alignment. Columns 8 and 9 delineate the polynucleotides of SEQ ID NO:X which encode the polypeptide sequence which shows a significant match to a PFam protein family.

[0058] As mentioned, columns 8 and 9 in Table 2, “NT From” and “NT To”, delineate the polynucleotides of “SEQ ID NO:X” that encode a polypeptide having a significant match to the PFam/NR database as disclosed in the fifth column of Table 2. In one embodiment, the invention provides a protein comprising, or alternatively consisting of, a polypeptide encoded by the polynucleotides of SEQ ID NO:X delineated in columns 8 and 9 of Table 2. Also provided are polynucleotides encoding such proteins, and the complementary strand thereto.

[0059] The nucleotide sequence SEQ ID NO:X and the translated SEQ ID NO:Y are sufficiently accurate and otherwise suitable for a variety of uses well known in the art and described further below. For instance, the nucleotide sequences of SEQ ID NO:X are useful for designing nucleic acid hybridization probes that will detect nucleic acid sequences contained in SEQ ID NO:X or the cDNA contained in Clone ID NO:Z. These probes will also hybridize to nucleic acid molecules in biological samples, thereby enabling immediate applications in chromosome mapping, linkage analysis, tissue identification and/or typing, and a variety of forensic and diagnostic methods of the invention. Similarly, polypeptides identified from SEQ ID NO:Y may be used to generate antibodies which bind specifically to these polypeptides, or fragments thereof, and/or to the polypeptides encoded by the cDNA clones identified in, for example, Table 1A.

[0060] Nevertheless, DNA sequences generated by sequencing reactions can contain sequencing errors. The errors exist as misidentified nucleotides, or as insertions or deletions of nucleotides in the generated DNA sequence. The erroneously inserted or deleted nucleotides cause frame shifts in the reading frames of the predicted amino acid sequence. In these cases, the predicted amino acid sequence diverges from the actual amino acid sequence, even though the generated DNA sequence may be greater than 99.9% identical to the actual DNA sequence (for example, one base insertion or deletion in an open reading frame of over 1000 bases).

[0061] Accordingly, for those applications requiring precision in the nucleotide sequence or the amino acid sequence, the present invention provides not only the generated nucleotide sequence identified as SEQ ID NO:X, and a predicted translated amino acid sequence identified as SEQ ID NO:Y, but also a sample of plasmid DNA containing cDNA Clone ID NO:Z (deposited with the ATCC on May 20, 1997, having the ATCC designation numbers 209059, 209060, 209061, 209062, 209063, 209064, 209065, 209066, 209067, 209068, and 209069; deposited with the ATCC on Jan. 12, 1998, having the ATCC designation numbers 209578 and 209579; deposited with the ATCC on Jul. 16, 1998, having the ATCC designation numbers 203067 and 203068; deposited with the ATCC on Feb. 1, 1999, having the ATCC designation numbers 203609 and 203610; deposited with the ATCC on Nov. 17, 1998, having the ATCC designation number 203485; deposited with the ATCC on Jun. 19, 1999, having the ATCC designation numbers PTA-252 and PTA-253; and deposited with the ATCC on Oct. 28, 1999, having the ATCC designation numbers PA-005 Phage and PA005; and/or as set forth, for example, in Table 1A, 6 and 7). The nucleotide sequence of each deposited clone can readily be determined by sequencing the deposited clone in accordance with known methods. Further, techniques known in the art can be used to verify the nucleotide sequences of SEQ ID NO:X.

[0062] The predicted amino acid sequence can then be verified from such deposits. Moreover, the amino acid sequence of the protein encoded by a particular clone can also be directly determined by peptide sequencing or by expressing the protein in a suitable host cell containing the deposited human cDNA, collecting the protein, and determining its sequence.

[0063] RACE Protocol for Recovery of Full-Length Genes

[0064] Partial cDNA clones can be made full-length by utilizing the rapid amplification of cDNA ends (RACE) procedure described in Frohman, M. A., et al., Proc. Nat'l. Acad. Sci. USA, 85:8998-9002 (1988). A cDNA clone missing either the 5′ or 3′ end can be reconstructed to include the absent base pairs extending to the translational start or stop codon, respectively. In some cases, cDNAs are missing the start codon of translation. The following briefly describes a modification of this original 5′ RACE procedure. Poly A+ or total RNA is reverse transcribed with Superscript II (Gibco/BRL) and an antisense or complementary primer specific to the cDNA sequence. The primer is removed from the reaction with a Microcon Concentrator (Amicon). The first-strand cDNA is then tailed with dATP and terminal deoxynucleotide transferase (Gibco/BRL). Thus, an anchor sequence is produced which is needed for PCR amplification. The second strand is synthesized from the dA-tail in PCR buffer, Taq DNA polymerase (Perkin-Elmer Cetus), an oligo-dT primer containing three adjacent restriction sites (XhoI, SalI and ClaI) at the 5′ end and a primer containing just these restriction sites. This double-stranded cDNA is PCR amplified for 40 cycles with the same primers as well as a nested cDNA-specific antisense primer. The PCR products are size-separated on an ethidium bromide-agarose gel and the region of gel containing cDNA products the predicted size of missing protein-coding DNA is removed. cDNA is purified from the-agarose with the Magic PCR Prep kit (Promega), restriction digested with XhoI or SalI, and ligated to a plasmid such as pBluescript SKII (Stratagene) at XhoI and EcoRV sites. This DNA is transformed into bacteria and the plasmid clones sequenced to identify the correct protein-coding inserts. Correct 5′ ends are confirmed by comparing this sequence with the putatively identified homologue and overlap with the partial cDNA clone. Similar methods known in the art and/or commercial kits are used to amplify and recover 3′ ends.

[0065] Several quality-controlled kits are commercially available for purchase. Similar reagents and methods to those above are supplied in kit form from Gibco/BRL for both 5′ and 3′ RACE for recovery of full length genes. A second kit is available from Clontech which is a modification of a related technique, SLIC (single-stranded ligation to single-stranded cDNA), developed by Dumas et al., Nucleic Acids Res., 19:5227-32 (1991). The major differences in procedure are that the RNA is alkaline hydrolyzed after-reverse transcription and RNA ligase is used to join a restriction site-containing anchor primer to the first-strand cDNA. This obviates the necessity for the dA-tailing reaction which results in a polyT stretch that is difficult to sequence past.

[0066] An alternative to generating 5′ or 3′ cDNA from RNA is to use cDNA library double-stranded DNA. An asymmetric PCR-amplified antisense cDNA strand is synthesized with an antisense cDNA-specific primer and a plasmid-anchored primer. These primers are removed and a symmetric PCR reaction is performed with a nested cDNA-specific antisense primer and the plasmid-anchored primer.

[0067] RNA Ligase Protocol for Generating the 5′ or 3′ End Sequences to Obtain Full Length Genes

[0068] Once a gene of interest is identified, several methods are available for the identification of the 5′ or 3′ portions of the gene which may not be present in the original cDNA plasmid. These methods include, but are not limited to, filter probing, clone enrichment using specific probes and protocols similar and identical to 5′ and 3′ RACE. While the full length gene may be present in the library and can be identified by probing, a useful method for generating the 5′ or 3′ end is to use the existing sequence information from the original cDNA to generate the missing information. A method similar to 5′ RACE is available for generating the missing 5′ end of a desired full-length gene. (This method was published by Fromont-Racine et al., Nucleic Acids Res., 21(7):1683-1684 (1993)). Briefly, a specific RNA oligonucleotide is ligated to the 5′ ends of a population of RNA presumably containing full-length gene RNA transcript. A primer set containing a primer specific to the ligated RNA oligonucleotide and a primer specific to a known sequence of the gene of interest, is used to PCR amplify the 5′ portion of the desired full length gene which may then be sequenced and used to generate the full length gene. This method starts with total RNA isolated from the desired source, poly A RNA may be used but is not a prerequisite for this procedure. The RNA preparation may then be treated with phosphatase if necessary to eliminate 5′ phosphate groups on degraded or damaged RNA, which may interfere with the later RNA ligase step. The phosphatase, if used, is then inactivated and the RNA is treated with tobacco acid pyrophosphatase in order to remove the cap structure present at the 5′ ends of messenger RNAs. This reaction leaves a 5′ phosphate group at the 5′ end of the cap cleaved RNA which can then be ligated to an RNA oligonucleotide using T4 RNA ligase. This modified RNA preparation can then be used as a template for first strand cDNA synthesis using a gene specific oligonucleotide. The first strand synthesis reaction can then be used as a template for PCR amplification of the desired 5′ end using a primer specific to the ligated RNA oligonucleotide and a primer specific to the known sequence of the colon or colon cancer antigen of interest. The resultant product is then sequenced and analyzed to confirm that the 5′ end sequence belongs to the relevant colon or colon cancer antigen.

[0069] The present invention also relates to vectors or plasmids, which include such DNA sequences, as well as the use of the DNA sequences. The material deposited with the ATCC (deposited with the ATCC on May 20, 1997, having the ATCC designation numbers 209059, 209060, 209061, 209062, 209063, 209064, 209065, 209066, 209067, 209068, and 209069; deposited with the ATCC on Jan. 12, 1998, having the ATCC designation numbers 209578 and 209579; deposited with the ATCC on Jul. 16, 1998, having the ATCC designation numbers 203067 and 203068; deposited with the ATCC on Feb. 1, 1999, having the ATCC designation numbers 203609 and 203610; deposited with the ATCC on Nov. 17, 1998, having the ATCC designation number 203485; deposited with the ATCC on Jun. 19, 1999, having the ATCC designation numbers PTA-252 and PTA-253; and deposited with the ATCC on Oct. 28, 1999, having the ATCC designation numbers PA-005 Phage and PA005; and/or as set forth, for example, in Table 1A, 6 and 7) is a mixture of cDNA clones derived from a variety of human tissue and cloned in either a plasmid vector or a phage vector, as shown, for example, in Table 7. These deposits are referred to as “the deposits” herein. The tissues from which some of the clones were derived are listed in Table 7, and the vector in which the corresponding cDNA is contained is also indicated in Table 7. The deposited material includes cDNA clones corresponding to SEQ ID NO:X described, for example, in Table 1A (Clone ID NO:Z). A clone which is isolatable from the ATCC Deposits by use of a sequence listed as SEQ ID NO:X, may include the entire coding region of a human gene or in other cases such clone may include a substantial portion of the coding region of a human gene Furthermore, although the sequence listing may in some instances list only a portion of the DNA sequence in a clone included in the ATCC Deposits, it is well within the ability of one skilled in the art to sequence the DNA included in a clone contained in the ATCC Deposits by use of a sequence (or portion thereof) described in, for example Tables 1A or 2 by procedures hereinafter further described, and others apparent to those skilled in the art.

[0070] Also provided in Table 7 is the name of the vector which contains the cDNA clone. Each vector is routinely used in the art. The following additional information is provided for convenience.

[0071] Vectors Lambda Zap (U.S. Pat. Nos. 5,128,256 and 5,286,636), Uni-Zap XR (U.S. Pat. Nos. 5,128,256 and 5,286,636), Zap Express (U.S. Pat. Nos. 5,128,256 and 5,286,636), pBluescript (pBS) (Short, J. M. et al., Nucleic Acids Res. 16:7583-7600 (1988); Alting-Mees, M. A. and Short, J. M., Nucleic Acids Res. 17:9494 (1989)) and pBK (Alting-Mees, M. A. et al., Strategies 5:58-61 (1992)) are commercially available from Stratagene Cloning Systems, Inc., 11011 N. Torrey Pines Road, La Jolla, Calif., 92037. pBS contains an ampicillin resistance gene and pBK contains a neomycin resistance gene. Phagemid pBS may be excised from the Lambda Zap and Uni-Zap XR vectors, and phagemid pBK may be excised from the Zap Express vector. Both phagemids may be transformed into E. coli strain XL-1 Blue, also available from Stratagene.

[0072] Vectors pSport1, pCMVSport 1.0, pCMVSport 2.0 and pCMVSport 3.0, were obtained from Life Technologies, Inc., P. O. Box 6009, Gaithersburg, Md. 20897. All Sport vectors contain an ampicillin resistance gene and may be transformed into E. coli strain DH10B, also available from Life Technologies. See, for instance, Gruber, C. E., et al., Focus 15:59-(1993). Vector lafmid BA (Bento Soares, Columbia University, New York, N.Y.) contains an ampicillin resistance gene and can be transformed into E. coli strain XL-1 Blue. Vector pCR® 2.1, which is available from Invitrogen, 1600 Faraday Avenue, Carlsbad, Calif. 92008, contains an ampicillin resistance gene and may be transformed into E. coli strain DH10B, available from Life Technologies. See, for instance, Clark, J. M., Nuc. Acids Res. 16:9677-9686 (1988) and Mead, D. et al., Bio/Technology 9: (1991).

[0073] The present invention also relates to the genes corresponding to SEQ ID NO:X, SEQ ID NO:Y, and/or the deposited clone (Clone ID NO:Z). The corresponding gene can be isolated in accordance with known methods using the sequence information disclosed herein. Such methods include preparing probes or primers from the disclosed sequence and identifying or amplifying the corresponding gene from appropriate sources of genomic material.

[0074] Also provided in the present invention are allelic variants, orthologs, and/or species homologs. Procedures known in the art can be used to obtain full-length genes, allelic variants, splice variants, full-length coding portions, orthologs, and/or species homologs of colon cancer associated genes corresponding to SEQ ID NO:X or the complement thereof, polypeptides encoded by SEQ ID NO:X or the complement thereof, and/or the cDNA contained in Clone ID NO:Z, using information from the sequences disclosed herein or the clones deposited with the ATCC. For example, allelic variants and/or species homologs may be isolated and identified by making suitable probes or primers from the sequences provided herein and screening a suitable nucleic acid source for allelic variants and/or the desired homologue.

[0075] The polypeptides of the invention can be prepared in any suitable manner. Such polypeptides include isolated naturally occurring polypeptides, recombinantly produced polypeptides, synthetically produced polypeptides, or polypeptides produced by a combination of these methods. Means for preparing such polypeptides are well understood in the art.

[0076] The polypeptides may be in the form of the secreted protein, including the mature form, or may be a part of a larger protein, such as a fusion protein (see below). It is often advantageous to include an additional amino acid sequence which contains secretory or leader sequences, pro-sequences, sequences which aid in purification, such as multiple histidine residues, or an additional sequence for stability during recombinant production.

[0077] The polypeptides of the present invention are preferably provided in an isolated form, and preferably are substantially purified. A recombinantly produced version of a polypeptide, including the secreted polypeptide, can be substantially purified using techniques described herein or otherwise known in the art, such as, for example, by the one-step method described in Smith and Johnson, Gene 67:31-40 (1988). Polypeptides of the invention also can be purified from natural, synthetic or recombinant sources using techniques described herein or otherwise known in the art, such as, for example, antibodies of the invention raised against the colon cancer polypeptides of the present invention in methods which are well known in the art.

[0078] The present invention provides a polynucleotide comprising, or alternatively consisting of, the nucleic acid sequence of SEQ ID NO:X, and/or the cDNA sequence contained in Clone ID NO:Z. The present invention also provides a polypeptide comprising, or alternatively, consisting of, the polypeptide sequence of SEQ ID NO:Y, a polypeptide encoded by SEQ ID NO:X or a complement thereof, or a polypeptide encoded by the cDNA contained in Clone ID NO:Z. Polynucleotides encoding a polypeptide comprising, or alternatively consisting of the polypeptide sequence of SEQ ID NO:Y, a polypeptide encoded by SEQ ID NO:X, and/or a polypeptide encoded by the cDNA contained in Clone ID NO:Z. The present invention further encompasses a polynucleotide comprising, or alternatively consisting of, the complement of the nucleic acid sequence of SEQ ID NO:X, a nucleic acid sequence encoding a polypeptide encoded by the complement of the nucleic acid sequence of SEQ ID NO:X, and/or the cDNA contained in Clone ID NO:Z.

[0079] Many polynucleotide sequences, such as EST sequences, are publicly available and accessible through sequence databases and may have been publicly available prior to conception of the present invention. Preferably, such related polynucleotides are specifically excluded from the scope of the present invention. Accordingly, for each contig sequence (SEQ ID NO:X) listed in the fourth column of Table 1A, preferably excluded are one or more polynucleotides comprising a nucleotide sequence described by the general formula of a-b, where a is any integer between 1 and the final nucleotide minus 15 of SEQ ID NO:X, b is an integer of 15 to the final nucleotide of SEQ ID NO:X, where both a and b correspond to the positions of nucleotide residues shown in SEQ ID NO:X, and where b is greater than or equal to a +14. More specifically, preferably excluded are one or more polynucleotides comprising a nucleotide sequence described by the general formula of a-b, where a and b are integers as defined in columns 4 and 5, respectively, of Table 3. In specific embodiments, the polynucleotides of the invention do not consist of at least one, two, three, four, five, ten, or more of the specific polynucleotide sequences referenced by the Genbank Accession No. as disclosed in column 6 of Table 3. In further embodiments, preferably excluded from the invention are the specific polynucleotide sequence(s) contained in the clones corresponding to at least one, two, three, four, five, ten, or more of the available material having the accession numbers identified in the sixth column of this Table. In no way is this listing meant to encompass all of the sequences which may be excluded by the general formula, it is just a representative example. All references available through these accessions are hereby incorporated by reference in their entirety.

[0080] Table 3

[0081] Table 3 is provided on CD-R, hereby incorporated by reference herein.

[0082] Table 4

[0083] Table 4 is provided on CD-R, hereby incorporated by reference herein.

TABLE 5

| OMIM Reference | Description |
|---|---|
| 100650 | Fetal alcohol syndrome |
| 100650 | Alcohol intolerance, acute |
| 100678 | ACAT2 deficiency |
| 100690 | Myasthenic syndrome, slow-channel congenital, 601462 |
| 100710 | Myasthenic syndrome, slow-channel congenital, 601462 |
| 100730 | Myasthenia gravis, neonatal transient |
| 101000 | Meningioma, NF2-related, sporadic Schwannoma, sporadic |
| 101000 | Neurofibromatosis, type 2 |
| 101000 | Neurolemmomatosis |
| 101000 | Malignant mesothelioma, sporadic |
| 102200 | Somatotrophinoma |
| 102480 | Male infertility due to acrosin deficiency |
| 102540 | Cardiomyopathy, idiopathic dilated |
| 102578 | Leukemia, acute promyelocytic, PML/RARA type |
| 102600 | Urolithiasis, 2,8-dihydroxyadenine |
| 102770 | Myoadenylate deaminase deficiency |
| 102772 | [AMP deaminase deficiency, erythrocytic] |
| 103000 | Hemolytic anemia due to adenylate kinase deficiency |
| 103050 | Autism, succinylpurinemic |
| 103050 | Adenylosuccinase deficiency |
| 103581 | Albright hereditary osteodystrophy-2 |
| 103600 | [Dysalbuminemic hyperthyroxinemia] |
| 103600 | [Dysalbuminemic hyperzincemia], 194470 |
| 103600 | Analbuminemia |
| 103850 | Aldolase A deficiency |
| 103950 | Emphysema due to alpha-2-macroglobulin deficiency |
| 104150 | [AFP deficiency, congenital] |
| 104150 | [Hereditary persistence of alpha-fetoprotein] |
| 104170 | NAGA deficiency, mild |
| 104170 | Schindler disease |
| 104170 | Kanzaki disease |
| 104311 | Alzheimer disease-3 |
| 104500 | Amelogenesis imperfecta-2, hypoplastic local type |
| 104770 | Amyloidosis, secondary, susceptibility to |
| 105580 | Anal canal carcinoma |
| 105600 | Dyserythropoietic anemia, congenital, type III |
| 106100 | Angioedema, hereditary |
| 106150 | Hypertension, essential, susceptibility to |
| 106150 | Preeclampsia, susceptibility to |
| 106165 | Hypertension, essential, 145500 |
| 106180 | Myocardial infarction, susceptibility to |
| 106210 | Peters anomaly |
| 106210 | Cataract, congenital, with late-onset corneal dystrophy |
| 106210 | Foveal hypoplasia, isolated, 136520 |
| 106210 | Aniridia |
| 106300 | Ankylosing spondylitis |
| 106700 | Total anomalous pulmonary venous return |
| 107250 | Anterior segment mesenchymal dysgenesis |
| 107271 | CD59 deficiency |
| 107280 | Cerebrovascular disease, occlusive |
| 107280 | Alpha-1-antichymotrypsin deficiency |
| 107300 | Antithrombin III deficiency |
| 107400 | Emphysema |
| 107400 | Emphysema-cirrhosis |
| 107400 | Hemorrhagic diathesis due to antithrombin_ittsburgh |
| 107470 | Atypical mycobacterial infection, familial disseminated, 209950 |
| 107470 | BCG infection, generalized familial |
| 107470 | Tuberculosis, susceptibility to |
| 107670 | Apolipoprotein A-II deficiency |
| 107680 | ApoA-I and apoC-III deficiency, combined |
| 107680 | Corneal clouding, autosomal recessive |
| 107680 | Amyloidosis, 3 or more types |
| 107680 | Hypertriglyceridemia, one form |
| 107680 | Hypoalphalipoproteinemia |
| 107720 | Hypertriglyceridemia |
| 107730 | Apolipoprotein B-100, ligand-defective |
| 107730 | Abetalipoproteinemia |
| 107730 | Hyperbetalipoproteinemia |
| 107730 | Hypobetalipoproteinemia |
| 107741 | Hyperlipoproteinemia, type III |
| 107776 | Colton blood group, 110450 |
| 107777 | Diabetes insipidus, nephrogenic, autosomal recessive, 222000 |
| 107970 | Arrhythmogenic right ventricular dysplasia-1 |
| 108120 | Distal arthrogryposis-1 |
| 108725 | Atherosclerosis, susceptibility to |
| 108730 | Brody myopathy, 601003 |
| 108800 | Atrial septal defect, secundum type |
| 108962 | Hypertension, salt-resistant |
| 108985 | Atrophia areata |
| 109150 | Machado-Joseph disease |
| 109270 | Renal tubular acidosis, distal, 179800 |
| 109270 | Spherocytosis, hereditary |
| 109270 | [Acanthocytosis, one form] |
| 109270 | [Elliptocytosis, Malaysian-Melanesian type] |
| 109270 | Hemolytic anemia due to band 3 defect |
| 109400 | Basal cell nevus syndrome |
| 109543 | Leukemia, chronic lymphocytic, B-cell |
| 109560 | Leukemia/lymphoma, B-cell, 3 |
| 109565 | Lymphoma, B-cell |
| 109565 | Lymphoma, diffuse large cell |
| 109690 | Asthma, nocturnal, susceptibility to |
| 109690 | Obesity, susceptibility to |
| 109700 | Hemodialysis-related amyloidosis |
| 110100 | Blepharophimosis, epicanthus inversus, and ptosis, type 1 |
| 110700 | Vivax malaria, susceptibility to |
| 112250 | Bone dysplasia with medullary fibrosarcoma |
| 112262 | Fibrodysplasia ossificans progressiva, 135100 |
| 112410 | Hypertension with brachydactyly |
| 113100 | Brachydactyly, type C |
| 113300 | Brachydactyly type E |
| 113520 | Hyperleucinemia-isoleucinemia or hypervalinemia |
| 113705 | Ovarian cancer |
| 113705 | Breast cancer-1 |
| 113721 | Breast cancer |
| 113811 | Epidermolysis bullosa, generalized atrophic benign, 226650 |
| 113900 | Heart block, progressive familial, type I |
| 114130 | Osteoporosis |
| 114208 | Malignant hyperthermia susceptibility 5, 601887 |
| 114208 | Hypokalemic periodic paralysis, 170400 |
| 114240 | Muscular dystrophy, limb-girdle, type 2A, 253600 |
| 114290 | Campomelic dysplasia with autosomal sex reversal |
| 114350 | Leukemia, acute myeloid |
| 114400 | Lynch cancer family syndrome II |
| 114550 | Hepatocellular carcinoma |
| 114835 | Monocyte carboxyesterase deficiency |
| 115470 | Cat eye syndrome |
| 115500 | Acatalasemia |
| 115501 | Albinism, brown, 203290 |
| 115501 | Albinism, rufous, 278400 |
| 115650 | Cataract, anterior polar-1 |
| 115660 | Cataract, cerulean, type 1 |
| 115665 | Cataract, congenital, Volkmann type |
| 116600 | Cataract, posterior polar |
| 116800 | Cataract, Marner type |
| 116806 | Colorectal cancer |
| 116860 | Cavernous angiomatous malformations |
| 117700 | [Hypoceruloplasminemia, hereditary] |
| 117700 | Hemosiderosis, systemic, due to aceruloplasminemia |
| 118210 | Charcot-Marie-Tooth neuropathy-2A |
| 118425 | Myotonia congenita, dominant, 160800 |
| 118425 | Myotonia congenita, recessive, 255700 |
| 118425 | Myotonia levior, recessive |
| 118485 | Polycystic ovary syndrome with hyperandrogenemia |
| 118504 | Epilepsy, benign neonatal, type 1, 121200 |
| 118504 | Epilepsy, nocturnal frontal lobe, 600513 |
| 118511 | Schizophrenia, neurophysiologic defect in |
| 118800 | Choreoathetosis, familial paroxysmal |
| 119300 | van der Woude syndrome |
| 119530 | Orofacial cleft-1 |
| 120070 | Alport syndrome, autosomal recessive, 203780 |
| 120110 | Metaphyseal chondrodysplasia, Schmid type |
| 120120 | Epidermolysis bullosa dystrophica, dominant, 131750 |
| 120120 | Epidermolysis bullosa dystrophica, recessive, 226600 |
| 120120 | Epidermolysis bullosa, pretibial, 131850 |
| 120131 | Alport syndrome, autosomal recessive, 203780 |
| 120131 | Hematuria, familial benign |
| 120140 | Osteoarthrosis, precocious |
| 120140 | SED congenita |
| 120140 | SMED Strudwick type |
| 120140 | Stickler syndrome, type I |
| 120140 | Wagner syndrome, type II |
| 120140 | Achondrogenesis-hypochondrogenesis, type II |
| 120140 | Kniest dysplasia |
| 120150 | Osteogenesis imperfecta, 4 clinical forms, 166200, 166210, 259420, |
| | 166220 |
| 120150 | Osteoporosis, idiopathic, 166710 |
| 120150 | Ehlers-Danlos syndrome, type VIIA1, 130060 |
| 120160 | Osteogenesis imperfecta, 4 clinical forms, 166200, 166210, 259420, |
| | 166220 |
| 120160 | Osteoporosis, idiopathic, 166710 |
| 120160 | Ehlers-Danlos syndrome, type VIIA2, 130060 |
| 120160 | Marfan syndrome, atypical |
| 120180 | Ehlers-Danlos syndrome, type III |
| 120180 | Ehlers-Danlos syndrome, type IV, 130050 |
| 120180 | Fibromuscular dysplasia of arteries, 135580 |
| 120180 | Aneurysm, familial, 100070 |
| 120190 | Ehlers-Danlos syndrome, type I, 130000 |
| 120215 | Ehlers-Danlos syndrome, type I, 130000 |
| 120215 | Ehlers-Danlos syndrome, type II, 130010 |
| 120220 | Bethlem myopathy, 158810 |
| 120240 | Bethlem myopathy, 158810 |
| 120250 | Bethlem myopathy, 158810 |
| 120260 | Epiphyseal dysplasia, multiple, type 2, 600204 |
| 120280 | Stickler syndrome, type III |
| 120280 | Marshall syndrome, 154780 |
| 120290 | OSMED syndrome, 215150 |
| 120290 | Stickler syndrome, type II, 184840 |
| 120435 | Muir-Torre syndrome, 158320 |
| 120435 | Colorectal cancer, hereditary, nonpolyposis, type 1 Ovarian cancer |
| 120436 | Muir-Torre family cancer syndrome, 158320 |
| 120436 | Turcot syndrome with glioblastoma, 276300 |
| 120436 | Colorectal cancer, hereditary nonpolyposis, type 2 |
| 120470 | Colorectal cancer |
| 120550 | C1q deficiency, type A |
| 120570 | C1q deficiency, type B |
| 120575 | C1q deficiency, type C |
| 120580 | C1r/C1s deficiency, combined |
| 120620 | SLE susceptibility |
| 120620 | CR1 deficiency |
| 120700 | C3 deficiency |
| 120810 | C4 deficiency |
| 120820 | C4 deficiency |
| 120900 | C5 deficiency |
| 120920 | Measles, susceptibility to |
| 120940 | C9 deficiency |
| 120950 | C8 deficiency, type I |
| 120960 | C8 deficiency, type II |
| 121011 | Deafness, autosomal dominant 3, 601544 |
| 121011 | Deafness, autosomal recessive 1, 220290 |
| 121014 | Heterotaxia, visceroatrial, autosomal recessive |
| 121050 | Contractural arachnodactyly, congenital |
| 121300 | Coproporphyria |
| 121300 | Harderoporphyrinuria |
| 121360 | Myeloid leukemia, acute, M4Eo subtype |
| 121800 | Corneal dystrophy, crystalline, Schnyder |
| 122500 | [Transcortin deficiency] |
| 122560 | ACTH deficiency, 201400 |
| 122720 | Nicotine addiction, protection from |
| 122720 | Coumarin resistance, 122700 |
| 123000 | Craniometaphyseal dysplasia |
| 123100 | Craniosynostosis, type 1 |
| 123101 | Craniosynostosis, type 2 |
| 123580 | Cataract, congenital, autosomal dominant |
| 123620 | Cataract, cerulean, type 2, 601547 |
| 123660 | Cataract, Coppock-like |
| 123825 | Retinitis pigmentosa, autosomal recessive |
| 123829 | Melanoma |
| 123940 | White sponge nevus, 193900 |
| 124020 | Mephenytoin poor metabolizer |
| 124030 | Parkinsonism, susceptibility to |
| 124030 | Debrisoquine sensitivity |
| 124080 | CMO II deficiency |
| 124200 | Darier disease (keratosis follicularis) |
| 125264 | Leukemia, acute nonlymphocytic |
| 125270 | Porphyria, acute hepatic |
| 125270 | Lead poisoning, susceptibility to |
| 125490 | Dentinogenesis imperfecta-1 |
| 125660 | Myopathy, desminopathic |
| 125660 | Cardiomyopathy |
| 125852 | Insulin-dependent diabetes mellitus-2 |
| 126060 | Anemia, megaloblastic, due to DHFR deficiency |
| 126090 | Hyperphenylalaninemia due to pterin-4a-carbinolamine dehydratase |
| | deficiency, 264070 |
| 126150 | Diphtheria, susceptibility to |
| 126337 | Myxoid liposarcoma |
| 126340 | Xeroderma pigmentosum, group D, 278730 |
| 126391 | DNA ligase I deficiency |
| 126451 | Schizophrenia, susceptibility to |
| 126452 | Autonomic nervous system dysfunction |
| 126452 | [Novelty seeking personality] |
| 126600 | Doyne honeycomb retinal dystrophy |
| 126600 | Drusen, radial, autosomal dominant |
| 126650 | Chloride diarrhea, congenital, Finnish type, 214700 |
| 126650 | Colon cancer |
| 128100 | Dystonia-1, torsion |
| 129010 | Neuropathy, congenital hypomyelinating, 1 |
| 129490 | Ectodermal dysplasia-3, anhidrotic |
| 129500 | Ectodermal dysplasia, hidrotic |
| 129900 | EEC syndrome-1 |
| 130160 | Supravalvar aortic stenosis, 185500 |
| 130160 | Williams-Beuren syndrome, 194050 |
| 130160 | Cutis laxa, 123700 |
| 130410 | Glutaricaciduria, type IIB |
| 130500 | Elliptocytosis-1 |
| 130650 | Beckwith-Wiedemann syndrome |
| 131100 | Multiple endocrine neoplasia I |
| 131100 | Prolactinoma, hyperparathyroidism, carcinoid syndrome |
| 131100 | Carcinoid tumor of lung |
| 131195 | Hereditary hemorrhagic telangiectasia-1, 187300 |
| 131210 | Atherosclerosis, susceptibility to |
| 131242 | Shah-Waardenburg syndrome, 277580 |
| 131400 | Eosinophilia, familial |
| 131440 | Eosinophilic myeloproliferative disorder |
| 132700 | Cylindromatosis |
| 132800 | Basal cell carcinoma |
| 132800 | Epithelioma, self-healing, squamous 1, Ferguson-Smith type |
| 133170 | Erythremia |
| 133171 | [Erythrocytosis, familial], 133100 |
| 133200 | Erythrokeratodermia variabilis |
| 133510 | Trichothiodystrophy |
| 133510 | Xeroderma pigmentosum, group B |
| 133530 | Xeroderma pigmentosum, group G, 278780 |
| 133540 | Cockayne syndrome-2, late onset |
| 133700 | Chondrosarcoma, 215300 |
| 133700 | Exostoses, multiple, type 1 |
| 133701 | Exostoses, multiple, type 2 |
| 133780 | Vitreoretinopathy, exudative, familial |
| 134370 | Membroproliferative glomerulonephritis |
| 134370 | Factor H deficiency |
| 134370 | Hemolytic-uremic syndrome, 235400 |
| 134570 | Factor XIIIA deficiency |
| 134580 | Factor XIIIB deficiency |
| 134638 | Systemic lupus erythematosus, susceptibility, 152700 |
| 134790 | Hyperferritinemia-cataract syndrome, 600886 |
| 134820 | Dysfibrinogenemia, alpha type, causing bleeding diathesis |
| 134820 | Dysfibrinogenemia, alpha type, causing recurrent thrombosis |
| 134820 | Amyloidosis, hereditary renal, 105200 |
| 134830 | Dysfibrinogenemia, beta type |
| 134850 | Dysfibrinogenemia, gamma type |
| 134850 | Hypofibrinogenemia, gamma type |
| 134934 | Thanatophoric dysplasia, types I and II, 187600 |
| 134934 | Achondroplasia, 100800 |
| 134934 | Craniosynostosis, nonsyndromic |
| 134934 | Crouzon syndrome with acanthosis nigricans |
| 134934 | Hypochondroplasia, 146000 |
| 135300 | Fibromatosis, gingival |
| 135600 | Ehlers-Danlos syndrome, type X |
| 135700 | Fibrosis of extraocular muscles, congenital, 1 |
| 135750 | Tetramelic mirror-image polydactyly |
| 135940 | Ichthyosis vulgaris, 146700 |
| 136132 | [Fish-odor syndrome], 602079 |
| 136350 | Pfeiffer syndrome, 101600 |
| 136435 | Ovarian dysgenesis, hypergonadotropic, with normal karyotype, |
| | 233300 |
| 136440 | Lymphoma/leukemia, B-cell, variant |
| 136530 | Male infertility, familial |
| 136533 | Rhabdomyosarcoma, alveolar, 268220 |
| 136550 | Macular dystrophy, North Carolina type |
| 136836 | Fucosyltransferase-6 deficiency |
| 136850 | Fumarase deficiency |
| 137350 | Amyloidosis, Finnish type, 105120 |
| 137580 | Tourette syndrome |
| 137600 | Iridogoniodysgenesis syndrome |
| 138030 | [Hyperproglucagonemia] |
| 138033 | Diabetes mellitus, type II |
| 138040 | Cortisol resistance |
| 138079 | Hyperinsulinism, familial, 602485 |
| 138079 | MODY, type 2, 125851 |
| 138130 | Hyperinsulinism-hyperammonemia syndrome |
| 138140 | Glucose transport defect, blood-brain barrier |
| 138160 | Diabetes mellitus, noninsulin-dependent |
| 138160 | Fanconi-Bickel syndrome, 227810 |
| 138190 | Diabetes mellitus, noninsulin-dependent |
| 138250 | P5CS deficiency |
| 138300 | Hemolytic anemia due to glutathione reductase deficiency |
| 138320 | Hemolytic anemia due to glutathione peroxidase deficiency |
| 138430 | Diabetes mellitus, type II |
| 138491 | Startle disease, autosomal recessive |
| 138491 | Startle disease/hyperekplexia, autosomal dominant, 149400 |
| 138491 | Hyperekplexia and spastic paraparesis |
| 138570 | Non-insulin dependent diabetes mellitus, susceptibility to |
| 138571 | Glycogen synthase, liver, deficiency of, 240600 |
| 138700 | [Apolipoprotein H deficiency] |
| 138720 | Bernard-Soulier syndrome, type B |
| 138850 | Hypogonadotropic hypogonadism |
| 138971 | Kostmann neutropenia, 202700 |
| 138981 | Pulmonary alveolar proteinosis, 265120 |
| 139130 | Hypertension, essential, susceptibility to, 145500 |
| 139150 | Basal cell carcinoma |
| 139190 | Gigantism due to GHRF hypersecretion |
| 139190 | Isolated growth hormone deficiency due to defect in GHRF |
| 139191 | Growth hormone deficient dwarfism |
| 139250 | Isolated growth hormone deficiency, Illig type with absent GH and |
| | Kowarski type with bioinactive GH |
| 139320 | Pituitary ACTH secreting adenoma |
| 139320 | Pseudohypoparathyroidism, type Ia, 103580 |
| 139320 | Somatotrophinoma |
| 139320 | McCune-Albright polyostotic fibrous dysplasia, 174800 |
| 139330 | Night blindness, congenital stationary |
| 139350 | Epidermolytic hyperkeratosis, 113800 |
| 139350 | Keratoderma, palmoplantar, nonepidermolytic |
| 139360 | Pituitary ACTH-secreting adenoma |
| 140100 | [Anhaptoglobinemia] |
| 140100 | [Hypohaptogloginemia] |
| 141750 | Alpha-thalassemia/mental retardation syndrome, type 1 |
| 141800 | Methemoglobinemias, alpha- |
| 141800 | Thalassemias, alpha- |
| 141800 | Erythremias, alpha- |
| 141800 | Heinz body anemias, alpha- |
| 141850 | Thalassemia, alpha- |
| 141850 | Erythrocytosis |
| 141850 | Heinz body anemia |
| 141850 | Hemoglobin H disease |
| 141850 | Hypochromic microcytic anemia |
| 141900 | Methemoglobinemias, beta- |
| 141900 | Sickle cell anemia |
| 141900 | Thalassemias, beta- |
| 141900 | Erythremias, beta- |
| 141900 | HPFH, deletion type |
| 141900 | Heinz body anemias, beta- |
| 142000 | Thalassemia due to Hb Lepore |
| 142000 | Thalassemia, delta- |
| 142200 | HPFH, nondeletion type A |
| 142250 | HPFH, nondeletion type G |
| 142270 | Hereditary persistence of fetal hemoglobin |
| 142335 | Hereditary persistence of fetal hemoglobin, heterocellular, Indian |
| | type |
| 142360 | Thrombophilia due to heparin cofactor II deficiency |
| 142410 | Non-insulin-dependent diabetes mellitus-2, 601407 |
| 142410 | Insulin-dependent diabetes mellitus |
| 142410 | MODY, type 3, 600496 |
| 142470 | [Hereditary persistence of fetal hemoglobin, heterocellular] |
| 142600 | Hemolytic anemia due to hexokinase deficiency |
| 142640 | Thrombophilia due to elevated HRG |
| 142680 | Periodic fever, familial |
| 142857 | Pemphigoid, susceptibility to |
| 142858 | Beryllium disease, chronic, susceptibility to |
| 142959 | Hand-foot-uterus syndrome, 140000 |
| 142989 | Synpolydactyly, type II, 186000 |
| 143100 | Huntington disease |
| 143200 | Wagner syndrome |
| 143200 | Erosive vitreoretinopathy |
| 143450 | Trifunctional protein deficiency, type II |
| 143890 | Hypercholesterolemia, familial |
| 144120 | Hyperimmunoglobulin G1 syndrome |
| 144200 | Epidermolytic palmoplantar keratoderma |
| 145001 | Hyperparathyroidism-jaw tumor syndrome |
| 145260 | Pseudohypoaldosteronism, type II |
| 145410 | Opitz G syndrome, type II |
| 145505 | Hypertension, essential |
| 145981 | Hypocalciuric hypercalcemia, type II |
| 146150 | Hypomelanosis of Ito |
| 146150 | Hypomelanosis of Ito |
| 146200 | Hypoparathyroidism, familial |
| 146740 | Neutropenia, alloimmune neonatal |
| 146740 | Viral infections, recurrent |
| 146740 | Lupus erythematosus, systemic, susceptibility, 152700 |
| 146760 | [IgG receptor I, phagocytic, familial deficiency of] |
| 146790 | Lupus nephritis, susceptibility to |
| 147020 | Agammaglobulinemia, 601495 |
| 147050 | Atopy |
| 147061 | Allergy and asthma susceptibility |
| 147110 | IgG2 deficiency, selective |
| 147141 | Leukemia, acute lymphoblastic |
| 147200 | [Kappa light chain deficiency] |
| 147280 | Hepatocellular carcinoma |
| 147440 | Growth retardation with deafness and mental retardation |
| 147545 | Diabetes mellitus, noninsulin-dependent |
| 147570 | Interferon, immune, deficiency |
| 147575 | Myelodysplastic syndrome, preleukemic |
| 147575 | Myelogenous leukemia, acute |
| 147575 | Macrocytic anemia refractory, of 5q-syndrome, 153550 |
| 147660 | Interferon, alpha, deficiency |
| 147670 | Rabson-Mendenhall syndrome |
| 147670 | Diabetes mellitus, insulin-resistant, with acanthosis nigricans |
| 147670 | Leprechaunism |
| 147680 | Severe combined immunodeficiency due to IL2 deficiency |
| 147730 | Interleukin-2 receptor, alpha chain, deficiency of |
| 147781 | Atopy, susceptibility to |
| 147790 | Leukemia, acute lymphocytic, with 4/11 translocation |
| 147791 | Jacobsen syndrome |
| 148040 | Epidermolysis bullosa simplex, Koebner, Dowling-Meara, and |
| | Weber-Cockayne types, 131900, 131760, 131800 |
| 148041 | Pachyonychia congenita, Jadassohn-Lewandowsky type, 167200 |
| 148043 | Meesmann corneal dystrophy, 122100 |
| 148065 | White sponge nevus, 193900 |
| 148066 | Epidermolysis bullosa simplex, Koebner, Dowling-Meara, and |
| | Weber-Cockayne types, 131900, 131760, 131800 |
| 148066 | Epidermolysis bullosa simplex, recessive, 601001 |
| 148067 | Nonepidermolytic palmoplantar keratoderma, 600962 |
| 148067 | Pachyonychia congenita, Jadassohn-Lewandowsky type, 167200 |
| 148069 | Pachyonychia congenita, Jackson-Lawler type, 167210 |
| 148070 | Liver disease, susceptibility to, from hepatotoxins or viruses |
| 148080 | Epidermolytic hyperkeratosis, 113800 |
| 148370 | Keratolytic winter erythema |
| 148500 | Tylosis with esophageal cancer |
| 148900 | Klippel-Feil syndrome with laryngeal malformation |
| 150000 | Exertional myoglobinuria due to deficiency of LDH-A |
| 150100 | Lactate dehydrogenase-B deficiency |
| 150200 | [Placental lactogen deficiency] |
| 150210 | Lactoferrin-deficient neutrophils, 245480 |
| 150230 | Langer-Giedion syndrome |
| 150240 | Cutis laxa, marfanoid neonatal type |
| 150250 | Larsen syndrome, autosomal dominant |
| 150270 | Laryngeal adductor paralysis |
| 150292 | Epidermolysis bullosa, Herlitz junctional type, 226700 |
| 150310 | Epidermolysis bullosa, Herlitz junctional type, 226700 |
| 150310 | Epidermolysis bullosa, generalized atrophic benign, 226650 |
| 150800 | Leiomyomata, multiple hereditary cutaneous |
| 151385 | Leukemia, acute myeloid |
| 151390 | Leukemia, acute T-cell |
| 151400 | Leukemia/lymphoma, B-cell, 1 |
| 151430 | Leukemia/lymphoma, B-cell, 2 |
| 151440 | Leukemia, T-cell acute lymphoblastoid |
| 151670 | Hepatic lipase deficiency |
| 152200 | Coronary artery disease, susceptibility to |
| 152427 | Long QT syndrome-2 |
| 152445 | Vohwinkel syndrome, 124500 |
| 152445 | Erythrokeratodernia, progressive symmetric, 602036 |
| 152760 | Hypogonadotropic hypogonadism due to GNRH deficiency, 227200 |
| 152790 | Precocious puberty, male, 176410 |
| 152790 | Leydig cell hypoplasia |
| 153454 | Ehlers-Danlos syndrome, type VI, 225400 |
| 153455 | Cutis laxa, recessive, type 1, 219100 |
| 153700 | Macular dystrophy, vitelliform type |
| 153880 | Macular dystrophy, dominant cystoid |
| 153900 | Stargardt disease-2 |
| 154275 | Malignant hyperthermia susceptibility 2 |
| 154276 | Malignant hyperthermia susceptibility 3 |
| 154400 | Acrofacial dysostosis, Nager type |
| 154500 | Treacher Collins mandibulofacial dysostosis |
| 154545 | Chronic infections, due to opsonin defect |
| 154550 | Carbohydrate-deficient glycoprotein syndrome, type Ib, 602579 |
| 154705 | Marfan syndrome, type II |
| 155555 | [Red hair/fair skin] |
| 155555 | UV-induced skin damage, vulnerability to |
| 155600 | Malignant melanoma, cutaneous |
| 155900 | Melkersson-Rosenthal syndrome |
| 156225 | Muscular dystrophy, congenital merosin-deficient |
| 156232 | Mesomelic dysplasia, Kantaputra type |
| 156490 | Neuroblastoma |
| 156570 | Methylcobalamin deficiency, cbl G type |
| 156600 | Microcoria, congenital |
| 156845 | Tietz syndrome, 103500 |
| 156845 | Waardenburg syndrome, type IIA, 193510 |
| 156845 | Waardenburg syndrome/ocular albinism, digenic, 103470 |
| 156850 | Cataract, congenital, with microphthalmia |
| 157140 | Dementia, frontotemporal, with parkinsonism, 601630 |
| 157147 | Abetalipoproteinemia, 200100 |
| 157170 | Holoprosencephaly-2 |
| 157640 | PEO with mitochondrial DNA deletions, type 1 |
| 157655 | Lactic acidosis due to defect in iron-sulfur cluster of complex I |
| 157900 | Moebius syndrome |
| 158590 | Spinal muscular atrophy-4 |
| 159000 | Muscular dystrophy, limb-girdle, type 1A |
| 159001 | Muscular dystrophy, limb-girdle, type 1B |
| 159350 | Colorectal cancer |
| 159440 | Charcot-Marie-Tooth neuropathy-1B, 118200 |
| 159440 | Dejerine-Sottas disease, myelin P-related, 145900 |
| 159440 | Hypomyelination, congenital |
| 159555 | Leukemia, myeloid/lymphoid or mixed-lineage |
| 159595 | Leukemia, transient, of Down syndrome |
| 160760 | Cardiomyopathy, familial hypertrophic, 1, 192600 |
| 160760 | Central core disease, one form |
| 160777 | Griscelli disease, 214450 |
| 160781 | Cardiomyopathy, hypertrophic, mid-left ventricular chamber type |
| 160900 | Myotonic dystrophy |
| 160980 | Carney myxoma-endocrine complex |
| 161015 | Mitochondrial complex I deficiency, 252010 |
| 162100 | Neuralgic amyotrophy with predilection for brachial plexus |
| 162150 | Obestiy with impaired prohormone processing, 600955 |
| 162200 | Neurofibromatosis, type 1 |
| 162200 | Watson syndrome, 193520 |
| 162400 | Neuropathy, hereditary sensory and autonomic, type 1 |
| 163729 | Hypertension, pregnancy-induced |
| 163950 | Noonan syndrome-1 |
| 163950 | Cardiofaciocutaneous syndrome, 115150 |
| 164009 | Leukemia, acute promyelocytic, NUMA/RARA type |
| 164040 | Leukemia, acute promyelocytic, NPM/RARA type |
| 164050 | Nucleoside phosphorylase deficiency, immunodeficiency due to |
| 164160 | Obesity, severe, due to leptin deficiency |
| 164200 | Oculodentodigital dysplasia |
| 164200 | Syndactyly, type III, 186100 |
| 164500 | Spinocerebellar ataxia-7 |
| 164731 | Ovarian carcinoma, 167000 |
| 164761 | Medullary thyroid carcinoma, 155240 |
| 164761 | Multiple endocrine neoplasia IIA, 171400 |
| 164761 | Multiple endocrine neoplasia IIB, 162300 |
| 164761 | Hirschsprung disease, 142623 |
| 164770 | Myeloid malignancy, predisposition to |
| 164860 | Renal cell carcinoma, papillary, familial and sporadic |
| 164920 | Piebaldism |
| 164920 | Mast cell leukemia |
| 164920 | Mastocytosis with associated hematologic disorder |
| 164953 | Liposarcoma |
| 165215 | 3q21q26 syndrome |
| 165240 | Pallister-Hall syndrome, 146510 |
| 165240 | Postaxial polydactyly type A1, 174200 |
| 165240 | Greig cephalopolysyndactyly syndrome, 175700 |
| 165320 | Hepatocellular carcinoma |
| 165500 | Optic atrophy 1 |
| 166600 | Osteopetrosis, AD, type II |
| 166800 | Otosclerosis |
| 167000 | Ovarian cancer, serous |
| 167250 | Paget disease of bone |
| 167409 | Optic nerve coloboma with renal disease, 120330 |
| 167410 | Rhabdomyosarcoma, alveolar, 268220 |
| 167415 | Hypothyroidism, congenital, due to thyroid dysgenesis or hypoplasia |
| 168000 | Paraganglioma, familial nonchromaffin, 1 |
| 168360 | Paraneoplastic sensory neuropathy |
| 168450 | Hypoparathyroidism, autosomal dominant |
| 168450 | Hypoparathyroidism, autosomal recessive |
| 168461 | Multiple myeloma, 254250 |
| 168461 | Parathyroid adenomatosis 1 |
| 168461 | Centrocytic lymphoma |
| 168468 | Metaphyseal chondrodysplasia, Murk Jansen type, 156400 |
| 168470 | Humoral hypercalcemia of malignancy |
| 168500 | Parietal foramina |
| 168610 | Parkinsonism-dementia with pallidopontonigral degeneration |
| 169600 | Hailey-Hailey disease |
| 170261 | Bare lymphocyte syndrome, type I, due to TAP2 deficiency |
| 170500 | Myotonia congenita, atypical acetazolamide-responsive |
| 170500 | Paramyotonia congenita, 168300 |
| 170500 | Hyperkalemic periodic paralysis |
| 170650 | Periodontitis, juvenile |
| 170995 | Zellweger syndrome-2 |
| 171050 | Colchicine resistance |
| 171060 | Cholestasis, progressive familial intrahepatic, type III, 602347 |
| 171190 | Hypertension, essential, 145500 |
| 171650 | Lysosomal acid phosphatase deficiency |
| 171760 | Hypophosphatasia, adult, 146300 |
| 171760 | Hypophosphatasia, infantile, 241500 |
| 171860 | Hemolytic anemia due to phosphofructokinase deficiency |
| 172400 | Hemolytic anemia due to glucosephosphate isomerase deficiency |
| 172400 | Hydrops fetalis, one form |
| 172411 | Colorectal cancer, resistance to |
| 172430 | Enolase deficiency |
| 172471 | Glycogenosis, hepatic, autosomal |
| 172490 | Phosphorylase kinase deficiency of liver and muscle, 261750 |
| 173350 | Plasminogen Tochigi disease |
| 173350 | Plasminogen deficiency, types I and II |
| 173350 | Thrombophilia, dysplasminogenemic |
| 173360 | Thrombophilia due to excessive plasminogen activator inhibitor |
| 173360 | Hemorrhagic diathesis due to PAI1 deficiency |
| 173370 | Plasminogen activator deficiency |
| 173470 | Glanzmann thrombasthenia, type B |
| 173510 | Platelet glycoprotein IV deficiency |
| 173510 | [Macrothrombocytopenia] |
| 173610 | Platelet alpha/delta storage pool deficiency |
| 173850 | Polio, susceptibility to |
| 173870 | Xeroderma pigmentosum |
| 173870 | Fanconi anemia |
| 173910 | Polycystic kidney disease, adult, type II |
| 174000 | Medullary cystic kidney disease, AD |
| 174810 | Osteolysis, familial expansile |
| 174900 | Polyposis, juvenile intestinal |
| 175100 | Turcot syndrome, 276300 |
| 175100 | Adenomatous polyposis coli |
| 175100 | Adenomatous polyposis coli, attenuated |
| 175100 | Colorectal cancer |
| 175100 | Desmoid disease, hereditary, 135290 |
| 175100 | Gardner syndrome |
| 176000 | Porphyria, acute intermittent |
| 176100 | Porphyria cutanea tarda |
| 176100 | Porphyria, hepatoerythropoietic |
| 176260 | Episodic ataxia/myokymia syndrome, 160120 |
| 176261 | Jervell and Lange-Nielsen syndrome, 220400 |
| 176300 | [Dystransthyretinemic hyperthyroxinemia] |
| 176300 | Carpal tunnel syndrome, familial |
| 176300 | Amyloid neuropathy, familial, several allelic types |
| 176300 | Amyloidosis, senile systemic |
| 176310 | Leukemia, acute pre-B-cell |
| 176450 | Sacral agenesis-1 |
| 176705 | Breast cancer, sporadic |
| 176730 | Diabetes mellitus, rare form |
| 176730 | Hyperproinsulinemia, familial |
| 176730 | MODY, one form |
| 176830 | Obesity, adrenal insufficiency, and red hair |
| 176830 | ACTH deficiency |
| 176860 | Purpura fulminans, neonatal |
| 176860 | Thrombophilia due to protein C deficiency |
| 176930 | Dysprothrombinemia |
| 176930 | Hypoprothrombinemia |
| 176943 | Apert syndrome, 101200 |
| 176943 | Pfeiffer syndrome, 101600 |
| 176943 | Beare-Stevenson cutis gyrata syndrome, 123790 |
| 176943 | Crouzon craniofacial dysostosis, 123500 |
| 176943 | Jackson-Weiss syndrome, 123150 |
| 176947 | Selective T-cell defect |
| 176960 | Pituitary tumor, invasive |
| 177000 | Protoporphyria, erythropoietic |
| 177000 | Protoporphyria, erythropoietic, recessive, with liver failure |
| 177070 | Spherocytosis, hereditary, Japanese type |
| 177070 | Hermansky-Pudlak syndrome, 203300 |
| 177400 | Apnea, postanesthetic |
| 177900 | Psoriasis susceptibility-1 |
| 178300 | Ptosis, hereditary congenital, 1 |
| 178600 | Pulmonary hypertension, familial primary |
| 178640 | Pulmonary alveolar proteinosis, congenital, 265120 |
| 179095 | Male infertility |
| 179450 | Ragweed sensitivity |
| 179605 | Retinitis pigmentosa, digenic |
| 179605 | Retinitis pigmentosa-7, peripherin-related |
| 179605 | Retinitis punctata albescens |
| 179605 | Butterfly dystrophy, retinal |
| 179605 | Macular dystrophy |
| 179615 | Reticulosis, familial histiocytic, 267700 |
| 179615 | Severe combined immunodeficiency, B cell-negative, 601457 |
| 179616 | Severe combined immunodeficiency, B cell-negative, 601457 |
| 179755 | Renal cell carcinoma, papillary, 1 |
| 179820 | [Hyperproreninemia] |
| 180020 | Retinal cone dystrophy-1 |
| 180069 | Retinal dystrophy, autosomal recessive, childhood-onset |
| 180069 | Retinitis pigmentosa-20 |
| 180069 | Leber congenital amaurosis-2, 204100 |
| 180071 | Retinitis pigmentosa, autosomal recessive |
| 180072 | Night blindness, congenital stationary, type 3, 163500 |
| 180072 | Retinitis pigmentosa, autosomal recessive |
| 180090 | Retinitis pigmentosa, autosomal recessive |
| 180100 | Retinitis pigmentosa-1 |
| 180104 | Retinitis pigmentosa-9 |
| 180105 | Retinitis pigmentosa-10 |
| 180200 | Osteosarcoma, 259500 |
| 180200 | Pinealoma with bilateral retinoblastoma |
| 180200 | Retinoblastoma |
| 180200 | Bladder cancer, 109800 |
| 180240 | Leukemia, acute promyelocytic |
| 180250 | Retinol binding protein, deficiency of |
| 180297 | Anemia, hemolytic, Rh-null, suppressor type, 268150 |
| 180380 | Night blindness, congenital stationery, rhodopsin-related |
| 180380 | Retinitis pigmentosa, autosomal recessive |
| 180380 | Retinitis pigmentosa-4, autosomal dominant |
| 180381 | Oguchi disease-2, 258100 |
| 180385 | Leukemia, acute T-cell |
| 180721 | Retinitis pigmentosa, digenic |
| 180840 | Susceptibility to IDDM |
| 180860 | Russell-Silver syndrome |
| 180901 | Malignant hyperthermia susceptibility 1, 145600 |
| 180901 | Central core disease, 117000 |
| 181031 | Oguchi disease-1, 258100 |
| 181405 | Scapuloperoneal spinal muscular atrophy, New England type |
| 181430 | Scapuloperoneal syndrome, myopathic type |
| 181460 | Schistosoma mansoni, susceptibility/resistance to |
| 181510 | Schizophrenia |
| 181600 | Sclerotylosis |
| 182138 | Anxiety-related personality traits |
| 182279 | Prader-Willi syndrome |
| 182280 | Small-cell cancer of lung |
| 182290 | Smith-Magenis syndrome |
| 182380 | Glucose/galactose malabsorption |
| 182381 | Renal glucosuria, 253100 |
| 182452 | Lung cancer, small cell |
| 182500 | Cataract, congenital |
| 182600 | Spastic paraplegia-3A |
| 182601 | Spastic paraplegia-4 |
| 182860 | Pyropoikilocytosis |
| 182860 | Spherocytosis, recessive |
| 182860 | Elliptocytosis-2 |
| 182870 | Spherocytosis-1 |
| 182870 | Elliptocytosis-3 |
| 182870 | Anemia, neonatal hemolytic, fatal and near-fatal |
| 182900 | Spherocytosis-2 |
| 183600 | Split hand/foot malformation, type 1 |
| 185000 | Stomatocytosis I |
| 185430 | Atherosclerosis, susceptibility to |
| 185470 | Myopathy due to succinate dehydrogenase deficiency |
| 185800 | Symphalangism, proximal |
| 186580 | Arthrocutaneouveal granulomatosis |
| 186740 | Immunodeficiency due to defect in CD3-gamma |
| 186770 | Leukemia, T-cell acute lymphocytic |
| 186780 | CD3, zeta chain, deficiency |
| 186830 | Immunodeficiency, T-cell receptor/CD3 complex |
| 186855 | Leukemia-2, T-cell acute lymphoblastic |
| 186860 | Leukemia/lymphoma, T-cell |
| 186880 | Leukemia/lymphoma, T-cell |
| 186921 | Leukemia, T-cell acute lymphoblastic |
| 186940 | [CD4(+) lymphocyte deficiency] |
| 186940 | Lupus erythematosus, susceptibility to |
| 186960 | Leukemia/lymphoma, T-cell |
| 187040 | Leukemia-1, T-cell acute lymphoblastic |
| 187680 | 6-mercaptopurine sensitivity |
| 188025 | Thrombocytopenia, Paris-Trousseau type |
| 188070 | Bleeding disorder due to defective thromboxane A2 receptor |
| 188400 | Velocardiofacial syndrome, 192430 |
| 188400 | DiGeorge syndrome |
| 188450 | Goiter, adolescent multinodular |
| 188450 | Goiter, nonendemic, simple |
| 188450 | Hypothyroidism, hereditary congenital |
| 188540 | Hypothyroidism, nongoitrous |
| 188550 | Thyroid papillary carcinoma |
| 188826 | Sorsby fundus dystrophy, 136900 |
| 189800 | Preeclampsia/eclampsia |
| 189980 | Leukemia, chronic myeloid |
| 190000 | Atransferrinemia |
| 190020 | Bladder cancer, 109800 |
| 190040 | Meningioma, SIS-related |
| 190040 | Dermatofibrosarcoma protuberans |
| 190040 | Giant-cell fibroblastoma |
| 190070 | Colorectal adenoma |
| 190070 | Colorectal cancer |
| 190080 | Burkitt lymphoma |
| 190100 | Geniospasm |
| 190160 | Thyroid hormone resistance, 274300, 188570 |
| 190182 | Colon cancer |
| 190182 | Colorectal cancer, familial nonpolyposis, type 6 |
| 190195 | Ichthyosiform erythroderma, congenital, 242100 |
| 190195 | Ichthyosis, lamellar, autosomal recessive, 242300 |
| 190198 | Leukemia, T-cell acute lymphoblastic |
| 190300 | Tremor, familial essential, 1 |
| 190350 | Trichorhinophalangeal syndrome, type I |
| 190450 | Hemolytic anemia due to triosephosphate isomerase deficiency |
| 190605 | Triphalangeal thumb-polysyndactyly syndrome |
| 190685 | Down syndrome |
| 190900 | Colorblindness, tritan |
| 191010 | Cardiomyopathy, familial hypertrophic, 3, 115196 |
| 191030 | Nemaline myopathy-1, 161800 |
| 191044 | Cardiomyopathy, familial hypertrophic |
| 191045 | Cardiomyopathy, familial hypertrophic, 2, 115195 |
| 191092 | Tuberous sclerosis-2 |
| 191100 | Tuberous sclerosis-1 |
| 191170 | Colorectal cancer, 114500 |
| 191170 | Li-Fraumeni syndrome |
| 191181 | Cervical carcinoma |
| 191290 | Segawa syndrome, recessive |
| 191315 | Insensitivity to pain, congenital, with anhidrosis, 256800 |
| 191540 | [Urate oxidase deficiency] |
| 192090 | Ovarian carcinoma |
| 192090 | Breast cancer, lobular |
| 192090 | Endometrial carcinoma |
| 192090 | Gastric cancer, familial, 137215 |
| 192340 | Diabetes insipidus, neurohypophyseal, 125700 |
| 192500 | Jervell and Lange-Nielsen syndrome, 220400 |
| 192500 | Long QT syndrome-1 |
| 192974 | Neonatal alloimmune thrombocytopenia |
| 192974 | Glycoprotein Ia deficiency |
| 193100 | Hypophosphatemic rickets, autosomal dominant |
| 193235 | Vitreoretinopathy, neovascular inflammatory |
| 193300 | Renal cell carcinoma |
| 193300 | von Hippel-Lindau syndrome |
| 193400 | von Willebrand disease |
| 193500 | Rhabdomyosarcoma, alveolar, 268220 |
| 193500 | Waardenburg syndrome, type I |
| 193500 | Waardenburg syndrome, type III, 148820 |
| 193500 | Craniofacial-deafness-hand syndrome, 122880 |
| 194070 | Wilms tumor, type 1 |
| 194070 | Denys-Drash syndrome |
| 194070 | Frasier syndrome, 136680 |
| 194071 | Wilms tumor, type 2 |
| 194071 | Adrenocortical carcinoma, hereditary, 202300 |
| 194190 | Wolf-Hirschhorn syndrome |
| 200150 | Choreoacanthocytosis |
| 200350 | Acetyl-CoA carboxylase deficiency |
| 200990 | Acrocallosal syndrome |
| 201450 | Acyl-CoA dehydrogenase, medium chain, deficiency of |
| 201460 | Acyl-CoA dehydrogenase, long chain, deficiency of |
| 201470 | Acyl-CoA dehydrogenase, short-chain, deficiency of |
| 201475 | VLCAD deficiency |
| 201810 | 3-beta-hydroxysteroid dehydrogenase, type II, deficiency |
| 201910 | Adrenal hyperplasia, congenital, due to 21-hydroxylase deficiency |
| 202010 | Adrenal hyperplasia, congenital, due to 11-beta-hydroxylase |
| | deficiency |
| 202010 | Aldosteronism, glucocorticoid-remediable |
| 202110 | Adrenal hyperplasia, congenital, due to 17-alpha-hydroxylase |
| | deficiency |
| 203100 | Waardenburg syndrome/ocular albinism, digenic, 103470 |
| 203100 | Albinism, oculocutaneous, type IA |
| 203200 | Albinism, ocular, autosomal recessive |
| 203200 | Albinism, oculocutaneous, type II |
| 203300 | Hermansky-Pudlak syndrome |
| 203310 | Ocular albinism, autosomal recessive |
| 203500 | Alkaptonuria |
| 203740 | Alpha-ketoglutarate dehydrogenase deficiency |
| 203750 | 3-ketothiolase deficiency |
| 203800 | Alstrom syndrome |
| 204500 | Ceroid-lipofuscinosis, neuronal 2, classic late infantile |
| 205100 | Amyotrophic lateral sclerosis, juvenile |
| 205900 | Anemia, Diamond-Blackfan |
| 207750 | Hyperlipoproteinemia, type Ib |
| 207800 | Argininemia |
| 208100 | Arthrogryposis multiplex congenita, neurogenic |
| 208250 | Jacobs syndrome |
| 208400 | Aspartylglucosaminuria |
| 208900 | Ataxia-telangiectasia |
| 208900 | B-cell non-Hodgkin lymphoma, sporadic |
| 208900 | T-cell prolymphocytic leukemia, sporadic |
| 209901 | Bardet-Biedl syndrome 1 |
| 210900 | Bloom syndrome |
| 211420 | Breast cancer, ductal |
| 212138 | Camitine-acylcarnitine translocase deficiency |
| 212200 | Carnosinemia |
| 213700 | Cerebrotendinous xanthomatosis |
| 214300 | Klippel-Feil syndrome |
| 214400 | Charcot-Marie-Tooth neuropathy-4A |
| 214500 | Chediak-Higashi syndrome |
| 215700 | Citrullinemia |
| 216550 | Cohen syndrome |
| 216900 | Achromatopsia |
| 216950 | C1r/C1s deficiency, combined |
| 217000 | C2 deficiency |
| 217030 | C3b inactivator deficiency |
| 217050 | C6 deficiency |
| 217050 | Combined C6/C7 deficiency |
| 217070 | C7 deficiency |
| 217095 | Conotruncal cardiac anomalies |
| 217300 | Cornea plana congenita, recessive |
| 217800 | Macular corneal dystrophy |
| 218000 | Andermann syndrome |
| 218030 | Apparent mineralocorticoid excess, hypertension due to |
| 219800 | Cystinosis, nephropathic |
| 221770 | Polycystic lipomembranous osteodysplasia with sclerosing |
| | leukencephalopathy |
| 221820 | Gliosis, familial progressive subcortical |
| 222100 | Diabetes mellitus, insulin-dependent-1 |
| 222600 | Atelosteogenesis II, 256050 |
| 222600 | Achondrogenesis Ib, 600972 |
| 222600 | Diastrophic dysplasia |
| 222700 | Lysinuric protein intolerance |
| 222745 | DECR deficiency |
| 222800 | Hemolytic anemia due to bisphosphoglycerate mutase deficiency |
| 222900 | Sucrose intolerance |
| 223000 | Lactase deficiency, adult, 223100 |
| 223000 | Lactase deficiency, congenital |
| 223360 | Dopamine-beta-hydroxylase deficiency |
| 223900 | Dysautonomia, familial |
| 224100 | Congenital dyserythropoietic anemia II |
| 224120 | Dyserythropoietic anemia, contenital, type I |
| 225500 | Ellis-van Creveld syndrome |
| 226450 | Epidermolysis bullosa inversa, junctional |
| 227220 | [Eye color, brown] |
| 227400 | Thromboembolism susceptibility due to factor V Leiden |
| 227400 | Hemorrhagic diathesis due to factor V deficiency |
| 227500 | Factor VII deficiency |
| 227600 | Factor X deficiency |
| 227645 | Fanconi anemia, type C |
| 227646 | Fanconi anemia, type D |
| 227650 | Fanconi anemia, type A |
| 228960 | [Kininogen deficiency] |
| 229300 | Friedreich ataxia |
| 229300 | Friedreich ataxia with retained reflexes |
| 229600 | Fructose intolerance |
| 229700 | Fructose-bisphosphatase deficiency |
| 229800 | [Fructosuria] |
| 230000 | Fucosidosis |
| 230200 | Galactokinase deficiency with cataracts |
| 230350 | Galactose epimerase deficiency |
| 230400 | Galactosemia |
| 230450 | Hemolytic anemia due to gamma-glutamylcysteine synthetase |
| | deficiency |
| 230500 | Mucopolysaccharidosis IVB |
| 230500 | GM1-gangliosidosis |
| 230800 | Gaucher disease |
| 230800 | Gaucher disease with cardiovascular calcification |
| 231200 | Bernard-Soulier syndrome |
| 231550 | Achalasia-addisonianism-alacrimia syndrome |
| 231670 | Glutaricaciduria, type I |
| 231675 | Glutaricaciduria, type IIC |
| 231680 | Glutaricaciduria, type IIA |
| 231950 | Glutathioninuria |
| 232000 | Propionicacidemia, type I or pccA type |
| 232050 | Propionicacidemia, type II or pccB type |
| 232200 | Glycogen storage disease I |
| 232300 | Glycogen storage disease II |
| 232400 | Glycogen storage disease IIIa |
| 232400 | Glycogen storage disease IIIb |
| 232600 | McArdle disease |
| 232700 | Glycogen storage disease VI |
| 232800 | Glycogen storage disease VII |
| 233100 | [Renal glucosuria] |
| 233690 | Chronic granulomatous disease, autosomal, due to deficiency of |
| | CYBA |
| 233700 | Chronic granulomatous disease due to deficiency of NCF-1 |
| 233710 | Chronic granulomatous disease due to deficiency of NCF-2 |
| 234000 | Factor XII deficiency |
| 234200 | Neurodegeneration with brain iron accumulation |
| 235200 | Hemochromatosis |
| 235800 | [Histidinemia] |
| 236100 | Holoprosencephaly-1 |
| 236200 | Homocystinuria, B6-responsive and nonresponsive types |
| 236250 | Homocystinuria due to MTHFR deficiency |
| 236730 | Urofacial syndrome |
| 237300 | Carbamoylphosphate synthetase I deficiency |
| 238300 | Hyperglycinemia, nonketotic, type I |
| 238310 | Hyperglycinemia, nonketotic, type II |
| 238600 | Chylomicronemia syndrome, familial |
| 238600 | Combined hyperlipemia, familial |
| 238600 | Hyperlipoproteinemia I |
| 238600 | Lipoprotein lipase deficiency |
| 238970 | HHH syndrome |
| 239100 | Van Buchem disease |
| 239500 | Hyperprolinemia, type I |
| 240300 | Autoimmune polyglandular disease, type I |
| 240400 | Scurvy |
| 243500 | Isovalericacidemia |
| 245000 | Papillon-Lefevre syndrome |
| 245050 | Ketoacidosis due to SCOT deficiency |
| 245200 | Krabbe disease |
| 245349 | Lacticacidemia due to PDX1 deficiency |
| 245900 | Norum disease |
| 245900 | Fish-eye disease |
| 246450 | HMG-CoA lyase deficiency |
| 246530 | Leukotriene C4 synthase deficiency |
| 246900 | Lipoamide dehydrogenase deficiency |
| 247200 | Miller-Dieker lissencephaly syndrome |
| 247640 | Leukemia, acute lymphoblastic |
| 248510 | Mannosidosis, beta- |
| 248600 | Maple syrup urine disease, type Ia |
| 248610 | Maple syrup urine disease, type II |
| 248611 | Maple syrup urine disease, type Ib |
| 249000 | Meckel syndrome |
| 249270 | Thiamine-responsive megaloblastic anemia |
| 250100 | Metachromatic leukodystrophy |
| 250250 | Cartilage-hair hypoplasia |
| 250790 | Methemoglobinemia due to cytochrome b5 deficiency |
| 250800 | Methemoglobinemia, type I |
| 250800 | Methemoglobinemia, type II |
| 250850 | Hypermethioninemia, persistent, autosomal dominant, due to |
| | methionine adenosyltransferase I/III deficiency |
| 251000 | Methylmalonicaciduria, mutase deficiency type |
| 251170 | Mevalonicaciduria |
| 252500 | Mucolipidosis II |
| 252500 | Mucolipidosis III |
| 252800 | Mucopolysaccharidosis Ih |
| 252800 | Mucopolysaccharidosis Ih/s |
| 252800 | Mucopolysaccharidosis Is |
| 252900 | Sanfilippo syndrome, type A |
| 252920 | Sanfilippo syndrome, type B |
| 252940 | Sanfilippo syndrome, type D |
| 253000 | Mucopolysaccharidosis IVA |
| 253200 | Maroteaux-Lamy syndrome, several forms |
| 253250 | Mulibrey nanism |
| 253260 | Biotinidase deficiency |
| 253601 | Miyoshi myopathy, 254130 |
| 253601 | Muscular dystrophy, limb-girdle, type 2B |
| 253700 | Muscular dystrophy, limb-girdle, type 2C |
| 253800 | Walker-Warburg syndrome, 236670 |
| 253800 | Fukuyama type congenital muscular dystrophy |
| 254210 | Myasthenia gravis, familial infantile |
| 254770 | Epilepsy, juvenile myoclonic |
| 254780 | Myoclonus epilepsy, Lafora type |
| 255800 | Schwartz-Jampel syndrome |
| 256030 | Nemaline myopamy-2 |
| 256100 | Nephronophthisis, juvenile |
| 256540 | Galactosialidosis |
| 256550 | Sialidosis, type I |
| 256550 | Sialidosis, type II |
| 256700 | Neuroblastoma |
| 256731 | Ceroid-lipofuscinosis, neuronal-5, variant late infantile |
| 256850 | Giant axonal neuropathy-1 |
| 257200 | Niemann-Pick disease, type A |
| 257200 | Niemann-Pick disease, type B |
| 257220 | Niemann-Pick disease, type C |
| 257220 | Niemann-Pick disease, type D, 257250 |
| 258501 | 3-methylglutaconicaciduria, type III |
| 258870 | Gyrate atrophy of choroid and retina with ornithinemia, B6 |
| | responsive or unresponsive |
| 258900 | Oroticaciduria |
| 259700 | Osteopetrosis, recessive |
| 259730 | Renal tubular acidosis-osteopetrosis syndrome |
| 259770 | Osteoporosis-pseudoglioma syndrome |
| 259900 | Hyperoxaluria, primary, type 1 |
| 261100 | Vitamin B12, selective intestinal malabsorption of |
| 261510 | Pseudo-Zellweger syndrome |
| 261515 | Peroxisomal bifunctional enzyme deficiency |
| 261600 | Phenylketonuria |
| 261600 | [Hyperphenylalaninemia, mild] |
| 261640 | Phenylketonuria due to PTS deficiency |
| 261670 | Myopathy due to phosphoglycerate mutase deficiency |
| 261680 | Hypoglycemia due to PCK1 deficiency |
| 262000 | Bjornstad syndrome |
| 262850 | Plasmin inhibitor deficiency |
| 263200 | Polycystic kidney disease, autosomal recessive |
| 263700 | Porphyria, congenital erythropoietic |
| 264300 | Pseudohermaphroditism, male, with gynecomastia |
| 264470 | Adrenoleukodystrophy, pseudoneonatal |
| 264600 | Pseudovaginal perineoscrotal hypospadias |
| 264700 | Pseudo-vitamin D dependency rickets 1 |
| 266100 | Pyridoxine dependency with seizures |
| 266200 | Anemia, hemolytic, due to PK deficiency |
| 266300 | [Hair color, red] |
| 266600 | Inflammatory bowel disease-1 |
| 267750 | Knobloch syndrome |
| 268800 | Sandhoff disease, infantile, juvenile, and adult forms |
| 268800 | Spinal muscular atrophy, HEXB-related |
| 268900 | [Sarcosinemia] |
| 269920 | Salla disease |
| 270200 | Sjogren-Larsson syndrome |
| 270400 | Smith-Lemli-Opitz syndrome |
| 270800 | Spastic paraplegia-5A |
| 271245 | Spinocerebellar ataxia-8, infantile, with sensory neuropathy |
| 271900 | Canavan disease |
| 272750 | GM2-gangliosidosis, AB variant |
| 272800 | Tay-Sachs disease |
| 272800 | [Hex A pseudodeficiency] |
| 272800 | GM2-gangliosidosis, juvenile, adult |
| 273300 | Male germ cell tumor |
| 273800 | Thrombocytopenia, neonatal alloimmune |
| 273800 | Glanzmann thrombasthenia, type A |
| 274180 | Thromboxane synthase deficiency |
| 274270 | Thymine-uraciluria |
| 274270 | Fluorouracil toxicity, sensitivity to |
| 274500 | Thyroid iodine peroxidase deficiency |
| 274500 | Goiter, congenital |
| 274500 | Hypothyroidism, congenital |
| 274600 | Pendred syndrome |
| 274600 | Deafness, autosomal recessive 4 |
| 275200 | Thyroid adenoma, hyperfunctioning |
| 275200 | Graves disease, 275000 |
| 275200 | Hyperthroidism, congenital |
| 275200 | Hypothyroidism, nongoitrous, due to TSH resistance |
| 275350 | Transcobalamin II deficiency |
| 276000 | Pancreatitis, hereditary, 167800 |
| 276000 | Trypsinogen deficiency |
| 276600 | Tyrosinemia, type II |
| 276700 | Tyrosinemia, type I |
| 276710 | Tyrosinemia, type III |
| 276901 | Usher syndrome, type 2 |
| 276902 | Usher syndrome, type 3 |
| 276904 | Usher syndrome, type 1C |
| 277700 | Werner syndrome |
| 277730 | Wernicke-Korsakoff syndrome, susceptibility to |
| 277900 | Wilson disease |
| 278000 | Wolman disease |
| 278000 | Cholesteryl ester storage disease |
| 278250 | Wrinkly skin syndrome |
| 278300 | Xanthinuria, type I |
| 278700 | Xeroderma pigmentosum, group A |
| 278720 | Xeroderma pigmentosum, group C |
| 278760 | Xeroderma pigmentosum, group F |
| 300000 | Opitz G syndrome, type I |
| 300011 | Menkes disease, 309400 |
| 300011 | Occipital horn syndrome, 304150 |
| 300011 | Cutis laxa, neonatal |
| 300029 | Retinitis pigmentosa-15 |
| 300031 | Mental retardation, X-linked, FRAXF type |
| 300032 | Alpha-thalassemia/mental retardation syndrome, type 2, 301040 |
| 300032 | Juberg-Marsidi syndrome, 309590 |
| 300037 | Simpson dysmorphia syndrome, 312870 |
| 300044 | Wernicke-Korsakoff syndrome, susceptibility to |
| 300046 | Mental retardation, X-linked 23, nonspecific |
| 300047 | Mental retardation, X-linked 20 |
| 300048 | Intestinal pseudoobstruction, neuronal, X-linked |
| 300049 | Nodular heterotopia, bilateral periventricular |
| 300049 | BPNH/MR syndrome |
| 300055 | Mental retardation with psychosis, pyramidal signs, and |
| | macroorchidism |
| 300066 | Deafness, X-linked 6, sensorineural |
| 300067 | Subcortical laminar heterotopia, X-linked dominant |
| 300067 | Lissencephaly, X-linked |
| 300071 | Night blindness, congenital stationary, type 2 |
| 300075 | Coffin-Lowry syndrome, 303600 |
| 300076 | Wood neuroimmunologic syndrome |
| 300077 | Mental retardation, X-linked 29 |
| 300088 | Epilepsy, female restricted, with mental retardation |
| 300100 | Adrenoleukodystrophy |
| 300100 | Adrenomyeloneuropathy |
| 300104 | Mental retardation, X-linked nonspecific, 309541 |
| 300110 | Night blindness, congenital stationary, X-linked incomplete, 300071 |
| 300121 | Subcortical laminal heteropia, X-linked, 300067 |
| 300121 | Lissencephaly, X-linked, 300067 |
| 300123 | Mental retardation with isolated growth hormone deficiency |
| 300126 | Dyskeratosis congenita-1, 305000 |
| 300127 | Mental retardation, X-linked, 60 |
| 300300 | XLA and isolated growth hormone deficiency, 307200 |
| 300300 | Agammaglobulinemia, type 1, X-linked |
| 300310 | Agammaglobulinemia, type 2, X-linked |
| 300600 | Ocular albinism, Forsius-Eriksson type |
| 301000 | Thrombocytopenia, X-linked, 313900 |
| 301000 | Wiskott-Aldrich syndrome |
| 301200 | Amelogenesis imperfecta |
| 301201 | Amelogenesis imperfecta-3, hypoplastic type |
| 301220 | Partington syndrome II |
| 301300 | Anemia, sideroblastic/hypochromic |
| 301310 | Anemia, sideroblastic, with spinocerebellar ataxia |
| 301500 | Fabry disease |
| 301590 | Anophthahnos-1 |
| 301830 | Arthrogryposis, X-linked (spinal muscular atrophy, infantile, X- |
| | linked) |
| 301835 | Arts syndrome |
| 301845 | Bazex syndrome |
| 301900 | Borjeson-Forssman-Lehmann syndrome |
| 302060 | Noncompaction of left ventricular myocardium, isolated |
| 302060 | Barth syndrome |
| 302060 | Cardiomyopathy, X-linked dilated, 300069 |
| 302060 | Endocardial fibroelastosis-2 |
| 302350 | Nance-Horan syndrome |
| 302801 | Charcot-Marie-Tooth neuropathy, X-linked-2, recessive |
| 302960 | Chondrodysplasia punctata, X-linked dominant |
| 303400 | Cleft palate, X-linked |
| 303630 | Alport syndrome, 301050 |
| 303630 | Leiomyomatosis-nephropathy syndrome, 308940 |
| 303631 | Leiomyomatosis, diffuse, with Alport syndrome |
| 303700 | Colorblindness, blue monochromatic |
| 303800 | Colorblindness, deutan |
| 303900 | Colorblindness, protan |
| 304040 | Charcot-Marie-Tooth neuropathy, X-linked-1, dominant, 302800 |
| 304050 | Aicardi syndrome |
| 304110 | Craniofrontonasal dysplasia |
| 304340 | Mental retardation, X-linked, syndromic-5, with Dandy-Walker |
| | malformation, basal ganglia disease, and seizures |
| 304500 | Deafness, X-linked 2, perceptive congenital |
| 304700 | Mohr-Tranebjaerg syndrome |
| 304700 | Deafness, X-linked 1, progressive |
| 304700 | Jensen syndrome, 311150 |
| 304800 | Diabetes insipidus, nephrogenic |
| 305100 | Anhidrotic ectodermal dysplasia |
| 305400 | Aarskog-Scott syndrome |
| 305435 | Heterocellular hereditary persistence of fetal hemoglobin, Swiss type |
| 305450 | FG syndrome |
| 305600 | Focal dermal hypoplasia |
| 305900 | Favism |
| 305900 | G6PD deficiency |
| 305900 | Hemolytic anemia due to G6PD deficiency |
| 306000 | Glycogenosis, X-linked hepatic, type I |
| 306000 | Glycogenosis, X-linked hepatic, type II |
| 306100 | Gonadal dysgenesis, XY female type |
| 306250 | Leukemia, acute myeloid, M2 type |
| 306400 | Chronic granulomatous disease, X-linked |
| 306700 | Hemophilia A |
| 306900 | Hemophilia B |
| 306995 | [Homosexuality, male] |
| 307150 | Hypertrichosis, congenital generalized |
| 307700 | Hypoparathyroidism, X-linked |
| 307800 | Hypophosphatemia, hereditary |
| 308000 | HPRT-related gout |
| 308000 | Lesch-Nyhan syndrome |
| 308100 | Placental steroid sulfatase deficiency |
| 308100 | Ichthyosis, X-linked |
| 308230 | Immunodeficiency, X-linked, with hyper-IgM |
| 308240 | Lymphoproliferative syndrome, X-linked |
| 308300 | Incontinentia pigmenti, sporadic type |
| 308310 | Incontinentia pigmenti, familial |
| 308380 | Severe combined immunodeficiency, X-linked, 300400 |
| 308380 | Combined immunodeficiency, X-linked, moderate, 312863 |
| 308800 | Keratosis follicularis spinulosa decalvans |
| 308840 | Spastic paraplegia, 312900 |
| 308840 | Hydrocephalus due to aqueductal stenosis, 307000 |
| 308840 | MASA syndrome, 303350 |
| 309000 | Lowe syndrome |
| 309200 | Manic-depressive illness, X-linked |
| 309300 | Megalocornea, X-linked |
| 309470 | Mental retardation, X-linked, syndromic-3, with spastic diplegia |
| 309500 | Renpenning syndrome-1 |
| 309510 | Mental retardation, X-linked, syndromic-1, with dystonic |
| | movements, ataxia, and seizures |
| 309530 | Mental retardation, X-linked 1, non-dysmorphic |
| 309548 | Mental retardation, X-linked, FRAXE type |
| 309555 | Gustavson syndrome |
| 309585 | Mental retardation, X-linked, syndromic-6, with gynecomastia and |
| | obesity |
| 309605 | Mental retardation, X-linked, syndromic-4, with congenital |
| | contractures and low fingertip arches |
| 309610 | Mental retardation, X-linked, syndromic-2, with dysmorphism and |
| | cerebral atrophy |
| 309620 | Mental retardation-skeletal dysplasia |
| 309801 | Microphthalmia with linear skin defects |
| 309801 | Microphthalmia, dermal aplasia, and sclerocornea |
| 309850 | Brunner syndrome |
| 309900 | Mucopolysaccharidosis II |
| 310300 | Emery-Dreifuss muscular dystrophy |
| 310400 | Myotubular myopathy, X-linked |
| 310460 | Myopia-1 |
| 310460 | Bornholm eye disease |
| 310490 | Cowchock syndrome |
| 311050 | Optic atrophy, X-linked |
| 311200 | Oral-facial-digital syndrome 1 |
| 311250 | Ornithine transcarbamylase deficiency |
| 311300 | Otopalatodigital syndrome, type I |
| 311510 | Waisman parkinsonism-mental retardation syndrome |
| 311770 | Paroxysmal nocturnal hemoglobinuria |
| 311800 | Myoglobinuria/hemolysis due to PGK deficiency |
| 311800 | Hemolytic anemia due to PGK deficiency |
| 311850 | Phosphoribosyl pyrophosphate synthetase-related gout |
| 311870 | Muscle glycogenosis |
| 312000 | Panhypopituitarism, X-linked |
| 312040 | N syndrome, 310465 |
| 312060 | Properdin deficiency, X-linked |
| 312080 | Pelizaeus-Merzbacher disease |
| 312080 | Spastic paraplegia-2, 312920 |
| 312170 | Pyruvate dehydrogenase deficiency |
| 312390 | Renal cell carcinoma, papillary, 2 |
| 312610 | Retinitis pigmentosa-3 |
| 312700 | Retinoschisis |
| 312760 | Turner syndrome |
| 312820 | Sarcoma, synovial |
| 312865 | Short stature, idiopathic familial |
| 312865 | Langer mesomelic dysplasia, 249700 |
| 312865 | Leri-Weill dyschondrosteosis, 127300 |
| 313350 | Split hand/foot malformation, type 2 |
| 313400 | Spondyloepiphyseal dysplasia tarda |
| 313700 | Permeal hypospadias |
| 313700 | Prostate cancer |
| 313700 | Spinal and bulbar muscular atrophy of Kennedy, 313200 |
| 313700 | Breast cancer, male, with Reifenstein syndrome |
| 313700 | Androgen insensitivity, several forms |
| 313850 | Thoracoabdominal syndrome |
| 314250 | Dystonia-3, torsion, with parkinsonism, Filipino type |
| 314300 | Goeminne TKCR syndrome |
| 314400 | Cardiac valvular dysplasia-1 |
| 314580 | Wieacker-Wolff syndrome |
| 314850 | McLeod phenotype |
| 600020 | Prostate cancer, 176807 |
| 600040 | Colorectal cancer |
| 600044 | Thrombocythemia, essential, 187950 |
| 600045 | Xeroderma pigmentosum, group E, subtype 2 |
| 600048 | Breast cancer-3 |
| 600049 | Myelodysplasia syndrome-1 |
| 600059 | Retinitis pigmentosa-13 |
| 600065 | Leukocyte adhesion deficiency, 116920 |
| 600079 | Colon cancer |
| 600095 | Split hand/foot malformation, type 3 |
| 600101 | Deafness, autosomal dominant 2 |
| 600105 | Retinitis pigmentosa-12, autosomal recessive |
| 600119 | Muscular dystrophy, Duchenne-like, type 2 |
| 600119 | Adhalinopathy, primary |
| 600134 | Melanoma |
| 600138 | Retinitis pigmentosa-11 |
| 600140 | Rubenstein-Taybi syndrome, 180849 |
| 600143 | Epilepsy, progressive, with mental retardation |
| 600151 | Bardet-Biedl syndrome 3 |
| 600160 | Melanoma, 155601 |
| 600163 | Long QT syndrome-3 |
| 600173 | SCID, autosomal recessive, T-negative/B-positive type |
| 600175 | Spinal muscular atrophy, congenital nonprogressive, of lower limbs |
| 600179 | Leber congenital amaurosis, type I, 204000 |
| 600184 | Carnitine acetyltransferase deficiency |
| 600185 | Pancreatic cancer |
| 600185 | Breast cancer 2, early onset |
| 600192 | Sarcoma, synovial |
| 600194 | Ichthyosis bullosa of Siemens, 146800 |
| 600202 | Dyslexia, specific, 2 |
| 600211 | Cleidocranial dysplasia, 119600 |
| 600221 | Venous malformations, multiple cutaneous and mucosal, 600195 |
| 600223 | Spinocerebellar ataxia-4 |
| 600224 | Spinocerebellar ataxia-5 |
| 600225 | Phenylketonuria, atypical, due to GCH1 deficiency, 233910 |
| 600225 | Dystonia, DOPA-responsive, 128230 |
| 600228 | Pseudohypoaldosteronism, type I, 264350 |
| 600231 | Palmoplantar keratoderma, Bothnia type |
| 600234 | HMG-CoA synthease-2 deficiency |
| 600243 | Temperature-sensitive apoptosis |
| 600258 | Colorectal cancer, hereditary nonpolyposis, type 3 |
| 600259 | Turcot syndrome with glioblastoma, 276300 |
| 600259 | Colorectal cancer, hereditary nonpolyposis, type 4 |
| 600261 | Ehlers-Danlos-like syndrome |
| 600266 | Resistance/susceptibility to TB, etc. |
| 600273 | Polycystic kidney disease, infantile severe, with tuberous sclerosis |
| 600276 | Cerebral arteriopathy with subcortical infarcts and |
| | leukoencephalopathy, 125310 |
| 600281 | Non-insulin-dependent diabetes mellitus, 125853 |
| 600281 | MODY, type 1, 125850 |
| 600309 | Atrioventricular canal defect-1 |
| 600310 | Pseudoachondroplasia, 177170 |
| 600310 | Epiphyseal dysplasia, multiple 1, 132400 |
| 600318 | Diabetes mellitus, insulin-dependent, 3 |
| 600319 | Diabetes mellitus, insulin-dependent, 4 |
| 600320 | Insulin-dependent diabetes mellitus-5 |
| 600321 | Diabetes mellitus, insulin-dependent, 7 |
| 600332 | Rippling muscle disease-1 |
| 600334 | Tibial muscular dystrophy |
| 600354 | Spinal muscular atrophy-1, 253300 |
| 600354 | Spinal muscular atrophy-2, 253550 |
| 600354 | Spinal muscular atrophy-3, 253400 |
| 600359 | Bartter syndrome, type 2 |
| 600364 | Cone dystrophy-3, 602093 |
| 600374 | Bardet-Biedl syndrome 4 |
| 600414 | Adrenoleukodystrophy, neonatal, 202370 |
| 600415 | Ataxia with isolated vitamin E deficiency, 277460 |
| 600429 | [Ii blood group, 110800] |
| 600430 | Brachydactyly-mental retardation syndrome |
| 600467 | Malignant hyperthermia susceptibility 4 |
| 600509 | Persistent hyperinsulinemic hypoglycemia of infancy, 256450 |
| 600510 | Pigment dispersion syndrome |
| 600511 | Schizophrenia-3 |
| 600512 | Epilepsy, partial |
| 600525 | Trichodontoosseous syndrome, 190320 |
| 600528 | CPT deficiency, hepatic, type I, 255120 |
| 600536 | Myopathy, congenital |
| 600542 | Chondrosarcoma, extraskeletal myxoid |
| 600584 | Atrial septal defect with atrioventricular conduction defects, 108900 |
| 600593 | Craniosynostosis, Adelaide type |
| 600617 | Lipoid adrenal hyperplasia, 201710 |
| 600618 | Leukemia, acute lymphoblastic |
| 600623 | Prostate cancer, 176807 |
| 600624 | Cone-rod retinal dystrophy-1 |
| 600631 | Enuresis, nocturnal, 1 |
| 600635 | Goiter, familial, due to TTF-1 defect |
| 600650 | Myopathy due to CPT II deficiency, 255110 |
| 600650 | CPT deficiency, hepatic, type II, 600649 |
| 600652 | Deafness, autosomal dominant 4 |
| 600678 | Cancer susceptibility |
| 600698 | Salivary adenoma |
| 600698 | Uterine leiomyoma |
| 600698 | Lipoma |
| 600698 | Lipomatosis, mutiple, 151900 |
| 600700 | Lipoma |
| 600701 | Lipoma |
| 600722 | Ceroid lipofuscinosis, neuronal, variant juvenile type, with granular |
| | osmiophilic deposits |
| 600722 | Ceroid lipofuscinosis, neuronal-1, infantile, 256730 |
| 600725 | Holoprosencephaly-3, 142945 |
| 600757 | Orofacial cleft-3 |
| 600759 | Alzheimer disease-4 |
| 600760 | Pseudohypoaldosteronism, type I, 264350 |
| 600760 | Liddle syndrome, 177200 |
| 600761 | Pseudohypoaldosteronism, type I, 264350 |
| 600761 | Liddle syndrome, 177200 |
| 600792 | Deafness, autosomal recessive 5 |
| 600805 | Epidermolysis bullosa, junctional, Herlitz type |
| 600807 | Bronchial asthma |
| 600808 | Enuresis, nocturnal, 2 |
| 600811 | Xeroderma pigmentosum, group E, DDB-negative subtype, 278740 |
| 600837 | Hirschsprung disease, 142623 |
| 600839 | Bartter syndrome, 241200 |
| 600850 | Schizophrenia disorder-4 |
| 600852 | Retinitis pigmentosa-17 |
| 600856 | Beckwith-Wiedemann syndrome, 130650 |
| 600881 | Cataract, congenital, zonular, with sutural opacities |
| 600882 | Charcot-Marie-Tooth neuropathy-2B |
| 600883 | Diabetes mellitus, insulin-dependent, 8 |
| 600884 | Cardiomyopathy, familial dilated 1B |
| 600887 | Endometrial carcinoma |
| 600890 | Mitochondrial trifunctional protein deficiency |
| 600890 | LCHAD deficiency |
| 600897 | Cataract, zonular pulverulent-1, 116200 |
| 600899 | Severe combined immunodeficiency, type I, 202500 |
| 600900 | Muscular dystrophy, limb-girdle, type 2E |
| 600918 | Cystinuria, type III |
| 600919 | Long QT syndrome-4 with sinus bradycardia |
| 600923 | Porphyria variegata, 176200 |
| 600937 | Persistent hyperinsulinemic hypoglycemia of infancy, 256450 |
| 600946 | Short stature, autosomal dominant, with normal serum growth |
| | hormone binding protein |
| 600946 | Short stature, idiopathic |
| 600946 | Laron dwarfism, 262500 |
| 600956 | Persistent Mullerian duct syndrome, type II, 261550 |
| 600957 | Persistent Mullerian duct syndrome, type I, 261550 |
| 600958 | Cardiomyopathy, familial hypertrophic, 4, 115197 |
| 600964 | Refsum disease, adult, with increased pipecolicacidemia |
| 600965 | Deafness, autosomal dominant 6 |
| 600968 | Gitelman syndrome, 263800 |
| 600971 | Deafness, autosomal recessive 6 |
| 600974 | Deafness, autosomal recessive 7 |
| 600975 | Glaucoma 3, primary infantile, B |
| 600977 | Cone dystrophy, progressive |
| 600983 | Pseudohypoaldosteronism type I, autosomal dominant, 177735 |
| 600994 | Deafness, autosomal dominant 5 |
| 600995 | Nephrotic syndrome, idiopathic, steroid-resistant |
| 600996 | Arrhythmogenic right ventricular dysplasia-2 |
| 600998 | Bleeding diathesis due to GNAQ deficiency |
| 601002 | 5-oxoprolinuria, 266130 |
| 601002 | Hemolytic anemia due to glutathione synthetase deficiency, 231900 |
| 601011 | Spinocerebellar ataxia-6, 183086 |
| 601011 | Cerebellar ataxia, pure |
| 601011 | Episodic ataxia, type 2, 108500 |
| 601011 | Hemiplegic migraine, familial, 141500 |
| 601071 | Deafness, autosomal recessive 9 |
| 601072 | Deafness, autosomal recessive 8 |
| 601090 | Iridogoniodysgenesis, 601631 |
| 601097 | Neuropathy, recurrent, with pressure palsies, 162500 |
| 601097 | Charcot-Marie-Tooth neuropathy-1A, 118220 |
| 601097 | Dejerine-Sottas disease, PMP22 related, 145900 |
| 601105 | Pycnodysostosis, 265800 |
| 601107 | Dubin-Johnson syndrome, 237500 |
| 601130 | Tolbutamide poor metabolizer |
| 601145 | Epilepsy, progressive myoclonic 1, 254800 |
| 601146 | Brachydactyly, type C, 113100 |
| 601146 | Acromesomelic dysplasia, Hunter-Thompson type, 201250 |
| 601146 | Chondrodysplasia, Grebe type, 200700 |
| 601154 | Cardiomyopathy, dilated, IE |
| 601199 | Neonatal hyperparathyroidism, 239200 |
| 601199 | Hypocalcemia, autosomal dominant, 601198 |
| 601199 | Hypocalciuric hypercalcemia, type 1, 145980 |
| 601202 | Cataract, anterior polar-2 |
| 601208 | Insulin-dependent diabetes mellitus-11 |
| 601226 | Progressive external ophthalmoplegia, type 2 |
| 601238 | Cerebellar ataxia, Cayman type |
| 601253 | Muscular dystrophy, limb-girdle, type 1C |
| 601267 | HIV infection, susceptibility/resistence to |
| 601277 | Ichthyosis, lamellar, type 2 |
| 601284 | Hereditary hemorrhagic telangiectasia-2, 600376 |
| 601295 | Bile acid malabsorption, primary |
| 601309 | Basal cell carcinoma, sporadic |
| 601309 | Basal cell nevus syndrome, 109400 |
| 601313 | Polycystic kidney disease, adult type I, 173900 |
| 601316 | Deafness, autosomal dominant 10 |
| 601318 | Diabetes mellitus, insulin-dependent, 13 |
| 601362 | DiGeorge syndrome/velocardiofacial syndrome complex-2 |
| 601363 | Wilms tumor, type 4 |
| 601369 | Deafness, autosomal dominant 9 |
| 601373 | HIV infection, susceptibility/resistance to |
| 601382 | Charcot-Marie-Tooth neuropathy-4B |
| 601385 | Prostate cancer |
| 601386 | Deafness, autosomal recessive 12 |
| 601387 | Breast cancer |
| 601399 | Platelet disorder, familial, with associated myeloid malignancy |
| 601406 | B-cell non-Hodgkin lymphoma, high-grade |
| 601410 | Diabetes mellitus, transient neonatal |
| 601411 | Muscular dystrophy, limb-girdle, type 2F, 601287 |
| 601412 | Deafness, autosomal dominant 7 |
| 601414 | Retinitis pigmentosa-18 |
| 601458 | Inflammatory bowel disease-2 |
| 601471 | Moebius syndrome-2 |
| 601472 | Charcot-Marie-Tooth neuropathy-2D |
| 601493 | Cardiomyopathy, dilated 1C |
| 601494 | Cardiomyopathy, familial, dilated-2 |
| 601498 | Peroxisomal biogenesis disorder, complementation group 4 |
| 601499 | Rieger syndrome, type 2 |
| 601517 | Spinocerebellar ataxia-2, 183090 |
| 601518 | Prostate cancer, hereditary, 1, 176807 |
| 601542 | Rieger syndrome, type 1, 180500 |
| 601545 | Lissencephaly-1 |
| 601556 | Spinocerebellar ataxia-1, 164400 |
| 601567 | Combined factor V and VIII deficiency, 227300 |
| 601596 | Charcot-Marie-Tooth neuropathy, demyelinating |
| 601604 | Mycobacterial and salmonella infections, susceptibility to |
| 601606 | Trichoepithelioma, multiple familial |
| 601607 | Rhabdoid rumors |
| 601620 | Holt-Oram syndrome, 142900 |
| 601621 | Ulnar-mammary syndrome, 181450 |
| 601622 | Saethre-Chotzen syndrome, 101400 |
| 601623 | Angelman syndrome |
| 601649 | Blepharophimosis, epicanthus inversus, and ptosis, type 2 |
| 601650 | Paraganglioma, familial nonchromaffin, 2 |
| 601652 | Glaucoma 1A, primary open angle, juvenile-onset, 137750 |
| 601653 | Branchiootic syndrome |
| 601653 | Branchiootorenal syndrome, 113650 |
| 601666 | Insulin-dependent diabetes mellitus-15 |
| 601669 | Hirschsprung disease, one form |
| 601676 | Acute insulin response |
| 601680 | Distal arthrogryposis, type 2B |
| 601682 | Glaucoma 1C, primary open angle |
| 601687 | Meesmann corneal dystrophy, 122100 |
| 601690 | Platelet-activating factor acetylhydrolase deficiency |
| 601691 | Retinitis pigmentosa-19, 601718 |
| 601691 | Stargardt disease-1, 248200 |
| 601691 | Cone-rod dystrophy 3 |
| 601691 | Fundus flavimaculatus with macular dystrophy, 248200 |
| 601692 | Reis-Bucklers corneal dystrophy |
| 601692 | Corneal dystrophy, Avellino type |
| 601692 | Corneal dystrophy, Groenouw type I, 121900 |
| 601692 | Corneal dystrophy, lattice type I, 122200 |
| 601718 | Retinitis pigmentosa-19 |
| 601728 | Bannayan-Zonana syndrome, 153480 |
| 601728 | Cowden disease, 158350 |
| 601728 | Endometrial carcinoma |
| 601728 | Lhermitte-Duclos syndrome |
| 601744 | Systemic lupus erythematosus, susceptibility to, 1 |
| 601757 | Rhizomelic chondrodysplasia punctata, type 1, 215100 |
| 601768 | Leukemia, acute myeloid |
| 601769 | Osteoporosis, involutional |
| 601769 | Rickets, vitamin D-resistant, 277440 |
| 601771 | Glaucoma 3A, primary infantile, 231300 |
| 601777 | Cone dystrophy, progressive |
| 601780 | Ceroid-lipofuscinosis, neuronal-6, variant late infantile |
| 601785 | Carbohydrate-deficient glycoprotein syndrome, type I, 212065 |
| 601800 | [Hair color, brown] |
| 601841 | Protein C inhibitor deficiency |
| 601843 | Hypothyroidism, congenital, 274400 |
| 601844 | Pseudohypoaldosteronism type II |
| 601846 | Muscular dystrophy with rimmed vacuoles |
| 601847 | Progressive intrahepatic cholestasis-2 |
| 601850 | Retinitis pigmentosa-deafness syndrome |
| 601863 | Bare lymphocyte syndrome, complementation group C |
| 601868 | Deafness, autosomal dominant 13 |
| 601884 | [High bone mass] |
| 601885 | Cataract, zonular pulverulent-2 |
| 601889 | Lymphoma, diffuse large cell |
| 601916 | Pancreatic cancer |
| 601928 | Monilethrix, 158000 |
| 601941 | Insulin-dependent diabetes mellitus-6 |
| 601954 | Muscular dystrophy, limb-girdle, type 2G |
| 601969 | Medulloblastoma, 155255 |
| 601969 | Glioblastoma multiforme, 137800 |
| 601975 | Ectodermal dysplasia/skin fragility syndrome |
| 601990 | Neuroblastoma |
| 602011 | Pancreatic endocrine tumors |
| 602014 | Hypomagnesemia with secondary hypocalcemia |
| 602023 | Bartter syndrome, type 3 |
| 602025 | Obesity/hyperinsulinism, susceptibility to |
| 602026 | Refsum disease, 266500 |
| 602028 | Multiple myeloma |
| 602066 | Convulsions, infantile and paroxysmal choreoathetosis |
| 602067 | Cardiomyopathy, dilated, 1F |
| 602078 | Fibrosis of extraocular muscles, congenital, 2 |
| 602080 | Paget disease of bone-2 |
| 602081 | Speech-language disorder-1 |
| 602082 | Corneal dystrophy, Thiel-Behnke type |
| 602084 | Endometrial carcinoma |
| 602085 | Postaxial polydactyly, type A2 |
| 602086 | Arrhythmogenic right ventricular dysplasia-3 |
| 602087 | Arrhythmogenic right ventricular dysplasia-4 |
| 602088 | Nephronophthisis, infantile |
| 602089 | Hemangioma, capillary, hereditary |
| 602091 | Marfan syndrome, atypical |
| 602092 | Deafness, autosomal recessive 18 |
| 602094 | Lipodystrophy, familial partial |
| 602096 | Alzheimer disease-5 |
| 602099 | Amytrophic lateral sclerosis-5 |
| 602116 | Glioma |
| 602117 | Prader-Willi syndrome |
| 602121 | Deafness, autosomal dominant nonsyndromic sensorineural, 1, |
| | 124900 |
| 602134 | Tremor, familial essential, 2 |
| 602136 | Refsum disease, infantile, 266510 |
| 602136 | Zellweger syndrome-1, 214100 |
| 602136 | Adrenoleukodystrophy, neonatal, 202370 |
| 602153 | Monilethrix, 158000 |
| 602216 | Peutz-Jeghers syndrome, 175200 |
| 602218 | Townes-Brocks syndrome, 107480 |
| 602221 | Stem-cell leukemia/lymphoma syndrome |
| 602225 | Cone-rod retinal dystrophy-2, 120970 |
| 602225 | Leber congenital amaurosis, type III |
| 602229 | Waardenburg-Shah syndrome, 277580 |
| 602235 | Epilepsy, benign, neonatal, type 1, 121200 |
| 602279 | Oculopharyngeal muscular dystorphy, 164300 |
| 602279 | Oculopharyngeal muscular dystrophy, autosomal recessive, 257950 |
| 602280 | Retinitis pigmentosa-14, 600132 |
| 602363 | Ellis-van Creveld-like syndrome |
| 602397 | Cholestasis, benign recurrent intrahepatic, 243300 |
| 602397 | Cholestasis, progressive familial intrahepatic-1, 211600 |
| 602403 | Alzheimer disease, susceptibility to |
| 602404 | Parkinson disease, type 3 |
| 602421 | Sweat chloride elevation without CF |
| 602421 | Congenital bilateral absence of vas deferens, 277180 |
| 602421 | Cystic fibrosis, 219700 |
| 602447 | Coronary artery disease, susceptibility to |
| 602460 | Deafness, autosomal dominant 15, 602459 |
| 602475 | Ossification of posterior longitudinal ligament of spine |
| 602476 | Febrile convulsions, familial, 1 |
| 602477 | Febrile convulsions, familial, 2 |
| 602491 | Hyperlipidemia, familial combined, 1 |
| 602522 | Bartter syndrome, infantile, with sensorineural deafness |
| 602544 | Parkinson disease, juvenile, type 2, 600116 |
| 602568 | Homocystinuria-megaloblastic anemia, cbl E type, 236270 |
| 602574 | Deafness, autosomal dominant 12, 601842 |
| 602574 | Deafness, autosomal dominant 8, 601543 |
| 602575 | Nail-patella syndrome with open-angle glaucoma, 137750 |
| 602575 | Nail-patella syndrome, 161200 |
| 602594 | Retinitis pigmentosa-22 |
| 602616 | Carbohydrate-deficient glycoprotein syndrome, type II, 212066 |
| 602629 | Dystonia-6, torsion |
| 602631 | Rhabdomyosarcoma, 268210 |
| 602631 | Breast Cancer |
| 602639 | Hypodontia, autosomal recessive |
| 602666 | Deafness, autosomal recessive 3, 600316 |
| 602667 | Nijmegen breakage syndrome, 251260 |
| 602669 | Anterior segment mesenchymal dysgenesis and cataract, 107250 |
| 602669 | Cataract, congenital |
| 602716 | Nephrosis-1, congenital, Finnish type, 256300 |
| 602759 | Prostate cancer, hereditary, 2, 176807 |
| 602771 | Muscular dystrophy, congenital, with early spine rigidity |
| 602772 | Retinitis pitmentosa-24 |
| 602782 | Faisalabad histiocytosis |
| 602783 | Spastic paraplegia-7 |

[0084] Polynucleotide and Polypeptide Variants

[0085] The present invention is also directed to variants of the colon or colon cancer associated polynucleotide sequence disclosed in SEQ ID NO:X or the complementary strand thereto, nucleotide sequences encoding the polypeptide of SEQ ID NO:Y, the nucleotide sequence of SEQ ID NO:X encoding the polypeptide sequence as defined in column 7 of Table 1A, nucleotide sequences encoding the polypeptide as defined in column 7 of Table 1A, the nucleotide sequence as defined in columns 8 and 9 of Table 2, nucleotide sequences encoding the polypeptide encoded by the nucleotide sequence as defined in columns 8 and 9 of Table 2, the cDNA sequence contained in Clone ID NO:Z, and/or nucleotide sequences encoding a polypeptide encoded by the cDNA sequence contained in Clone ID NO:Z.

[0086] The present invention also encompasses variants of the polypeptide sequence disclosed in SEQ ID NO:Y, a polypeptide sequence as defined in column 7 of Table 1A, a polypeptide sequence encoded by the polynucleotide sequence in SEQ ID NO:X, a polypeptide sequence encoded by the nucleotide sequence as defined in columns 8 and 9 of Table 2, a polypeptide sequence encoded by the complement of the polynucleotide sequence in SEQ ID NO:X, and/or a polypeptide sequence encoded by the cDNA sequence contained in Clone ID NO:Z.

[0087] “Variant” refers to a polynucleotide or polypeptide differing from the polynucleotide or polypeptide of the present invention, but retaining essential properties thereof. Generally, variants are overall closely similar, and, in many regions, identical to the polynucleotide or polypeptide of the present invention.

[0088] Thus, one aspect of the invention provides an isolated nucleic acid molecule comprising, or alternatively consisting of, a polynucleotide having a nucleotide sequence selected from the group consisting of: (a) a nucleotide sequence described in SEQ ID NO:X or contained in the cDNA sequence of Clone ID NO:Z; (b) a nucleotide sequence in SEQ ID NO:X or the cDNA in Clone ID NO:Z which encodes a mature colon or colon cancer associated polypeptide; (c) a nucleotide sequence in SEQ ID NO:X or the cDNA sequence of Clone ID NO:Z, which encodes a biologically active fragment of a colon or colon cancer associated polypeptide; (d) a nucleotide sequence in SEQ ID NO:X or the cDNA sequence of Clone ID NO:Z, which encodes an antigenic fragment of a colon or colon cancer associated polypeptide; (e) a nucleotide sequence encoding a colon or colon cancer associated polypeptide having the complete amino acid sequence of SEQ ID NO:Y or the complete amino acid sequence encoded by the cDNA in Clone ID NO:Z; (f) a nucleotide sequence encoding a mature colon or colon cancer associated polypeptide of the amino acid sequence of SEQ ID NO:Y or the amino acid sequence encoded by the cDNA in Clone ID NO:Z; (g) a nucleotide sequence encoding a biologically active fragment of a colon or colon cancer associated polypeptide having the complete amino acid sequence of SEQ ID NO:Y or the complete amino acid sequence encoded by the cDNA in Clone ID NO:Z; (h) a nucleotide sequence encoding an antigenic fragment of a colon or colon cancer associated polypeptide having the complete amino acid sequence of SEQ ID NO:Y or the complete amino acid sequence encoded by the cDNA in Clone ID NO:Z; and (i) a nucleotide sequence complementary to any of the nucleotide sequences in (a), (b), (c), (d), (e), (f), (g), or (h), above.

[0089] The present invention is also directed to nucleic acid molecules which comprise, or alternatively consist of, a nucleotide sequence which is at least 80%, 85%, 90%, 95%, 96%, 97%, 98%, 99% or 100%, identical to, for example, any of the nucleotide sequences in (a), (b), (c), (d), (e), (f), (g), (h), or (i) above, the nucleotide coding sequence in SEQ ID NO:X or the complementary strand thereto, the nucleotide coding sequence of the cDNA contained in Clone ID NO:Z or the complementary strand thereto, a nucleotide sequence encoding the polypeptide of SEQ ID NO:Y, a nucleotide sequence encoding a polypeptide sequence encoded by the nucleotide sequence in SEQ ID NO:X, a polypeptide sequence encoded by the complement of the polynucleotide sequence in SEQ ID NO:X, a nucleotide sequence encoding the polypeptide encoded by the cDNA contained in Clone ID NO:Z, the nucleotide coding sequence in SEQ ID NO:X as defined in columns 8 and 9 of Table 2 or the complementary strand thereto, a nucleotide sequence encoding the polypeptide encoded by the nucleotide sequence in SEQ ID NO:X as defined in columns 8 and 9 of Table 2 or the complementary strand thereto, the nucleotide sequence in SEQ ID NO:X encoding the polypeptide sequence as defined in column 7 of Table 1A or the complementary strand thereto, nucleotide sequences encoding a polypeptide as defined in column 7 of Table 1A or the complementary strand thereto, and/or polynucleotide fragments of any of these nucleic acid molecules (e.g., those fragments described herein). Polynucleotides which hybridize to the complement of these nucleic acid molecules under stringent hybridization conditions or alternatively, under lower stringency conditions, are also encompassed by the invention, as are polypeptides encoded by these polynucleotides and nucleic acids.

[0090] In a preferred embodiment, the invention encompasses nucleic acid molecules which comprise, or alternatively, consist of a polynucleotide which hybridizes under stringent hybridization conditions, or alternatively, under lower stringency conditions, to a polynucleotide in (a), (b), (c), (d), (e), (f), (g), (h), or (i) above, as are polypeptides encoded by these polynucleotides. In another preferred embodiment, polynucleotides which hybridize to the complement of these nucleic acid molecules under stringent hybridization conditions or alternatively, under lower stringency conditions, are also encompassed by the invention, as are polypeptides encoded by these polynucleotides.

[0091] In another embodiment, the invention provides a purified protein comprising, or alternatively consisting of, a polypeptide having an amino acid sequence selected from the group consisting of: (a) the complete amino acid sequence of SEQ ID NO:Y or the complete amino acid sequence encoded by the cDNA in Clone ID NO:Z; (b) the amino acid sequence of a mature colon or colon cancer associated polypeptide having the amino acid sequence of SEQ ID NO:Y or the amino acid sequence encoded by the cDNA in Clone ID NO:Z; (c) the amino acid sequence of a biologically active fragment of a colon or colon cancer associated polypeptide having the complete amino acid sequence of SEQ ID NO:Y or the complete amino acid sequence encoded by the cDNA in Clone ID NO:Z; and (d) the amino acid sequence of an antigenic fragment of a colon or colon cancer associated polypeptide having the complete amino acid sequence of SEQ ID NO:Y or the complete amino acid sequence encoded by the cDNA in Clone ID NO:Z.

[0092] The present invention is also directed to proteins which comprise, or alternatively consist of, an amino acid sequence which is at least 80%, 85%, 90%, 95%, 96%, 97%, 98%, 99% or 100%, identical to, for example, any of the amino acid sequences in (a), (b), (c), or (d), above, the amino acid sequence shown in SEQ ID NO:Y, the amino acid sequence encoded by the cDNA contained in Clone ID NO:Z, the amino acid sequence of the polypeptide encoded by the nucleotide sequence in SEQ ID NO:X as defined in columns 8 and 9 of Table 2, the amino acid sequence as defined in column 7 of Table 1A, an amino acid sequence encoded by the nucleotide sequence in SEQ ID NO:X, and an amino acid sequence encoded by the complement of the polynucleotide sequence in SEQ ID NO:X. Fragments of these polypeptides are also provided (e.g., those fragments described herein). Further proteins encoded by polynucleotides which hybridize to the complement of the nucleic acid molecules encoding these amino acid sequences under stringent hybridization conditions or alternatively, under lower stringency conditions, are also encompassed by the invention, as are the polynucleotides encoding these proteins.

[0093] By a nucleic acid having a nucleotide sequence at least, for example, 95% “identical” to a reference nucleotide sequence of the present invention, it is intended that the nucleotide sequence of the nucleic acid is identical to the reference sequence except that the nucleotide sequence may include up to five point mutations per each 100 nucleotides of the reference nucleotide sequence encoding the polypeptide. In other words, to obtain a nucleic acid having a nucleotide sequence at least 95% identical to a reference nucleotide sequence, up to 5% of the nucleotides in the reference sequence may be deleted or substituted with another nucleotide, or a number of nucleotides up to 5% of the total nucleotides in the reference sequence may be inserted into the reference sequence. The query sequence may be an entire sequence referred to in Table 1A or 2 as the ORF (open reading frame), or any fragment specified, as described herein.

[0094] As a practical matter, whether any particular nucleic acid molecule or polypeptide is at least 80%, 85%, 90%, 95%, 96%, 97%, 98% or 99% identical to a nucleotide sequence of the present invention can be determined conventionally using known computer programs. A preferred method for determining the best overall match between a query sequence (a sequence of the present invention) and a subject sequence, also referred to as a global sequence alignment, can be determined using the FASTDB computer program based on the algorithm of Brutlag et al. (Comp. App. Biosci. 6:237-245 (1990)). In a sequence alignment the query and subject sequences are both DNA sequences. An RNA sequence can be compared by converting U's to T's. The result of said global sequence alignment is expressed as percent identity. Preferred parameters used in a FASTDB alignment of DNA sequences to calculate percent identity are: Matrix=Unitary, k-tuple=4, Mismatch Penalty=1, Joining Penalty=30, Randomization Group Length=0, Cutoff Score=1, Gap Penalty=5, Gap Size Penalty 0.05, Window Size=500 or the length of the subject nucleotide sequence, whichever is shorter.

[0095] If the subject sequence is shorter than the query sequence because of 5′ or 3′ deletions, not because of internal deletions, a manual correction must be made to the results. This is because the FASTDB program does not account for 5′ and 3′ truncations of the subject sequence when calculating percent identity. For subject sequences truncated at the 5′ or 3′ ends, relative to the query sequence, the percent identity is corrected by calculating the number of bases of the query sequence that are 5′ and 3′ of the subject sequence, which are not matched/aligned, as a percent of the total bases of the query sequence. Whether a nucleotide is matched/aligned is determined by results of the FASTDB sequence alignment. This percentage is then subtracted from the percent identity, calculated by the above FASTDB program using the specified parameters, to arrive at a final percent identity score. This corrected score is what is used for the purposes of the present invention. Only bases outside the 5′ and 3′ bases of the subject sequence, as displayed by the FASTDB alignment, which are not matched/aligned with the query sequence, are calculated for the purposes of manually adjusting the percent identity score.

[0096] For example, a 90 base subject sequence is aligned to a 100 base query sequence to determine percent identity. The deletions occur at the 5′ end of the subject sequence and therefore, the FASTDB alignment does not show a matched/alignment of the first 10 bases at 5′ end. The 10 unpaired bases represent 10% of the sequence (number of bases at the 5′ and 3′ ends not matched/total number of bases in the query sequence) so 10% is subtracted from the percent identity score calculated by the FASTDB program. If the remaining 90 bases were perfectly matched the final percent identity would be 90%. In another example, a 90 base subject sequence is compared with a 100 base query sequence. This time the deletions are internal deletions so that there are no bases on the 5′ or 3′ of the subject sequence which are not matched/aligned with the query. In this case the percent identity calculated by FASTDB is not manually corrected. Once again, only bases 5′ and 3′ of the subject sequence which are not matched/aligned with the query sequence are manually corrected for. No other manual corrections are to be made for the purposes of the present invention.

[0097] By a polypeptide having an amino acid sequence at least, for example, 95% “identical” to a query amino acid sequence of the present invention, it is intended that the amino acid sequence of the subject polypeptide is identical to the query sequence except that the subject polypeptide sequence may include up to five amino acid alterations per each 100 amino acids of the query amino acid sequence. In other words, to obtain a polypeptide having an amino acid sequence at least 95% identical to a query amino acid sequence, up to 5% of the amino acid residues in the subject sequence may be inserted, deleted, (indels) or substituted with another amino acid. These alterations of the reference sequence may occur at the amino or carboxy terminal positions of the reference amino acid sequence or anywhere between those terminal positions, interspersed either individually among residues in the reference sequence or in one or more contiguous groups within the reference sequence.

[0098] As a practical matter, whether any particular polypeptide is at least 80%, 85%, 90%, 95%, 96%, 97%, 98% or 99% identical to, for instance, the amino acid sequence of a polypeptide referred to in Table 1A (e.g., an amino acid sequence of the polypeptide identified in columns 5 or 6) or Table 2 (e.g., the amino acid sequence encoded by the polynucleotide sequence defined in columns 8 and 9 of Table 2), ) or a fragment thereof, the amino acid sequence of the polypeptide encoded by the nucleotide sequence in SEQ ID NO:X or a fragment thereof, or an amino acid sequence of the polypeptide encoded by cDNA contained in Clone ID NO:Z, or a fragment thereof, can be determined conventionally using known computer programs. A preferred method for determining the best overall match between a query sequence (a sequence of the present invention) and a subject sequence, also referred to as a global sequence alignment, can be determined using the FASTDB computer program based on the algorithm of Brutlag et al. (Comp. App. Biosci.6:237-245 (1990)). In a sequence alignment the query and subject sequences are either both nucleotide sequences or both amino acid sequences. The result of said global sequence alignment is expressed as percent identity. Preferred parameters used in a FASTDB amino acid alignment are: Matrix=PAM 0, k-tuple=2, Mismatch Penalty=1, Joining Penalty=20, Randomization Group Length=0, Cutoff Score=1, Window Size=sequence length, Gap Penalty=5, Gap Size Penalty=0.05, Window Size=500 or the length of the subject amino acid sequence, whichever is shorter.

[0099] If the subject sequence is shorter than the query sequence due to N- or C-terminal deletions, not because of internal deletions, a manual correction must be made to the results. This is because the FASTDB program does not account for N- and C-terminal truncations of the subject sequence when calculating global percent identity. For subject sequences truncated at the N- and C-termini, relative to the query sequence, the percent identity is corrected by calculating the number of residues of the query sequence that are N- and C-terminal of the subject sequence, which are not matched/aligned with a corresponding subject residue, as a percent of the total bases of the query sequence. Whether a residue is matched/aligned is determined by results of the FASTDB sequence alignment. This percentage is then subtracted from the percent identity, calculated by the above FASTDB program using the specified parameters, to arrive at a final percent identity score. This final percent identity score is what is used for the purposes of the present invention. Only residues to the N- and C-termini of the subject sequence, which are not matched/aligned with the query sequence, are considered for the purposes of manually adjusting the percent identity score. That is, only query residue positions outside the farthest N- and C-terminal residues of the subject sequence.

[0100] For example, a 90 amino acid residue subject sequence is aligned with a 100 residue query sequence to determine percent identity. The deletion occurs at the N-terminus of the subject sequence and therefore, the FASTDB alignment does not show a matching/alignment of the first 10 residues at the N-terminus. The 10 unpaired residues represent 10% of the sequence (number of residues at the N- and C-termini not matched/total number of residues in the query sequence) so 10% is subtracted from the percent identity score calculated by the FASTDB program. If the remaining 90 residues were perfectly matched the final percent identity would be 90%. In another example, a 90 residue subject sequence is compared with a 100 residue query sequence. This time the deletions are internal deletions so there are no residues at the N- or C-termini of the subject sequence which are not matched/aligned with the query. In this case the percent identity calculated by FASTDB is not manually corrected. Once again, only residue positions outside the N- and C-terminal ends of the subject sequence, as displayed in the FASTDB alignment, which are not matched/aligned with the query sequence are manually corrected for. No other manual corrections are to be made for the purposes of the present invention.

[0101] The polynucleotide variants of the invention may contain alterations in the coding regions, non-coding regions, or both. Especially preferred are polynucleotide variants containing alterations, which produce silent substitutions, additions, or deletions, but do not alter the properties or activities of the encoded polypeptide. Nucleotide variants produced by silent substitutions due to the degeneracy of the genetic code are preferred. Moreover, polypeptide variants in which less than 50, less than 40, less than 30, less than 20, less than 10, or 5-50, 5-25, 5-10, 1-5, or 1-2 amino acids are substituted, deleted, or added in any combination are also preferred. Polynucleotide variants can be produced for a variety of reasons, e.g., to optimize codon expression for a particular host (change codons in the human mRNA to those preferred by a bacterial host such as E. coli).

[0102] Naturally occurring variants are called “allelic variants,” and refer to one of several alternate forms of a gene occupying a given locus on a chromosome of an organism. (Genes II, Lewin, B., ed., John Wiley & Sons, New York (1985).) These allelic variants can vary at either the polynucleotide and/or polypeptide level and are included in the present invention. Alternatively, non-naturally occurring variants may be produced by mutagenesis techniques or by direct synthesis.

[0103] Using known methods of protein engineering and recombinant DNA technology, variants may be generated to improve or alter the characteristics of the polypeptides of the present invention. For instance, one or more amino acids can be deleted from the N-terminus or C-terminus of the polypeptides of the present invention without substantial loss of biological function. As an example, the authors of Ron et al., J. Biol. Chem. 268: 2984-2988 (1993), reported variant KGF proteins having heparin binding activity even after deleting 3, 8, or 27 amino-terminal amino acid residues. Similarly, Interferon gamma exhibited up to ten times higher activity after deleting 8-10 amino acid residues from the carboxy terminus of this protein. (Dobeli et al., J. Biotechnology 7:199-216 (1988).)

[0104] Moreover, ample evidence demonstrates that variants often retain a biological activity similar to that of the naturally occurring protein. For example, Gayle and coworkers (J. Biol. Chem. 268:22105-22111 (1993)) conducted extensive mutational analysis of human cytokine IL-1a. They used random mutagenesis to generate over 3,500 individual IL-1a mutants that averaged 2.5 amino acid changes per variant over the entire length of the molecule. Multiple mutations were examined at every possible amino acid position. The investigators found that “[m]ost of the molecule could be altered with little effect on either [binding or biological activity].” In fact, only 23 unique amino acid sequences, out of more than 3,500 nucleotide sequences examined, produced a protein that significantly differed in activity from wild-type.

[0105] Furthermore, even if deleting one or more amino acids from the N-terminus or C-terminus of a polypeptide results in modification or loss of one or more biological functions, other biological activities may still be retained. For example, the ability of a deletion variant to induce and/or to bind antibodies which recognize the secreted form will likely be retained when less than the majority of the residues of the secreted form are removed from the N-terminus or C-terminus. Whether a particular polypeptide lacking N- or C-terminal residues of a protein retains such immunogenic activities can readily be determined by routine methods described herein and otherwise known in the art.

[0106] Thus, the invention further includes polypeptide variants which show a functional activity (e.g., biological activity) of the polypeptides of the invention. Such variants include deletions, insertions, inversions, repeats, and substitutions selected according to general rules known in the art so as have little effect on activity.

[0107] The present application is directed to nucleic acid molecules at least 80%, 85%, 90%, 95%, 96%, 97%, 98%, 99% or 100% identical to the nucleic acid sequences disclosed herein, (e.g., encoding a polypeptide having the amino acid sequence of an N and/or C terminal deletion), irrespective of whether they encode a polypeptide having functional activity. This is because even where a particular nucleic acid molecule does not encode a polypeptide having functional activity, one of skill in the art would still know how to use the nucleic acid molecule, for instance, as a hybridization probe or a polymerase chain reaction (PCR) primer. Uses of the nucleic acid molecules of the present invention that do not encode a polypeptide having functional activity include, inter alia, (1) isolating a gene or allelic or splice variants thereof in a cDNA library; (2) in situ hybridization (e.g., “FISH”) to metaphase chromosomal spreads to provide precise chromosomal location of the gene, as described in Verma et al., Human Chromosomes: A Manual of Basic Techniques, Pergamon Press, New York (1988); (3) Northern Blot analysis for detecting mRNA expression in specific tissues (e.g., normal colon or diseased colon tissues); and (4) in situ hybridization (e.g., histochemistry) for detecting mRNA expression in specific tissues (e.g., normal colon or diseased colon tissues).

[0108] Preferred, however, are nucleic acid molecules having sequences at least 80%, 85%, 90%, 95%, 96%, 97%, 98%, 99% or 100% identical to the nucleic acid sequences disclosed herein, which do, in fact, encode a polypeptide having functional activity. By a polypeptide having “functional activity” is meant, a polypeptide capable of displaying one or more known functional activities associated with a full-length (complete) protein of the invention. Such functional activities include, but are not limited to, biological activity, antigenicity [ability to bind (or compete with a polypeptide of the invention for binding) to an anti-polypeptide of the invention antibody], immunogenicity (ability to generate antibody which binds to a specific polypeptide of the invention), ability to form multimers with polypeptides of the invention, and ability to bind to a receptor or ligand for a polypeptide of the invention.

[0109] The functional activity of the polypeptides, and fragments, variants and derivatives of the invention, can be assayed by various methods.

[0110] For example, in one embodiment where one is assaying for the ability to bind or compete with full-length polypeptide of the present invention for binding to an anti-polypeptide of the invention antibody, various immunoassays known in the art can be used, including but not limited to, competitive and non-competitive assay systems using techniques such as radioimmunoassays, ELISA (enzyme linked immunosorbent assay), “sandwich” immunoassays, immunoradiometric assays, gel diffusion precipitation reactions, immunodiffusion assays, in situ immunoassays (using colloidal gold, enzyme or radioisotope labels, for example), western blots, precipitation reactions, agglutination assays (e.g., gel agglutination assays, hemagglutination assays), complement fixation assays, immunofluorescence assays, protein A assays, and immunoelectrophoresis assays, etc. In one embodiment, antibody binding is detected by detecting a label on the primary antibody. In another embodiment, the primary antibody is detected by detecting binding of a secondary antibody or reagent to the primary antibody. In a further embodiment, the secondary antibody is labeled. Many means are known in the art for detecting binding in an immunoassay and are within the scope of the present invention.

[0111] In another embodiment, where a ligand is identified, or the ability of a polypeptide fragment, variant or derivative of the invention to multimerize is being evaluated, binding can be assayed, e.g., by means well-known in the art, such as, for example, reducing and non-reducing gel chromatography, protein affinity chromatography, and affinity blotting. See generally, Phizicky et al., Microbiol. Rev. 59:94-123 (1995). In another embodiment, the ability of physiological correlates of a polypeptide of the present invention to bind to a substrate(s) of the polypeptide of the invention can be routinely assayed using techniques known in the art.

[0112] In addition, assays described herein (see Examples) and otherwise known in the art may routinely be applied to measure the ability of polypeptides of the present invention and fragments, variants and derivatives thereof to elicit polypeptide related biological activity (either in vitro or in vivo). Other methods will be known to the skilled artisan and are within the scope of the invention.

[0113] Of course, due to the degeneracy of the genetic code, one of ordinary skill in the art will immediately recognize that a large number of the nucleic acid molecules having a sequence at least 80%, 85%, 90%, 95%, 96%, 97%, 98%, 99%, or 100% identical to, for example, the nucleic acid sequence of the cDNA contained in Clone ID NO:Z, a nucleic acid sequence referred to in Table 1A (e.g., SEQ ID NO:X), a nucleic acid sequence disclosed in Table 2 (e.g., the nucleic acid sequence delineated in columns 8 and 9) or fragments thereof, will encode polypeptides “having functional activity.” In fact, since degenerate variants of any of these nucleotide sequences all encode the same polypeptide, in many instances, this will be clear to the skilled artisan even without performing the above described comparison assay. It will be further recognized in the art that, for such nucleic acid molecules that are not degenerate variants, a reasonable number will also encode a polypeptide having functional activity. This is because the skilled artisan is fully aware of amino acid substitutions that are either less likely or not likely to significantly effect protein function (e.g., replacing one aliphatic amino acid with a second aliphatic amino acid), as further described below.

[0114] For example, guidance concerning how to make phenotypically silent amino acid substitutions is provided in Bowie et al., “Deciphering the Message in Protein Sequences: Tolerance to Amino Acid Substitutions,” Science 247:1306-1310 (1990), wherein the authors indicate that there are two main strategies for studying the tolerance of an amino acid sequence to change.

[0115] The first strategy exploits the tolerance of amino acid substitutions by natural selection during the process of evolution. By comparing amino acid sequences in different species, conserved amino acids can be identified. These conserved amino acids are likely important for protein function. In contrast, the amino acid positions where substitutions have been tolerated by natural selection indicates that these positions are not critical for protein function. Thus, positions tolerating amino acid substitution could be modified while still maintaining biological activity of the protein.

[0116] The second strategy uses genetic engineering to introduce amino acid changes at specific positions of a cloned gene to identify regions critical for protein function. For example, site directed mutagenesis or alanine-scanning mutagenesis (introduction of single alanine mutations at every residue in the molecule) can be used. See Cunningham et al., Science 244:1081-1085 (1989). The resulting mutant molecules can then be tested for biological activity.

[0117] As the authors state, these two strategies have revealed that proteins are surprisingly tolerant of amino acid substitutions. The authors further indicate which amino acid changes are likely to be permissive at certain amino acid positions in the protein. For example, most buried (within the tertiary structure of the protein) amino acid residues require nonpolar side chains, whereas few features of surface side chains are generally conserved. Moreover, tolerated conservative amino acid substitutions involve replacement of the aliphatic or hydrophobic amino acids Ala, Val, Leu and Ile; replacement of the hydroxyl residues Ser and Thr; replacement of the acidic residues Asp and Glu; replacement of the amide residues Asn and Gln, replacement of the basic residues Lys, Arg, and His; replacement of the aromatic residues Phe, Tyr, and Trp, and replacement of the small-sized amino acids Ala, Ser, Thr, Met, and Gly. Besides conservative amino acid substitutions, variants of the present invention include (i) substitutions with one or more of the non-conserved amino acid residues, where the substituted amino acid residues may or may not be one encoded by the genetic code, or (ii) substitutions with one or more of the amino acid residues having a substituent group, or (iii) fusion of the mature polypeptide with another compound, such as a compound to increase the stability and/or solubility of the polypeptide (for example, polyethylene glycol), or (iv) fusion of the polypeptide with additional amino acids, such as, for example, an IgG Fc fusion region peptide, serum albumin (preferably human serum albumin) or a fragment or variant thereof, or leader or secretory sequence, or a sequence facilitating purification. Such valiant polypeptides are deemed to be within the scope of those skilled in the art from the teachings herein.

[0118] For example, polypeptide variants containing amino acid substitutions of charged amino acids with other charged or neutral amino acids may produce proteins with improved characteristics, such as less aggregation. Aggregation of pharmaceutical formulations both reduces activity and increases clearance due to the aggregate's immunogenic activity. See Pinckard et al., Clin. Exp. Immunol. 2:331-340 (1967); Robbins et al., Diabetes 36: 838-845 (1987); Cleland et al., Crit. Rev. Therapeutic Drug Carrier Systems 10:307-377 (1993).

[0119] A further embodiment of the invention relates to polypeptides which comprise the amino acid sequence of a polypeptide having an amino acid sequence which contains at least one amino acid substitution, but not more than 50 amino acid substitutions, even more preferably, not more than 40 amino acid substitutions, still more preferably, not more than 30 amino acid substitutions, and still even more preferably, not more than 20 amino acid substitutions from a polypeptide sequence disclosed herein. Of course it is highly preferable for a polypeptide to have an amino acid sequence which comprises the amino acid sequence of a polypeptide of SEQ ID NO:Y, an amino acid sequence encoded by SEQ ID NO:X, an amino acid sequence encoded by the portion of SEQ ID NO:X as defined in columns 8 and 9 of Table 2, an amino acid sequence encoded by the complement of SEQ ID NO:X, and/or the amino acid sequence encoded by cDNA contained in Clone ID NO:Z which contains, in order of ever-increasing preference, at least one, but not more than 10, 9, 8, 7, 6, 5, 4, 3, 2 or 1 amino acid substitutions.

[0120] In specific embodiments, the polypeptides of the invention comprise, or alternatively, consist of, fragments or variants of a reference amino acid sequence selected from: (a) the amino acid sequence of SEQ ID NO:Y or fragments thereof (e.g., the mature form and/or other fragments described herein); (b) the amino acid sequence encoded by SEQ ID NO:X or fragments thereof; (c) the amino acid sequence encoded by the complement of SEQ ID NO:X or fragments thereof; (d) the amino acid sequence encoded by the portion of SEQ ID NO:X as defined in columns 8 and 9 of Table 2 or fragments thereof; and (e) the amino acid sequence encoded by cDNA contained in Clone ID NO:Z or fragments thereof; wherein the fragments or variants have 1-5,5-10, 5-25, 5-50, 10-50 or 50-150, amino acid residue additions, substitutions, and/or deletions when compared to the reference amino acid sequence. In preferred embodiments, the amino acid substitutions are conservative. Polynucleotides encoding these polypeptides are also encompassed by the invention.

[0121] Polynucleotide and Polypeptide Fragments

[0122] The present invention is also directed to polynucleotide fragments of the polynucleotides (nucleic acids) of the invention. In the present invention, a “polynucleotide fragment” refers to a polynucleotide having a nucleic acid sequence which, for example: is a portion of the cDNA contained in Clone ID NO:Z or the complementary strand thereto; is a portion of the polynucleotide sequence encoding the polypeptide encoded by the cDNA contained in Clone ID NO:Z or the complementary strand thereto; is a portion of a polynucleotide sequence encoding the amino acid sequence encoded by the region of SEQ ID NO:X as defined in columns 8 and 9 of Table 2 or the complementary strand thereto; is a portion of the polynucleotide sequence of SEQ ID NO:X as defined in columns 8 and 9 of Table 2 or the complementary strand thereto; is a portion of the polynucleotide sequence in SEQ ID NO:X or the complementary strand thereto; is a polynucleotide sequence encoding a portion of the polypeptide of SEQ ID NO:Y; is a polynucleotide sequence encoding a portion of a polypeptide encoded by SEQ ID NO:X; or is a polynucleotide sequence encoding a portion of a polypeptide encoded by the complement of the polynucleotide sequence in SEQ ID NO:X.

[0123] The polynucleotide fragments of the invention are preferably at least about 15 nt, and more preferably at least about 20 nt, still more preferably at least about 30 nt, and even more preferably, at least about 40 nt, at least about 50 nt, at least about 75 nt, or at least about 150 nt in length. A fragment “at least 20 nt in length,” for example, is intended to include 20 or more contiguous bases from the cDNA sequence contained in Clone ID NO:Z, or the nucleotide sequence shown in SEQ ID NO:X or the complementary stand thereto. In this context “about” includes the particularly recited value or a value larger or smaller by several (5, 4, 3, 2, or 1) nucleotides, at either terminus or at both termini. These nucleotide fragments have uses that include, but are not limited to, as diagnostic probes and primers as discussed herein. Of course, larger fragments (e.g., at least 160, 170, 180, 190, 200, 250, 500, 600, 1000, or 2000 nucleotides in length) are also encompassed by the invention.

[0124] Moreover, representative examples of polynucleotide fragments of the invention, comprise, or alternatively consist of, a sequence from about nucleotide number 1-50, 51-100, 101-150, 151-200, 201-250, 251-300, 301-350, 351-400, 401-450, 451-500, 501-550, 551-600, 651-700, 701-750, 751-800, 800-850, 851-900, 901-950, 951-1000, 1001-1050, 1051-1100, 1101-1150, 1151-1200, 1201-1250, 1251-1300, 1301-1350, 1351-1400, 1401-1450, 1451-1500, 1501-1550, 1551-1600, 1601-1650, 1651-1700, 1701-1750, 1751-1800, 1801-1850, 1851-1900, 1901-1950, 1951-2000, 2001-2050, 2051-2100, 2101-2150, 2151-2200, 2201-2250, 2251-2300, 2301-2350, 2351-2400, 2401-2450, 2451-2500, 2501-2550, 2551-2600, 2601-2650, 2651-2700, 2701-2750, 2751-2800, 2801-2850, 2851-2900, 2901-2950, 2951-3000, 3001-3050, 3051-3100, 3101-3150, 3151-3200, 3201-3250, 3251-3300, 3301-3350, 3351-3400, 3401-3450, 3451-3500, 3501-3550, 3551-3600, 3601-3650, 3651-3700, 3701-3750, 3751-3800, 3801-3850, 3851-3900, 3901-3950, 3951-4000, 4001-4050, 4051-4100, 4101-4150, 4151-4200, 4201-4250, 4251-4300, 4301-4350, 4351-4400, 4401-4450, 4451-4500, 4501-4550, 4551-4600, 4601-4650, 4651-4700, 4701-4750, 4751-4800, 4801-4850, 4851-4900, 4901-4950, 4951-5000, 5001-5050, 5051-5100, 5101-5150, 5151-5200, 5201-5250, 5251-5300, 5301-5350, 5351-5400, 5401-5450, 5451-5500, 5501-5550, 5551-5600, 5601-5650, 5651-5700, 5701-5750, 5751-5800, 5801-5850, 5851-5900, 5901-5950, 5951-6000, 6001-6050, 6051-6100, 6101-6150, 6151-6200, 6201-6250, 6251-6300, 6301-6350, 6351-6400, 6401-6450, 6451-6500, 6501-6550, 6551-6600, 6601-6650, 6651-6700, 6701-6750, 6751-6800, 6801-6850, 6851-6900, 6901-6950, 6951-7000, 7001-7050, 7051-7100, 7101-7150, 7151-7200, 7201-7250, 7251-7300 or 7301 to the end of SEQ ID NO:X, or the complementary strand thereto. In this context “about” includes the particularly recited range or a range larger or smaller by several (5, 4, 3, 2, or 1) nucleotides, at either terminus or at both termini. Preferably, these fragments encode a polypeptide, which has a functional activity (e.g., biological activity). More preferably, these polynucleotides can be used as probes or primers as discussed herein. Polynucleotides which hybridize to one or more of these polynucleotides under stringent hybridization conditions or alternatively, under lower stringency conditions are also encompassed by the invention, as are polypeptides encoded by these polynucleotides.

[0125] Further representative examples of polynucleotide fragments of the invention, comprise, or alternatively consist of, a sequence from about nucleotide number 1-50, 51-100, 101-150, 151-200, 201-250, 251-300, 301-350, 351-400, 401-450, 451-500, 501-550, 551-600, 651-700, 701-750, 751-800, 800-850, 851-900, 901-950, 951-1000, 1001-1050, 1051-1100, 1101-1150, 1151-1200, 1201-1250, 1251-1300, 1301-1350, 1351-1400, 1401-1450, 1451-1500, 1501-1550, 1551-1600, 1601-1650, 1651-1700, 1701-1750, 1751-1800, 1801-1850, 1851-1900, 1901-1950, 1951-2000, 2001-2050, 2051-2100, 2101-2150, 2151-2200, 2201-2250, 2251-2300, 2301-2350, 2351-2400, 2401-2450, 2451-2500, 2501-2550, 2551-2600, 2601-2650, 2651-2700, 2701-2750, 2751-2800, 2801-2850, 2851-2900, 2901-2950, 2951-3000, 3001-3050, 3051-3100, 3101-3150, 3151-3200, 3201-3250, 3251-3300, 3301-3350, 3351-3400, 3401-3450, 3451-3500, 3501-3550, 3551-3600, 3601-3650, 3651-3700, 3701-3750, 3751-3800, 3801-3850, 3851-3900, 3901-3950, 3951-4000, 4001-4050, 4051-4100, 4101-4150, 4151-4200, 4201-4250, 4251-4300, 4301-4350, 4351-4400, 4401-4450, 4451-4500, 4501-4550, 4551-4600, 4601-4650, 4651-4700, 4701-4750, 4751-4800, 4801-4850, 4851-4900, 4901-4950, 4951-5000, 5001-5050, 5051-5100, 5101-5150, 5151-5200, 5201-5250, 5251-5300, 5301-5350, 5351-5400, 5401-5450, 5451-5500, 5501-5550, 5551-5600, 5601-5650, 5651-5700, 5701-5750, 5751-5800, 5801-5850, 5851-5900, 5901-5950, 5951-6000, 6001-6050, 6051-6100, 6101-6150, 6151-6200, 6201-6250, 6251-6300, 6301-6350, 6351-6400, 6401-6450, 6451-6500, 6501-6550, 6551-6600, 6601-6650, 6651-6700, 6701-6750, 6751-6800, 6801-6850, 6851-6900, 6901-6950, 6951-7000, 7001-7050, 7051-7100, 7101-7150, 7151-7200, 7201-7250, 7251-7300 or 7301 to the end of the cDNA sequence contained in Clone ID NO:Z, or the complementary strand thereto. In this context “about” includes the particularly recited range or a range larger or smaller by several (5, 4, 3, 2, or 1) nucleotides, at either terminus or at both termini. Preferably, these fragments encode a polypeptide, which has a functional activity (e.g., biological activity). More preferably, these polynucleotides can be used as probes or primers as discussed herein. Polynucleotides which hybridize to one or more of these polynucleotides under stringent hybridization conditions or alternatively, under lower stringency conditions are also encompassed by the invention, as are polypeptides encoded by these polynucleotides.

[0126] In specific embodiments, polynucleotides of the invention comprise, or alternatively consist of, one, two, three, four, five, six, seven, eight, nine, ten, or more fragments of the polynucleotide sequence of SEQ ID NO:X (e.g., as defined in Table 1A) or fragments or variants thereof. Polypeptides encoded by these polynucleotides, other polynucleotides that encode these polypeptides, and antibodies that bind these polypeptides are also encompassed by the invention.

[0127] In further specific embodiments, polynucleotides of the invention comprise, or alternatively consist of, one, two, three, four, five, six, seven, eight, nine, ten, or more fragments of the polynucleotide sequence of SEQ ID NO:X (e.g., as defined in Table 1A) or fragments or variants thereof. Polypeptides encoded by these polynucleotides, other polynucleotides that encode these polypeptides, and antibodies that bind these polypeptides are also encompassed by the invention.

[0128] In the present invention, a “polypeptide fragment” refers to an amino acid sequence which is a portion of that contained in SEQ ID NO:Y, a portion of an amino acid sequence encoded by the portion of SEQ ID NO:X as defined in columns 8 and 9 of Table 2, a portion of an amino acid sequence encoded by the polynucleotide sequence of SEQ ID NO:X, a portion of an amino acid sequence encoded by the complement of the polynucleotide sequence in SEQ ID NO:X, and/or a portion of an amino acid sequence encoded by the cDNA contained in Clone ID NO:Z. Protein (polypeptide) fragments may be “free-standing,” or comprised within a larger polypeptide of which the fragment forms a part or region, most preferably as a single continuous region. Representative examples of polypeptide fragments of the invention, include, for example, fragments comprising, or alternatively consisting of, from about amino acid number 1-20, 21-40, 41-60, 61-80, 81-100, 102-120, 121-140, 141-160, 161-180, 181-200, 201-220, 221-240, 241-260, 261-280, 281-300, 301-320, 321-340, 341-360, 361-380, 381-400, 401-420, 421-440, 441-460, 461-480, 481-500, 501-520, 521-540, 541-560, 561-580, 581-600, 601-620, 621-640, 641-660, 661-680, 681-700, 701-720, 721-740, 741-760, 761-780, 781-800, 801-820, 821-840, 841-860, 861-880, 881-900, 901-920, 921-940, 941-960, 961-980, 981-1000, 1001-1020, 1021-1040, 1041-1060, 1061-1080, 1081-1100, 1101-1120, 1121-1140, 1141-1160, 1161-1180, 1181-1200, 1201-1220, 1221-1240, 1241-1260, 1261-1280, 1281-1300, 1301-1320, 1321-1340, 1341-1360, 1361-1380, 1381-1400, 1401-1420, 1421-1440, or 1441 to the end of the coding region. In a preferred embodiment, polypeptide fragments of the invention include, for example, fragments comprising, or alternatively consisting of, from about amino acid number 1-20, 21-40, 41-60, 61-80, 81-100, 102-120, 121-140, 141-160, 161-180, 181-200, 201-220, 221-240, 241-260, 261-280, 281-300, 301-320, 321-340, 341-360, 361-380, 381-400, 401-420, 421-440, 441-460, 461-480, 481-500, 501-520, 521-540, 541-560, 561-580, 581-600, 601-620, 621-640, 641-660, 661-680, 681-700, 701-720, 721-740, 741-760, 761-780, 781-800, 801-820, 821-840, 841-860, 861-880, 881-900, 901-920, 921-940, 941-960, 961-980, 981-1000, 1001-1020, 1021-1040, 1041-1060, 1061-1080, 1081-1100, 1101-1120, 1121-1140, 1141-1160, 1161-1180, 1181-1200, 1201-1220, 1221-1240, 1241-1260, 1261-1280, 1281-1300, 1301-1320, 1321-1340, 1341-1360, 1361-1380, 1381-1400, 1401-1420, 1421-1440, or 1441 to the end of the coding region of SEQ ID NO:Y. Moreover, polypeptide fragments of the invention may be at least about 10, 15, 20, 25, 30, 35, 40, 45, 50, 55, 60, 65, 70, 75, 80, 85, 90, 100, 110, 120, 130, 140, or 150 amino acids in length. In this context “about” includes the particularly recited ranges or values, or ranges or values larger or smaller by several (5, 4, 3, 2, or 1) amino acids, at either extreme or at both extremes. Polynucleotides encoding these polypeptide fragments are also encompassed by the invention.

[0129] Even if deletion of one or more amino acids from the N-terminus of a protein results in modification of loss of one or more biological functions of the protein, other functional activities (e.g., biological activities, ability to multimerize, ability to bind a ligand) may still be retained. For example, the ability of shortened muteins to induce and/or bind to antibodies which recognize the complete or mature forms of the polypeptides generally will be retained when less than the majority of the residues of the complete or mature polypeptide are removed from the N-terminus. Whether a particular polypeptide lacking N-terminal residues of a complete polypeptide retains such immunologic activities can readily be determined by routine methods described herein and otherwise known in the art. It is not unlikely that a mutein with a large number of deleted N-terminal amino acid residues may retain some biological or immunogenic activities. In fact, peptides composed of as few as six amino acid residues may often evoke an immune response.

[0130] Accordingly, polypeptide fragments include the secreted protein as well as the mature form. Further preferred polypeptide fragments include the secreted protein or the mature form having a continuous series of deleted residues from the amino or the carboxy terminus, or both. For example, any number of amino acids, ranging from 1-60, can be deleted from the amino terminus of either the secreted polypeptide or the mature form. Similarly, any number of amino acids, ranging from 1-30, can be deleted from the carboxy terminus of the secreted protein or mature form. Furthermore, any combination of the above amino and carboxy terminus deletions is preferred. Similarly, polynucleotides encoding these polypeptide fragments are also preferred.

[0131] The present invention further provides polypeptides having one or more residues deleted from the amino terminus of the amino acid sequence of a polypeptide disclosed herein (e.g., a polypeptide of SEQ ID NO:Y, a polypeptide encoded by the polynucleotide sequence contained in SEQ ID NO:X or the complement thereof, a polypeptide encoded by the portion of SEQ ID NO:X as defined in columns 8 and 9 of Table 2, and/or a polypeptide encoded by the cDNA contained in Clone ID NO:Z). In particular, N-terminal deletions may be described by the general formula m−q, where q is a whole integer representing the total number of amino acid residues in a polypeptide of the invention (e.g., the polypeptide disclosed in SEQ ID NO:Y, or the polypeptide encoded by the portion of SEQ ID NO:X as defined in columns 8 and 9 of Table 2), and m is defined as any integer ranging from 2 to q−6. Polynucleotides encoding these polypeptides are also encompassed by the invention.

[0132] The present invention further provides polypeptides having one or more residues from the carboxy terminus of the amino acid sequence of a polypeptide disclosed herein (e.g., a polypeptide of SEQ ID NO:Y, a polypeptide encoded by the polynucleotide sequence contained in SEQ ID NO:X, a polypeptide encoded by the portion of SEQ ID NO:X as defined in columns 8 and 9 of Table 2, and/or a polypeptide encoded by the cDNA contained in Clone ID NO:Z). In particular, C-terminal deletions may be described by the general formula 1−n, where n is any whole integer ranging from 6 to q−1, and where n corresponds to the position of amino acid residue in a polypeptide of the invention. Polynucleotides encoding these polypeptides are also encompassed by the invention.

[0133] In addition, any of the above described N- or C-terminal deletions can be combined to produce a N- and C-terminal deleted polypeptide. The invention also provides polypeptides having one or more amino acids deleted from both the amino and the carboxyl termini, which may be described generally as having residues m−n of a polypeptide encoded by SEQ ID NO:X (e.g., including, but not limited to, the preferred polypeptide disclosed as SEQ ID NO:Y and the polypeptide encoded by the portion of SEQ ID NO:X as defined in columns 8 and 9 of Table 2), the cDNA contained in Clone ID NO:Z, and/or the complement thereof, where n and m are integers as described above. Polynucleotides encoding these polypeptides are also encompassed by the invention.

[0134] Also as mentioned above, even if deletion of one or more amino acids from the C-terminus of a protein results in modification of loss of one or more biological functions of the protein, other functional activities (e.g., biological activities, ability to multimerize, ability to bind a ligand) may still be retained. For example the ability of the shortened mutein to induce and/or bind to antibodies which recognize the complete or mature forms of the polypeptide generally will be retained when less than the majority of the residues of the complete or mature polypeptide are removed from the C-terminus. Whether a particular polypeptide lacking C-terminal residues of a complete polypeptide retains such immunologic activities can readily be determined by routine methods described herein and otherwise known in the art. It is not unlikely that a mutein with a large number of deleted C-terminal amino acid residues may retain some biological or immunogenic activities. In fact, peptides composed of as few as six amino acid residues may often evoke an immune response.

[0135] The present application is also directed to proteins containing polypeptides at least 80%, 85%, 90%, 95%, 96%, 97%, 98% or 99% identical to a polypeptide sequence set forth herein. In preferred embodiments, the application is directed to proteins containing polypeptides at least 80%, 85%, 90%, 95%, 96%, 97%, 98% or 99% identical to polypeptides having the amino acid sequence of the specific N- and C-terminal deletions. Polynucleotides encoding these polypeptides are also encompassed by the invention.

[0136] Any polypeptide sequence encoded by, for example, the polynucleotide sequences set forth as SEQ ID NO:X or the complement thereof, (presented, for example, in Tables 1A and 2), or the cDNA contained in Clone ID NO:Z may be analyzed to determine certain preferred regions of the polypeptide. For example, the amino acid sequence of a polypeptide encoded by a polynucleotide sequence of SEQ ID NO:X (e.g., the polypeptide of SEQ ID NO:Y and the polypeptide encoded by the portion of SEQ ID NO:X as defined in columns 8 and 9 of Table 2) or the cDNA contained in Clone ID NO:Z may be analyzed using the default parameters of the DNASTAR computer algorithm (DNASTAR, Inc., 1228 S. Park St., Madison, Wis. 53715 USA; http://www.dnastar.com/).

[0137] Polypeptide regions that may be routinely obtained using the DNASTAR computer algorithm include, but are not limited to, Garnier-Robson alpha-regions, beta-regions, turn-regions, and coil-regions; Chou-Fasman alpha-regions, beta-regions, and turn-regions; Kyte-Doolittle hydrophilic regions and hydrophobic regions; Eisenberg alpha- and beta-amphipathic regions; Karplus-Schulz flexible regions; Emini surface-forming regions; and Jameson-Wolf regions of high antigenic index. Among highly preferred polynucleotides of the invention in this regard are those that encode polypeptides comprising regions that combine several structural features, such as several (e.g., 1, 2, 3 or 4) of the features set out above.

[0138] Additionally, Kyte-Doolittle hydrophilic regions and hydrophobic regions, Emini surface-forming regions, and Jameson-Wolf regions of high antigenic index (i.e., containing four or more contiguous amino acids having an antigenic index of greater than or equal to 1.5, as identified using the default parameters of the Jameson-Wolf program) can routinely be used to determine polypeptide regions that exhibit a high degree of potential for antigenicity. Regions of high antigenicity are determined from data by DNASTAR analysis by choosing values which represent regions of the polypeptide which are likely to be exposed on the surface of the polypeptide in an environment in which antigen recognition may occur in the process of initiation of an immune response.

[0139] Preferred polypeptide fragments of the invention are fragments comprising, or alternatively, consisting of, an amino acid sequence that displays a functional activity (e.g. biological activity) of the polypeptide sequence of which the amino acid sequence is a fragment. By a polypeptide displaying a “functional activity” is meant a polypeptide capable of one or more known functional activities associated with a full-length protein, such as, for example, biological activity, antigenicity, immunogenicity, and/or multimerization, as described herein.

[0140] Other preferred polypeptide fragments are biologically active fragments. Biologically active fragments are those exhibiting activity similar, but not necessarily identical, to an activity of the polypeptide of the present invention. The biological activity of the fragments may include an improved desired activity, or a decreased undesirable activity.

[0141] In preferred embodiments, polypeptides of the invention comprise, or alternatively consist of, one, two, three, four, five or more of the antigenic fragments of the polypeptide of SEQ ID NO:Y, or portions thereof. Polynucleotides encoding these polypeptides are also encompassed by the invention.

[0142] The present invention encompasses polypeptides comprising, or alternatively consisting of, an epitope of: the polypeptide sequence shown in SEQ ID NO:Y; a polypeptide sequence encoded by SEQ ID NO:X or the complementary strand thereto; the polypeptide sequence encoded by the portion of SEQ ID NO:X as defined in columns 8 and 9 of Table 2; the polypeptide sequence encoded by the cDNA contained in Clone ID NO:Z; or the polypeptide sequence encoded by a polynucleotide that hybridizes to the sequence of SEQ ID NO:X, the complement of the sequence of SEQ ID NO:X, the complement of a portion of SEQ ID NO:X as defined in columns 8 and 9 of Table 2, or the cDNA sequence contained in Clone ID NO:Z under stringent hybridization conditions or alternatively, under lower stringency hybridization as defined supra. The present invention further encompasses polynucleotide sequences encoding an epitope of a polypeptide sequence of the invention (such as, for example, the sequence disclosed in SEQ ID NO:X, or a fragment thereof), polynucleotide sequences of the complementary strand of a polynucleotide sequence encoding an epitope of the invention, and polynucleotide sequences which hybridize to the complementary strand under stringent hybridization conditions or alternatively, under lower stringency hybridization conditions defined supra.

[0143] The term “epitopes,” as used herein, refers to portions of a polypeptide having antigenic or immunogenic activity in an animal, preferably a mammal, and most preferably in a human. In a preferred embodiment, the present invention encompasses a polypeptide comprising an epitope, as well as the polynucleotide encoding this polypeptide. An “immunogenic epitope,” as used herein, is defined as a portion of a protein that elicits an antibody response in an animal, as determined by any method known in the art, for example, by the methods for generating antibodies described infra. (See, for example, Geysen et al., Proc. Natl. Acad. Sci. USA 81:3998-4002 (1983)). The term “antigenic epitope,” as used herein, is defined as a portion of a protein to which an antibody can immunospecifically bind its antigen as determined by any method well known in the art, for example, by the immunoassays described herein. Immunospecific binding excludes non-specific binding but does not necessarily exclude cross-reactivity with other antigens. Antigenic epitopes need not necessarily be immunogenic.

[0144] Fragments, which function as epitopes may be produced by any conventional means. (See, e.g., Houghten, R. A., Proc. Natl. Acad. Sci. USA 82:5131-5135 (1985) further described in U.S. Pat. No. 4,631,211.)

[0145] In the present invention, antigenic epitopes preferably contain a sequence of at least 4, at least 5, at least 6, at least 7, more preferably at least 8, at least 9, at least 10, at least 11, at least 12, at least 13, at least 14, at least 15, at least 20, at least 25, at least 30, at least 40, at least 50, and, most preferably, between about 15 to about 30 amino acids. Preferred polypeptides comprising immunogenic or antigenic epitopes are at least 10, 15, 20, 25, 30, 35, 40, 45, 50, 55, 60, 65, 70, 75, 80, 85, 90, 95, or 100 amino acid residues in length. Additional non-exclusive preferred antigenic epitopes include the antigenic epitopes disclosed herein, as well as portions thereof. Antigenic epitopes are useful, for example, to raise antibodies, including monoclonal antibodies, that specifically bind the epitope. Preferred antigenic epitopes include the antigenic epitopes disclosed herein, as well as any combination of two, three, four, five or more of these antigenic epitopes. Antigenic epitopes can be used as the target molecules in immunoassays. (See, for instance, Wilson et al., Cell 37:767-778 (1984); Sutcliffe et al., Science 219:660-666 (1983)).

[0146] Non-limiting examples of epitopes of polypeptides that can be used to generate antibodies of the invention include a polypeptide comprising, or alternatively consisting of, at least one, two, three, four, five, six or more of the portion(s) of SEQ ID NO:Y specified in column 7 of Table 1A. These polypeptide fragments have been determined to bear antigenic epitopes of the proteins of the invention by the analysis of the Jameson-Wolf antigenic index, which is included in the DNAStar suite of computer programs. By “comprise” it is intended that a polypeptide contains at least one, two, three, four, five, six or more of the portion(s) of SEQ ID NO:Y shown in column 7 of Table 1A, but it may contain additional flanking residues on either the amino or carboxyl termini of the recited portion. Such additional flanking sequences are preferably sequences naturally found adjacent to the portion; i.e., contiguous sequence shown in SEQ ID NO:Y. The flanking sequence may, however, be sequences from a heterolgous polypeptide, such as from another protein described herein or from a heterologous polypeptide not described herein. In particular embodiments, epitope portions of a polypeptide of the invention comprise one, two, three, or more of the portions of SEQ ID NO:Y shown in column 7 of Table 1A. Polynucleotides encoding these polypeptides are also encompassed by the invention.

[0147] Similarly, immunogenic epitopes can be used, for example, to induce antibodies according to methods well known in the art. See, for instance, Sutcliffe et al., supra; Wilson et al., supra; Chow et al., Proc. Natl. Acad. Sci. USA 82:910-914; and Bittle et al., J. Gen. Virol. 66:2347-2354 (1985). Preferred immunogenic epitopes include the immunogenic epitopes disclosed herein, as well as any combination of two, three, four, five or more of these immunogenic epitopes. The polypeptides comprising one or more immunogenic epitopes may be presented for eliciting an antibody response together with a carrier protein, such as an albumin, to an animal system (such as rabbit or mouse), or, if the polypeptide is of sufficient length (at least about 25 amino acids), the polypeptide may be presented without a carrier. However, immunogenic epitopes comprising as few as 8 to 10 amino acids have been shown to be sufficient to raise antibodies capable of binding to, at the very least, linear epitopes in a denatured polypeptide (e.g., in Western blotting).

[0148] Epitope-bearing polypeptides of the present invention may be used to induce antibodies according to methods well known in the art including, but not limited to, in vivo immunization, in vitro immunization, and phage display methods. See, e.g., Sutcliffe et al., supra; Wilson et al., supra, and Bittle et al., J. Gen. Virol., 66:2347-2354 (1985). If in vivo immunization is used, animals may be immunized with free peptide; however, anti-peptide antibody titer may be boosted by coupling the peptide to a macromolecular carrier, such as keyhole limpet hemacyanin (KLH) or tetanus toxoid. For instance, peptides containing cysteine residues may be coupled to a carrier using a linker such as maleimidobenzoyl-N-hydroxysuccinimide ester (MBS), while other peptides may be coupled to carriers using a more general linking agent such as glutaraldehyde. Animals such as rabbits, rats and mice are immunized with either free or carrier- coupled peptides, for instance, by intraperitoneal and/or intradermal injection of emulsions containing about 100 μg of peptide or carrier protein and Freund's adjuvant or any other adjuvant known for stimulating an immune response. Several booster injections may be needed, for instance, at intervals of about two weeks, to provide a useful titer of anti-peptide antibody which can be detected, for example, by ELISA assay using free peptide adsorbed to a solid surface. The titer of anti-peptide antibodies in serum from an immunized animal may be increased by selection of anti-peptide antibodies, for instance, by adsorption to the peptide on a solid support and elution of the selected antibodies according to methods well known in the art.

[0149] As one of skill in the art will appreciate, and as discussed above, the polypeptides of the present invention (e.g., those comprising an immunogenic or antigenic epitope) can be fused to heterologous polypeptide sequences. For example, polypeptides of the present invention (including fragments or variants thereof), may be fused with the constant domain of immunoglobulins (IgA, IgE, IgG, IgM), or portions thereof (CH1, CH2, CH3, or any combination thereof and portions thereof, resulting in chimeric polypeptides. By way of another non-limiting example, polypeptides and/or antibodies of the present invention (including fragments or variants thereof) may be fused with albumin (including but not limited to recombinant human serum albumin or fragments or variants thereof (see, e.g., U.S. Pat. No. 5,876,969, issued Mar. 2, 1999, EP Patent 0 413 622, and U.S. Pat. No. 5,766,883, issued Jun. 16, 1998, herein incorporated by reference in their entirety)). In a preferred embodiment, polypeptides and/or antibodies of the present invention (including fragments or variants thereof) are fused with the mature form of human serum albumin (i.e., amino acids 1-585 of human serum albumin as shown in FIGS. 1 and 2 of EP Patent 0 322 094) which is herein incorporated by reference in its entirety. In another preferred embodiment, polypeptides and/or antibodies of the present invention (including fragments or variants thereof) are fused with polypeptide fragments comprising, or alternatively consisting of, amino acid residues l-z of human serum albumin, where z is an integer from 369 to 419, as described in U.S. Pat. No. 5,766,883 herein incorporated by reference in its entirety. Polypeptides and/or antibodies of the present invention (including fragments or variants thereof) may be fused to either the N- or C-terminal end of the heterologous protein (e.g., immunoglobulin Fc polypeptide or human serum albumin polypeptide). Polynucleotides encoding fusion proteins of the invention are also encompassed by the invention.

[0150] Such fusion proteins as those described above may facilitate purification and may increase half-life in vivo. This has been shown for chimeric proteins consisting of the first two domains of the human CD4-polypeptide and various domains of the constant regions of the heavy or light chains of mammalian immunoglobulins. See, e.g., EP 394,827; Traunecker et al., Nature, 331:84-86 (1988). Enhanced delivery of an antigen across the epithelial barrier to the immune system has been demonstrated for antigens (e.g., insulin) conjugated to an FcRn binding partner such as IgG or Fc fragments (see, e.g., PCT Publications WO 96/22024 and WO 99/04813). IgG Fusion proteins that have a disulfide-linked dimeric structure due to the IgG portion desulfide bonds have also been found to be more efficient in binding and neutralizing other molecules than monomeric polypeptides or fragments thereof alone. See, e.g., Fountoulakis et al., J. Biochem., 270:3958-3964 (1995). Nucleic acids encoding the above epitopes can also be recombined with a gene of interest as an epitope tag (e.g., the hemagglutinin (HA) tag or flag tag) to aid in detection and purification of the expressed polypeptide. For example, a system described by Janknecht et al. allows for the ready purification of non-denatured fusion proteins expressed in human cell lines (Janknecht et al., 1991, Proc. Natl. Acad. Sci. USA 88:8972-897). In this system, the gene of interest is subcloned into a vaccinia recombination plasmid such that the open reading frame of the gene is translationally fused to an amino-terminal tag consisting of six histidine residues. The tag serves as a matrix binding domain for the fusion protein. Extracts from cells infected with the recombinant vaccinia virus are loaded onto Ni2+ nitriloacetic acid-agarose column and histidine-tagged proteins can be selectively eluted with imidazole-containing buffers.

[0151] Fusion Proteins

[0152] Any polypeptide of the present invention can be used to generate fusion proteins. For example, the polypeptide of the present invention, when fused to a second protein, can be used as an antigenic tag. Antibodies raised against the polypeptide of the present invention can be used to indirectly detect the second protein by binding to the polypeptide. Moreover, because secreted proteins target cellular locations based on trafficking signals, polypeptides of the present invention which are shown to be secreted can be used as targeting molecules once fused to other proteins.

[0153] Examples of domains that can be fused to polypeptides of the present invention include not only heterologous signal sequences, but also other heterologous functional regions. The fusion does not necessarily need to be direct, but may occur through linker sequences.

[0154] In certain preferred embodiments, proteins of the invention are fusion proteins comprising an amino acid sequence that is an N and/or C-terminal deletion of a polypeptide of the invention. In preferred embodiments, the invention is directed to a fusion protein comprising an amino acid sequence that is at least 80%, 85%, 90%, 95%, 96%, 97%, 98% or 99% identical to a polypeptide sequence of the invention. Polynucleotides encoding these proteins are also encompassed by the invention.

[0155] Moreover, fusion proteins may also be engineered to improve characteristics of the polypeptide of the present invention. For instance, a region of additional amino acids, particularly charged amino acids, may be added to the N-terminus of the polypeptide to improve stability and persistence during purification from the host cell or subsequent handling and storage. Also, peptide moieties may be added to the polypeptide to facilitate purification. Such regions may be removed prior to final preparation of the polypeptide. The addition of peptide moieties to facilitate handling of polypeptides is familiar and routine techniques in the art.

[0156] As one of skill in the art will appreciate that, as discussed above, polypeptides of the present invention, and epitope-bearing fragments thereof, can be combined with heterologous polypeptide sequences. For example, the polypeptides of the present invention may be fused with heterologous polypeptide sequences, for example, the polypeptides of the present invention may be fused with the constant domain of immunoglobulins (IgA, IgE, IgG, IgM) or portions thereof (CH1, CH2, CH3, and any combination thereof, including both entire domains and portions thereof), or albumin (including, but not limited to, native or recombinant human albumin or fragments or variants thereof (see, e.g., U.S. Pat. No. 5,876,969, issued Mar. 2, 1999, EP Patent 0 413 622, and U.S. Pat. No. 5,766,883, issued Jun. 16, 1998, herein incorporated by reference in their entirety)), resulting in chimeric polypeptides. For example, EP-A-O 464 533 (Canadian counterpart 2045869) discloses fusion proteins comprising various portions of constant region of immunoglobulin molecules together with another human protein or part thereof. In many cases, the Fc part in a fusion protein is beneficial in therapy and diagnosis, and thus can result in, for example, improved pharmacokinetic properties (EP-A 0232 262). Alternatively, deleting the Fc part after the fusion protein has been expressed, detected, and purified, would be desired. For example, the Fc portion may hinder therapy and diagnosis if the fusion protein is used as an antigen for immunizations. In drug discovery, for example, human proteins, such as hIL-5, have been fused with Fc portions for the purpose of high-throughput screening assays to identify antagonists of hIL-5. See, D. Bennett et al., J. Molecular Recognition 8:52-58 (1995); K. Johanson et al., J. Biol. Chem. 270:9459-9471 (1995).

[0157] Moreover, the polypeptides of the present invention can be fused to marker sequences, such as a polypeptide, which facilitates purification of the fused polypeptide. In preferred embodiments, the marker amino acid sequence is a hexa-histidine peptide, such as the tag provided in a pQE vector (QIAGEN, Inc., 9259 Eton Avenue, Chatsworth, Calif., 91311), among others, many of which are commercially available. As described in Gentz et al., Proc. Natl. Acad. Sci. USA 86:821-824 (1989), for instance, hexa-histidine provides for convenient purification of the fusion protein. Another peptide tag useful for purification, the “HA” tag, corresponds to an epitope derived from the influenza hemagglutinin protein (Wilson et al., Cell 37:767 (1984).)

[0158] Additional fusion proteins of the invention may be generated through the techniques of gene-shuffling, motif-shuffling, exon-shuffling, and/or codon-shuffling (collectively referred to as “DNA shuffling”), briefly described below, and further described herein. DNA shuffling may be employed to modulate the activities of polypeptides of the invention, such methods can be used to generate polypeptides with altered activity, as well as agonists and antagonists of the polypeptides. See, generally, U.S. Pat. Nos. 5,605,793; 5,811,238; 5,830,721; 5,834,252; and 5,837,458, and Patten et al., Curr. Opinion Biotechnol. 8:724-33 (1997); Harayama, Trends Biotechnol. 16(2):76-82 (1998); Hansson et al., J. Mol. Biol. 287:265-76 (1999); and Lorenzo and Blasco, Biotechniques 24(2):308-13 (1998); each of these patents and publications are hereby incorporated by reference in its entirety). In a preferred embodiment, one or more components, motifs, sections, parts, domains, fragments, etc., of a polynucleotide encoding a polypeptide of the invention may be recombined with one or more components, motifs, sections, parts, domains, fragments, etc., of one or more heterologous molecules encoding a heterologous polypeptide.

[0159] Thus, any of these above fusions can be engineered using the polynucleotides or the polypeptides of the present invention.

[0160] Recombinant and Synthetic Production of Polypeptides of the Invention

[0161] The present invention also relates to vectors containing the polynucleotide of the present invention, host cells, and the production of polypeptides by synthetic and recombinant techniques. The vector may be, for example, a phage, plasmid, viral, or retroviral vector. Retroviral vectors may be replication competent or replication defective. In the latter case, viral propagation generally will occur only in complementing host cells.

[0162] The polynucleotides of the invention may be joined to a vector containing a selectable marker for propagation in a host. Generally, a plasmid vector is introduced in a precipitate, such as a calcium phosphate precipitate, or in a complex with a charged lipid. If the vector is a virus, it may be packaged in vitro using an appropriate packaging cell line and then transduced into host cells.

[0163] The polynucleotide insert should be operatively linked to an appropriate promoter, such as the phage lambda PL promoter, the E. coli lac, trp, phoa and tac promoters, the SV40 early and late promoters and promoters of retroviral LTRs, to name a few. Other suitable promoters will be known to the skilled artisan. The expression constructs will further contain sites for transcription initiation, termination, and, in the transcribed region, a ribosome binding site for translation. The coding portion of the transcripts expressed by the constructs will preferably include a translation initiating codon at the beginning and a termination codon (UAA, UGA or UAG) appropriately positioned at the end of the polypeptide to be translated.

[0164] As indicated, the expression vectors will preferably include at least one selectable marker. Such markers include dihydrofolate reductase, G418 or neomycin resistance, glutamine synthase, for eukaryotic cell culture and tetracycline, kanamycin or ampicillin resistance genes for culturing in E. coli and other bacteria. Representative examples of appropriate hosts include, but are not limited to, bacterial cells, such as E. coli, Streptomyces and Salmonella typhimurium cells; fungal cells, such as yeast cells (e.g., Saccharomyces cerevisiae or Pichia pastoris (ATCC Accession No. 201178)); insect cells such as Drosophila S2 and Spodoptera Sf9 cells; animal cells such as CHO, COS, 293, NSO and Bowes melanoma cells; and plant cells. Appropriate culture mediums and conditions for the above-described host cells are known in the art.

[0165] Among vectors preferred for use in bacteria include pQE70, pQE60 and pQE-9, available from QIAGEN, Inc.; pBluescript vectors, Phagescript vectors, pNH8A, pNH16a, pNH18A, pNH46A, available from Stratagene Cloning Systems, Inc.; and ptrc99a, pKK223-3, pKK233-3, pDR540, pRIT5 available from Pharmacia Biotech, Inc. Among preferred eukaryotic vectors are pWLNEO, pSV2CAT, pOG44, pXT1 and pSG available from Stratagene; and pSVK3, pBPV, pMSG and pSVL available from Pharmacia. Preferred expression vectors for use in yeast systems include, but are not limited to pYES2, pYD1, pTEF1/Zeo, pYES2/GS, pPICZ, pGAPZ, pGAPZalph, pPIC9, pPIC3.5, pHIL-D2, pHIL-SI, pPIC3.5K, pPIC9K, and PA0815 (all available from Invitrogen, Carlsbad, Calif.). Other suitable vectors will be readily apparent to the skilled artisan.

[0166] Vectors which use glutamine synthase (GS) or DHFR as the selectable markers can be amplified in the presence of the drugs methionine sulphoximine or methotrexate, respectively. An advantage of glutamine synthase based vectors is the availabilty of cell lines (e.g., the murine myeloma cell line, NSO) which are glutamine synthase negative. Glutamine synthase expression systems can also function in glutamine synthase expressing cells (e.g., Chinese Hamster Ovary (CHO) cells) by providing additional inhibitor to prevent the functioning of the endogenous gene. A glutamine synthase expression system and components thereof are detailed in PCT publications: WO87/04462; WO86/05807; WO89/01036; WO89/10404; and WO91/06657 which are hereby incorporated in their entireties by reference herein. Additionally, glutamine synthase expression vectors can be obtained from Lonza Biologics, Inc. (Portsmouth, N.H.). Expression and production of monoclonal antibodies using a GS expression system in murine myeloma cells is described in Bebbington et al., Bio/technology 10:169(1992) and in Biblia and Robinson Biotechnol. Prog. 11:1 (1995) which are herein incorporated by reference.

[0167] The present invention also relates to host cells containing the above-described vector constructs described herein, and additionally encompasses host cells containing nucleotide sequences of the invention that are operably associated with one or more heterologous control regions (e.g., promoter and/or enhancer) using techniques known of in the art. The host cell can be a higher eukaryotic cell, such as a mammalian cell (e.g., a human derived cell), or a lower eukaryotic cell, such as a yeast cell, or the host cell can be a prokaryotic cell, such as a bacterial cell. A host strain may be chosen, which modulates the expression of the inserted gene sequences, or modifies and processes the gene product in the specific fashion desired. Expression from certain promoters can be elevated in the presence of certain inducers; thus expression of the genetically engineered polypeptide may be controlled. Furthermore, different host cells have characteristics and specific mechanisms for the translational and post-translational processing and modification (e.g., phosphorylation, cleavage) of proteins. Appropriate cell lines can be chosen to ensure the desired modifications and processing of the foreign protein expressed.

[0168] Introduction of the nucleic acids and nucleic acid constructs of the invention into the host cell can be effected by calcium phosphate transfection, DEAE-dextran mediated transfection, cationic lipid-mediated transfection, electroporation, transduction, infection, or other methods. Such methods are described in many standard laboratory manuals, such as Davis et al., Basic Methods In Molecular Biology (1986). It is specifically contemplated that the polypeptides of the present invention may in fact be expressed by a host cell lacking a recombinant vector.

[0169] In addition to encompassing host cells containing the vector constructs discussed herein, the invention also encompasses primary, secondary, and immortalized host cells of vertebrate origin, particularly mammalian origin, that have been engineered to delete or replace endogenous genetic material (e.g., colon or colon cancer antigen coding sequence), and/or to include genetic material (e.g., heterologous polynucleotide sequences) that is operably associated with colon or colon cancer associated polynucleotides of the invention, and which activates, alters, and/or amplifies endogenous colon cancer associated polynucleotides. For example, techniques known in the art may be used to operably associate heterologous control regions (e.g., promoter and/or enhancer) and endogenous colon or colon cancer associated polynucleotide sequences via homologous recombination (see, e.g., U.S. Pat. No. 5,641,670, issued Jun. 24, 1997; International Publication Number WO 96/29411; International Publication Number WO 94/12650; Koller et al., Proc. Natl. Acad. Sci. USA 86:8932-8935 (1989); and Zijlstra et al., Nature 342:435-438 (1989), the disclosures of each of which are incorporated by reference in their entireties).

[0170] Polypeptides of the present invention can also be recovered from: products purified from natural sources, including bodily fluids, tissues and cells, whether directly isolated or cultured; products of chemical synthetic procedures; and products produced by recombinant techniques from a prokaryotic or eukaryotic host, including, for example, bacterial, yeast, higher plant, insect, and mammalian cells. Depending upon the host employed in a recombinant production procedure, the polypeptides of the present invention may be glycosylated or may be non-glycosylated. In addition, polypeptides of the invention may also include an initial modified methionine residue, in some cases as a result of host-mediated processes. Thus, it is well known in the art that the N-terminal methionine encoded by the translation initiation codon generally is removed with high efficiency from any protein after translation in all eukaryotic cells. While the N-terminal methionine on most proteins also is efficiently removed in most prokaryotes, for some proteins, this prokaryotic removal process is inefficient, depending on the nature of the amino acid to which the N-terminal methionine is covalently linked.

[0171] In one embodiment, the yeast Pichia pastoris is used to express polypeptides of the invention in a eukaryotic system. Pichia pastoris is a methylotrophic yeast which can metabolize methanol as its sole carbon source. A main step in the methanol metabolization pathway is the oxidation of methanol to formaldehyde using O₂. This reaction is catalyzed by the enzyme alcohol oxidase. In order to metabolize methanol as its sole carbon source, Pichia pastoris must generate high levels of alcohol oxidase due, in part, to the relatively low affinity of alcohol oxidase for O₂. Consequently, in a growth medium depending on methanol as a main carbon source, the promoter region of one of the two alcohol oxidase genes (AOX1) is highly active. In the presence of methanol, alcohol oxidase produced from the AOX1 gene comprises up to approximately 30% of the total soluble protein in Pichia pastoris. See, Ellis, S. B., et al., Mol. Cell. Biol. 5:1111-21 (1985); Koutz, P. J, et al., Yeast 5:167-77 (1989); Tschopp, J. F., et al., Nucl. Acids Res. 15:3859-76 (1987). Thus, a heterologous coding sequence, such as, for example, a polynucleotide of the present invention, under the transcriptional regulation of all or part of the AOX1 regulatory sequence is expressed at exceptionally high levels in Pichia yeast grown in the presence of methanol.

[0172] In one example, the plasmid vector pPIC9K is used to express DNA encoding a polypeptide of the invention, as set forth herein, in a Pichea yeast system essentially as described in “Pichia Protocols: Methods in Molecular Biology,” D. R. Higgins and J. Cregg, eds. The Humana Press, Totowa, N.J., 1998. This expression vector allows expression and secretion of a polypeptide of the invention by virtue of the strong AOX1 promoter linked to the Pichia pastoris alkaline phosphatase (PHO) secretory signal peptide (i.e., leader) located upstream of a multiple cloning site.

[0173] Many other yeast vectors could be used in place of pPIC9K, such as, pYES2, pYD1, pTEF1/Zeo, pYES2/GS, pPICZ, pGAPZ, pGAPZalpha, pPIC9, pPIC3.5, pHIL-D2, pHIL-S1, pPIC3.5K, and PA0815, as one skilled in the art would readily appreciate, as long as the proposed expression construct provides appropriately located signals for transcription, translation, secretion (if desired), and the like, including an in-frame AUG as required.

[0174] In another embodiment, high-level expression of a heterologous coding sequence, such as, for example, a polynucleotide of the present invention, may be achieved by cloning the heterologous polynucleotide of the invention into an expression vector such as, for example, pGAPZ or pGAPZalpha, and growing the yeast culture in the absence of methanol.

[0175] In addition to encompassing host cells containing the vector constructs discussed herein, the invention also encompasses primary, secondary, and immortalized host cells of vertebrate origin, particularly mammalian origin, that have been engineered to delete or replace endogenous genetic material (e.g., coding sequence), and/or to include genetic material (e.g., heterologous polynucleotide sequences) that is operably associated with polynucleotides of the invention, and which activates, alters, and/or amplifies endogenous polynucleotides. For example, techniques known in the art may be used to operably associate heterologous control regions (e.g., promoter and/or enhancer) and endogenous polynucleotide sequences via homologous recombination (see, e.g., U.S. Pat. No. 5,641,670, issued Jun. 24, 1997; International Publication No. WO 96/29411, published Sep. 26, 1996; International Publication No. WO 94/12650, published Aug. 4, 1994; Koller et al., Proc. Natl. Acad. Sci. USA 86:8932-8935 (1989); and Zijlstra et al., Nature 342:435-438 (1989), the disclosures of each of which are incorporated by reference in their entireties).

[0176] In addition, polypeptides of the invention can be chemically synthesized using techniques known in the art (e.g., see Creighton, 1983, Proteins: Structures and Molecular Principles, W. H. Freeman & Co., N.Y., and Hunkapiller et al., Nature, 310:105-111 (1984)). For example, a polypeptide corresponding to a fragment of a polypeptide can be synthesized by use of a peptide synthesizer. Furthermore, if desired, nonclassical amino acids or chemical amino acid analogs can be introduced as a substitution or addition into the polypeptide sequence. Non-classical amino acids include, but are not limited to, to the D-isomers of the common amino acids, 2,4-diaminobutyric acid, a-amino isobutyric acid, 4-aminobutyric acid, Abu, 2-amino butyric acid, g-Abu, e-Ahx, 6-amino hexanoic acid, Aib, 2-amino isobutyric acid, 3-amino propionic acid, omithine, norleucine, norvaline, hydroxyproline, sarcosine, citrulline, homocitrulline, cysteic acid, t-butylglycine, t-butylalanine, phenylglycine, cyclohexylalanine, b-alanine, fluoro-amino acids, designer amino acids such as b-methyl amino acids, Ca-methyl amino acids, Na-methyl amino acids, and amino acid analogs in general. Furthermore, the amino acid can be D (dextrorotary) or L (levorotary).

[0177] The invention encompasses polypeptides of the present invention which are differentially modified during or after translation, e.g., by glycosylation, acetylation, phosphorylation, amidation, derivatization by known protecting/blocking groups, proteolytic cleavage, linkage to an antibody molecule or other cellular ligand, etc. Any of numerous chemical modifications may be carried out by known techniques, including but not limited, to specific chemical cleavage by cyanogen bromide, trypsin, chymotrypsin, papain, V8 protease, NaBH4; acetylation, formylation, oxidation, reduction; metabolic synthesis in the presence of tunicamycin; etc.

[0178] Additional post-translational modifications encompassed by the invention include, for example, e.g., N-linked or O-linked carbohydrate chains, processing of N-terminal or C-terminal ends), attachment of chemical moieties to the amino acid backbone, chemical modifications of N-linked or O-linked carbohydrate chains, and addition or deletion of an N-terminal methionine residue as a result of procaryotic host cell expression. The polypeptides may also be modified with a detectable label, such as an enzymatic, fluorescent, isotopic or affinity label to allow for detection and isolation of the protein.

[0179] Examples of suitable enzymes include horseradish peroxidase, alkaline phosphatase, beta-galactosidase, or acetylcholinesterase; examples of suitable prosthetic group complexes include streptavidinibiotin and avidin/biotin; examples of suitable fluorescent materials include umbelliferone, fluorescein, fluorescein isothiocyanate, rhodamine, dichlorotriazinylamine fluorescein, dansyl chloride or phycoerythrin; an example of a luminescent material includes luminol; examples of bioluminescent materials include luciferase, luciferin, and aequorin; and examples of suitable radioactive material include iodine (¹²¹I, ¹²³I, ¹²⁵I, ¹³¹I), carbon (¹⁴C), sulfur (³⁵S), tritium (³H), indium (¹¹¹In, ¹¹²In, 113mIn, ^{115m}In), technetium (⁹⁹Tc, ^{99m}Tc), thallium (²⁰¹Ti), gallium (⁶⁸Ga, 67Ga), palladium (¹⁰³Pd), molybdenum (⁹⁹Mo), xenon (¹³³Xe), fluorine (¹⁸F), ¹⁵³Sm, ¹⁷⁷Lu, ¹⁵⁹Gd, ¹⁴⁹Pm, ¹⁴⁰La, ¹⁷⁵Yb, ¹⁶⁶Ho, ⁹⁰Y, ⁴⁷Sc, ¹⁸⁶Re, ¹⁸⁸Re, ¹⁴²Pr, ¹⁰⁵Rh, and ⁹⁷Ru.

[0180] In specific embodiments, a polypeptide of the present invention or fragment or variant thereof is attached to macrocyclic chelators that associate with radiometal ions, including but not limited to, ¹⁷⁷Lu, ⁹⁹Y, ¹⁶⁶Ho, and ¹⁵³Sm, to polypeptides. In a preferred embodiment, the radiometal ion associated with the macrocyclic chelators is ¹¹¹In. In another preferred embodiment, the radiometal ion associated with the macrocyclic chelator is ⁹⁰Y. In specific embodiments, the macrocyclic chelator is 1,4,7,10-tetraazacyclododecane-N,N′,N″,N′″-tetraacetic acid (DOTA). In other specific embodiments, DOTA is attached to an antibody of the invention or fragment thereof via a linker molecule. Examples of linker molecules useful for conjugating DOTA to a polypeptide are commonly known in the art—see, for example, DeNardo et al., Clin Cancer Res. 4(10):2483-90 (1998); Peterson et al., Bioconjug. Chem. 10(4):553-7 (1999); and Zimmerman et al, Nucl. Med. Biol. 26(8):943-50 (1999); which are hereby incorporated by reference in their entirety.

[0181] As mentioned, the colon or colon cancer associated proteins of the invention may be modified by either natural processes, such as posttranslational processing, or by chemical modification techniques which are well known in the art. It will be appreciated that the same type of modification may be present in the same or varying degrees at several sites in a given colon or colon cancer associated polypeptide. Colon or colon cancer associated polypeptides may be branched, for example, as a result of ubiquitination, and they may be cyclic, with or without branching. Cyclic, branched, and branched cyclic colon or colon cancer associated polypeptides may result from posttranslation natural processes or may be made by synthetic methods. Modifications include acetylation, acylation, ADP-ribosylation, amidation, covalent attachment of flavin, covalent attachment of a heme moiety, covalent attachment of a nucleotide or nucleotide derivative, covalent attachment of a lipid or lipid derivative, covalent attachment of phosphotidylinositol, cross-linking, cyclization, disulfide bond formation, demethylation, formation of covalent cross-links, formation of cysteine, formation of pyroglutamate, formylation, gamma-carboxylation, glycosylation, GPI anchor formation, hydroxylation, iodination, methylation, myristoylation, oxidation, pegylation, proteolytic processing, phosphorylation, prenylation, racemization, selenoylation, sulfation, transfer-RNA mediated addition of amino acids to proteins such as arginylation, and ubiquitination. (See, for instance, PROTEINS—STRUCTURE AND MOLECULAR PROPERTIES, 2nd Ed., T. E. Creighton, W. H. Freeman and Company, New York (1993); POSTTRANSLATIONAL COVALENT MODIFICATION OF PROTEINS, B. C. Johnson, Ed., Academic Press, New York, pgs. 1-12 (1983); Seifter et al., Meth. Enzymol. 182:626-646 (1990); Rattan et al., Ann. N.Y. Acad. Sci. 663:48-62 (1992)).

[0182] Also provided by the invention are chemically modified derivatives of the polypeptides of the invention which may provide additional advantages such as increased solubility, stability and circulating time of the polypeptide, or decreased immunogenicity (see U.S. Pat. No. 4,179,337). The chemical moieties for derivitization may be selected from water soluble polymers such as polyethylene glycol, ethylene glycol/propylene glycol copolymers, carboxymethylcellulose, dextran, polyvinyl alcohol and the like. The polypeptides may be modified at random positions within the molecule, or at predetermined positions within the molecule and may include one, two, three or more attached chemical moieties.

[0183] The polymer may be of any molecular weight, and may be branched or unbranched. For polyethylene glycol, the preferred molecular weight is between about 1 kDa and about 100 kDa (the term “about” indicating that in preparations of polyethylene glycol, some molecules will weigh more, some less, than the stated molecular weight) for ease in handling and manufacturing. Other sizes may be used, depending on the desired therapeutic profile (e.g., the duration of sustained release desired, the effects, if any on biological activity, the ease in handling, the degree or lack of antigenicity and other known effects of the polyethylene glycol to a therapeutic protein or analog). For example, the polyethylene glycol may have an average molecular weight of about 200, 500, 1000, 1500, 2000, 2500, 3000, 3500, 4000, 4500, 5000, 5500, 6000, 6500, 7000, 7500, 8000, 8500, 9000, 9500, 10,000, 10,500, 11,000, 11,500, 12,000, 12,500, 13,000, 13,500, 14,000, 14,500, 15,000, 15,500, 16,000, 16,500, 17,000, 17,500, 18,000, 18,500, 19,000, 19,500, 20,000, 25,000, 30,000, 35,000, 40,000, 50,000, 55,000, 60,000, 65,000, 70,000, 75,000, 80,000, 85,000, 90,000, 95,000, or 100,000 kDa.

[0184] As noted above, the polyethylene glycol may have a branched structure. Branched polyethylene glycols are described, for example, in U.S. Pat. No. 5,643,575; Morpurgo et al., Appl. Biochem. Biotechnol. 56:59-72 (1996); Vorobjev et al., Nucleosides Nucleotides 18:2745-2750 (1999); and Caliceti et al., Bioconjug. Chem. 10:638-646 (1999), the disclosures of each of which are incorporated herein by reference.

[0185] The polyethylene glycol molecules (or other chemical moieties) should be attached to the protein with consideration of effects on functional or antigenic domains of the protein. There are a number of attachment methods available to those skilled in the art, such as, for example, the method disclosed in EP 0 401 384 (coupling PEG to G-CSF), herein incorporated by reference; see also Malik et al., Exp. Hematol. 20:1028-1035 (1992), reporting pegylation of GM-CSF using tresyl chloride. For example, polyethylene glycol may be covalently bound through amino acid residues via a reactive group, such as a free amino or carboxyl group. Reactive groups are those to which an activated polyethylene glycol molecule may be bound. The amino acid residues having a free amino group may include lysine residues and the N-terminal amino acid residues; those having a free carboxyl group may include aspartic acid residues glutamic acid residues and the C-terminal amino acid residue. Sulfhydryl groups may also be used as a reactive group for attaching the polyethylene glycol molecules. Preferred for therapeutic purposes is attachment at an amino group, such as attachment at the N-terminus or lysine group.

[0186] As suggested above, polyethylene glycol may be attached to proteins via linkage to any of a number of amino acid residues. For example, polyethylene glycol can be linked to proteins via covalent bonds to lysine, histidine, aspartic acid, glutamic acid, or cysteine residues. One or more reaction chemistries may be employed to attach polyethylene glycol to specific amino acid residues (e.g., lysine, histidine, aspartic acid, glutamic acid, or cysteine) of the protein or to more than one type of amino acid residue (e.g., lysine, histidine, aspartic acid, glutamic acid, cysteine and combinations thereof) of the protein.

[0187] One may specifically desire proteins chemically modified at the N-terminus. Using polyethylene glycol as an illustration of the present composition, one may select from a variety of polyethylene glycol molecules (by molecular weight, branching, etc.), the proportion of polyethylene glycol molecules to protein (polypeptide) molecules in the reaction mix, the type of pegylation reaction to be performed, and the method of obtaining the selected N-terminally pegylated protein. The method of obtaining the N-terminally pegylated preparation (i.e., separating this moiety from other monopegylated moieties if necessary) may be by purification of the N-terminally pegylated material from a population of pegylated protein molecules. Selective proteins chemically modified at the N-terminus modification may be accomplished by reductive alkylation which exploits differential reactivity of different types of primary amino groups (lysine versus the N-terminal) available for derivatization in a particular protein. Under the appropriate reaction conditions, substantially selective derivatization of the protein at the N-terminus with a carbonyl group containing polymer is achieved.

[0188] As indicated above, pegylation of the proteins of the invention may be accomplished by any number of means. For example, polyethylene glycol may be attached to the protein either directly or by an intervening linker. Linkerless systems for attaching polyethylene glycol to proteins are described in Delgado et al., Crit. Rev. Thera. Drug Carrier Sys. 9:249-304 (1992); Francis et al., Intern. J. of Hematol. 68:1-18 (1998); U.S. Pat. No. 4,002,531; U.S. Pat. No. 5,349,052; WO 95/06058; and WO 98/32466, the disclosures of each of which are incorporated herein by reference.

[0189] One system for attaching polyethylene glycol directly to amino acid residues of proteins without an intervening linker employs tresylated MPEG, which is produced by the modification of monmethoxy polyethylene glycol (MPEG) using tresylchloride (ClSO₂CH₂CF₃). Upon reaction of protein with tresylated MPEG, polyethylene glycol is directly attached to amine groups of the protein. Thus, the invention includes protein-polyethylene glycol conjugates produced by reacting proteins of the invention with a polyethylene glycol molecule having a 2,2,2-trifluoreothane sulphonyl group.

[0190] Polyethylene glycol can also be attached to proteins using a number of different intervening linkers. For example, U.S. Pat. No. 5,612,460, the entire disclosure of which is incorporated herein by reference, discloses urethane linkers for connecting polyethylene glycol to proteins. Protein-polyethylene glycol conjugates wherein the polyethylene glycol is attached to the protein by a linker can also be produced by reaction of proteins with compounds such as MPEG-succinimidylsuccinate, MPEG activated with 1,1′-carbonyldiimidazole, MPEG-2,4,5-trichloropenylcarbonate, MPEG-p-nitrophenolcarbonate, and various MPEG-succinate derivatives. A number of additional polyethylene glycol derivatives and reaction chemistries for attaching polyethylene glycol to proteins are described in International Publication No. WO 98/32466, the entire disclosure of which is incorporated herein by reference. Pegylated protein products produced using the reaction chemistries set out herein are included within the scope of the invention.

[0191] The number of polyethylene glycol moieties attached to each protein of the invention (i.e., the degree of substitution) may also vary. For example, the pegylated proteins of the invention may be linked, on average, to 1, 2, 3, 4, 5, 6, 7, 8, 9, 10, 12, 15, 17, 20, or more polyethylene glycol molecules. Similarly, the average degree of substitution within ranges such as 1-3,2-4, 3-5,4-6, 5-7,6-8, 7-9,8-10, 9-11, 10-12, 11-13, 12-14, 13-15, 14-16, 15-17, 16-18, 17-19, or 18-20 polyethylene glycol moieties per protein molecule. Methods for determining the degree of substitution are discussed, for example, in Delgado et al., Crit. Rev. Thera. Drug Carrier Sys. 9:249-304 (1992).

[0192] The colon or colon cancer associated polypeptides of the invention can be recovered and purified from chemical synthesis and recombinant cell cultures by standard methods which include, but are not limited to, ammonium sulfate or ethanol precipitation, acid extraction, anion or cation exchange chromatography, phosphocellulose chromatography, hydrophobic interaction chromatography, affinity chromatography, hydroxylapatite chromatography and lectin chromatography. Most preferably, high performance liquid chromatography (“HPLC”) is employed for purification. Well known techniques for refolding protein may be employed to regenerate active conformation when the polypeptide is denatured during isolation and/or purification.

[0193] Colon or colon cancer associated polynucleotides and polypeptides may be used in accordance with the present invention for a variety of applications, particularly those that make use of the chemical and biological properties of colon or colon cancer associated antigens. Among these are applications in the detection, prevention, diagnosis and/or treatment of diseases associated with the colon, including, but not limited to, congenital abnormalities, colonic diverticulitis, toxic megacolon, constipation, disorders caused by parasites and protozoa, bacteria infection, viral infection; inflammatory bowel disease; neoplastic disorders, such as, polyps, adenomas, lipomas, and angiomas, cancers, such as, rectal cancer, adenocarcinoma, colorectal carcinoma, colon cancer, colon carcinoma, colorectal cancer; miscellaneous intestinal inflammatory disorders, inflammatory colonic disease, ischemic colitis, radiation proctitis, non-inflammatory bowel disease (non-IBD), colonic inflammation; colitis; diarrhea and dysentary, malabsorption syndromes, mesenteric vascular occlusion, pneumatosis cystoides intestinalis, protein-losing enteropathies (intestinal lymphagiectasis); intestinal obstruction, intestinal perforation, sigmoid diseases, and/or as described under “Gastrointestinal Disorders” below. Additional applications relate to diagnosis and to treatment of disorders of cells, tissues and organisms. These aspects of the invention are discussed further below.

[0194] In a preferred embodiment, polynucleotides expressed in a particular tissue type are used to detect, diagnose, treat, prevent and/or prognose disorders associated with the tissue type.

[0195] The polypeptides of the invention may be in monomers or multimers (i.e., dimers, trimers, tetramers and higher multimers). Accordingly, the present invention relates to monomers and multimers of the polypeptides of the invention, their preparation, and compositions (preferably, Therapeutics) containing them. In specific embodiments, the polypeptides of the invention are monomers, dimers, trimers or tetramers. In additional embodiments, the multimers of the invention are at least dimers, at least trimers, or at least tetramers.

[0196] Multimers encompassed by the invention may be homomers or heteromers. As used herein, the term homomer refers to a multimer containing only polypeptides corresponding to a protein of the invention (e.g., the amino acid sequence of SEQ ID NO:Y, an amino acid sequence encoded by SEQ ID NO:X or the complement of SEQ ID NO:X, the amino acid sequence encoded by the portion of SEQ ID NO:X as defined in columns 8 and 9 of Table 2, and/or an amino acid sequence encoded by cDNA contained in Clone ID NO:Z (including fragments, variants, splice variants, and fusion proteins, corresponding to these as described herein)). These homomers may contain polypeptides having identical or different amino acid sequences. In a specific embodiment, a homomer of the invention is a multimer containing only polypeptides having an identical amino acid sequence. In another specific embodiment, a homomer of the invention is a multimer containing polypeptides having different amino acid sequences. In specific embodiments, the multimer of the invention is a homodimer (e.g., containing two polypeptides having identical or different amino acid sequences) or a homotrimer (e.g., containing three polypeptides having identical and/or different amino acid sequences). In additional embodiments, the homomeric multimer of the invention is at least a homodimer, at least a homotrimer, or at least a homotetramer.

[0197] As used herein, the term heteromer refers to a multimer containing two or more heterologous polypeptides (i.e., polypeptides of different proteins) in addition to the polypeptides of the invention. In a specific embodiment, the multimer of the invention is a heterodimer, a heterotrimer, or a heterotetramer. In additional embodiments, the heteromeric multimer of the invention is at least a heterodimer, at least a heterotrimer, or at least a heterotetramer.

[0198] Multimers of the invention may be the result of hydrophobic, hydrophilic, ionic and/or covalent associations and/or may be indirectly linked by, for example, liposome formation. Thus, in one embodiment, multimers of the invention, such as, for example, homodimers or homotrimers, are formed when polypeptides of the invention contact one another in solution. In another embodiment, heteromultimers of the invention, such as, for example, heterotrimers or heterotetramers, are formed when polypeptides of the invention contact antibodies to the polypeptides of the invention (including antibodies to the heterologous polypeptide sequence in a fusion protein of the invention) in solution. In other embodiments, multimers of the invention are formed by covalent associations with and/or between the polypeptides of the invention. Such covalent associations may involve one or more amino acid residues contained in the polypeptide sequence (e.g., that recited in SEQ ID NO:Y, encoded by the portion of SEQ ID NO:X as defined in columns 8 and 9 of Table 2, and/or encoded by the cDNA contained in Clone ID NO:Z). In one instance, the covalent associations are cross-linking between cysteine residues located within the polypeptide sequences which interact in the native (i.e., naturally occurring) polypeptide. In another instance, the covalent associations are the consequence of chemical or recombinant manipulation. Alternatively, such covalent associations may involve one or more amino acid residues contained in the heterologous polypeptide sequence in a fusion protein. In one example, covalent associations are between the heterologous sequence contained in a fusion protein of the invention (see, e.g., U.S. Pat. No. 5,478,925). In a specific example, the covalent associations are between the heterologous sequence contained in a Fc fusion protein of the invention (as described herein). In another specific example, covalent associations of fusion proteins of the invention are between heterologous polypeptide sequence from another protein that is capable of forming covalently associated multimers, such as for example, osteoprotegerin (see, e.g., International Publication NO: WO 98/49305, the contents of which are herein incorporated by reference in its entirety). In another embodiment, two or more polypeptides of the invention are joined through peptide linkers. Examples include those peptide linkers described in U.S. Pat. No. 5,073,627 (hereby incorporated by reference). Proteins comprising multiple polypeptides of the invention separated by peptide linkers may be produced using conventional recombinant DNA technology.

[0199] Another method for preparing multimer polypeptides of the invention involves use of polypeptides of the invention fused to a leucine zipper or isoleucine zipper polypeptide sequence. Leucine zipper and isoleucine zipper domains are polypeptides that promote multimerization of the proteins in which they are found. Leucine zippers were originally identified in several DNA-binding proteins (Landschulz et al., Science 240:1759, (1988)), and have since been found in a variety of different proteins. Among the known leucine zippers are naturally occurring peptides and derivatives thereof that dimerize or trimerize. Examples of leucine zipper domains suitable for producing soluble multimeric proteins of the invention are those described in PCT application WO 94/10308, hereby incorporated by reference. Recombinant fusion proteins comprising a polypeptide of the invention fused to a polypeptide sequence that dimerizes or trimerizes in solution are expressed in suitable host cells, and the resulting soluble multimeric fusion protein is recovered from the culture supernatant using techniques known in the art.

[0200] Trimeric polypeptides of the invention may offer the advantage of enhanced biological activity. Preferred leucine zipper moieties and isoleucine moieties are those that preferentially form trimers. One example is a leucine zipper derived from lung surfactant protein D (SPD), as described in Hoppe et al. (FEBS Letters 344:191, (1994)) and in U.S. patent application Ser. No. 08/446,922, hereby incorporated by reference. Other peptides derived from naturally occurring trimeric proteins may be employed in preparing trimeric polypeptides of the invention.

[0201] In another example, proteins of the invention are associated by interactions between Flag® polypeptide sequence contained in fusion proteins of the invention containing Flag® polypeptide sequence. In a further embodiment, proteins of the invention are associated by interactions between heterologous polypeptide sequence contained in Flag® fusion proteins of the invention and anti-Flag® antibody.

[0202] The multimers of the invention may be generated using chemical techniques known in the art. For example, polypeptides desired to be contained in the multimers of the invention may be chemically cross-linked using linker molecules and linker molecule length optimization techniques known in the art (see, e.g., U.S. Pat. No. 5,478,925, which is herein incorporated by reference in its entirety). Additionally, multimers of the invention may be generated using techniques known in the art to form one or more inter-molecule cross-links between the cysteine residues located within the sequence of the polypeptides desired to be contained in the multimer (see, e.g., U.S. Pat. No. 5,478,925, which is herein incorporated by reference in its entirety). Further, polypeptides of the invention may be routinely modified by the addition of cysteine or biotin to the C-terminus or N-terminus of the polypeptide and techniques known in the art may be applied to generate multimers containing one or more of these modified polypeptides (see, e.g., U.S. Pat. No. 5,478,925, which is herein incorporated by reference in its entirety). Additionally, techniques known in the art may be applied to generate liposomes containing the polypeptide components desired to be contained in the multimer of the invention (see, e.g., U.S. Pat. No. 5,478,925, which is herein incorporated by reference in its entirety).

[0203] Alternatively, multimers of the invention may be generated using genetic engineering techniques known in the art. In one embodiment, polypeptides contained in multimers of the invention are produced recombinantly using fusion protein technology described herein or otherwise known in the art (see, e.g., U.S. Pat. No. 5,478,925, which is herein incorporated by reference in its entirety). In a specific embodiment, polynucleotides coding for a homodimer of the invention are generated by ligating a polynucleotide sequence encoding a polypeptide of the invention to a sequence encoding a linker polypeptide and then further to a synthetic polynucleotide encoding the translated product of the polypeptide in the reverse orientation from the original C-terminus to the N-terminus (lacking the leader sequence) (see, e.g., U.S. Pat. No. 5,478,925, which is herein incorporated by reference in its entirety). In another embodiment, recombinant techniques described herein or otherwise known in the art are applied to generate recombinant polypeptides of the invention which contain a transmembrane domain (or hydrophobic or signal peptide) and which can be incorporated by membrane reconstitution techniques into liposomes (see, e.g., U.S. Pat. No. 5,478,925, which is herein incorporated by reference in its entirety). Antibodies

[0204] Further polypeptides of the invention relate to antibodies and T-cell antigen receptors (TCR) which immunospecifically bind a polypeptide, polypeptide fragment, or variant of the invention (e.g., a polypeptide or fragment or variant of the amino acid sequence of SEQ ID NO:Y or a polypeptide encoded by the cDNA contained in Clone ID NO:Z, and/or an epitope, of the present invention) as determined by immunoassays well known in the art for assaying specific antibody-antigen binding. Antibodies of the invention include, but are not limited to, polyclonal, monoclonal, multispecific, human, humanized or chimeric antibodies, single chain antibodies, Fab fragments, F(ab′) fragments, fragments produced by a Fab expression library, anti-idiotypic (anti-Id) antibodies (including, e.g., anti-Id antibodies to antibodies of the invention), intracellularly-made antibodies (i.e., intrabodies), and epitope-binding fragments of any of the above. The term “antibody,” as used herein, refers to immunoglobulin molecules and immunologically active portions of immunoglobulin molecules, i.e., molecules that contain an antigen binding site that immunospecifically binds an antigen. The immunoglobulin molecules of the invention can be of any type (e.g., IgG, IgE, IgM, IgD, IgA and IgY), class (e.g., IgG1, IgG2, IgG3, IgG4, IgA1 and IgA2) or subclass of immunoglobulin molecule. In preferred embodiments, the immunoglobulin molecules of the invention are IgG1. In other preferred embodiments, the immunoglobulin molecules of the invention are IgG4.

[0205] Most preferably the antibodies are human antigen-binding antibody fragments of the present invention and include, but are not limited to, Fab, Fab′ and F(ab′)₂, Fd, single-chain Fvs (scFv), single-chain antibodies, disulfide-linked Fvs (sdFv) and fragments comprising either a VL or VH domain. Antigen-binding antibody fragments, including single-chain antibodies, may comprise the variable region(s) alone or in combination with the entirety or a portion of the following: hinge region, CH1, CH2, and CH3 domains. Also included in the invention are antigen-binding fragments also comprising any combination of variable region(s) with a hinge region, CH1, CH2, and CH3 domains. The antibodies of the invention may be from any animal origin including birds and mammals. Preferably, the antibodies are human, murine (e.g., mouse and rat), donkey, ship rabbit, goat, guinea pig, camel, horse, or chicken. As used herein, “human” antibodies include antibodies having the amino acid sequence of a human immunoglobulin and include antibodies isolated from human immunoglobulin libraries or from animals transgenic for one or more human immunoglobulin and that do not express endogenous immunoglobulins, as described infra and, for example in, U.S. Pat. No. 5,939,598 by Kucherlapati et al.

[0206] The antibodies of the present invention may be monospecific, bispecific, trispecific or of greater multispecificity. Multispecific antibodies may be specific for different epitopes of a polypeptide of the present invention or may be specific for both a polypeptide of the present invention as well as for a heterologous epitope, such as a heterologous polypeptide or solid support material. See, e.g., PCT publications WO 93/17715; WO 92/08802; WO 91/00360; WO 92/05793; Tutt, et al., J. Immunol. 147:60-69 (1991); U.S. Pat. Nos. 4,474,893; 4,714,681; 4,925,648; 5,573,920; 5,601,819; Kostelny et al., J. Immunol. 148:1547-1553 (1992).

[0207] Antibodies of the present invention may be described or specified in terms of the epitope(s) or portion(s) of a polypeptide of the present invention which they recognize or specifically bind. The epitope(s) or polypeptide portion(s) may be specified as described herein, e.g., by N-terminal and C-terminal positions, or by size in contiguous amino acid residues, or listed in the Tables and Figures. Preferred epitopes of the invention include those shown in column 7 of Table 1A, as well as polynucleotides that encode these epitopes. Antibodies, which specifically bind any epitope or polypeptide of the present invention may also be excluded. Therefore, the present invention includes antibodies that specifically bind polypeptides of the present invention, and allows for the exclusion of the same.

[0208] Antibodies of the present invention may also be described or specified in terms of their cross-reactivity. Antibodies that do not bind any other analog, ortholog, or homolog of a polypeptide of the present invention are included. Antibodies that bind polypeptides with at least 95%, at least 90%, at least 85%, at least 80%, at least 75%, at least 70%, at least 65%, at least 60%, at least 55%, and at least 50% identity (as calculated using methods known in the art and described herein) to a polypeptide of the present invention are also included in the present invention. In specific embodiments, antibodies of the present invention cross-react with murine, rat and/or rabbit homologs of human proteins and the corresponding epitopes thereof. Antibodies that do not bind polypeptides with less than 95%, less than 90%, less than 85%, less than 80%, less than 75%, less than 70%, less than 65%, less than 60%, less than 55%, and less than 50% identity (as calculated using methods known in the art and described herein) to a polypeptide of the present invention are also included in the present invention. In a specific embodiment, the above-described cross-reactivity is with respect to any single specific antigenic or immunogenic polypeptide, or combination(s) of 2, 3, 4, 5, or more of the specific antigenic and/or immunogenic polypeptides disclosed herein. Further included in the present invention are antibodies which bind polypeptides encoded by polynucleotides which hybridize to a polynucleotide of the present invention under stringent hybridization conditions (as described herein). Antibodies of the present invention may also be described or specified in terms of their binding affinity to a polypeptide of the invention. Preferred binding affinities include those with a dissociation constant or Kd less than 5×10⁻² M, 10⁻² M, 5×10⁻³ M, 10⁻³ M, 5×10⁻⁴M 10⁻⁴ M, 5×10⁻⁵ M, 10⁻⁵ M, 5×10⁻⁶ M, 10⁻⁶ M, 5×10⁻⁷ M, 10⁷ M, 5×10⁻⁸ M, 10⁻⁸ M, 5×0⁻⁹ M, 10⁻⁹ M, 5×10⁻¹⁰ M, 10⁻¹⁰ M, 5×10⁻¹¹ M, 10⁻¹¹ M, 5×10⁻¹² M, 10⁻¹² M, 5×10⁻¹³ M, 10⁻¹³ M, 5×10⁻¹⁴ M, 10⁻¹⁴M, 5×10⁻¹⁵ M, or 10⁻¹⁵ M.

[0209] The invention also provides antibodies that competitively inhibit binding of an antibody to an epitope of the invention as determined by any method known in the art for determining competitive binding, for example, the immunoassays described herei-n. In preferred embodiments, the antibody competitively inhibits binding to the epitope by at least 95%, at least 90%, at least 85%, at least 80%, at least 75%, at least 70%, at least 60%, or at least 50%.

[0210] Antibodies of the present invention may act as agonists or antagonists of the polypeptides of the present invention. For example, the present invention includes antibodies which disrupt the receptor/ligand interactions with the polypeptides of the invention either partially or fully. Preferably, antibodies of the present invention bind an antigenic epitope disclosed herein, or a portion thereof. The invention features both receptor-specific antibodies and ligand-specific antibodies. The invention also features receptor-specific antibodies, which do not prevent ligand binding but prevent receptor activation. Receptor activation (i.e., signaling) may be determined by techniques described herein or otherwise known in the art. For example, receptor activation can be determined by detecting the phosphorylation (e.g., tyrosine or serine/threonine) of the receptor or its substrate by immunoprecipitation followed by western blot analysis (for example, as described supra). In specific embodiments, antibodies are provided that inhibit ligand activity or receptor activity by at least 95%, at least 90%, at least 85%, at least 80%, at least 75%, at least 70%, at least 60%, or at least 50% of the activity in absence of the antibody.

[0211] The invention also features receptor-specific antibodies which both prevent ligand binding and receptor activation as well as antibodies that recognize the receptor-ligand complex, and, preferably, do not specifically recognize the unbound receptor or the unbound ligand. Likewise, included in the invention are neutralizing antibodies which bind the ligand and prevent binding of the ligand to the receptor, as well as antibodies which bind the ligand, thereby preventing receptor activation, but do not prevent the ligand from binding the receptor. Further included in the invention are antibodies, which activate the receptor. These antibodies may act as receptor agonists, i.e., potentiate or activate either all or a subset of the biological activities of the ligand-mediated receptor activation, for example, by inducing dimerization of the receptor. The antibodies may be specified as agonists, antagonists or inverse agonists for biological activities comprising the specific biological activities of the peptides of the invention disclosed herein. The above antibody agonists can be made using methods known in the art. See, e.g., PCT publication WO 96/40281; U.S. Pat. No. 5,811,097; Deng et al., Blood 92(6):1981-1988 (1998); Chen et al., Cancer Res. 58(16):3668-3678 (1998); Harrop et al., J. Immunol. 161(4):1786-1794 (1998); Zhu et al., Cancer Res. 58(15):3209-3214 (1998); Yoon et al., J. Immunol. 160(7):3170-3179 (1998); Prat et al., J. Cell. Sci. 111(Pt2):237-247 (1998); Pitard et al., J. Immunol. Methods 205(2):177-190 (1997); Liautard et al., Cytokine 9(4):233-241 (1997); Carlson et al., J. Biol. Chem. 272(17):11295-11301 (1997); Taryman et al., Neuron 14(4):755-762 (1995); Muller et al., Structure 6(9):1153-1167 (1998); Bartunek et al., Cytokine 8(1):14-20 (1996) (which are all incorporated by reference herein in their entireties).

[0212] Antibodies of the present invention may be used, for example, to purify, detect, and target the polypeptides of the present invention, including both in vitro and in vivo diagnostic and therapeutic methods. For example, the antibodies have utility in immunoassays for qualitatively and quantitatively measuring levels of the polypeptides of the present invention in biological samples. See, e.g., Harlow et al., Antibodies: A Laboratory Manual, (Cold Spring Harbor Laboratory Press, 2nd ed. 1988); incorporated by reference herein in its entirety.

[0213] As discussed in more detail below, the antibodies of the present invention may be used either alone or in combination with other compositions. The antibodies may further be recombinantly fused to a heterologous polypeptide at the N- or C-terminus or chemically conjugated (including covalent and non-covalent conjugations) to polypeptides or other compositions. For example, antibodies of the present invention may be recombinantly fused or conjugated to molecules useful as labels in detection assays and effector molecules such as heterologous polypeptides, drugs, radionuclides, or toxins. See, e.g., PCT publications WO 92/08495; WO 91/14438; WO 89/12624; U.S. Pat. No. 5,314,995; and EP 396,387; the disclosures of which are incorporated herein by reference in their entireties.

[0214] The antibodies of the invention include derivatives that are modified, i.e., by the covalent attachment of any type of molecule to the antibody such that covalent attachment does not prevent the antibody from generating an anti-idiotypic response. For example, but not by way of limitation, the antibody derivatives include antibodies that have been modified, e.g., by glycosylation, acetylation, pegylation, phosphylation, amidation, derivatization by known protecting/blocking groups, proteolytic cleavage, linkage to a cellular ligand or other protein, etc. Any of numerous chemical modifications may be carried out by known techniques, including, but not limited to specific chemical cleavage, acetylation, formylation, metabolic synthesis of tunicamycin, etc. Additionally, the derivative may contain one or more non-classical amino acids.

[0215] The antibodies of the present invention may be generated by any suitable method known in the art. Polyclonal antibodies to an antigen-of-interest can be produced by various procedures well known in the art. For example, a polypeptide of the invention can be administered to various host animals including, but not limited to, rabbits, mice, rats, etc. to induce the production of sera containing polyclonal antibodies specific for the antigen. Various adjuvants may be used to increase the immunological response, depending on the host species, and include but are not limited to, Freund's (complete and incomplete), mineral gels such as aluminum hydroxide, surface active substances such as lysolecithin, pluronic polyols, polyanions, peptides, oil emulsions, keyhole limpet hemocyanins, dinitrophenol, and potentially useful human adjuvants such as BCG (bacille Calmette-Guerin) and Corynebacterium parvum. Such adjuvants are also well known in the art.

[0216] Monoclonal antibodies can be prepared using a wide variety of techniques known in the art including the use of hybridoma, recombinant, and phage display technologies, or a combination thereof. For example, monoclonal antibodies can be produced using hybridoma techniques including those known in the art and taught, for example, in Harlow et al., Antibodies: A Laboratory Manual, (Cold Spring Harbor Laboratory Press, 2nd ed. 1988); Hammerling, et al., in: Monoclonal Antibodies and T-Cell Hybridomas 563-681 (Elsevier, N.Y., 1981) (said references incorporated by reference in their entireties). The term “monoclonal antibody” as used herein is not limited to antibodies produced through hybridoma technology. The term “monoclonal antibody” refers to an antibody that is derived from a single clone, including any eukaryotic, prokaryotic, or phage clone, and not the method by which it is produced.

[0217] Methods for producing and screening for specific antibodies using hybridoma technology are routine and well known in the art and are discussed in detail in the Examples. In a non-limiting example, mice can be immunized with a polypeptide of the invention or a cell expressing such peptide. Once an immune response is detected, e.g., antibodies specific for the antigen are detected in the mouse serum, the mouse spleen is harvested and splenocytes isolated. The splenocytes are then fused by well known techniques to any suitable myeloma cells, for example cells from cell line SP20 available from the ATCC. Hybridomas are selected and cloned by limited dilution. The hybridoma clones are then assayed by methods known in the art for cells that secrete antibodies capable of binding a polypeptide of the invention. Ascites fluid, which generally contains high levels of antibodies, can be generated by immunizing mice with positive hybridoma clones.

[0218] Accordingly, the present invention provides methods of generating monoclonal antibodies as well as antibodies produced by the method comprising culturing a hybridoma cell secreting an antibody of the invention wherein, preferably, the hybridoma is generated by fusing splenocytes isolated from a mouse immunized with an antigen of the invention with myeloma cells and then screening the hybridomas resulting from the fusion for hybridoma clones that secrete an antibody able to bind a polypeptide of the invention.

[0219] Another well known method for producing both polyclonal and monoclonal human B cell lines is transformation using Epstein Barr Virus (EBV). Protocols for generating EBV-transformed B cell lines are commonly known in the art, such as, for example, the protocol outlined in Chapter 7.22 of Current Protocols in Immunology, Coligan et al., Eds., 1994, John Wiley & Sons, NY, which is hereby incorporated in its entirety by reference herein. The source of B cells for transformation is commonly human peripheral blood, but B cells for transformation may also be derived from other sources including, but not limited to, lymph nodes, tonsil, spleen, tumor tissue, and infected tissues. Tissues are generally made into single cell suspensions prior to EBV transformation. Additionally, steps may be taken to either physically remove or inactivate T cells (e.g., by treatment with cyclosporin A) in B cell-containing samples, because T cells from individuals seropositive for anti-EBV antibodies can suppress B cell immortalization by EBV.

[0220] In general, the sample containing human B cells is innoculated with EBV, and cultured for 3-4 weeks. A typical source of EBV is the culture supernatant of the B95-8 cell line (ATCC #VR-1492). Physical signs of EBV transformation can generally be seen towards the end of the 3-4 week culture period. By phase-contrast microscopy, transformed cells may appear large, clear, hairy and tend to aggregate in tight clusters of cells. Initially, EBV lines are generally polyclonal. However, over prolonged periods of cell cultures, EBV lines may become monoclonal or polyclonal as a result of the selective outgrowth of particular B cell clones. Alternatively, polyclonal EBV transformed lines may be subcloned (e.g., by limiting dilution culture) or fused with a suitable fusion partner and plated at limiting dilution to obtain monoclonal B cell lines. Suitable fusion partners for EBV transformed cell lines include mouse myeloma cell lines (e.g., SP2/0, X63-Ag8.653), heteromyeloma cell lines (human x mouse; e.g, SPAM-8, SBC-H20, and CB-F7), and human cell lines (e.g., GM 1500, SKO-007, RPMI 8226, and KR-4). Thus, the present invention also provides a method of generating polyclonal or monoclonal human antibodies against polypeptides of the invention or fragments thereof, comprising EBV-transformation of human B cells.

[0221] Antibody fragments, which recognize specific epitopes may be generated by known techniques. For example, Fab and F(ab′)₂ fragments of the invention may be produced by proteolytic cleavage of immunoglobulin molecules, using enzymes such as papain (to produce Fab fragments) or pepsin (to produce F(ab′)₂ fragments). F(ab′)₂ fragments contain the variable region, the light chain constant region and the CH1 domain of the heavy chain. For example, the antibodies of the present invention can also be generated using various phage display methods known in the art and as discussed in detail in the Examples (e.g., Example 10). In phage display methods, functional antibody domains are displayed on the surface of phage particles, which carry the polynucleotide sequences encoding them. In a particular embodiment, such phage can be utilized to display antigen binding domains expressed from a repertoire or combinatorial antibody library (e.g., human or murine). Phage expressing an antigen binding domain that binds the antigen of interest can be selected or identified with antigen, e.g., using labeled antigen or antigen bound or captured to a solid surface or bead. Phage used in these methods are typically filamentous phage including fd and M13 binding domains expressed from phage with Fab, Fv or disulfide stabilized Fv antibody domains recombinantly fused to either the phage gene III or gene VIII protein. Examples of phage display methods that can be used to make the antibodies of the present invention include those disclosed in Brinkman et al., J. Immunol. Methods 182:41-50 (1995); Ames et al., J. Immunol. Methods 184:177-186 (1995); Kettleborough et al., Eur. J. Immunol. 24:952-958 (1994); Persic et al., Gene 187 9-18 (1997); Burton et al., Advances in Immunology 57:191-280 (1994); PCT application No. PCT/GB91/01134; PCT publications WO 90/02809; WO 91/10737; WO 92/01047; WO 92/18619; WO 93/11236; WO 95/15982; WO 95/20401; and U.S. Patent Nos. 5,698,426; 5,223,409; 5,403,484; 5,580,717; 5,427,908; 5,750,753; 5,821,047; 5,571,698; 5,427,908; 5,516,637; 5,780,225; 5,658,727; 5,733,743 and 5,969,108; each of which is incorporated herein by reference in its entirety.

[0222] As described in the above references, after phage selection, the antibody coding regions from the phage can be isolated and used to generate whole antibodies, including human antibodies, or any other desired antigen binding fragment, and expressed in any desired host, including mammalian cells, insect cells, plant cells, yeast, and bacteria, e.g., as described in detail below. For example, techniques to recombinantly produce Fab, Fab′ and F(ab′)₂ fragments can also be employed using methods known in the art such as those disclosed in PCT publication WO 92/22324; Mullinax et al., BioTechniques 12(6):864-869 (1992); and Sawai et al., AJRI 34:26-34 (1995); and Better et al., Science 240:1041-1043 (1988) (said references incorporated by reference in their entireties).

[0223] Examples of techniques which can be used to produce single-chain Fvs and antibodies include those described in U.S. Pat. Nos. 4,946,778 and 5,258,498; Huston et al., Methods in Enzymology 203:46-88 (1991); Shu et al., PNAS 90:7995-7999 (1993); and Skerra et al., Science 240:1038-1040 (1988). For some uses, including in vivo use of antibodies in humans and in vitro detection assays, it may be preferable to use chimeric, humanized, or human antibodies. A chimeric antibody is a molecule in which different portions of the antibody are derived from different animal species, such as antibodies having a variable region derived from a murine monoclonal antibody and a human immunoglobulin constant region. Methods for producing chimeric antibodies are known in the art. See e.g., Morrison, Science 229:1202 (1985); Oi et al., BioTechniques 4:214 (1986); Gillies et al., (1989) J. Immunol. Methods 125:191-202; U.S. Pat. Nos. 5,807,715; 4,816,567; and 4,816,397, which are incorporated herein by reference in their entirety. Humanized antibodies are antibody molecules from non-human species antibody that binds the desired antigen having one or more complementarity determining regions (CDRs) from the non-human species and a framework regions from a human immunoglobulin molecule. Often, framework residues in the human framework regions will be substituted with the corresponding residue from the CDR donor antibody to alter, preferably improve, antigen binding. These framework substitutions are identified by methods well known in the art, e.g., by modeling of the interactions of the CDR and framework residues to identify framework residues important for antigen binding and sequence comparison to identify unusual framework residues at particular positions. (See, e.g., Queen et al., U.S. Pat. No. 5,585,089; Riechmann et al., Nature 332:323 (1988), which are incorporated herein by reference in their entireties.) Antibodies can be humanized using a variety of techniques known in the art including, for example, CDR-grafting (EP 239,400; PCT publication WO 91/09967; U.S. Pat. Nos. 5,225,539; 5,530,101; and 5,585,089), veneering or resurfacing (EP 592,106; EP 519,596; Padlan, Molecular Immunology 28(4/5):489-498 (1991); Studnicka et al., Protein Engineering 7(6):805-814 (1994); Roguska. et al., PNAS 91:969-973 (1994)), and chain shuffling (U.S. Pat. No. 5,565,332).

[0224] Completely human antibodies are particularly desirable for therapeutic treatment of human patients. Human antibodies can be made by a variety of methods known in the art including phage display methods described above using antibody libraries derived from human immunoglobulin sequences. See also, U.S. Pat. Nos. 4,444,887 and 4,716,111; and PCT publications WO 98/46645, WO 98/50433, WO 98/24893, WO 98/16654, WO 96/34096, WO 96/33735, and WO 91/10741; each of which is incorporated herein by reference in its entirety.

[0225] Human antibodies can also be produced using transgenic mice which are incapable of expressing functional endogenous immunoglobulins, but which can express human immunoglobulin genes. For example, the human heavy and light chain immunoglobulin gene complexes may be introduced randomly or by homologous recombination into mouse embryonic stem cells. Alternatively, the human variable region, constant region, and diversity region may be introduced into mouse embryonic stem cells in addition to the human heavy and light chain genes. The mouse heavy and light chain immunoglobulin genes may be rendered non-functional separately or simultaneously with the introduction of human immunoglobulin loci by homologous recombination. In particular, homozygous deletion of the JH region prevents endogenous antibody production. The modified embryonic stem cells are expanded and microinjected into blastocysts to produce chimeric mice. The chimeric mice are then bred to produce homozygous offspring, which express human antibodies. The transgenic mice are immunized in the normal fashion with a selected antigen, e.g., all or a portion of a polypeptide of the invention. Monoclonal antibodies directed against the antigen can be obtained from the immunized, transgenic mice using conventional hybridoma technology. The human immunoglobulin transgenes harbored by the transgenic mice rearrange during B cell differentiation, and subsequently undergo class switching and somatic mutation. Thus, using such a technique, it is possible to produce therapeutically useful IgG, IgA, IgM and IgE antibodies. For an overview of this technology for producing human antibodies, see Lonberg and Huszar, Int. Rev. Immunol. 13:65-93 (1995). For a detailed discussion of this technology for producing human antibodies and human monoclonal antibodies and protocols for producing such antibodies, see, e.g., PCT publications WO 98/24893; WO 92/01047; WO 96/34096; WO 96/33735; European Patent No. 0 598 877; U.S. Pat. Nos. 5,413,923; 5,625,126; 5,633,425; 5,569,825; 5,661,016; 5,545,806; 5,814,318; 5,885,793; 5,916,771; 5,939,598; 6,075,181 and 6,114,598, which are incorporated by reference herein in their entirety. In addition, companies such as Abgenix, Inc. (Freemont, Calif.) and Genpharm (San Jose, Calif.) can be engaged to provide human antibodies directed against a selected antigen using technology similar to that described above.

[0226] Completely human antibodies which recognize a selected epitope can be generated using a technique referred to as “guided selection.” In this approach a selected non-human monoclonal antibody, e.g., a mouse antibody, is used to guide the selection of a completely human antibody recognizing the same epitope. (Jespers et al., Bio/technology 12:899-903 (1988)).

[0227] Further, antibodies to the polypeptides of the invention can, in turn, be utilized to generate anti-idiotype antibodies that “mimic” polypeptides of the invention using techniques well known to those skilled in the art. (See, e.g., Greenspan & Bona, FASEB J. 7(5):437-444; (1989) and Nissinoff, J. Immunol. 147(8):2429-2438 (1991)). For example, antibodies which bind to and competitively inhibit polypeptide multimerization and/or binding of a polypeptide of the invention to a ligand can be used to generate anti-idiotypes that “mimic” the polypeptide multimerization and/or binding domain and, as a consequence, bind to and neutralize polypeptide and/or its ligand. Such neutralizing anti-idiotypes or Fab fragments of such anti-idiotypes can be used in therapeutic regimens to neutralize polypeptide ligand/receptor. For example, such anti-idiotypic antibodies can be used to bind a polypeptide of the invention and/or to bind its ligand(s)/receptor(s), and thereby block its biological activity. Alternatively, antibodies which bind to and enhance polypeptide multimerization and/or binding, and/or receptor/ligand multimerization, binding and/or signaling can be used to generate anti-idiotypes that function as agonists of a polypeptide of the invention and/or its ligand/receptor. Such agonistic anti-idiotypes or Fab fragments of such anti-idiotypes can be used in therapeutic regimens as agonists of the polypeptides of the invention or its ligand(s)/receptor(s). For example, such anti-idiotypic antibodies can be used to bind a polypeptide of the invention and/or to bind its ligand(s)/receptor(s), and thereby promote or enhance its biological activity.

[0228] Intrabodies of the invention can be produced using methods known in the art, such as those disclosed and reviewed in Chen et al., Hum. Gene Ther. 5:595-601 (1994); Marasco, W. A., Gene Ther. 4:11-15 (1997); Rondon and Marasco, Annu. Rev. Microbiol. 51:257-283 (1997); Proba et al., J. Mol. Biol. 275:245-253 (1998); Cohen et al., Oncogene 17:2445-2456 (1998); Ohage and Steipe, J. Mol. Biol. 291:1119-1128 (1999); Ohage et al., J. Mol. Biol. 291:1129-1134 (1999); Wirtz and Steipe, Protein Sci. 8:2245-2250 (1999); Zhu et al., J. Immunol. Methods 23 1:207-222 (1999); and references cited therein.

[0229] Polynucleotides Encoding Antibodies

[0230] The invention further provides polynucleotides comprising a nucleotide sequence encoding an antibody of the invention and fragments thereof. The invention also encompasses polynucleotides that hybridize under stringent or alternatively, under lower stringency hybridization conditions, e.g., as defined supra, to polynucleotides that encode an antibody, preferably, that specifically binds to a polypeptide of the invention, preferably, an antibody that binds to a polypeptide having the amino acid sequence of SEQ ID NO:Y, to a polypeptide encoded by a portion of SEQ ID NO:X as defined in columns 8 and 9 of Table 2, and/or to a polypeptide encoded by the cDNA contained in Clone ID NO:Z.

[0231] The polynucleotides may be obtained, and the nucleotide sequence of the polynucleotides determined, by any method known in the art. For example, if the nucleotide sequence of the antibody is known, a polynucleotide encoding the antibody may be assembled from chemically synthesized oligonucleotides (e.g., as described in Kutmeier et al., BioTechniques 17:242 (1994)), which, briefly, involves the synthesis of overlapping oligonucleotides containing portions of the sequence encoding the antibody, annealing and ligating of those oligonucleotides, and then amplification of the ligated oligonucleotides by PCR.

[0232] Alternatively, a polynucleotide encoding an antibody may be generated from nucleic acid from a suitable source. If a clone containing a nucleic acid encoding a particular antibody is not available, but the sequence of the antibody molecule is known, a nucleic acid encoding the immunoglobulin may be chemically synthesized or obtained from a suitable source (e.g., an antibody cDNA library, or a cDNA library generated from, or nucleic acid, preferably poly A+ RNA, isolated from, any tissue or cells expressing the antibody, such as hybridoma cells selected to express an antibody of the invention) by PCR amplification using synthetic primers hybridizable to the 3′ and 5′ ends of the sequence or by cloning using an oligonucleotide probe specific for the particular gene sequence to identify, e.g., a cDNA clone from a cDNA library that encodes the antibody. Amplified nucleic acids generated by PCR may then be cloned into replicable cloning vectors using any method well known in the art.

[0233] Once the nucleotide sequence and corresponding amino acid sequence of the antibody is determined, the nucleotide sequence of the antibody may be manipulated using methods well known in the art for the manipulation of nucleotide sequences, e.g., recombinant DNA techniques, site directed mutagenesis, PCR, etc. (see, for example, the techniques described in Sambrook et al., 1990, Molecular Cloning, A Laboratory Manual, 2d Ed., Cold Spring Harbor Laboratory, Cold Spring Harbor, N.Y. and Ausubel et al., eds., 1998, Current Protocols in Molecular Biology, John Wiley & Sons, NY, which are both incorporated by reference herein in their entireties), to generate antibodies having a different amino acid sequence, for example to create amino acid substitutions, deletions, and/or insertions.

[0234] In a specific embodiment, the amino acid sequence of the heavy and/or light chain variable domains may be inspected to identify the sequences of the complementarity determining regions (CDRs) by methods that are well know in the art, e.g., by comparison to known amino acid sequences of other heavy and light chain variable regions to determine the regions of sequence hypervariability. Using routine recombinant DNA techniques, one or more of the CDRs may be inserted within framework regions, e.g., into human framework regions to humanize a non-human antibody, as described supra. The framework regions may be naturally occurring or consensus framework regions, and preferably human framework regions (see, e.g., Chothia et al., J. Mol. Biol. 278: 457-479 (1998) for a listing of human framework regions). Preferably, the polynucleotide generated by the combination of the framework regions and CDRs encodes an antibody that specifically binds a polypeptide of the invention. Preferably, as discussed supra, one or more amino acid substitutions may be made within the framework regions, and, preferably, the amino acid substitutions improve binding of the antibody to its antigen. Additionally, such methods may be used to make amino acid substitutions or deletions of one or more variable region cysteine residues participating in an intrachain disulfide bond to generate antibody molecules lacking one or more intrachain disulfide bonds. Other alterations to the polynucleotide are encompassed by the present invention and within the skill of the art.

[0235] In addition, techniques developed for the production of “chimeric antibodies” (Morrison et al., Proc. Natl. Acad. Sci. 81:851-855 (1984); Neuberger et al., Nature 312:604-608 (1984); Takeda et al., Nature 314:452-454 (1985)) by splicing genes from a mouse antibody molecule of appropriate antigen specificity together with genes from a human antibody molecule of appropriate biological activity can be used. As described supra, a chimeric antibody is a molecule in which different portions are derived from different animal species, such as those having a variable region derived from a murine mAb and a human immunoglobulin constant region, e.g., humanized antibodies.

[0236] Alternatively, techniques described for the production of single chain antibodies (U.S. Pat. No. 4,946,778; Bird, Science 242:423-42 (1988); Huston et al., Proc. Natl. Acad. Sci. USA 85:5879-5883 (1988); and Ward et al., Nature 334:544-54 (1989)) can be adapted to produce single chain antibodies. Single chain antibodies are formed by linking the heavy and light chain fragments of the Fv region via an amino acid bridge, resulting in a single chain polypeptide. Techniques for the assembly of functional Fv fragments in E. coli may also be used (Skerra et al., Science 242:1038-1041 (1988)).

[0237] Methods of Producing Antibodies

[0238] The antibodies of the invention can be produced by any method known in the art for the synthesis of antibodies, in particular, by chemical synthesis or preferably, by recombinant expression techniques. Methods of producing antibodies include, but are not limited to, hybridoma technology, EBV transformation, and other methods discussed herein as well as through the use recombinant DNA technology, as discussed below.

[0239] Recombinant expression of an antibody of the invention, or fragment, derivative or analog thereof, (e.g., a heavy or light chain of an antibody of the invention or a single chain antibody of the invention), requires construction of an expression vector containing a polynucleotide that encodes the antibody. Once a polynucleotide encoding an antibody molecule or a heavy or light chain of an antibody, or portion thereof (preferably containing the heavy or light chain variable domain), of the invention has been obtained, the vector for the production of the antibody molecule may be produced by recombinant DNA technology using techniques well known in the art. Thus, methods for preparing a protein by expressing a polynucleotide containing an antibody encoding nucleotide sequence are described herein. Methods which are well known to those skilled in the art can be used to construct expression vectors containing antibody coding sequences and appropriate transcriptional and translational control signals. These methods include, for example, in vitro recombinant DNA techniques, synthetic techniques, and in vivo genetic recombination. The invention, thus, provides replicable vectors comprising a nucleotide sequence encoding an antibody molecule of the invention, or a heavy or light chain thereof, or a heavy or light chain variable domain, operably linked to a promoter. Such vectors may include the nucleotide sequence encoding the constant region of the antibody molecule (see, e.g., PCT Publication WO 86/05807; PCT Publication WO 89/01036; and U.S. Pat. No. 5,122,464) and the variable domain of the antibody may be cloned into such a vector for expression of the entire heavy or light chain.

[0240] The expression vector is transferred to a host cell by conventional techniques and the transfected cells are then cultured by conventional techniques to produce an antibody of the invention. Thus, the invention includes host cells containing a polynucleotide encoding an antibody of the invention, or a heavy or light chain thereof, or a single chain antibody of the invention, operably linked to a heterologous promoter. In preferred embodiments for the expression of double-chained antibodies, vectors encoding both the heavy and light chains may be co-expressed in the host cell for expression of the entire immunoglobulin molecule, as detailed below.

[0241] A variety of host-expression vector systems may be utilized to express the antibody molecules of the invention. Such host-expression systems represent vehicles by which the coding sequences of interest may be produced and subsequently purified, but also represent cells which may, when transformed or transfected with the appropriate nucleotide coding sequences, express an antibody molecule of the invention in situ. These include but are not limited to microorganisms such as bacteria (e.g., E. coli, B. subtilis) transformed with recombinant bacteriophage DNA, plasmid DNA or cosmid DNA expression vectors containing antibody coding sequences; yeast (e.g., Saccharomyces, Pichia) transformed with recombinant yeast expression vectors containing antibody coding sequences; insect cell systems infected with recombinant virus expression vectors (e.g., baculovirus) containing antibody coding sequences; plant cell systems infected with recombinant virus expression vectors (e.g., cauliflower mosaic virus, CaMV; tobacco mosaic virus, TMV) or transformed with recombinant plasmid expression vectors (e.g., Ti plasmid) containing antibody coding sequences; or mammalian cell systems (e.g., COS, CHO, BHK, 293, 3T3 cells) harboring recombinant expression constructs containing promoters derived from the genome of mammalian cells (e.g., metallothionein promoter) or from mammalian viruses (e.g., the adenovirus late promoter; the vaccinia virus 7.5K promoter). Preferably, bacterial cells such as Escherichia coli, and more preferably, eukaryotic cells, especially for the expression of whole recombinant antibody molecule, are used for the expression of a recombinant antibody molecule. For example, mammalian cells such as Chinese hamster ovary cells (CHO), in conjunction with a vector such as the major intermediate early gene promoter element from human cytomegalovirus is an effective expression system for antibodies (Foecking et al., Gene 45:101 (1986); Cockett et al., Bio/Technology 8:2 (1990)).

[0242] In bacterial systems, a number of expression vectors may be advantageously selected depending upon the use intended for the antibody molecule being expressed. For example, when a large quantity of such a protein is to be produced, for the generation of pharmaceutical compositions of an antibody molecule, vectors which direct the expression of high levels of fusion protein products that are readily purified may be desirable. Such vectors include, but are not limited, to the E. coli expression vector pUR278 (Ruther et al., EMBO J. 2:1791 (1983)), in which the antibody coding sequence may be ligated individually into the vector in frame with the lac Z coding region so that a fusion protein is produced; pIN vectors (Inouye & Inouye, Nucleic Acids Res. 13:3101-3109 (1985); Van Heeke & Schuster, J. Biol. Chem. 24:5503-5509 (1989)); and the like. pGEX vectors may also be used to express foreign polypeptides as fusion proteins with glutathione S-transferase (GST). In general, such fusion proteins are soluble and can easily be purified from lysed cells by adsorption and binding to matrix glutathione-agarose beads followed by elution in the presence of free glutathione. The pGEX vectors are designed to include thrombin or factor Xa protease cleavage sites so that the cloned target gene product can be released from the GST moiety.

[0243] In an insect system, Autographa californica nuclear polyhedrosis virus (AcNPV) is used as a vector to express foreign genes. The virus grows in Spodoptera frugiperda cells. The antibody coding sequence may be cloned individually into non-essential regions (for example the polyhedrin gene) of the virus and placed under control of an AcNPV promoter (for example the polyhedrin promoter).

[0244] In mammalian host cells, a number of viral-based expression systems may be utilized. In cases where an adenovirus is used as an expression vector, the antibody coding sequence of interest may be ligated to an adenovirus transcription/translation control complex, e.g., the late promoter and tripartite leader sequence. This chimeric gene may then be inserted in the adenovirus genome by in vitro or in vivo recombination. Insertion in a non- essential region of the viral genome (e.g., region E1 or E3) will result in a recombinant virus that is viable and capable of expressing the antibody molecule in infected hosts. (e.g., see Logan & Shenk, Proc. Natl. Acad. Sci. USA 81:355-359 (1984)). Specific initiation signals may also be required for efficient translation of inserted antibody coding sequences. These signals include the ATG initiation codon and adjacent sequences. Furthermore, the initiation codon must be in phase with the reading frame of the desired coding sequence to ensure translation of the entire insert. These exogenous translational control signals and initiation codons can be of a variety of origins, both natural and synthetic. The efficiency of expression may be enhanced by the inclusion of appropriate transcription enhancer elements, transcription terminators, etc. (see Bittner et al., Methods in Enzymol. 153:51-544 (1987)).

[0245] In addition, a host cell strain may be chosen which modulates the expression of the inserted sequences, or modifies and processes the gene product in the specific fashion desired. Such modifications (e.g., glycosylation) and processing (e.g., cleavage) of protein products may be important for the function of the protein. Different host cells have characteristic and specific mechanisms for the post-translational processing and modification of proteins and gene products. Appropriate cell lines or host systems can be chosen to ensure the correct modification and processing of the foreign protein expressed. To this end, eukaryotic host cells which possess the cellular machinery for proper processing of the primary transcript, glycosylation, and phosphorylation of the gene product may be used. Such mammalian host cells include but are not limited to CHO, VERY, BHK, Hela, COS, MDCK, 293, 3T3, WI38, and in particular, breast cancer cell lines such as, for example, BT483, Hs578T, HTB2, BT20 and T47D, and normal mammary gland cell line such as, for example, CRL7030 and Hs578Bst.

[0246] For long-term, high-yield production of recombinant proteins, stable expression is preferred. For example, cell lines, which stably express the antibody molecule may be engineered. Rather than using expression vectors which contain viral origins of replication, host cells can be transformed with DNA controlled by appropriate expression control elements (e.g., promoter, enhancer, sequences, transcription terminators, polyadenylation sites, etc.), and a selectable marker. Following the introduction of the foreign DNA, engineered cells may be allowed to grow for 1-2 days in an enriched media, and then are switched to a selective media. The selectable marker in the recombinant plasmid confers resistance to the selection and allows cells to stably integrate the plasmid into their chromosomes and grow to form foci which in turn can be cloned and expanded into cell lines. This method may advantageously be used to engineer cell lines, which express the antibody molecule. Such engineered cell lines may be particularly useful in screening and evaluation of compounds that interact directly or indirectly with the antibody molecule.

[0247] A number of selection systems may be used, including but not limited to the herpes simplex virus thymidine kinase (Wigler et al., Cell 11:223 (1977)), hypoxanthine-guanine phosphoribosyltransferase (Szybalska & Szybalski, Proc. Natl. Acad. Sci. USA 4 8:2 0 2 (1992)), and adenine phosphoribosyltransferase (Lowy et al., Cell 22:817 (1980)) genes can be employed in tk-, hgprt- or aprt-cells, respectively. Also, antimetabolite resistance can be used as the basis of selection for the following genes: dhfr, which confers resistance to methotrexate (Wigler et al., Natl. Acad. Sci. USA 77:357 (1980); O'Hare et al., Proc. Natl. Acad. Sci. USA 78:1527 (1981)); gpt, which confers resistance to mycophenolic acid (Mulligan & Berg, Proc. Natl. Acad. Sci. USA 78:2072 (1981)); neo, which confers resistance to the aminoglycoside G-418 Clinical Pharmacy 12:488-505; Wu and Wu, Biotherapy 3:87-95 (1991); Tolstoshev, Ann. Rev. Pharmacol. Toxicol. 32:573-596 (1993); Mulligan, Science 260:926-932 (1993); and Morgan and Anderson, Ann. Rev. Biochem. 62:191-217 (1993); TIB TECH 11(5):155-215 (1993)); and hygro, which confers resistance to hygromycin (Santerre et al., Gene 30:147 (1984)). Methods commonly known in the art of recombinant DNA technology may be routinely applied to select the desired recombinant clone, and such methods are described, for example, in Ausubel et al. (eds.), Current Protocols in Molecular Biology, John Wiley & Sons, NY (1993); Kriegler, Gene Transfer and Expression, A Laboratory Manual, Stockton Press, NY (1990); and in Chapters 12 and 13, Dracopoli et al. (eds), Current Protocols in Human Genetics, John Wiley & Sons, NY (1994); Colberre-Garapin et al., J. Mol. Biol. 150:1 (1981), which are incorporated by reference herein in their entireties.

[0248] The expression levels of an antibody molecule can be increased by vector amplification (for a review, see Bebbington and Hentschel, The use of vectors based on gene amplification for the expression of cloned genes in mammalian cells in DNA cloning, Vol.3. (Academic Press, New York, 1987)). When a marker in the vector system expressing antibody is amplifiable, increase in the level of inhibitor present in culture of host cell will increase the number of copies of the marker gene. Since the amplified region is associated with the antibody gene, production of the antibody will also increase (Crouse et al., Mol. Cell. Biol. 3:257 (1983)).

[0249] Vectors, which use glutamine synthase (GS) or DHFR as the selectable markers can be amplified in the presence of the drugs methionine sulphoximine or methotrexate, respectively. An advantage of glutamine synthase based vectors are the availabilty of cell lines (e.g., the murine myeloma cell line, NSO) which are glutamine synthase negative. Glutamine synthase expression systems can also function in glutamine synthase expressing cells (e.g., Chinese Hamster Ovary (CHO) cells) by providing additional inhibitor to prevent the functioning of the endogenous gene. A glutamine synthase expression system and components thereof are detailed in PCT publications: WO87/04462; WO86/05807; WO89/01036; WO89/10404; and WO91/06657, which are incorporated in their entireties by reference herein. Additionally, glutamine synthase expression vectors that may be used according to the present invention are commercially available from suplliers, including, for example Lonza Biologics, Inc. (Portsmouth, N.H.). Expression and production of monoclonal antibodies using a GS expression system in murine myeloma cells is described in Bebbington et al., Bio/technology 10:169(1992) and in Biblia and Robinson Biotechnol. Prog. 11:1 (1995) which are incorporated in their entirities by reference herein.

[0250] The host cell may be co-transfected with two expression vectors of the invention, the first vector encoding a heavy chain derived polypeptide and the second vector encoding a light chain derived polypeptide. The two vectors may contain identical selectable markers, which enable equal expression of heavy and light chain polypeptides. Alternatively, a single vector may be used which encodes, and is capable of expressing, both heavy and light chain polypeptides. In such situations, the light chain should be placed before the heavy chain to avoid an excess of toxic free heavy chain (Proudfoot, Nature 322:52 (1986); Kohler, Proc. Natl. Acad. Sci. USA 77:2197 (1980)). The coding sequences for the heavy and light chains may comprise cDNA or genomic DNA.

[0251] Once an antibody molecule of the invention has been produced by an animal, chemically synthesized, or recombinantly expressed, it may be purified by any method known in the art for purification of an immunoglobulin molecule, for example, by chromatography (e.g., ion exchange, affinity, particularly by affinity for the specific antigen after Protein A, and sizing column chromatography), centrifugation, differential solubility, or by any other standard technique for the purification of proteins. In addition, the antibodies of the present invention or fragments thereof can be fused to heterologous polypeptide sequences described herein or otherwise known in the art, to facilitate purification.

[0252] The present invention encompasses antibodies recombinantly fused or chemically conjugated (including both covalently and non-covalently conjugations) to a polypeptide (or portion thereof, preferably at least 10, 20, 30, 40, 50, 60, 70, 80, 90 or 100 amino acids of the polypeptide) of the present invention to generate fusion proteins. The fusion does not necessarily need to be direct, but may occur through linker sequences. The antibodies may be specific for antigens other than polypeptides (or portion thereof, preferably at least 10, 20, 30, 40, 50, 60, 70, 80, 90 or 100 amino acids of the polypeptide) of the present invention. For example, antibodies may be used to target the polypeptides of the present invention to particular cell types, either in vitro or in vivo, by fusing or conjugating the polypeptides of the present invention to antibodies specific for particular cell surface receptors. Antibodies fused or conjugated to the polypeptides of the present invention may also be used in in vitro immunoassays and purification methods using methods known in the art. See e.g., Harbor et al., supra, and PCT publication WO 93/21232; EP 439,095; Naramura et al., Immunol. Lett. 39:91-99 (1994); U.S. Pat. No. 5,474,981; Gillies et al., PNAS 89:1428-1432 (1992); Fell et al., J. Immunol. 146:2446-2452 (1991), which are incorporated by reference in their entireties.

[0253] The present invention further includes compositions comprising the polypeptides of the present invention fused or conjugated to antibody domains other than the variable regions. For example, the polypeptides of the present invention may be fused or conjugated to an antibody Fc region, or portion thereof. The antibody portion fused to a polypeptide of the present invention may comprise the constant region, hinge region, CH1 domain, CH2 domain, and CH3 domain or any combination of whole domains or portions thereof. The polypeptides may also be fused or conjugated to the above antibody portions to form multimers. For example, Fc portions fused to the polypeptides of the present invention can form dimers through disulfide bonding between the Fe portions. Higher multimeric forms can be made by fusing the polypeptides to portions of IgA and IgM. Methods for fusing or conjugating the polypeptides of the present invention to antibody portions are known in the art. See, e.g., U.S. Pat. Nos. 5,336,603; 5,622,929; 5,359,046; 5,349,053; 5,447,851; 5,112,946; EP 307,434; EP 367,166; PCT publications WO 96/04388; WO 91/06570; Ashkenazi et al., Proc. Natl. Acad. Sci. USA 88:10535-10539 (1991); Zheng et al., J. Immunol. 154:5590-5600 (1995); and Vil et al., Proc. Natl. Acad. Sci. USA 89:11337-11341 (1992) (said references incorporated by reference in their entireties).

[0254] As discussed, supra, the polypeptides corresponding to a polypeptide, polypeptide fragment, or a variant of SEQ ID NO:Y may be fused or conjugated to the above antibody portions to increase the in vivo half life of the polypeptides or for use in immunoassays using methods known in the art. Further, the polypeptides corresponding to SEQ ID NO:Y may be fused or conjugated to the above antibody portions to facilitate purification. One reported example describes chimeric proteins consisting of the first two domains of the human CD4-polypeptide and various domains of the constant regions of the heavy or light chains of mammalian immunoglobulins. See EP 394,827; Traunecker et al., Nature 331:84-86 (1988). The polypeptides of the present invention fused or conjugated to an antibody having disulfide-linked dimeric structures (due to the IgG) may also be more efficient in binding and neutralizing other molecules, than the monomeric secreted protein or protein fragment alone. See, for example, Fountoulakis et al., J. Biochem. 270:3958-3964 (1995). In many cases, the Fc part in a fusion protein is beneficial in therapy and diagnosis, and thus can result in, for example, improved pharmacokinetic properties. See, for example, EP A 232,262. Alternatively, deleting the Fc part after the fusion protein has been expressed, detected, and purified, would be desired. For example, the Fc portion may hinder therapy and diagnosis if the fusion protein is used as an antigen for immunizations. In drug discovery, for example, human proteins, such as hIL-5, have been fused with Fc portions for the purpose of high-throughput screening assays to identify antagonists of hIL-5. (See, Bennett et al., J. Molecular Recognition 8:52-58 (1995); Johanson et al., J. Biol. Chem. 270:9459-9471 (1995)).

[0255] Moreover, the antibodies or fragments thereof of the present invention can be fused to marker sequences, such as a peptide to facilitate purification. In preferred embodiments, the marker amino acid sequence is a hexa-histidine peptide, such as the tag provided in a pQE vector (QIAGEN, Inc., 9259 Eton Avenue, Chatsworth, Calif., 91311), among others, many of which are commercially available. As described in Gentz et al., Proc. Natl. Acad. Sci. USA 86:821-824 (1989), for instance, hexa-histidine provides for convenient purification of the fusion protein. Other peptide tags useful for purification include, but are not limited to, the “HA” tag, which corresponds to an epitope derived from the influenza hemagglutinin protein (Wilson et al., Cell 37:767 (1984)) and the “flag” tag.

[0256] The present invention further encompasses antibodies or fragments thereof conjugated to a diagnostic or therapeutic agent. The antibodies can be used diagnostically to, for example, monitor the development or progression of a tumor as part of a clinical testing procedure to, e.g., determine the efficacy of a given treatment regimen. Detection can be facilitated by coupling the antibody to a detectable substance. Examples of detectable substances include various enzymes, prosthetic groups, fluorescent materials, luminescent materials, bioluminescent materials, radioactive materials, positron emitting metals using various positron emission tomographies, and nonradioactive paramagnetic metal ions. The detectable substance may be coupled or conjugated either directly to the antibody (or fragment thereof) or indirectly, through an intermediate (such as, for example, a linker known in the art) using techniques known in the art. See, for example, U.S. Pat. No. 4,741,900 for metal ions which can be conjugated to antibodies for use as diagnostics according to the present invention.

[0257] Further, an antibody or fragment thereof may be conjugated to a therapeutic moiety such as a cytotoxin, e.g., a cytostatic or cytocidal agent, a therapeutic agent or a radioactive metal ion, e.g., alpha-emitters such as, for example, 213Bi. A cytotoxin or cytotoxic agent includes any agent that is detrimental to cells. Examples include paclitaxol, cytochalasin B, gramicidin D, ethidium bromide, emetine, mitomycin, etoposide, tenoposide, vincristine, vinblastine, colchicin, doxorubicin, daunorubicin, dihydroxy anthracin dione, mitoxantrone, mithramycin, actinomycin D, 1-dehydrotestosterone, glucocorticoids, procaine, tetracaine, lidocaine, propranolol, and puromycin and analogs or homologs thereof. Therapeutic agents include, but are not limited to, antimetabolites (e.g., methotrexate, 6-mercaptopurine, 6-thioguanine, cytarabine, 5-fluorouracil decarbazine), alkylating agents (e.g., mechlorethamine, thioepa chlorambucil, melphalan, carmustine (BSNU) and lomustine (CCNU), cyclothosphamide, busulfan, dibromomannitol, streptozotocin, mitomycin C, and cis-dichlorodiamine platinum (II) (DDP) cisplatin), anthracyclines (e.g., daunorubicin (formerly daunomycin) and doxorubicin), antibiotics (e.g., dactinomycin (formerly actinomycin), bleomycin, mithramycin, and anthramycin (AMC)), and anti-mitotic agents (e.g., vincristine and vinblastine).

[0258] The conjugates of the invention can be used for modifying a given biological response, the therapeutic agent or drug moiety is not to be construed as limited to classical chemical therapeutic agents. For example, the drug moiety may be a protein or polypeptide possessing a desired biological activity. Such proteins may include, for example, a toxin such as abrin, ricin A, pseudomonas exotoxin, or diphtheria toxin; a protein such as tumor necrosis factor, a-interferon, β-interferon, nerve growth factor, platelet derived growth factor, tissue plasminogen activator, an apoptotic agent, e.g., TNF-alpha, TNF-beta, AIM I (See, International Publication No. WO 97/33899), AIM II (See, International Publication No. WO 97/34911), Fas Ligand (Takahashi et al., Int. Immunol., 6:1567-1574 (1994)), VEGI (See, International Publication No. WO 99/23105), a thrombotic agent or an anti-angiogenic agent, e.g., angiostatin or endostatin; or, biological response modifiers such as, for example, lymphokines, interleukin-1 (“IL-1”), interleukin-2 (“IL-2”), interleukin-6 (“IL-6”), granulocyte macrophage colony stimulating factor (“GM-CSF”), granulocyte colony stimulating factor (“G-CSF”), or other growth factors.

[0259] Antibodies may also be attached to solid supports, which are particularly useful for immunoassays or purification of the target antigen. Such solid supports include, but are not limited to, glass, cellulose, polyacrylamide, nylon, polystyrene, polyvinyl chloride or polypropylene.

[0260] Techniques for conjugating such therapeutic moiety to antibodies are well known. See, for example, Amon et al., “Monoclonal Antibodies For Immunotargeting Of Drugs In Cancer Therapy”, in Monoclonal Antibodies And Cancer Therapy, Reisfeld et al. (eds.), pp. 243-56 (Alan R. Liss, Inc. 1985); Hellstrom et al., “Antibodies For Drug Delivery”, in Controlled Drug Delivery (2nd Ed.), Robinson et al. (eds.), pp. 623-53 (Marcel Dekker, Inc. 1987); Thorpe, “Antibody Carriers Of Cytotoxic Agents In Cancer Therapy: A Review”, in Monoclonal Antibodies '84: Biological And Clinical Applications, Pinchera et al. (eds.), pp. 475-506 (1985); “Analysis, Results, And Future Prospective Of The Therapeutic Use Of Radiolabeled Antibody In Cancer Therapy”, in Monoclonal Antibodies For Cancer Detection And Therapy, Baldwin et al. (eds.), pp. 303-16 (Academic Press 1985), and Thorpe et al., “The Preparation And Cytotoxic Properties Of Antibody-Toxin Conjugates”, Immunol. Rev. 62:119-58 (1982).

[0261] Alternatively, an antibody can be conjugated to a second antibody to form an antibody heteroconjugate as described by Segal in U.S. Pat. No. 4,676,980, which is incorporated herein by reference in its entirety.

[0262] An antibody, with or without a therapeutic moiety conjugated to it, administered alone or in combination with cytotoxic factor(s) and/or cytokine(s) can be used as a therapeutic.

[0263] Immunophenotyping

[0264] The antibodies of the invention may be utilized for immunophenotyping of cell lines and biological samples. Translation products of the genes of the present invention may be useful as cell specific markers, or more specifically as cellular markers that are differentially expressed at various stages of differentiation and/or maturation of particular cell types. Monoclonal antibodies directed against a specific epitope, or combination of epitopes, will allow for the screening of cellular populations expressing the marker. Various techniques can be utilized using monoclonal antibodies to screen for cellular populations expressing the marker(s), and include magnetic separation using antibody-coated magnetic beads, “panning” with antibody attached to a solid matrix (i.e., plate), and flow cytometry (See, e.g., U.S. Pat. No. 5,985,660; and Morrison et al., Cell, 96:737-49 (1999)).

[0265] These techniques allow for the screening of particular populations of cells, such as might be found with hematological malignancies (i.e. minimal residual disease (MRD) in acute leukemic patients) and “non-self” cells in transplantations to prevent Graft-versus-Host Disease (GVHD). Alternatively, these techniques allow for the screening of hematopoietic stem and progenitor cells capable of undergoing proliferation and/or differentiation, as might be found in human umbilical cord blood.

[0266] Assays for Antibody Binding

[0267] The antibodies of the invention may be assayed for immunospecific binding by any method known in the art. The immunoassays which can be used include but are not limited to competitive and non-competitive assay systems using techniques such as western blots, radioimmunoassays, ELISA (enzyme linked immunosorbent assay), “sandwich” immunoassays, immunoprecipitation assays, precipitin reactions, gel diffusion precipitin reactions, immunodiffusion assays, agglutination assays, complement-fixation assays, immunoradiometric assays, fluorescent immunoassays, and protein A immunoassays, to name but a few. Such assays are routine and well known in the art (see, e.g., Ausubel et al, eds, 1994, Current Protocols in Molecular Biology, Vol. 1, John Wiley & Sons, Inc., New York, which is incorporated by reference herein in its entirety). Exemplary immunoassays are described briefly below (but are not intended by way of limitation).

[0268] Immunoprecipitation protocols generally comprise lysing a population of cells in a lysis buffer such as RIPA buffer (1% NP-40 or Triton X-100, 1% sodium deoxycholate, 0.1% SDS, 0.15 M NaCl, 0.01 M sodium phosphate at pH 7.2, 1% Trasylol) supplemented with protein phosphatase and/or protease inhibitors (e.g., EDTA, PMSF, aprotinin, sodium vanadate), adding the antibody of interest to the cell lysate, incubating for a period of time (e.g., 1-4 hours) at 4° C., adding protein A and/or protein G sepharose beads to the cell lysate, incubating for about an hour or more at 4° C., washing the beads in lysis buffer and resuspending the beads in SDS/sample buffer. The ability of the antibody of interest to immunoprecipitate a particular antigen can be assessed by, e.g., western blot analysis. One of skill in the art would be knowledgeable as to the parameters that can be modified to increase the binding of the antibody to an antigen and decrease the background (e.g., pre-clearing the cell lysate with sepharose beads). For further discussion regarding immunoprecipitation protocols see, e.g., Ausubel et al., eds., (1994), Current Protocols in Molecular Biology, Vol. 1, John Wiley & Sons, Inc., New York, section 10.16.1.

[0269] Western blot analysis generally comprises preparing protein samples, electrophoresis of the protein samples in a polyacrylamide gel (e.g., 8%-20% SDS-PAGE depending on the molecular weight of the antigen), transferring the protein sample from the polyacrylamide gel to a membrane such as nitrocellulose, PVDF or nylon, blocking the membrane in blocking solution (e.g., PBS with 3% BSA or non-fat milk), washing the membrane in washing buffer (e.g., PBS-Tween 20), blocking the membrane with primary antibody (the antibody of interest) diluted in blocking buffer, washing the membrane in washing buffer, blocking the membrane with a secondary antibody (which recognizes the primary antibody, e.g., an anti-human antibody) conjugated to an enzymatic substrate (e.g., horseradish peroxidase or alkaline phosphatase) or radioactive molecule (e.g., 32P or 125I) diluted in blocking buffer, washing the membrane in wash buffer, and detecting the presence of the antigen. One of skill in the art would be knowledgeable as to the parameters that can be modified to increase the signal detected and to reduce the background noise. For further discussion regarding western blot protocols see, e.g., Ausubel et al., eds., (1994), Current Protocols in Molecular Biology, Vol. 1, John Wiley & Sons, Inc., New York, section 10.8.1.

[0270] ELISAs comprise preparing antigen, coating the well of a 96 well microtiter plate with the antigen, adding the antibody of interest conjugated to a detectable compound such as an enzymatic substrate (e.g., horseradish peroxidase or alkaline phosphatase) to the well and incubating for a period of time, and detecting the presence of the antigen. In ELISAs the antibody of interest does not have to be conjugated to a detectable compound; instead, a second antibody (which recognizes the antibody of interest) conjugated to a detectable compound may be added to the well. Further, instead of coating the well with the antigen, the antibody may be coated to the well. In this case, a second antibody conjugated to a detectable compound may be added following the addition of the antigen of interest to the coated well. One of skill in the art would be knowledgeable as to the parameters that can be modified to increase the signal detected as well as other variations of ELISAs known in the art. For further discussion regarding ELISAs see, e.g., Ausubel et al., eds, (1994), Current Protocols in Molecular Biology, Vol. 1, John Wiley & Sons, Inc., New York, section 11.2.1.

[0271] The binding affinity of an antibody to an antigen and the off-rate of an antibody-antigen interaction can be determined by competitive binding assays. One example of a competitive binding assay is a radioimmunoassay comprising the incubation of labeled antigen (e.g., 3H or 125I) with the antibody of interest in the presence of increasing amounts of unlabeled antigen, and the detection of the antibody bound to the labeled antigen. The affinity of the antibody of interest for a particular antigen and the binding off-rates can be determined from the data by scatchard plot analysis. Competition with a second antibody can also be determined using radioimmunoassays. In this case, the antigen is incubated with antibody of interest conjugated to a labeled compound (e.g., 3H or 125I) in the presence of increasing amounts of an unlabeled second antibody.

[0272] Antibodies of the invention may be characterized using immunocytochemisty methods on cells (e.g., mammalian cells, such as CHO cells) transfected with a vector enabling the expression of a colon or colon cancer antigen or with vector alone using techniques commonly known in the art. Antibodies that bind colon or colon cancer antigen transfected cells, but not vector-only transfected cells, are colon or colon cancer antigen specific.

[0273] Therapeutic Uses

[0274] The present invention is further directed to antibody-based therapies which involve administering antibodies of the invention to an animal, preferably a mammal, and most preferably a human, patient for treating one or more of the disclosed diseases, disorders, or conditions. Therapeutic compounds of the invention include, but are not limited to, antibodies of the invention (including fragments, analogs and derivatives thereof as described herein) and nucleic acids encoding antibodies of the invention (including fragments, analogs and derivatives thereof and anti-idiotypic antibodies as described herein). The antibodies of the invention can be used to treat, inhibit or prevent diseases, disorders or conditions associated with aberrant expression and/or activity of a polypeptide of the invention, including, but not limited to, any one or more of the diseases, disorders, or conditions described herein. The treatment and/or prevention of diseases, disorders, or conditions associated with aberrant expression and/or activity of a polypeptide of the invention includes, but is not limited to, alleviating symptoms associated with those diseases, disorders or conditions. Antibodies of the invention may be provided in pharmaceutically acceptable compositions as known in the art or as described herein.

[0275] In a specific and preferred embodiment, the present invention is directed to antibody-based therapies which involve administering antibodies of the invention to an animal, preferably a mammal, and most preferably a human, patient for treating one or more of the diseases, disorders, or conditions of the colon, including, but not limited to, congenital abnormalities, such as atresia and stenosis, Meckel diverticulum, congential aganglionic megacolon or Hirschsprung disease; colonic diverticulitis, colonic diverticulosis, toxic megacolon, constipation, disorders caused by parasites and protozoa (e.g., amoebic colitis, anisakiasis, balantidiasis, blastocystis infections, cryptosporidiosis, dientamoebiasis, amoebic dysentery, giardiasis, Lymphopathia venereum, Entamoeba histolytica), bacteria infection (e.g., Shigella, Salmonella, Yersinia, E. coli, Clostridium difficile), viral infection (e.g., cytomegalic virus, rotovirus); inflammatory bowel disease (e.g., ulcerative colitis, Crohn's disease, eosinophilic colitis); neoplastic disorders, such as, polyps (e.g., sessile polyp, adenomatous polyp, inflammatory polyps), adenomas (e.g., tubular adenoma, tubovillous adenomas, villous adenoma, Gardner syndrome, Peutz-Jeghers syndrome), hyperplastic, polyposis, villous, pseudopolyps, leiomyomas, carcinoids, lipomas, and angiomas, cancers, such as, rectal cancer, adenocarcinoma, colorectal carcinoma, colon cancer, colon carcinoma, colorectal cancer; colonic diseases); miscellaneous intestinal inflammatory disorders, including acquired immunodeficiency syndrome, HIV enteropathy, transplantation, drug-induced intestinal injury, radiation enterocolitis, neutropenic colitis, diverticular colon disease (DCD), inflammatory colonic disease, ischemic colitis, radiation proctitis, non-inflammatory bowel disease (non-IBD), colonic inflammation; colitis (e.g., infectious enterocolitis, necrotizing enterocolitis, antibiotic-associated colitis (pseudomembranous colitis), and collagenous and lymphocytic colitis); diarrhea and dysentary, malabsorption syndromes (e.g., blind loop syndrome, lactose intolerance, short bowl syndrome, whipple's disease), mesenteric vascular occlusion, pneumatosis cystoides intestinalis, protein-losing enteropathies (intestinal lymphagiectasis); intestinal obstruction (e.g., afferent loop syndrome, impacted feces, intestinal pseudo-obstruction [cecal volvulus], intussusception), intestinal perforation, sigmoid diseases (e.g., proctocolitis, sigmoin neoplasms), and/or as described under “Gastrointestinal Disorders” below. Therapeutic compounds of the invention include, but are not limited to, antibodies of the invention (e.g., antibodies directed to the full length protein expressed on the cell surface of a mammalian cell; antibodies directed to an epitope of a colon cancer associated polypeptide of the invention (such as, a linear epitope (shown in Table 1A, column 7) or a conformational epitope), including fragments, analogs and derivatives thereof as described herein) and nucleic acids encoding antibodies of the invention (including fragments, analogs and derivatives thereof and anti-idiotypic antibodies as described herein). The antibodies of the invention can be used to treat, inhibit or prevent diseases, disorders or conditions associated with aberrant expression and/or activity of a polypeptide of the invention, including, but not limited to, any one or more of the diseases, disorders, or conditions of the colon, particularly colon cancer, described herein. The treatment and/or prevention of diseases, disorders, or conditions of the colon or colon cancer associated with aberrant expression and/or activity of a polypeptide of the invention includes, but is not limited to, alleviating symptoms associated with those diseases, disorders or conditions. Antibodies of the invention may be provided in pharmaceutically acceptable compositions as known in the art or as described herein.

[0276] A summary of the ways in which the antibodies of the present invention may be used therapeutically includes binding polynucleotides or polypeptides of the present invention locally or systemically in the body or by direct cytotoxicity of the antibody, e.g. as mediated by complement (CDC) or by effector cells (ADCC). Some of these approaches are described in more detail below. Armed with the teachings provided herein, one of ordinary skill in the art will know how to use the antibodies of the present invention for diagnostic, monitoring or therapeutic purposes without undue experimentation.

[0277] The antibodies of this invention may be advantageously utilized in combination with other monoclonal or chimeric antibodies, or with lymphokines or hematopoietic growth factors (such as, e.g., IL-2, IL-3 and IL-7), for example, which serve to increase the number or activity of effector cells which interact with the antibodies.

[0278] The antibodies of the invention may be administered alone or in combination with other types of treatments (e.g., radiation therapy, chemotherapy, hormonal therapy, immunotherapy and anti-tumor agents). Generally, administration of products of a species origin or species reactivity (in the case of antibodies) that is the same species as that of the patient is preferred. Thus, in a preferred embodiment, human antibodies, fragments derivatives, analogs, or nucleic acids, are administered to a human patient for therapy or prophylaxis.

[0279] It is preferred to use high affinity and/or potent in vivo inhibiting and/or neutralizing antibodies against polypeptides or polynucleotides of the present invention, fragments or regions thereof, for both immunoassays directed to and therapy of disorders related to polynucleotides or polypeptides, including fragments thereof, of the present invention. Such antibodies, fragments, or regions, will preferably have an affinity for polynucleotides or polypeptides of the invention, including fragments thereof. Preferred binding affinities include those with a dissociation constant or Kd less than 5×10⁻² M, 10⁻² M, 5×10⁻³ M, 10⁻³ M, 5×10⁻⁴ M, 10⁻⁴ M, 5×10⁻⁵ M, 10⁻⁵ M, 5×10⁻⁶ M, 10⁻⁶ M, 5×10⁻⁷ M, 10⁻⁷ M, 5×10⁻⁸ M, 10⁻⁸ M, 5×10⁻⁹ M, 10⁻⁹ M, 5×10⁻¹⁰ M, 10⁻¹⁰ M, 5×10⁻¹¹ M, 10⁻¹¹ M, 5×10⁻¹² M, 10⁻¹² M, 5×10⁻¹³ M, 10⁻¹³ M, 5×10⁻¹⁴ M, 10⁻¹⁴ M, 5×10⁻¹⁵ M, and 10⁻¹⁵ M.

[0280] Gene Therapy

[0281] In a specific embodiment, nucleic acids comprising sequences encoding antibodies or functional derivatives thereof, are administered to treat, inhibit or prevent a disease or disorder associated with aberrant expression and/or activity of a polypeptide of the invention, by way of gene therapy. Gene therapy refers to therapy performed by the administration to a subject of an expressed or expressible nucleic acid. In this embodiment of the invention, the nucleic acids produce their encoded protein that mediates a therapeutic effect.

[0282] Any of the methods for gene therapy available in the art can be used according to the present invention. Exemplary methods are described below.

[0283] For general reviews of the methods of gene therapy, see Goldspiel et al., Clinical Pharmacy 12:488-505 (1993); Wu and Wu, Biotherapy 3:87-95 (1991); Tolstoshev, Ann. Rev. Pharmacol. Toxicol. 32:573-596 (1993); Mulligan, Science 260:926-932 (1993); and Morgan and Anderson, Ann. Rev. Biochem. 62:191-217 (1993); May, TIBTECH 11(5):155-215 (1993). Methods commonly known in the art of recombinant DNA technology which can be used are described in Ausubel et al. (eds.), Current Protocols in Molecular Biology, John Wiley & Sons, NY (1993); and Kriegler, Gene Transfer and Expression, A Laboratory Manual, Stockton Press, NY (1990).

[0284] In a preferred embodiment, the compound comprises nucleic acid sequences encoding an antibody, said nucleic acid sequences being part of expression vectors that express the antibody or fragments or chimeric proteins or heavy or light chains thereof in a suitable host. In particular, such nucleic acid sequences have promoters operably linked to the antibody coding region, said promoter being inducible or constitutive, and, optionally, tissue-specific. In another particular embodiment, nucleic acid molecules are used in which the antibody coding sequences and any other desired sequences are flanked by regions that promote homologous recombination at a desired site in the genome, thus providing for intrachromosomal expression of the antibody encoding nucleic acids (Koller and Smithies, Proc. Natl. Acad. Sci. USA 86:8932-8935 (1989); Zijlstra et al., Nature 342:435-438 (1989). In specific embodiments, the expressed antibody molecule is a single chain antibody; alternatively, the nucleic acid sequences include sequences encoding both the heavy and light chains, or fragments thereof, of the antibody.

[0285] Delivery of the nucleic acids into a patient may be either direct, in which case the patient is directly exposed to the nucleic acid or nucleic acid- carrying vectors, or indirect, in which case, cells are first transformed with the nucleic acids in vitro, then transplanted into the patient. These two approaches are known, respectively, as in vivo or ex vivo gene therapy.

[0286] In a specific embodiment, the nucleic acid sequences are directly administered in vivo, where it is expressed to produce the encoded product. This can be accomplished by any of numerous methods known in the art, e.g., by constructing them as part of an appropriate nucleic acid expression vector and administering it so that they become intracellular, e.g., by infection using defective or attenuated retrovirals or other viral vectors (see U.S. Pat. No. 4,980,286), or by direct injection of naked DNA, or by use of microparticle bombardment (e.g., a gene gun; Biolistic, Dupont), or coating with lipids or cell-surface receptors or transfecting agents, encapsulation in liposomes, microparticles, or microcapsules, or by administering them in linkage to a peptide which is known to enter the nucleus, by administering it in linkage to a ligand subject to receptor-mediated endocytosis (see, e.g., Wu and Wu, J. Biol. Chem. 262:4429-4432 (1987)) (which can be used to target cell types specifically expressing the receptors), etc. In another embodiment, nucleic acid-ligand complexes can be formed in which the ligand comprises a fusogenic viral peptide to disrupt endosomes, allowing the nucleic acid to avoid lysosomal degradation. In yet another embodiment, the nucleic acid can be targeted in vivo for cell specific uptake and expression, by targeting a specific receptor (see, e.g., PCT Publications WO 92/06180; WO 92/22635; WO92/20316; WO93/14188, WO 93/20221). Alternatively, the nucleic acid can be introduced intracellularly and incorporated within host cell DNA for expression, by homologous recombination (Koller and Smithies, Proc. Natl. Acad. Sci. USA 86:8932-8935 (1989); Zijlstra et al., Nature 342:435-438 (1989)).

[0287] In a specific embodiment, viral vectors that contains nucleic acid sequences encoding an antibody of the invention are used. For example, a retroviral vector can be used (see Miller et al., Meth. Enzymol. 217:581-599 (1993)). These retroviral vectors contain the components necessary for the correct packaging of the viral genome and integration into the host cell DNA. The nucleic acid sequences encoding the antibody to be used in gene therapy are cloned into one or more vectors, which facilitates delivery of the gene into a patient. More detail about retroviral vectors can be found in Boesen et al., Biotherapy 6:291-302 (1994), which describes the use of a retroviral vector to deliver the mdr1 gene to hematopoietic stem cells in order to make the stem cells more resistant to chemotherapy. Other references illustrating the use of retroviral vectors in gene therapy are: Clowes et al., J. Clin. Invest. 93:644-651 (1994); Kiem et al., Blood 83:1467-1473 (1994); Salmons and Gunzberg, Human Gene Therapy 4:129-141 (1993); and Grossman and Wilson, Curr. Opin. in Genetics and Devel. 3:110-114 (1993).

[0288] Adenoviruses are other viral vectors that can be used in gene therapy. Adenoviruses are especially attractive vehicles for delivering genes to respiratory epithelia. Adenoviruses naturally infect respiratory epithelia where they cause a mild disease. Other targets for adenovirus-based delivery systems are liver, the central nervous system, endothelial cells, and muscle. Adenoviruses have the advantage of being capable of infecting non-dividing cells. Kozarsky and Wilson, Current Opinion in Genetics and Development 3:499-503 (1993) present a review of adenovirus-based gene therapy. Bout et al., Human Gene Therapy 5:3-10 (1994) demonstrated the use of adenovirus vectors to transfer genes to the respiratory epithelia of rhesus monkeys. Other instances of the use of adenoviruses in gene therapy can be found in Rosenfeld et al., Science 252:431-434 (1991); Rosenfeld et al., Cell 68:143-155 (1992); Mastrangeli et al., J. Clin. Invest. 91:225-234 (1993); PCT Publication WO94/12649; and Wang, et al., Gene Therapy 2:775-783 (1995). In a preferred embodiment, adenovirus vectors are used.

[0289] Adeno-associated virus (AAV) has also been proposed for use in gene therapy (Walsh et al., Proc. Soc. Exp. Biol. Med. 204:289-300 (1993); U.S. Pat. No. 5,436,146).

[0290] Another approach to gene therapy involves transferring a gene to cells in tissue culture by such methods as electroporation, lipofection, calcium phosphate mediated transfection, or viral infection. Usually, the method of transfer includes the transfer of a selectable marker to the cells. The cells are then placed under selection to isolate those cells that have taken up and are expressing the transferred gene. Those cells are then delivered to a patient.

[0291] In this embodiment, the nucleic acid is introduced into a cell prior to administration in vivo of the resulting recombinant cell. Such introduction can be carried out by any method known in the art, including but not limited to transfection, electroporation, microinjection, infection with a viral or bacteriophage vector containing the nucleic acid sequences, cell fusion, chromosome-mediated gene transfer, microcell-mediated gene transfer, spheroplast fusion, etc. Numerous techniques are known in the art for the introduction of foreign genes into cells (see, e.g., Loeffler and Behr, Meth. Enzymol. 217:599-618 (1993); Cohen et al., Meth. Enzymol. 217:618-644 (1993); Cline, Pharmac. Ther. 29:69-92m (1985) and may be used in accordance with the present invention, provided that the necessary developmental and physiological functions of the recipient cells are not disrupted. The technique should provide for the stable transfer of the nucleic acid to the cell, so that the nucleic acid is expressible by the cell and preferably heritable and expressible by its cell progeny.

[0292] The resulting recombinant cells can be delivered to a patient by various methods known in the art. Recombinant blood cells (e.g., hematopoietic stem or progenitor cells) are preferably administered intravenously. The amount of cells envisioned for use depends on the desired effect, patient state, etc., and can be determined by one skilled in the art.

[0293] Cells into which a nucleic acid can be introduced for purposes of gene therapy encompass any desired, available cell type, and include but are not limited to epithelial cells, endothelial cells, keratinocytes, fibroblasts, muscle cells, hepatocytes; blood cells such as T lymphocytes, B lymphocytes, monocytes, macrophages, neutrophils, eosinophils, megakaryocytes, granulocytes; various stem or progenitor cells, in particular hematopoietic stem or progenitor cells, e.g., as obtained from bone marrow, umbilical cord blood, peripheral blood, fetal liver, etc.

[0294] In a preferred embodiment, the cell used for gene therapy is autologous to the patient.

[0295] In an embodiment in which recombinant cells are used in gene therapy, nucleic acid sequences encoding an antibody are introduced into the cells such that they are expressible by the cells or their progeny, and the recombinant cells are then administered in vivo for therapeutic effect. In a specific embodiment, stem or progenitor cells are used. Any stem and/or progenitor cells which can be isolated and maintained in vitro can potentially be used in accordance with this embodiment of the present invention (see e.g. PCT Publication WO 94/08598; Stemple and Anderson, Cell 71:973-985 (1992); Rheinwald, Meth. Cell Bio. 21A:229 (1980); and Pittelkow and Scott, Mayo Clinic Proc. 61:771 (1986)).

[0296] In a specific embodiment, the nucleic acid to be introduced for purposes of gene therapy comprises an inducible promoter operably linked to the coding region, such that expression of the nucleic acid is controllable by the presence or absence of an appropriate inducer of transcription.

[0297] Demonstration of Therapeutic or Prophylactic Activity

[0298] The compounds or pharmaceutical compositions of the invention are preferably tested in vitro, and then in vivo for the desired therapeutic or prophylactic activity, prior to use in humans. For example, in vitro assays to demonstrate the therapeutic or prophylactic utility of a compound or pharmaceutical composition include, the effect of a compound on a cell line or a patient tissue sample. The effect of the compound or composition on the cell line and/or tissue sample can be determined utilizing techniques known to those of skill in the art including, but not limited to, rosette formation assays and cell lysis assays. In accordance with the invention, in vitro assays which can be used to determine whether administration of a specific compound is indicated, include in vitro cell culture assays in which a patient tissue sample is grown in culture, and exposed to or otherwise administered a compound, and the effect of such compound upon the tissue sample is observed. Therapeutic/Prophylactic Administration and Composition

[0299] The invention provides methods of treatment, inhibition and prophylaxis by administration to a subject of an effective amount of a compound or pharmaceutical composition of the invention, preferably a polypeptide or antibody of the invention. In a preferred embodiment, the compound is substantially purified (e.g., substantially free from substances that limit its effect or produce undesired side-effects). The subject is preferably an animal, including but not limited to animals such as cows, pigs, horses, chickens, cats, dogs, etc., and is preferably a mammal, and most preferably human.

[0300] Formulations and methods of administration that can be employed when the compound comprises a nucleic acid or an immunoglobulin are described above; additional appropriate formulations and routes of administration can be selected from among those described herein below.

[0301] Various delivery systems are known and can be used to administer a compound of the invention, e.g., encapsulation in liposomes, microparticles, microcapsules, recombinant cells capable of expressing the compound, receptor-mediated endocytosis (see, e.g., Wu and Wu, J. Biol. Chem. 262:4429-4432 (1987)), construction of a nucleic acid as part of a retroviral or other vector, etc. Methods of introduction include but are not limited to intradermal, intramuscular, intraperitoneal, intravenous, subcutaneous, intranasal, epidural, and oral routes. The compounds or compositions may be administered by any convenient route, for example by infusion or bolus injection, by absorption through epithelial or mucocutaneous linings (e.g., oral mucosa, rectal and intestinal mucosa, etc.) and may be administered together with other biologically active agents. Administration can be systemic or local. In addition, it may be desirable to introduce the pharmaceutical compounds or compositions of the invention into the central nervous system by any suitable route, including intraventricular and intrathecal injection; intraventricular injection may be facilitated by an intraventricular catheter, for example, attached to a reservoir, such as an Ommaya reservoir. Pulmonary administration can also be employed, e.g., by use of an inhaler or nebulizer, and formulation with an aerosolizing agent.

[0302] In a specific embodiment, it may be desirable to administer the pharmaceutical compounds or compositions of the invention locally to the area in need of treatment; this may be achieved by, for example, and not by way of limitation, local infusion during surgery, topical application, e.g., in conjunction with a wound dressing after surgery, by injection, by means of a catheter, by means of a suppository, or by means of an implant, said implant being of a porous, non-porous, or gelatinous material, including membranes, such as sialastic membranes, or fibers. Preferably, when administering a protein, including an antibody, of the invention, care must be taken to use materials to which the protein does not absorb.

[0303] In another embodiment, the compound or composition can be delivered in a vesicle, in particular a liposome (see Langer, Science 249:1527-1533 (1990); Treat et al., in Liposomes in the Therapy of Infectious Disease and Cancer, Lopez-Berestein and Fidler (eds.), Liss, New York, pp. 353-365 (1989); Lopez-Berestein, ibid., pp. 317-327; see generally ibid.)

[0304] In yet another embodiment, the compound or composition can be delivered in a controlled release system. In one embodiment, a pump may be used (see Langer, supra; Sefton, CRC Crit. Ref. Biomed. Eng. 14:201 (1987); Buchwald et al., Surgery 88:507 (1980); Saudek et al., N. Engl. J. Med. 321:574 (1989)). In another embodiment, polymeric materials can be used (see Medical Applications of Controlled Release, Langer and Wise (eds.), CRC Pres., Boca Raton, Fla. (1974); Controlled Drug Bioavailability, Drug Product Design and Performance, Smolen and Ball (eds.), Wiley, New York (1984); Ranger and Peppas, J., Macromol. Sci. Rev. Macromol. Chem. 23:61 (1983); see also Levy et al., Science 228:190 (1985); During et al., Ann. Neurol. 25:351 (1989); Howard et al., J.Neurosurg. 71:105 (1989)). In yet another embodiment, a controlled release system can be placed in proximity of the therapeutic target, e.g., the brain, thus requiring only a fraction of the systemic dose (see, e.g., Goodson, in Medical Applications of Controlled Release, supra, vol. 2, pp. 115-138 (1984)).

[0305] Other controlled release systems are discussed in the review by Langer (Science 249:1527-1533 (1990)).

[0306] In a specific embodiment where the compound of the invention is a nucleic acid encoding a protein, the nucleic acid can be administered in vivo to promote expression of its encoded protein, by constructing it as part of an appropriate nucleic acid expression vector and administering it so that it becomes intracellular, e.g., by use of a retroviral vector (see U.S. Pat. No. 4,980,286), or by direct injection, or by use of microparticle bombardment (e.g., a gene gun; Biolistic, Dupont), or coating with lipids or cell-surface receptors or transfecting agents, or by administering it in linkage to a homeobox-like peptide which is known to enter the nucleus (see e.g., Joliot et al., Proc. Natl. Acad. Sci. USA 88:1864-1868 (1991)), etc. Alternatively, a nucleic acid can be introduced intracellularly and incorporated within host cell DNA for expression, by homologous recombination.

[0307] The present invention also provides pharmaceutical compositions. Such compositions comprise a therapeutically effective amount of a compound, and a pharmaceutically acceptable carrier. In a specific embodiment, the term “pharmaceutically acceptable” means approved by a regulatory agency of the Federal or a state government or listed in the U.S. Pharmacopeia or other generally recognized pharmacopeia for use in animals, and more particularly in humans. The term “carrier” refers to a diluent, adjuvant, excipient, or vehicle with which the therapeutic is administered. Such pharmaceutical carriers can be sterile liquids, such as water and oils, including those of petroleum, animal, vegetable or synthetic origin, such as peanut oil, soybean oil, mineral oil, sesame oil and the like. Water is a preferred carrier when the pharmaceutical composition is administered intravenously. Saline solutions and aqueous dextrose and glycerol solutions can also be employed as liquid carriers, particularly for injectable solutions. Suitable pharmaceutical excipients include starch, glucose, lactose, sucrose, gelatin, malt, rice, flour, chalk, silica gel, sodium stearate, glycerol monostearate, talc, sodium chloride, dried skim milk, glycerol, propylene, glycol, water, ethanol and the like. The composition, if desired, can also contain minor amounts of wetting or emulsifying agents, or pH buffering agents. These compositions can take the form of solutions, suspensions, emulsion, tablets, pills, capsules, powders, sustained-release formulations and the like. The composition can be formulated as a suppository, with traditional binders and carriers such as triglycerides. Oral formulation can include standard carriers such as pharmaceutical grades of mannitol, lactose, starch, magnesium stearate, sodium saccharine, cellulose, magnesium carbonate, etc. Examples of suitable pharmaceutical carriers are described in “Remington's Pharmaceutical Sciences” by E. W. Martin. Such compositions will contain a therapeutically effective amount of the compound, preferably in purified form, together with a suitable amount of carrier so as to provide the form for proper administration to the patient. The formulation should suit the mode of administration.

[0308] In a preferred embodiment, the composition is formulated in accordance with routine procedures as a pharmaceutical composition adapted for intravenous administration to human beings. Typically, compositions for intravenous administration are solutions in sterile isotonic aqueous buffer. Where necessary, the composition may also include a solubilizing agent and a local anesthetic such as lignocaine to ease pain at the site of the injection. Generally, the ingredients are supplied either separately or mixed together in unit dosage form, for example, as a dry lyophilized powder or water free concentrate in a hermetically sealed container such as an ampoule or sachette indicating the quantity of active agent. Where the composition is to be administered by infusion, it can be dispensed with an infusion bottle containing sterile pharmaceutical grade water or saline. Where the composition is administered by injection, an ampoule of sterile water for injection or saline can be provided so that the ingredients may be mixed prior to administration.

[0309] The compounds of the invention can be formulated as neutral or salt forms. Pharmaceutically acceptable salts include those formed with anions such as those derived from hydrochloric, phosphoric, acetic, oxalic, tartaric acids, etc., and those formed with cations such as those derived from sodium, potassium, ammonium, calcium, ferric hydroxides, isopropylamine, triethylamine, 2-ethylamino ethanol, histidine, procaine, etc.

[0310] The amount of the compound of the invention, which will be effective in the treatment, inhibition and prevention of a disease or disorder associated with aberrant expression and/or activity of a polypeptide of the invention can be determined by standard clinical techniques. In addition, in vitro assays may optionally be employed to help identify optimal dosage ranges. The precise dose to be employed in the formulation will also depend on the route of administration, and the seriousness of the disease or disorder, and should be decided according to the judgment of the practitioner and each patient's circumstances. Effective doses may be extrapolated from dose-response curves derived from in vitro or animal model test systems.

[0311] For antibodies, the dosage administered to a patient is typically 0.1 mg/kg to 100 mg/kg of the patient's body weight. Preferably, the dosage administered to a patient is between 0.1 mg/kg and 20 mg/kg of the patient's body weight, more preferably 1 mg/kg to 10 mg/kg of the patient's body weight. Generally, human antibodies have a longer half-life within the human body than antibodies from other species due to the immune response to the foreign polypeptides. Thus, lower dosages of human antibodies and less frequent administration is often possible. Further, the dosage and frequency of administration of antibodies of the invention may be reduced by enhancing uptake and tissue penetration (e.g., into the brain) of the antibodies by modifications such as, for example, lipidation.

[0312] The invention also provides a pharmaceutical pack or kit comprising one or more containers filled with one or more of the ingredients of the pharmaceutical compositions of the invention. Optionally associated with such container(s) can be a notice in the form prescribed by a governmental agency regulating the manufacture, use or sale of pharmaceuticals or biological products, which notice reflects approval by the agency of manufacture, use or sale for human administration. Diagnosis and Imaging

[0313] Labeled antibodies, and derivatives and analogs thereof, which specifically bind to a polypeptide of interest can be used for diagnostic purposes to detect, diagnose, or monitor diseases, disorders, and/or conditions associated with the aberrant expression and/or activity of a polypeptide of the invention. The invention provides for the detection of aberrant expression of a polypeptide of interest, comprising (a) assaying the expression of the polypeptide of interest in cells or body fluid of an individual using one or more antibodies specific to the polypeptide interest and (b) comparing the level of gene expression with a standard gene expression level, whereby an increase or decrease in the assayed polypeptide gene expression level compared to the standard expression level is indicative of aberrant expression.

[0314] The invention provides a diagnostic assay for diagnosing a colon disorder, comprising (a) assaying the expression of the polypeptide of interest in cells or body fluid of an individual using one or more antibodies specific to the polypeptide interest and (b) comparing the level of gene expression with a standard gene expression level, whereby an increase or decrease in the assayed polypeptide gene expression level compared to the standard expression level is indicative of a particular disorder. With respect to cancer, the presence of a relatively high amount of transcript in biopsied tissue from an individual may indicate a predisposition for the development of the disease, or may provide a means for detecting the disease prior to the appearance of actual clinical symptoms. A more definitive diagnosis of this type may allow health professionals to employ preventative measures or aggressive treatment earlier thereby preventing the development or further progression of the cancer.

[0315] Antibodies of the invention can be used to assay protein levels in a biological sample using classical immunohistological methods known to those of skill in the art (e.g., see Jalkanen et al., J. Cell. Biol. 101:976-985 (1985); Jalkanen et al., J. Cell. Biol. 105:3087-3096 (1987)). Other antibody-based methods useful for detecting protein gene expression include immunoassays, such as the enzyme linked immunosorbent assay (ELISA) and the radioimmunoassay (RIA). Suitable antibody assay labels are known in the art and include enzyme labels, such as, glucose oxidase; radioisotopes, such as iodine (125I, 121I), carbon (14C), sulfur (35S), tritium (3H), indium (112In), and technetium (99Tc); luminescent labels, such as luminol; and fluorescent labels, such as fluorescein and rhodamine, and biotin.

[0316] One facet of the invention is the detection and diagnosis of a disease or disorder associated with aberrant expression of a polypeptide of interest in an animal, preferably a mammal and most preferably a human. A preferred embodiment of the invention is the detection and diagnosis of a disease or disorder of the colon or colon cancer associated with aberrant expression of a colon or colon cancer antigen in an animal, preferably a mammal and most preferably a human. In one embodiment, diagnosis comprises: a) administering (for example, parenterally, subcutaneously, or intraperitoneally) to a subject an effective amount of a labeled molecule which specifically binds to the polypeptide of interest; b) waiting for a time interval following the administering for permitting the labeled molecule to preferentially concentrate at sites in the subject where the polypeptide is expressed (and for unbound labeled molecule to be cleared to background level); c) determining background level; and d) detecting the labeled molecule in the subject, such that detection of labeled molecule above the background level indicates that the subject has a particular disease or disorder associated with aberrant expression of the polypeptide of interest. Background level can be determined by various methods including, comparing the amount of labeled molecule detected to a standard value previously determined for a particular system.

[0317] It will be understood in the art that the size of the subject and the imaging system used will determine the quantity of imaging moiety needed to produce diagnostic images. In the case of a radioisotope moiety, for a human subject, the quantity of radioactivity injected will normally range from about 5 to 20 millicuries of 99mTc. The labeled antibody or antibody fragment will then preferentially accumulate at the location of cells which contain the specific protein. In vivo tumor imaging is described in S. W. Burchiel et al., “Immunopharmacokinetics of Radiolabeled Antibodies and Their Fragments.” (Chapter 13 in Tumor Imaging: The Radiochemical Detection of Cancer, S. W. Burchiel and B. A. Rhodes, eds., Masson Publishing Inc. (1982)).

[0318] Depending on several variables, including the type of label used and the mode of administration, the time interval following the administration for permitting the labeled molecule to preferentially concentrate at sites in the subject and for unbound labeled molecule to be cleared to background level is 6 to 48 hours or 6 to 24 hours or 6 to 12 hours. In another embodiment the time interval following administration is 5 to 20 days or 5 to 10 days.

[0319] In an embodiment, monitoring of the disease or disorder is carried out by repeating the method for diagnosing the disease or disorder, for example, one month after initial diagnosis, six months after initial diagnosis, one year after initial diagnosis, etc.

[0320] Presence of the labeled molecule can be detected in the patient using methods known in the art for in vivo scanning. These methods depend upon the type of label used. Skilled artisans will be able to determine the appropriate method for detecting a particular label. Methods and devices that may be used in the diagnostic methods of the invention include, but are not limited to, computed tomography (CT), whole body scan such as position emission tomography (PET), magnetic resonance imaging (MRI), and sonography.

[0321] In a specific embodiment, the molecule is labeled with a radioisotope and is detected in the patient using a radiation responsive surgical instrument (Thurston et al., U.S. Pat. No. 5,441,050). In another embodiment, the molecule is labeled with a fluorescent compound and is detected in the patient using a fluorescence responsive scanning instrument. In another embodiment, the molecule is labeled with a positron emitting metal and is detected in the patent using positron emission-tomography. In yet another embodiment, the molecule is labeled with a paramagnetic label and is detected in a patient using magnetic resonance imaging (MRI). Kits

[0322] The present invention provides kits that can be used in the above methods. In one embodiment, a kit comprises an antibody of the invention, preferably a purified antibody, in one or more containers. In a specific embodiment, the kits of the present invention contain a substantially isolated polypeptide comprising an epitope which is specifically immunoreactive with an antibody included in the kit. Preferably, the kits of the present invention further comprise a control antibody which does not react with the polypeptide of interest. In another specific embodiment, the kits of the present invention contain a means for detecting the binding of an antibody to a polypeptide of interest (e.g., the antibody may be conjugated to a detectable substrate such as a fluorescent compound, an enzymatic substrate, a radioactive compound or a luminescent compound, or a second antibody which recognizes the first antibody may be conjugated to a detectable substrate).

[0323] In another specific embodiment of the present invention, the kit is a diagnostic kit for use in screening serum containing antibodies specific against proliferative and/or cancerous polynucleotides and polypeptides. Such a kit may include a control antibody that does not react with the polypeptide of interest. Such a kit may include a substantially isolated polypeptide antigen comprising an epitope, which is specifically immunoreactive with at least one anti-polypeptide antigen antibody. Further, such a kit includes means for detecting the binding of said antibody to the antigen (e.g., the antibody may be conjugated to a fluorescent compound such as fluorescein or rhodamine, which can be detected by flow cytometry). In specific embodiments, the kit may include a recombinantly produced or chemically synthesized polypeptide antigen. The polypeptide antigen of the kit may also be attached to a solid support.

[0324] In a more specific embodiment the detecting means of the above-described kit includes a solid support to which said polypeptide antigen is attached. Such a kit may also include a non-attached reporter-labeled anti-human antibody. In this embodiment, binding of the antibody to the polypeptide antigen can be detected by binding of the said reporter-labeled antibody.

[0325] In an additional embodiment, the invention includes a diagnostic kit for use in screening serum containing antigens of the polypeptide of the invention. The diagnostic kit includes a substantially isolated antibody specifically immunoreactive with polypeptide or polynucleotide antigens, and means for detecting the binding of the polynucleotide or polypeptide antigen to the antibody. In one embodiment, the antibody is attached to a solid support. In a specific embodiment, the antibody may be a monoclonal antibody. The detecting means of the kit may include a second, labeled monoclonal antibody. Alternatively, or in addition, the detecting means may include a labeled, competing antigen.

[0326] In one diagnostic configuration, test serum is reacted with a solid phase reagent having a surface-bound antigen obtained by the methods of the present invention. After binding with specific antigen antibody to the reagent and removing unbound serum components by washing, the reagent is reacted with reporter-labeled anti-human antibody to bind reporter to the reagent in proportion to the amount of bound anti-antigen antibody on the solid support. The reagent is again washed to remove unbound labeled antibody, and the amount of reporter associated with the reagent is determined. Typically, the reporter is an enzyme, which is detected by incubating the solid phase in the presence of a suitable fluorometric, luminescent or calorimetric substrate (Sigma, St. Louis, Mo.).

[0327] The solid surface reagent in the above assay is prepared by known techniques for attaching protein material to solid support material, such as polymeric beads, dip sticks, 96-well plate or filter material. These attachment methods generally include non-specific adsorption of the protein to the support or covalent attachment of the protein, typically through a free amine group, to a chemically reactive group on the solid support, such as an activated carboxyl, hydroxyl, or aldehyde group. Alternatively, streptavidin coated plates can be used in conjunction with biotinylated antigen(s).

[0328] Thus, the invention provides an assay system or kit for carrying out this diagnostic method. The kit generally includes a support with surface- bound recombinant antigens, and a reporter-labeled anti-human antibody for detecting surface-bound anti-antigen antibody.

[0329] Uses of the Polynucleotides

[0330] Each of the polynucleotides identified herein can be used in numerous ways as reagents. The following description should be considered exemplary and utilizes known techniques.

[0331] The polynucleotides of the present invention are useful for chromosome identification. There exists an ongoing need to identify new chromosome markers, since few chromosome marking reagents, based on actual sequence data (repeat polymorphisms), are presently available. Each sequence is specifically targeted to and can hybridize with a particular location on an individual human chromosome, thus each polynucleotide of the present invention can routinely be used as a chromosome marker using techniques known in the art. Table 1A, column 9 provides the chromosome location of some of the polynucleotides of the invention.

[0332] Briefly, sequences can be mapped to chromosomes by preparing PCR primers (preferably at least 15 bp (e.g., 15-25 bp) from the sequences shown in SEQ ID NO:X. Primers can optionally be selected using computer analysis so that primers do not span more than one predicted exon in the genomic DNA. These primers are then used for PCR screening of somatic cell hybrids containing individual human chromosomes. Only those hybrids containing the human gene corresponding to SEQ ID NO:X will yield an amplified fragment.

[0333] Similarly, somatic hybrids provide a rapid method of PCR mapping the polynucleotides to particular chromosomes. Three or more clones can be assigned per day using a single thermal cycler. Moreover, sublocalization of the polynucleotides can be achieved with panels of specific chromosome fragments. Other gene mapping strategies that can be used include in situ hybridization, prescreening with labeled flow-sorted chromosomes, preselection by hybridization to construct chromosome specific-cDNA libraries, and computer mapping techniques (See, e.g., Shuler, Trends Biotechnol 16:456-459 (1998) which is hereby incorporated by reference in its entirety).

[0334] Precise chromosomal location of the polynucleotides can also be achieved using fluorescence in situ hybridization (FISH) of a metaphase chromosomal spread. This technique uses polynucleotides as short as 500 or 600 bases; however, polynucleotides 2,000-4,000 bp are preferred. For a review of this technique, see Verma et al., “Human Chromosomes: a Manual of Basic Techniques,” Pergamon Press, New York (1988).

[0335] For chromosome mapping, the polynucleotides can be used individually (to mark a single chromosome or a single site on that chromosome) or in panels (for marking multiple sites and/or multiple chromosomes).

[0336] Thus, the present invention also provides a method for chromosomal localization which involves (a) preparing PCR primers from the polynucleotide sequences in Table 1A and/or Table 2 and SEQ ID NO:X and (b) screening somatic cell hybrids containing individual chromosomes.

[0337] The polynucleotides of the present invention would likewise be useful for radiation hybrid mapping, HAPPY mapping, and long range restriction mapping. For a review of these techniques and others known in the art, see, e.g. Dear, “Genome Mapping: A Practical Approach,” IRL Press at Oxford University Press, London (1997); Aydin, J. Mol. Med. 77:691-694 (1999); Hacia et al., Mol. Psychiatry 3:483-492 (1998); Herrick et al., Chromosome Res. 7:409-423 (1999); Hamilton et al., Methods Cell Biol. 62:265-280 (2000); and/or Ott, J. Hered. 90:68-70 (1999), each of which is hereby incorporated by reference in its entirety.

[0338] Once a polynucleotide has been mapped to a precise chromosomal location, the physical position of the polynucleotide can be used in linkage analysis. Linkage analysis establishes coinheritance between a chromosomal location and presentation of a particular disease. (Disease mapping data are found, for example, in V. McKusick, Mendelian Inheritance in Man (available on line through Johns Hopkins University Welch Medical Library).) Column 10 of Table 1A provides an OMIM reference identification number of diseases associated with the cytologic band disclosed in column 9 of Table 1A, as determined using techniques described herein and by reference to Table 5. Assuming 1 megabase mapping resolution and one gene per 20 kb, a cDNA precisely localized to a chromosomal region associated with the disease could be one of 50-500 potential causative genes.

[0339] Thus, once coinheritance is established, differences in a polynucleotide of the invention and the corresponding gene between affected and unaffected individuals can be examined. First, visible structural alterations in the chromosomes, such as deletions or translocations, are examined in chromosome spreads or by PCR. If no structural alterations exist, the presence of point mutations are ascertained. Mutations observed in some or all affected individuals, but not in normal individuals, indicate that the mutation may cause the disease. However, complete sequencing of the polypeptide and the corresponding gene from several normal individuals is required to distinguish the mutation from a polymorphism. If a new polymorphism is identified, this polymorphic polypeptide can be used for further linkage analysis.

[0340] Furthermore, increased or decreased expression of the gene in affected individuals as compared to unaffected individuals can be assessed using the polynucleotides of the invention. Any of these alterations (altered expression, chromosomal rearrangement, or mutation) can be used as a diagnostic or prognostic marker. Diagnostic and prognostic methods, kits and reagents encompassed by the present invention are briefly described below and more thoroughly elsewhere herein (see e.g., the sections labeled “Antibodies”, “Diagnostic Assays”, and “Methods for Detecting Colon Disease, Including Cancer”).

[0341] Thus, the invention also provides a diagnostic method useful during diagnosis of a disorder, involving measuring the expression level of polynucleotides of the present invention in cells or body fluid from an individual and comparing the measured gene expression level with a standard level of polynucleotide expression level, whereby an increase or decrease in the gene expression level compared to the standard is indicative of a disorder. Additional non-limiting examples of diagnostic methods encompassed by the present invention are more thoroughly described elsewhere herein (see, e.g., Example 12).

[0342] In still another embodiment, the invention includes a kit for analyzing samples for the presence of proliferative and/or cancerous polynucleotides derived from a test subject, as further described herein. In a general embodiment, the kit includes at least one polynucleotide probe containing a nucleotide sequence that will specifically hybridize with a polynucleotide of the invention and a suitable container. In a specific embodiment, the kit includes two polynucleotide probes defining an internal region of the polynucleotide of the invention, where each probe has one strand containing a 31′mer-end internal to the region. In a further embodiment, the probes may be useful as primers for polymerase chain reaction amplification.

[0343] Where a diagnosis of a related disorder, including, for example, diagnosis of a tumor, has already been made according to conventional methods, the present invention is useful as a prognostic indicator, whereby patients exhibiting enhanced or depressed polynucleotide of the invention expression will experience a worse clinical outcome relative to patients expressing the gene at a level nearer the standard level.

[0344] By “measuring the expression level of polynucleotides of the invention” is intended qualitatively or quantitatively measuring or estimating the level of the polypeptide of the invention or the level of the mRNA encoding the polypeptide of the invention in a first biological sample either directly (e.g., by determining or estimating absolute protein level or mRNA level) or relatively (e.g., by comparing to the polypeptide level or mRNA level in a second biological sample). Preferably, the polypeptide level or mRNA level in the first biological sample is measured or estimated and compared to a standard polypeptide level or mRNA level, the standard being taken from a second biological sample obtained from an individual not having the related disorder or being determined by averaging levels from a population of individuals not having a related disorder. As will be appreciated in the art, once a standard polypeptide level or mRNA level is known, it can be used repeatedly as a standard for comparison.

[0345] By “biological sample” is intended any biological sample obtained from an individual, body fluid, cell line, tissue culture, or other source which contains polypeptide of the present invention or the corresponding mRNA. As indicated, biological samples include body fluids (such as semen, lymph, vaginal pool, sera, plasma, urine, synovial fluid and spinal fluid) which contain the polypeptide of the present invention, and tissue sources found to express the polypeptide of the present invention. Methods for obtaining tissue biopsies and body fluids from mammals are well known in the art. Where the biological sample is to include mRNA, a tissue biopsy is the preferred source.

[0346] The method(s) provided above may preferably be applied in a diagnostic method and/or kits in which polynucleotides and/or polypeptides of the invention are attached to a solid support. In one exemplary method, the support may be a “gene chip” or a “biological chip” as described in U.S. Pat. Nos. 5,837,832, 5,874,219, and 5,856,174. Further, such a gene chip with polynucleotides of the invention attached may be used to identify polymorphisms between the isolated polynucleotide sequences of the invention, with polynucleotides isolated from a test subject. The knowledge of such polymorphisms (i.e., their location, as well as, their existence) would be beneficial in identifying disease loci for many disorders, such as for example, in neural disorders, immune system disorders, muscular disorders, reproductive disorders, gastrointestinal disorders, pulmonary disorders, digestive disorders, cardiovascular disorders, renal disorders, proliferative disorders, and/or cancerous diseases and conditions. Such a method is described in U.S. Pat. Nos. 5,858,659 and 5,856,104. The U.S. patents referenced supra are hereby incorporated by reference in their entirety herein.

[0347] The present invention encompasses polynucleotides of the present invention that are chemically synthesized, or reproduced as peptide nucleic acids (PNA), or according to other methods known in the art. The use of PNAs would serve as the preferred form if the polynucleotides of the invention are incorporated onto a solid support, or gene chip. For the purposes of the present invention, a peptide nucleic acid (PNA) is a polyamide type of DNA analog and the monomeric units for adenine, guanine, thymine and cytosine are available commercially (Perceptive Biosystems). Certain components of DNA, such as phosphorus, phosphorus oxides, or deoxyribose derivatives, are not present in PNAs. As disclosed by Nielsen et al., Science 254:1497 (1991); and Egholm et al., Nature 365:666 (1993), PNAs bind specifically and tightly to complementary DNA strands and are not degraded by nucleases. In fact, PNA binds more strongly to DNA than DNA itself does. This is probably because there is no electrostatic repulsion between the two strands, and also the polyamide backbone is more flexible. Because of this, PNA/DNA duplexes bind under a wider range of stringency conditions than DNA/DNA duplexes, making it easier to perform multiplex hybridization. Smaller probes can be used than with DNA due to the strong binding. In addition, it is more likely that single base mismatches can be determined with PNA/DNA hybridization because a single mismatch in a PNA/DNA 15-mer lowers the melting point (T.sub.m) by 8°-20° C., vs. 4°-16° C. for the DNA/DNA 15-mer duplex. Also, the absence of charge groups in PNA means that hybridization can be done at low ionic strengths and reduce possible interference by salt during the analysis.

[0348] The compounds of the present invention have uses which include, but are not limited to, detecting cancer in mammals. In particular the invention is useful during diagnosis of pathological cell proliferative neoplasias which include, but are not limited to: acute myelogenous leukemias including acute monocytic leukemia, acute myeloblastic leukemia, acute promyelocytic leukemia, acute myelomonocytic leukemia, acute erythroleukemia, acute megakaryocytic leukemia, and acute undifferentiated leukemia, etc.; and chronic myelogenous leukemias including chronic myelomonocytic leukemia, chronic granulocytic leukemia, etc. Preferred mammals include monkeys, apes, cats, dogs, cows, pigs, horses, rabbits and humans. Particularly preferred are humans.

[0349] The compounds of the present invention have preferred uses which include, but are not limited to, detecting colon cancer in mammals. In particular the invention is useful during diagnosis of pathological cell proliferative neoplasias, which include, but are not limited to: polyps (e.g., sessile polyp, adenomatous polyp, inflammatory polyps), adenomas (e.g., tubular adenoma, tubovillous adenomas, villous adenoma, Gardner syndrome, Peutz-Jeghers syndrome), hyperplastic, polyposis, villous, pseudopolyps, leiomyomas, carcinoids, lipomas, and angiomas, cancers, such as, rectal cancer, adenocarcinoma, colorectal carcinoma, colon cancer, colon carcinoma, colorectal cancer; colonic diseases, and/or as described under “Gastrointestinal Disorders” below. Preferred mammals include monkeys, apes, cats, dogs, cows, pigs, horses, rabbits and humans. Particularly preferred are humans.

[0350] Pathological cell proliferative disorders are often associated with inappropriate activation of proto-oncogenes. (Gelmann, E. P. et al., “The Etiology of Acute Leukemia: Molecular Genetics and Viral Oncology,” in Neoplastic Diseases of the Blood, Vol 1., Wiernik, P. H. et al. eds., 161-182 (1985)). Neoplasias are now believed to result from the qualitative alteration of a normal cellular gene product, or from the quantitative modification of gene expression by insertion into the chromosome of a viral sequence, by chromosomal translocation of a gene to a more actively transcribed region, or by some other mechanism. (Gelmann et al., supra) It is likely that mutated or altered expression of specific genes is involved in the pathogenesis of some leukemias, among other tissues and cell types. (Gelmann et al., supra) Indeed, the human counterparts of the oncogenes involved in some animal neoplasias have been amplified or translocated in some cases of human leukemia and carcinoma. (Gelmann et al., supra)

[0351] For example, c-myc expression is highly amplified in the non-lymphocytic leukemia cell line HL-60. When HL-60 cells are chemically induced to stop proliferation, the level of c-myc is found to be downregulated. (International Publication Number WO 91/15580). However, it has been shown that exposure of HL-60 cells to a DNA construct that is complementary to the 5′ end of c-myc or c-myb blocks translation of the corresponding mRNAs which downregulates expression of the c-myc or c-myb proteins and causes arrest of cell proliferation and differentiation of the treated cells. (International Publication Number WO 91/15580; Wickstrom et al., Proc. Natl. Acad. Sci. 85:1028 (1988); Anfossi et al., Proc. Natl. Acad. Sci. 86:3379 (1989)). However, the skilled artisan would appreciate the present invention's usefulness is not be limited to treatment, prevention, diagnosis and/or prognosis, of proliferative disorders of cells and tissues of hematopoietic origin, in light of the numerous cells and cell types of varying origins which are known to exhibit proliferative phenotypes. In preferred embodiments, the compounds and/or methods of the invention are used to treat, prevent, diagnose, and/or prognose, proliferative disorders of colon cells and tissues.

[0352] In addition to the foregoing, a polynucleotide of the present invention can be used to control gene expression through triple helix formation or through antisense DNA or RNA. Antisense techniques are discussed, for example, in Okano, J. Neurochem. 56: 560 (1991); “Oligodeoxynucleotides as Antisense Inhibitors of Gene Expression, CRC Press, Boca Raton, Fla. (1988). Triple helix formation is discussed in, for instance Lee et al., Nucleic Acids Research 6: 3073 (1979); Cooney et al., Science 241: 456 (1988); and Dervan et al., Science 251: 1360 (1991). Both methods rely on binding of the polynucleotide to a complementary DNA or RNA. For these techniques, preferred polynucleotides are usually oligonucleotides 20 to 40 bases in length and complementary to either the region of the gene involved in transcription (triple helix—see Lee et al., Nucl. Acids Res. 6:3073 (1979); Cooney et al., Science 241:456 (1988); and Dervan et al., Science 251:1360 (1991)) or to the mRNA itself (antisense—Okano, J. Neurochem. 56:560 (1991); Oligodeoxy-nucleotides as Antisense Inhibitors of Gene Expression, CRC Press, Boca Raton, Fla. (1988).) Triple helix formation optimally results in a shut-off of RNA transcription from DNA, while antisense RNA hybridization blocks translation of an mRNA molecule into polypeptide. The oligonucleotide described above can also be delivered to cells such that the antisense RNA or DNA may be expressed in vivo to inhibit production of polypeptide of the present invention antigens. Both techniques are effective in model systems, and the information disclosed herein can be used to design antisense or triple helix polynucleotides in an effort to treat disease, and in particular, for the treatment of proliferative diseases and/or conditions. Non-limiting antisense and triple helix methods encompassed by the present invention are more thoroughly described elsewhere herein (see, e.g., the section labeled “Antisense and Ribozyme (Antagonists)”).

[0353] Polynucleotides of the present invention are also useful in gene therapy. One goal of gene therapy is to insert a normal gene into an organism having a defective gene, in an effort to correct the genetic defect. The polynucleotides disclosed in the present invention offer a means of targeting such genetic defects in a highly accurate manner. Another goal is to insert a new gene that was not present in the host genome, thereby producing a new trait in the host cell. Additional non-limiting examples of gene therapy methods encompassed by the present invention are more thoroughly described elsewhere herein (see, e.g., the sections labeled “Gene Therapy Methods” and Examples 16, 17 and 18).

[0354] The polynucleotides are also useful for identifying individuals from minute biological samples. The United States military, for example, is considering the use of restriction fragment length polymorphism (RFLP) for identification of its personnel. In this technique, an individual's genomic DNA is digested with one or more restriction enzymes, and probed on a Southern blot to yield unique bands for identifying personnel. This method does not suffer from the current limitations of “Dog Tags” which can be lost, switched, or stolen, making positive identification difficult. The polynucleotides of the present invention can be used as additional DNA markers for RFLP.

[0355] The polynucleotides of the present invention can also be used as an alternative to RFLP, by determining the actual base-by-base DNA sequence of selected portions of an individual's genome. These sequences can be used to prepare PCR primers for amplifying and isolating such selected DNA, which can then be sequenced. Using this technique, individuals can be identified because each individual will have a unique set of DNA sequences. Once a unique ID database is established for an individual, positive identification of that individual, living or dead, can be made from extremely small tissue samples.

[0356] Forensic biology also benefits from using DNA-based identification techniques as disclosed herein. DNA sequences taken from very small biological samples such as tissues, e.g., hair or skin, or body fluids, e.g., blood, saliva, semen, synovial fluid, amniotic fluid, breast milk, lymph, pulmonary sputum or surfactant, urine, fecal matter, etc., can be amplified using PCR. In one prior art technique, gene sequences amplified from polymorphic loci, such as DQa class II HLA gene, are used in forensic biology to identify individuals. (Erlich, H., PCR Technology, Freeman and Co. (1992).) Once these specific polymorphic loci are amplified, they are digested with one or more restriction enzymes, yielding an identifying set of bands on a Southern blot probed with DNA corresponding to the DQa class II HLA gene. Similarly, polynucleotides of the present invention can be used as polymorphic markers for forensic purposes.

[0357] There is also a need for reagents capable of identifying the source of a particular tissue. Such need arises, for example, in forensics when presented with tissue of unknown origin. Appropriate reagents can comprise, for example, DNA probes or primers prepared from the sequences of the present invention, specific to tissues, including but not limited to, those sequences referred to in Table 1A. Panels of such reagents can identify tissue by species and/or by organ type. In a similar fashion, these reagents can be used to screen tissue cultures for contamination. Additional non-limiting examples of such uses are further described herein.

[0358] Because colon or colon cancer antigens are found expressed in the colon, the polynucleotides of the present invention are also useful as hybridization probes for differential identification of the tissue(s) or cell type(s) present in a biological sample. Similarly, polypeptides and antibodies directed to polypeptides of the present invention are useful to provide immunological probes for differential identification of the tissue(s) (e.g., immunohistochemistry assays) or cell type(s) (e.g., immunocytochemistry assays). In a specific embodiment, the polynucleotides of the present invention are also useful as hybridization probes for differential identification of colon tissue(s) or cell type(s) present in a biological sample. Similarly, polypeptides and antibodies directed to polypeptides of the present invention are useful to provide immunological probes for differential identification of colon tissue(s) (e.g., immunohistochemistry assays) or cell type(s) (e.g., immunocytochemistry assays). In addition, for a number of disorders of the above tissues or cells, significantly higher or lower levels of gene expression of the polynucleotides/polypeptides of the present invention may be detected in certain tissues (e.g., tissues expressing polypeptides and/or polynucleotides of the present invention, for example, normal colon or diseased colon tissues, and/or those tissues/cells corresponding to the library source relating to a polynucleotide sequence of the invention as disclosed in column 8 of Table 1A, and/or cancerous and/or wounded tissues) or bodily fluids (e.g., semen, lymph, vaginal pool, serum, plasma, urine, synovial fluid or spinal fluid) taken from an individual having such a disorder, relative to a “standard” gene expression level, i.e., the expression level in healthy tissue from an individual not having the disorder.

[0359] Thus, the invention provides a diagnostic method of a disorder, which involves: (a) assaying gene expression level in cells or body fluid of an individual; (b) comparing the gene expression level with a standard gene expression level, whereby an increase or decrease in the assayed gene expression level compared to the standard expression level is indicative of a disorder.

[0360] In the very least, the polynucleotides of the present invention can be used as molecular weight markers on Southern gels, as diagnostic probes for the presence of a specific mRNA in a particular cell type, as a probe to “subtract-out” known sequences in the process of discovering novel polynucleotides, for selecting and making oligomers for attachment to a “gene chip” or other support, to raise anti-DNA antibodies using DNA immunization techniques, and as an antigen to elicit an immune response.

[0361] Uses of the Polypeptides

[0362] Each of the polypeptides identified herein can be used in numerous ways. The following description should be considered exemplary and utilizes known techniques.

[0363] Polypeptides and antibodies directed to polypeptides of the present invention are useful to provide immunological probes for differential identification of the tissue(s) (e.g., immunohistochemistry assays such as, for example, ABC immunoperoxidase (Hsu et al., J. Histochem. Cytochem. 29:577-580 (1981)) or cell type(s) (e.g., immunocytochemistry assays).

[0364] Antibodies can be used to assay levels of polypeptides encoded by polynucleotides of the invention in a biological sample using classical immunohistological methods known to those of skill in the art (see, e.g., Jalkanen, et al., J. Cell. Biol. 101:976-985 (1985); Jalkanen, et al., J. Cell. Biol. 105:3087-3096 (1987)). Other antibody-based methods useful for detecting protein gene expression include immunoassays, such as the enzyme linked immunosorbent assay (ELISA) and the radioimmunoassay (RIA). Suitable antibody assay labels are known in the art and include enzyme labels, such as, glucose oxidase; radioisotopes, such as iodine (¹³¹I, ¹²⁵I, ¹²³I, ¹²¹I), carbon (¹⁴C), sulfur (³⁵S), tritium (³H), indium (^{115m}In, ^{113m}In, ¹¹²In, ¹¹¹In), and technetium (⁹⁹Tc, ^{99m}Tc), thallium (²⁰¹Ti), gallium (⁶⁸Ga, ⁶⁷Ga), palladium (¹⁰³Pd), molybdenum (⁹⁹Mo), xenon (¹³³Xe), fluorine (¹⁸F), ¹⁵³Sm, ¹⁷⁷Lu, ¹⁵⁹Gd, ¹⁴⁹Pm, ¹⁴⁰La, 175Yb, ¹⁶⁶Ho, ⁹⁰Y, ⁴⁷Sc, ¹⁸⁶Re, ¹⁸⁸Re, ¹⁴²Pr, ¹⁰⁵Rh, ⁹⁷Ru; luminescent labels, such as luminol; and fluorescent labels, such as fluorescein and rhodamine, and biotin.

[0365] In addition to assaying levels of polypeptide of the present invention in a biological sample, proteins can also be detected in vivo by imaging. Antibody labels or markers for in vivo imaging of protein include those detectable by X-radiography, NMR or ESR. For X-radiography, suitable labels include radioisotopes such as barium or cesium, which emit detectable radiation but are not overtly harmful to the subject. Suitable markers for NMR and ESR include those with a detectable characteristic spin, such as deuterium, which may be incorporated into the antibody by labeling of nutrients for the relevant hybridoma.

[0366] A colon or colon cancer antigen-specific antibody or antibody fragment which has been labeled with an appropriate detectable imaging moiety, such as a radioisotope (for example, ¹³¹I, ¹¹²In, ^{99m}Tc, (¹³¹I, ¹²⁵I, ¹²³I, ¹²¹I), carbon (¹⁴C), sulfur (³⁵S), tritium (³H), indium (^{115m}In, ^{113m}In, ¹¹²In, ¹¹¹In), and technetium (⁹⁹Tc, ^{99m}Tc), thallium (²⁰¹Ti), gallium (⁶⁸Ga, ⁶⁷Ga), palladium (¹⁰³Pd), molybdenum (⁹⁹Mo), xenon (¹³³Xe), fluorine (¹⁸F, ¹⁵³Sm, ¹⁷⁷Lu, ¹⁵⁹Gd, ¹⁴⁹Pm, ¹⁴⁰La, ¹⁷⁵Yb, ¹⁶⁶Ho, ⁹⁰Y, ⁴⁷Sc, ¹⁸⁶Re, ¹⁸⁸Re, ¹⁴²Pr, Rh, ⁹⁷Ru), a radio-opaque substance, or a material detectable by nuclear magnetic resonance, is introduced (for example, parenterally, subcutaneously or intraperitoneally) into the mammal to be examined for colon disorder. It will be understood in the art that the size of the subject and the imaging system used will determine the quantity of imaging moiety needed to produce diagnostic images. In the case of a radioisotope moiety, for a human subject, the quantity of radioactivity injected will normally range from about 5 to 20 millicuries of ^{99m}Tc. The labeled antibody or antibody fragment will then preferentially accumulate at the location of cells which express the polypeptide encoded by a polynucleotide of the invention. In vivo tumor imaging is described in S. W. Burchiel et al., “Immunopharmacokinetics of Radiolabeled Antibodies and Their Fragments” (Chapter 13 in Tumor Imaging: The Radiochemical Detection of Cancer, S. W. Burchiel and B. A. Rhodes, eds., Masson Publishing Inc. (1982)).

[0367] In one embodiment, the invention provides a method for the specific delivery of compositions of the invention to cells by administering polypeptides of the invention (e.g., polypeptides encoded by polynucleotides of the invention and/or antibodies) that are associated with heterologous polypeptides or nucleic acids. In one example, the invention provides a method for delivering a therapeutic protein into the targeted cell. In another example, the invention provides a method for delivering a single stranded nucleic acid (e.g., antisense or ribozymes) or double stranded nucleic acid (e.g., DNA that can integrate into the cell's genome or replicate episomally and that can be transcribed) into the targeted cell.

[0368] In another embodiment, the invention provides a method for the specific destruction of cells (e.g., the destruction of tumor cells) by administering polypeptides of the invention in association with toxins or cytotoxic prodrugs.

[0369] In a preferred embodiment, the invention provides a method for the specific destruction of colon cells (e.g., aberrant colon cells, colon neoplasm) by administering polypeptides of the invention (e.g., polypeptides encoded by polynucleotides of the invention and/or antibodies) in association with toxins or cytotoxic prodrugs. In another preferred embodiment the invention provides a method for the specific destruction of tissues/cells corresponding to the library source relating to a polynucleotide sequence of the invention as disclosed in column 8 of Table 1A by administering polypeptides of the invention in association with toxins or cytotoxic prodrugs.

[0370] By “toxin” is meant one or more compounds that bind and activate endogenous cytotoxic effector systems, radioisotopes, holotoxins, modified toxins, catalytic subunits of toxins, or any molecules or enzymes not normally present in or on the surface of a cell that under defined conditions cause the cell's death. Toxins that may be used according to the methods of the invention include, but are not limited to, radioisotopes known in the art, compounds such as, for example, antibodies (or complement fixing containing portions thereof) that bind an inherent or induced endogenous cytotoxic effector system, thymidine kinase, endonuclease, RNAse, alpha toxin, ricin, abrin, Pseudomonas exotoxin A, diphtheria toxin, saporin, momordin, gelonin, pokeweed antiviral protein, alpha-sarcin and cholera toxin. “Toxin” also includes a cytostatic or cytocidal agent, a therapeutic agent or a radioactive metal ion, e.g., alpha-emitters such as, for example, ²¹³Bi, or other radioisotopes such as, for example, ¹⁰³Pd, ¹³³Xe, ¹³¹I, ⁶⁸Ge, ⁵⁷Co, ⁶⁵Zn, ⁸⁵Sr, ³²P, ³⁵S, ⁹⁰Y, ¹⁵³Sm, ¹⁵³Gd, ¹⁶⁹Yb, ⁵¹Cr, ⁵⁴Mn, ⁷⁵Se, ¹¹³Sn, ⁹⁰Yttrium, ¹¹⁷Tin, ¹⁸⁶Rhenium, ¹⁶⁶Holmium, and ¹⁸⁸Rhenium; luminescent labels, such as luminol; and fluorescent labels, such as fluorescein and rhodamine, and biotin.

[0371] In a specific embodiment, the invention provides a method for the specific destruction of cells (e.g., the destruction of tumor cells) by administering polypeptides of the invention or antibodies of the invention in association with the radioisotope ⁹⁰Y. In another specific embodiment, the invention provides a method for the specific destruction of cells (e.g., the destruction of tumor cells) by administering polypeptides of the invention or antibodies of the invention in association with the radioisotope ¹¹¹In. In a further specific embodiment, the invention provides a method for the specific destruction of cells (e.g., the destruction of tumor cells) by administering polypeptides of the invention or antibodies of the invention in association with the radioisotope ¹³¹I.

[0372] Techniques known in the art may be applied to label polypeptides of the invention (including antibodies). Such techniques include, but are not limited to, the use of bifunctional conjugating agents (see e.g., U.S. Pat. Nos. 5,756,065; 5,714,631; 5,696,239; 5,652,361; 5,505,931; 5,489,425; 5,435,990; 5,428,139; 5,342,604; 5,274,119; 4,994,560; and 5,808,003; the contents of each of which are hereby incorporated by reference in its entirety).

[0373] Thus, the invention provides a diagnostic method of a disorder, which involves (a) assaying the expression level of a polypeptide of the present invention in cells or body fluid of an individual; and (b) comparing the assayed polypeptide expression level with a standard polypeptide expression level, whereby an increase or decrease in the assayed polypeptide expression level compared to the standard expression level is indicative of a disorder. With respect to cancer, the presence of a relatively high amount of transcript in biopsied tissue from an individual may indicate a predisposition for the development of the disease, or may provide a means for detecting the disease prior to the appearance of actual clinical symptoms. A more definitive diagnosis of this type may allow health professionals to employ preventative measures or aggressive treatment earlier thereby preventing the development or further progression of the cancer.

[0374] Moreover, polypeptides of the present invention can be used to treat or prevent diseases or conditions of the colon such as, for example, congenital abnormalities, colonic diverticulitis, colonic diverticulosis, toxic megacolon, constipation, disorders caused by parasites and protozoa, bacteria and viral infection, inflammatory bowel disease, neoplastic disorders, such as, polyps, adenomas, leiomyomas, carcinoids, lipomas, and angiomas, cancers, such as, rectal cancer, adenocarcinoma, colorectal carcinoma, colon cancer, colon carcinoma, colorectal cancer, colonic diseases, miscellaneous intestinal inflammatory disorders, including acquired immunodeficiency syndrome, HIV enteropathy, transplantation, drug-induced intestinal injury, radiation enterocolitis, neutropenic colitis, diverticular colon disease (DCD), inflammatory colonic disease, ischemic colitis, radiation proctitis, non-inflammatory bowel disease (non-IBD), colonic inflammation; colitis, diarrhea and dysentary, malabsorption syndromes, mesenteric vascular occlusion, pneumatosis cystoides intestinalis, protein-losing enteropathies (intestinal lymphagiectasis); intestinal obstruction, intestinal perforation, sigmoid diseases, and/or as described under “Gastrointestinal Disorders” below. In preferred embodiments, polynucleotides expressed in a particular tissue type (see, e.g., Table 1A, column 8) are used to diagnose, detect, prevent, treat and/or prognose disorders associated with the tissue type. For example, patients can be administered a polypeptide of the present invention in an effort to replace absent or decreased levels of the polypeptide (e.g., insulin), to supplement absent or decreased levels of a different polypeptide (e.g., hemoglobin S for hemoglobin B, SOD, catalase, DNA repair proteins), to inhibit the activity of a polypeptide (e.g., an oncogene or tumor supressor), to activate the activity of a polypeptide (e.g., by binding to a receptor), to reduce the activity of a membrane bound receptor by competing with it for free ligand (e.g., soluble TNF receptors used in reducing inflammation), or to bring about a desired response (e.g., blood vessel growth inhibition, enhancement of the immune response to proliferative cells or tissues).

[0375] Similarly, antibodies directed to a polypeptide of the present invention can also be used to treat disease (as described supra, and elsewhere herein). For example, administration of an antibody directed to a polypeptide of the present invention can bind, and/or neutralize the polypeptide, and/or reduce overproduction of the polypeptide. Similarly, administration of an antibody can activate the polypeptide, such as by binding to a polypeptide bound to a membrane (receptor).

[0376] At the very least, the polypeptides of the present invention can be used as molecular weight markers on SDS-PAGE gels or on molecular sieve gel filtration columns using methods well known to those of skill in the art. Polypeptides can also be used to raise antibodies, which in turn are used to measure protein expression from a recombinant cell, as a way of assessing transformation of the host cell. Moreover, the polypeptides of the present invention can be used to test the biological activities described herein.

[0377] Diagnostic Asssays

[0378] The compounds of the present invention are useful for diagnosis, treatment, prevention and/or prognosis of various colon related disorders in mammals, preferably humans. Such disorders include, but are not limited to, congenital abnormalities, colonic diverticulitis, toxic megacolon, constipation, disorders caused by parasites and protozoa, bacteria and viral infection, inflammatory bowel disease, neoplastic disorders, such as, polyps, adenomas, leiomyomas, carcinoids, lipomas, and angiomas, cancers, such as, rectal cancer, adenocarcinoma, colorectal carcinoma, colon cancer, colon carcinoma, colorectal cancer; colonic diseases; miscellaneous intestinal inflammatory disorders, including acquired immunodeficiency syndrome, HIV enteropathy, transplantation, drug-induced intestinal injury, radiation enterocolitis, neutropenic colitis, diverticular colon disease (DCD), inflammatory colonic disease, ischemic colitis, radiation proctitis, non-inflammatory bowel disease (non-IBD), colonic inflammation; colitis, diarrhea and dysentary, malabsorption syndromes, mesenteric vascular occlusion, pneumatosis cystoides intestinalis, protein-losing enteropathies (intestinal lymphagiectasis); intestinal obstruction, intestinal perforation, sigmoid diseases (e.g., proctocolitis, sigmoin neoplasms), and/or as described under “Gastrointestinal Disorders” below. In preferred embodiments, polynucleotides expressed in a particular tissue type (see, e.g., Table 1A, column 8) are used to diagnose, detect, prevent, treat and/or prognose disorders associated with the tissue type.

[0379] Colon or colon cancer antigens are expressed in the colon. For a number of colon-related disorders, substantially altered (increased or decreased) levels of colon or colon cancer antigen gene expression can be detected in colon tissue or other cells or bodily fluids (e.g., sera, plasma, urine, semen, synovial fluid or spinal fluid) taken from an individual having such a disorder, relative to a “standard” colon or colon antigen gene expression level, that is, the colon or colon cancer antigen expression level in colon tissues or bodily fluids from an individual not having the colon disorder. Thus, the invention provides a diagnostic method useful during diagnosis of a colon disorder, which involves measuring the expression level of the gene encoding the colon or colon cancer associated polypeptide in colon tissue or other cells or body fluid from an individual and comparing the measured gene expression level with a standard colon antigens gene expression level, whereby an increase or decrease in the gene expression level(s) compared to the standard is indicative of a colon disorder.

[0380] In specific embodiments, the invention provides a diagnostic method useful during diagnosis of a disorder of a normal or diseased tissue/cell source corresponding to column 8 of Table 1A, which involves measuring the expression level of the coding sequence of a polynucleotide sequence associated with this tissue/cell source as disclosed in Table 1A in the tissue/cell source or other cells or body fluid from an individual and comparing the expression level of the coding sequence with a standard expression level of the coding sequence of a polynucleotide sequence, whereby an increase or decrease in the gene expression level(s) compared to the standard is indicative of a disorder of a normal or diseased tissue/cell source corresponding to column 8 of Table 1A.

[0381] In particular, it is believed that certain tissues in mammals with cancer of cells or tissue of the colon express significantly enhanced or reduced levels of normal or altered colon or colon cancer antigen expression and mRNA encoding the colon or colon cancer associated polypeptide when compared to a corresponding “standard” level. Further, it is believed that enhanced or depressed levels of the colon or colon cancer associated polypeptide can be detected in certain body fluids (e.g., sera, plasma, urine, and spinal fluid) or cells or tissue from mammals with such a cancer when compared to sera from mammals of the same species not having the cancer.

[0382] For example, as disclosed herein, colon or colon cancer associated polypeptides of the invention are expressed in the colon. Accordingly, polynucleotides of the invention (e.g., polynucleotide sequences complementary to all or a portion of a colon or colon cancer antigen mRNA nucleotide sequence of SEQ ID NO:X, nucleotide sequence encoding SEQ ID NO:Y, nucleotide sequence encoding a polypeptide encoded by SEQ ID NO:X and/or a nucleotide sequence delineated by columns 8 and 9 of Table 2) and antibodies (and antibody fragments) directed against the polypeptides of the invention may be used to quantitate or qualitate concentrations of cells of the colon expressing colon or colon cancer antigens, preferrably on their cell surfaces. These polynucleotides and antibodies additionally have diagnostic applications in detecting abnormalities in the level of colon or colon cancer antigens gene expression, or abnormalities in the structure and/or temporal, tissue, cellular, or subcellular location of colon or colon cancer antigens. These diagnostic assays may be performed in vivo or in vitro, such as, for example, on blood samples, biopsy tissue or autopsy tissue. In specific embodiments, polynucleotides and antibodies of the invention are used to quantitate or qualitate tissues/cells corresponding to the library source disclosed in column 8 of Table 1A expressing the corresponding colon or colon cancer sequence disclosed in the same row of Table 1A, preferrably on their cell surface.

[0383] Thus, the invention provides a diagnostic method useful during diagnosis of a colon disorder, including cancers, which involves measuring the expression level of the gene encoding the colon or colon cancer antigen polypeptide in colon tissue or other cells or body fluid from an individual and comparing the measured gene expression level with a standard colon or colon cancer antigen gene expression level, whereby an increase or decrease in the gene expression level compared to the standard is indicative of a colon disorder. In specific embodiments, polynucleotides and antibodies of the invention are used to quantitate or qualitate tissues/cells corresponding to the library source disclosed in column 8 of Table 1A expressing the corresponding colon or colon cancer sequence disclosed in the same row of Table 1A, preferrably on their cell surface.

[0384] Where a diagnosis of a disorder in the colon, including diagnosis of a tumor, has already been made according to conventional methods, the present invention is useful as a prognostic indicator, whereby patients exhibiting enhanced or depressed colon or colon cancer antigen gene expression will experience a worse clinical outcome relative to patients expressing the gene at a level nearer the standard level.

[0385] By “assaying the expression level of the gene encoding the colon or colon cancer associated polypeptide” is intended qualitatively or quantitatively measuring or estimating the level of the colon or colon cancer antigen polypeptide or the level of the mRNA encoding the colon or colon cancer antigen polypeptide in a first biological sample either directly (e.g., by determining or estimating absolute protein level or mRNA level) or relatively (e.g., by comparing to the colon or colon cancer associated polypeptide level or mRNA level in a second biological sample). Preferably, the colon or colon cancer antigen polypeptide expression level or mRNA level in the first biological sample is measured or estimated and compared to a standard colon or colon cancer antigen polypeptide level or mRNA level, the standard being taken from a second biological sample obtained from an individual not having the disorder or being determined by averaging levels from a population of individuals not having a disorder of the colon. As will be appreciated in the art, once a standard colon or colon cancer antigen polypeptide level or mRNA level is known, it can be used repeatedly as a standard for comparison.

[0386] By “biological sample” is intended any biological sample obtained from an individual, cell line, tissue culture, or other source containing colon or colon cancer antigen polypeptides (including portions thereof) or mRNA. As indicated, biological samples include body fluids (such as sera, plasma, urine, synovial fluid and spinal fluid) which contain cells expressing colon or colon cancer antigen polypeptides, colon tissue, and other tissue sources found to express the full length or fragments thereof of a colon or colon cancer antigen. Methods for obtaining tissue biopsies and body fluids from mammals are well known in the art. Where the biological sample is to include mRNA, a tissue biopsy is the preferred source.

[0387] Total cellular RNA can be isolated from a biological sample using any suitable technique such as the single-step guanidinium-thiocyanate-phenol-chloroform method described in Chomczynski and Sacchi, Anal. Biochem. 162:156-159 (1987). Levels of mRNA encoding the colon or colon cancer antigen polypeptides are then assayed using any appropriate method. These include Northern blot analysis, SI nuclease mapping, the polymerase chain reaction (PCR), reverse transcription in combination with the polymerase chain reaction (RT-PCR), and reverse transcription in combination with the ligase chain reaction (RT-LCR).

[0388] The present invention also relates to diagnostic assays such as quantitative and diagnostic assays for detecting levels of colon or colon cancer antigen polypeptides, in a biological sample (e.g., cells and tissues), including determination of normal and abnormal levels of polypeptides. Thus, for instance, a diagnostic assay in accordance with the invention for detecting over-expression of colon or colon cancer antigens compared to normal control tissue samples may be used to detect the presence of tumors. Assay techniques that can be used to determine levels of a polypeptide, such as a colon or colon cancer antigen polypeptide of the present invention in a sample derived from a host are well-known to those of skill in the art. Such assay methods include radioimmunoassays, competitive-binding assays, Western Blot analysis and ELISA assays. Assaying colon or colon cancer antigen polypeptide levels in a biological sample can occur using any art-known method.

[0389] Assaying colon or colon cancer antigen polypeptide levels in a biological sample can occur using antibody-based techniques. For example, colon or colon cancer antigen polypeptide expression in tissues can be studied with classical immunohistological methods (Jalkanen et al., J. Cell. Biol. 101:976-985 (1985); Jalkanen, M., et al., J. Cell. Biol. 105:3087-3096 (1987)). Other antibody-based methods useful for detecting colon or colon cancer antigen polypeptide gene expression include immunoassays, such as the enzyme linked immunosorbent assay (ELISA) and the radioimmunoassay (RIA). Suitable antibody assay labels are known in the art and include enzyme labels, such as, glucose oxidase, and radioisotopes, such as iodine (¹²⁵I, ¹²¹I), carbon (¹⁴C), sulfur (³⁵S), tritium (³H), indium (¹¹²In), and technetium (^{99m}Tc), and fluorescent labels, such as fluorescein and rhodamine, and biotin.

[0390] The tissue or cell type to be analyzed will generally include those which are known, or suspected, to express the colon or colon cancer antigen gene (such as, for example, cells of the colon and/or colon cancer). The protein isolation methods employed herein may, for example, be such as those described in Harlow and Lane (Harlow, E. and Lane, D., 1988, “Antibodies: A Laboratory Manual”, Cold Spring Harbor Laboratory Press, Cold Spring Harbor, N.Y.), which is incorporated herein by reference in its entirety. The isolated cells can be derived from cell culture or from a patient. The analysis of cells taken from culture may be a necessary step in the assessment of cells that could be used as part of a cell-based gene therapy technique or, alternatively, to test the effect of compounds on the expression of the colon or colon cancer antigen gene.

[0391] For example, antibodies, or fragments of antibodies, such as those described herein, may be used to quantitatively or qualitatively detect the presence of colon or colon cancer antigen gene products or conserved variants or peptide fragments thereof. This can be accomplished, for example, by immunofluorescence techniques employing a fluorescently labeled antibody coupled with light microscopic, flow cytometric, or fluorimetric detection.

[0392] In a preferred embodiment, antibodies, or fragments of antibodies directed to any one or all of the predicted epitope domains of the colon or colon cancer antigen polypeptides (Shown in Table 1A, column 7) may be used to quantitatively or qualitatively detect the presence of colon or colon cancer antigen gene products or conserved variants or peptide fragments thereof. This can be accomplished, for example, by immunofluorescence techniques employing a fluorescently labeled antibody coupled with light microscopic, flow cytometric, or fluorimetric detection.

[0393] In an additional preferred embodiment, antibodies, or fragments of antibodies directed to a conformational epitope of a colon or colon cancer antigen may be used to quantitatively or qualitatively detect the presence of colon or colon cancer antigen gene products or conserved variants or peptide fragments thereof. This can be accomplished, for example, by immunofluorescence techniques employing a fluorescently labeled antibody coupled with light microscopic, flow cytometric, or fluorimetric detection.

[0394] The antibodies (or fragments thereof), and/or colon or colon cancer antigen polypeptides of the present invention may, additionally, be employed histologically, as in immunofluorescence, immunoelectron microscopy or non-immunological assays, for in situ detection of colon or colon cancer antigen gene products or conserved variants or peptide fragments thereof. In situ detection may be accomplished by removing a histological specimen from a patient, and applying thereto a labeled antibody or colon or colon cancer antigen polypeptide of the present invention. The antibody (or fragment thereof) or colon or colon cancer antigen polypeptide is preferably applied by overlaying the labeled antibody (or fragment) onto a biological sample. Through the use of such a procedure, it is possible to determine not only the presence of the colon or colon cancer antigen gene product, or conserved variants or peptide fragments, or colon or colon cancer antigen polypeptide binding, but also its distribution in the examined tissue. Using the present invention, those of ordinary skill will readily perceive that any of a wide variety of histological methods (such as staining procedures) can be modified in order to achieve such in situ detection.

[0395] Immunoassays and non-immunoassays for colon or colon cancer antigen gene products or conserved variants or peptide fragments thereof will typically comprise incubating a sample, such as a biological fluid, a tissue extract, freshly harvested cells, or lysates of cells which have been incubated in cell culture, in the presence of a detectably labeled antibody capable of binding colon or colon cancer antigen gene products or conserved variants or peptide fragments thereof, and detecting the bound antibody by any of a number of techniques well-known in the art.

[0396] The biological sample may be brought in contact with and immobilized onto a solid phase support or carrier such as nitrocellulose, or other solid support which is capable of immobilizing cells, cell particles or soluble proteins. The support may then be washed with suitable buffers followed by treatment with the detectably labeled anti-colon or colon cancer antigen antibody or detectable colon or colon cancer antigen polypeptide. The solid phase support may then be washed with the buffer a second time to remove unbound antibody or polypeptide. Optionally the antibody is subsequently labeled. The amount of bound label on solid support may then be detected by conventional means.

[0397] By “solid phase support or carrier” is intended any support capable of binding an antigen or an antibody. Well-known supports or carriers include glass, polystyrene, polypropylene, polyethylene, dextran, nylon, amylases, natural and modified celluloses, polyacrylamides, gabbros, and magnetite. The nature of the carrier can be either soluble to some extent or insoluble for the purposes of the present invention. The support material may have virtually any possible structural configuration so long as the coupled molecule is capable of binding to an antigen or antibody. Thus, the support configuration may be spherical, as in a bead, or cylindrical, as in the inside surface of a test tube, or the external surface of a rod. Alternatively, the surface may be flat such as a sheet, test strip, etc. Preferred supports include polystyrene beads. Those skilled in the art will know many other suitable carriers for binding antibody or antigen, or will be able to ascertain the same by use of routine experimentation.

[0398] The binding activity of a given lot of anti-colon or colon cancer antigen antibody or colon or colon cancer antigen polypeptide may be determined according to well known methods. Those skilled in the art will be able to determine operative and optimal assay conditions for each determination by employing routine experimentation.

[0399] In addition to assaying colon or colon cancer antigen polypeptide levels or polynucleotide levels in a biological sample obtained from an individual, colon or colon cancer antigen polypeptide or polynucleotide can also be detected in vivo by imaging. For example, in one embodiment of the invention, colon or colon cancer antigen polypeptide and/or anti-colon or colon cancer antigen antibodies are used to image colon diseased cells, such as neoplasms. In another embodiment, colon or colon cancer antigen polynucleotides of the invention (e.g., polynucleotides complementary to all or a portion of colon or colon cancer antigen mRNA) and/or anti-colon or colon cancer antigen antibodies (e.g., antibodies directed to any one or a combination of the epitopes of colon or colon cancer antigens, antibodies directed to a conformational epitope of colon or colon cancer antigens, antibodies directed to the full length polypeptide expressed on the cell surface of a mammalian cell) are used to image diseased or neoplastic cells of the colon.

[0400] Antibody labels or markers for in vivo imaging of colon or colon cancer antigen polypeptides include those detectable by X-radiography, NMR, MRI, CAT-scans or ESR. For X-radiography, suitable labels include radioisotopes such as barium or cesium, which emit detectable radiation but are not overtly harmful to the subject. Suitable markers for NMR and ESR include those with a detectable characteristic spin, such as deuterium, which may be incorporated into the antibody by labeling of nutrients for the relevant hybridoma. Where in vivo imaging is used to detect enhanced levels of colon or colon cancer antigen polypeptides for diagnosis in humans, it may be preferable to use human antibodies or “humanized” chimeric monoclonal antibodies. Such antibodies can be produced using techniques described herein or otherwise known in the art. For example methods for producing chimeric antibodies are known in the art. See, for review, Morrison, Science 229:1202 (1985); Oi et al., BioTechniques 4:214 (1986); Cabilly et al., U.S. Pat. No. 4,816,567; Taniguchi et al., EP 171496; Morrison et al., EP 173494; Neuberger et al., WO 8601533; Robinson et al., WO 8702671; Boulianne et al., Nature 312:643 (1984); Neuberger et al., Nature 314:268 (1985).

[0401] Additionally, any colon or colon cancer antigen polypeptides whose presence can be detected, can be administered. For example, colon or colon cancer antigen polypeptides labeled with a radio-opaque or other appropriate compound can be administered and visualized in vivo, as discussed, above for labeled antibodies. Further such colon or colon cancer antigen polypeptides can be utilized for in vitro diagnostic procedures.

[0402] A colon or colon cancer antigen polypeptide-specific antibody or antibody fragment which has been labeled with an appropriate detectable imaging moiety, such as a radioisotope (for example, ¹³¹I, ¹¹²In, ^{99m}Tc), a radio-opaque substance, or a material detectable by nuclear magnetic resonance, is introduced (for example, parenterally, subcutaneously or intraperitoneally) into the mammal to be examined for a colon disorder. It will be understood in the art that the size of the subject and the imaging system used will determine the quantity of imaging moiety needed to produce diagnostic images. In the case of a radioisotope moiety, for a human subject, the quantity of radioactivity injected will normally range from about 5 to 20 millicuries of ^{99m}Tc. The labeled antibody or antibody fragment will then preferentially accumulate at the location of cells which contain colon or colon cancer antigen protein. In vivo tumor imaging is described in S. W. Burchiel et al., “Immunopharmacokinetics of Radiolabeled Antibodies and Their Fragments” (Chapter 13 in Tumor Imaging: The Radiochemical Detection of Cancer, S. W. Burchiel and B. A. Rhodes, eds., Masson Publishing Inc. (1982)).

[0403] With respect to antibodies, one of the ways in which the anti-colon or colon cancer antigen antibody can be detectably labeled is by linking the same to an enzyme and using the linked product in an enzyme immunoassay (EIA) (Voller, A., “The Enzyme Linked immunosorbent Assay (ELISA)”, 1978, Diagnostic Horizons 2:1-7, Microbiological Associates Quarterly Publication, Walkersville, Md.); Voller et al., J. Clin. Pathol. 31:507-520 (1978); Butler, J. E., Meth. Enzymol. 73:482-523 (1981); Maggio, E. (ed.), 1980, Enzyme Immunoassay, CRC Press, Boca Raton, Fla.,; Ishikawa, E. et al., (eds.), 1981, Enzyme Immunoassay, Kgaku Shoin, Tokyo). The enzyme, which is bound to the antibody will react with an appropriate substrate, preferably a chromogenic substrate, in such a manner as to produce a chemical moiety which can be detected, for example, by spectrophotometric, fluorimetric or by visual means. Enzymes which can be used to detectably label the antibody include, but are not limited to, malate dehydrogenase, staphylococcal nuclease, delta-5-steroid isomerase, yeast alcohol dehydrogenase, alpha-glycerophosphate, dehydrogenase, triose phosphate isomerase, horseradish peroxidase, alkaline phosphatase, asparaginase, glucose oxidase, beta-galactosidase, ribonuclease, urease, catalase, glucose-6-phosphate dehydrogenase, glucoamylase and acetylcholinesterase. Additionally, the detection can be accomplished by calorimetric methods which employ a chromogenic substrate for the enzyme. Detection may also be accomplished by visual comparison of the extent of enzymatic reaction of a substrate in comparison with similarly prepared standards.

[0404] Detection may also be accomplished using any of a variety of other immunoassays. For example, by radioactively labeling the antibodies or antibody fragments, it is possible to detect colon or colon cancer antigens through the use of a radioimmunoassay (RIA) (see, for example, Weintraub, B., Principles of Radioimmunoassays, Seventh Training Course on Radioligand Assay Techniques, The Endocrine Society, March, 1986, which is incorporated by reference herein). The radioactive isotope can be detected by means including, but not limited to, a gamma counter, a scintillation counter, or autoradiography.

[0405] It is also possible to label the antibody with a fluorescent compound. When the fluorescently labeled antibody is exposed to light of the proper wave length, its presence can then be detected due to fluorescence. Among the most commonly used fluorescent labeling compounds are fluorescein isothiocyanate, rhodamine, phycoerythrin, phycocyanin, allophycocyanin, ophthaldehyde and fluorescamine.

[0406] The antibody can also be detectably labeled using fluorescence emitting metals such as ¹⁵²Eu, or others of the lanthamide series. These metals can be attached to the antibody using such metal chelating groups as diethylenetriaminepentacetic acid (DTPA) or ethylenediaminetetraacetic acid (EDTA).

[0407] The antibody also can be detectably labeled by coupling it to a chemiluminescent compound. The presence of the chemiluminescent-tagged antibody is then determined by detecting the presence of luminescence that arises during the course of a chemical reaction. Examples of particularly useful chemiluminescent labeling compounds are luminol, isoluminol, theromatic acridinium ester, imidazole, acridinium salt and oxalate ester.

[0408] Likewise, a bioluminescent compound may be used to label the antibody of the present invention. Bioluminescence is a type of chemiluminescence found in biological systems in, which a catalytic protein increases the efficiency of the chemiluminescent reaction. The presence of a bioluminescent protein is determined by detecting the presence of luminescence. Important bioluminescent compounds for purposes of labeling are luciferin, luciferase and aequorin. Methods for Detecting Colon Disease, Including Cancer

[0409] In general, a colon disease or cancer may be detected in a patient based on the presence of one or more colon or colon cancer antigen proteins of the invention and/or polynucleotides encoding such proteins in a biological sample (for example, blood, sera, urine, and/or tumor biopsies) obtained from the patient. In other words, such proteins and/or polynucleotides may be used as markers to indicate the presence or absence of a colon disease or disorder, including cancer. Cancers that may be diagnosed, and/or prognosed using the compositions of the invention include but are not limited to, colon cancer. In addition, such proteins and/or polynucleotides may be useful for the detection of other diseases and cancers, including cancers of tissues/cells corresponding to the library source disclosed in column 8 of Table 1A expressing the corresponding colon or colon cancer sequence disclosed in the same row of Table 1A. The binding agents provided herein generally permit detection of the level of antigen that binds to the agent in the biological sample. Polynucleotide primers and probes may be used to detect the level of mRNA encoding colon or colon cancer antigen polypeptides, which is also indicative of the presence or absence of a colon disease or disorder, including cancer. In general, colon or colon cancer antigen polypeptides should be present at a level that is at least three fold higher in diseased tissue than in normal tissue.

[0410] There are a variety of assay formats known to those of ordinary skill in the art for using a binding agent to detect polypeptide markers in a sample. See, e.g., Harlow and Lane, supra. In general, the presence or absence of a colon disease in a patient may be determined by (a) contacting a biological sample obtained from a patient with a binding agent; (b) detecting in the sample a level of polypeptide that binds to the binding agent; and (c) comparing the level of polypeptide with a predetermined cut-off value.

[0411] In a preferred embodiment, the assay involves the use of binding agent immobilized on a solid support to bind to and remove the colon or colon cancer antigen polypeptide of the invention from the remainder of the sample. The bound polypeptide may then be detected using a detection reagent that contains a reporter group and specifically binds to the binding agent/polypeptide complex. Such detection reagents may comprise, for example, a binding agent that specifically binds to the polypeptide or an antibody or other agent that specifically binds to the binding agent, such as an anti-immunoglobulin, protein G, protein A or a lectin. Alternatively, a competitive assay may be utilized, in which a polypeptide is labeled with a reporter group and allowed to bind to the immobilized binding agent after incubation of the binding agent with the sample. The extent to which components of the sample inhibit the binding of the labeled polypeptide to the binding agent is indicative of the reactivity of the sample with the immobilized binding agent. Suitable polypeptides for use within such assays include colon or colon cancer antigen polypeptides and portions thereof, or antibodies, to which the binding agent binds, as described above.

[0412] The solid support may be any material known to those of skill in the art to which colon or colon cancer antigen polypeptides of the invention may be attached. For example, the solid support may be a test well in a microtiter plate or a nitrocellulose or other suitable membrane. Alternatively, the support may be a bead or disc, such as glass fiberglass, latex or a plastic material such as polystyrene or polyvinylchloride. The support may also be a magnetic particle or a fiber optic sensor, such as those disclosed, for example, in U.S. Pat. No. 5,359,681. The binding agent may be immobilized on the solid support using a variety of techniques known to those of skill in the art, which are amply described in the patent and scientific literature. In the context of the present invention, the term “immobilization” refers to both noncovalent association, such as adsorption, and covalent attachment (which may be a direct linkage between the agent and functional groups on the support or may be a linkage by way of a cross-linking agent). Immobilization by adsorption to a well in a microtiter plate or to a membrane is preferred. In such cases, adsorption may be achieved by contacting the binding agent, in a suitable buffer, with the solid support for the suitable amount of time. The contact time varies with temperature, but is typically between about 1 hour and about 1 day. In general, contacting a well of plastic microtiter plate (such as polystyrene or polyvinylchloride) with an amount of binding agent ranging from about 10 ng to about 10 ug, and preferably about 100 ng to about 1 ug, is sufficient to immobilize an adequate amount of binding agent.

[0413] Covalent attachment of binding agent to a solid support may generally be achieved by first reacting the support with a bifunctional reagent that will react with both the support and a functional group, such as a hydroxyl or amino group, on the binding agent. For example, the binding agent may be covalently attached to supports having an appropriate polymer coating using benzoquinone or by condensation of an aldehyde group on the support with an amine and an active hydrogen on the binding partner (see, e.g., Pierce Immunotechnology Catalog and Handbook, 1991, at A12-A13).

[0414] Gene Therapy Methods

[0415] Also encompassed by the present invention are gene therapy methods for treating or preventing disorders, diseases and conditions. The gene therapy methods relate to the introduction of nucleic acid (DNA, RNA and antisense DNA or RNA) sequences into an animal to achieve expression of a colon or colon cancer antigen of the present invention. This method requires a polynucleotide which codes for a polypeptide of the present invention operatively linked to a promoter and any other genetic elements necessary for the expression of the polypeptide by the target tissue. Such gene therapy and delivery techniques are known in the art, see, for example, WO90/11092, which is herein incorporated by reference.

[0416] Thus, for example, cells from a patient may be engineered with a polynucleotide (DNA or RNA) comprising a promoter operably linked to a polynucleotide of the present invention ex vivo, with the engineered cells then being provided to a patient to be treated with the polypeptide of the present invention. Such methods are well-known in the art. For example, see Belldegrun, A., et al., J. Natl. Cancer Inst. 85: 207-216 (1993); Ferrantini, M. et al., Cancer Research 53: 1107-1112 (1993); Ferrantini, M. et al., J. Immunology 153: 4604-4615 (1994); Kaido, T., et al., Int. J. Cancer 60: 221-229 (1995); Ogura, H., et al., Cancer Research 50: 5102-5106 (1990); Santodonato, L., et al., Human Gene Therapy 7:1-10 (1996); Santodonato, L., et al., Gene Therapy 4:1246-1255 (1997); and Zhang, J. -F. et al., Cancer Gene Therapy 3: 31-38 (1996)), which are herein incorporated by reference. In one embodiment, the cells, which are engineered are arterial cells. The arterial cells may be reintroduced into the patient through direct injection to the artery, the tissues surrounding the artery, or through catheter injection.

[0417] As discussed in more detail below, the polynucleotide constructs can be delivered by any method that delivers injectable materials to the cells of an animal, such as, injection into the interstitial space of tissues (heart, muscle, skin, lung, liver, and the like). The polynucleotide constructs may be delivered in a pharmaceutically acceptable liquid or aqueous carrier.

[0418] In one embodiment, the polynucleotide of the present invention is delivered as a naked polynucleotide. The term “naked” polynucleotide, DNA or RNA refers to sequences that are free from any delivery vehicle that acts to assist, promote or facilitate entry into the cell, including viral sequences, viral particles, liposome formulations, lipofectin or precipitating agents and the like. However, the polynucleotide of the present invention can also be delivered in liposome formulations and lipofectin formulations and the like can be prepared by methods well known to those skilled in the art. Such methods are described, for example, in U.S. Pat. Nos. 5,593,972, 5,589,466, and 5,580,859, which are herein incorporated by reference.

[0419] The polynucleotide vector constructs used in the gene therapy method are preferably constructs that will not integrate into the host genome nor will they contain sequences that allow for replication. Appropriate vectors include pWLNEO, pSV2CAT, pOG44, pXT1 and pSG available from Stratagene; pSVK3, pBPV, pMSG and pSVL available from Pharmacia; and pEF1/V5, pcDNA3.1, and pRc/CMV2 available from Invitrogen. Other suitable vectors will be readily apparent to the skilled artisan.

[0420] Any strong promoter known to those skilled in the art can be used for driving the expression of the polynucleotide sequence. Suitable promoters include adenoviral promoters, such as the adenoviral major late promoter; or heterologous promoters, such as the cytomegalovirus (CMV) promoter; the respiratory syncytial virus (RSV) promoter; inducible promoters, such as the MMT promoter, the metallothionein promoter; heat shock promoters; the albumin promoter; the ApoAI promoter; human globin promoters; viral thymidine kinase promoters, such as the Herpes Simplex thymidine kinase promoter; retroviral LTRs; the b-actin promoter; and human growth hormone promoters. The promoter also may be the native promoter for the polynucleotide of the present invention.

[0421] Unlike other gene therapy techniques, one major advantage of introducing naked nucleic acid sequences into target cells is the transitory nature of the polynucleotide synthesis in the cells. Studies have shown that non-replicating DNA sequences can be introduced into cells to provide production of the desired polypeptide for periods of up to six months.

[0422] The polynucleotide construct can be delivered to the interstitial space of tissues within the an animal, including of muscle, skin, brain, lung, liver, spleen, bone marrow, thymus, heart, lymph, blood, bone, cartilage, pancreas, kidney, gall bladder, stomach, intestine, testis, ovary, uterus, rectum, nervous system, eye, gland, and connective tissue. Interstitial space of the tissues comprises the intercellular, fluid, mucopolysaccharide matrix among the reticular fibers of organ tissues, elastic fibers in the walls of vessels or chambers, collagen fibers of fibrous tissues, or that same matrix within connective tissue ensheathing muscle cells or in the lacunae of bone. It is similarly the space occupied by the plasma of the circulation and the lymph fluid of the lymphatic channels. Delivery to the interstitial space of muscle tissue is preferred for the reasons discussed below. They may be conveniently delivered by injection into the tissues comprising these cells. They are preferably delivered to and expressed in persistent, non-dividing cells which are differentiated, although delivery and expression may be achieved in non-differentiated or less completely differentiated cells, such as, for example, stem cells of blood or skin fibroblasts. In vivo muscle cells are particularly competent in their ability to take up and express polynucleotides.

[0423] For the naked nucleic acid sequence injection, an effective dosage amount of DNA or RNA will be in the range of from about 0.05 mg/kg body weight to about 50 mg/kg body weight. Preferably the dosage will be from about 0.005 mg/kg to about 20 mg/kg and more preferably from about 0.05 mg/kg to about 5 mg/kg. Of course, as the artisan of ordinary skill will appreciate, this dosage will vary according to the tissue site of injection. The appropriate and effective dosage of nucleic acid sequence can readily be determined by those of ordinary skill in the art and may depend on the condition being treated and the route of administration.

[0424] The preferred route of administration is by the parenteral route of injection into the interstitial space of tissues. However, other parenteral routes may also be used, such as, inhalation of an aerosol formulation particularly for delivery to lungs or bronchial tissues, throat or mucous membranes of the nose. In addition, naked DNA constructs can be delivered to arteries during angioplasty by the catheter used in the procedure.

[0425] The naked polynucleotides are delivered by any method known in the art, including, but not limited to, direct needle injection at the delivery site, intravenous injection, topical administration, catheter infusion, and so-called “gene guns”. These delivery methods are known in the art.

[0426] The constructs may also be delivered with delivery vehicles such as viral sequences, viral particles, liposome formulations, lipofectin, precipitating agents, etc. Such methods of delivery are known in the art.

[0427] In certain embodiments, the polynucleotide constructs are complexed in a liposome preparation. Liposomal preparations for use in the instant invention include cationic (positively charged), anionic (negatively charged) and neutral preparations. However, cationic liposomes are particularly preferred because a tight charge complex can be formed between the cationic liposome and the polyanionic nucleic acid. Cationic liposomes have been shown to mediate intracellular delivery of plasmid DNA (Felgner et al., Proc. Natl. Acad. Sci. USA (1987) 84:7413-7416, which is herein incorporated by reference); mRNA (Malone et al., Proc. Natl. Acad. Sci. USA (1989) 86:6077-6081, which is herein incorporated by reference); and purified transcription factors (Debs et al., J. Biol. Chem. (1990) 265:10189-10192, which is herein incorporated by reference), in functional form.

[0428] Cationic liposomes are readily available. For example, N-[1-2,3-dioleyloxy)propyl]-N,N,N-triethylammonium (DOTMA) liposomes are particularly useful and are available under the trademark Lipofectin, from GIBCO BRL, Grand Island, N.Y., (see, also, Felgner et al., Proc. Natl. Acad. Sci. USA (1987) 84:7413-7416, which is herein incorporated by reference). Other commercially available liposomes include transfectace (DDAB/DOPE) and DOTAP/DOPE (Boehringer).

[0429] Other cationic liposomes can be prepared from readily available materials using techniques well known in the art. See, e.g. PCT Publication No. WO 90/11092 (which is herein incorporated by reference) for a description of the synthesis of DOTAP (1,2-bis(oleoyloxy)-3-(trimethylammonio)propane) liposomes. Preparation of DOTMA liposomes is explained in the literature, see, e.g., P. Felgner et al., Proc. Natl. Acad. Sci. USA 84:7413-7417, which is herein incorporated by reference. Similar methods can be used to prepare liposomes from other cationic lipid materials.

[0430] Similarly, anionic and neutral liposomes are readily available, such as from Avanti Polar Lipids (Birmingham, Ala.), or can be easily prepared using readily available materials. Such materials include phosphatidyl choline, cholesterol, phosphatidyl ethanolamine, dioleoylphosphatidyl choline (DOPC), dioleoylphosphatidyl glycerol (DOPG), dioleoylphoshatidyl ethanolamine (DOPE), among others. These materials can also be mixed with the DOTMA and DOTAP starting materials in appropriate ratios. Methods for making liposomes using these materials are well known in the art.

[0431] For example, commercially dioleoylphosphatidyl choline (DOPC), dioleoylphosphatidyl glycerol (DOPG), and dioleoylphosphatidyl ethanolamine (DOPE) can be used in various combinations to make conventional liposomes, with or without the addition of cholesterol. Thus, for example, DOPG/DOPC vesicles can be prepared by drying 50 mg each of DOPG and DOPC under a stream of nitrogen gas into a sonication vial. The sample is placed under a vacuum pump overnight and is hydrated the following day with deionized water. The sample is then sonicated for 2 hours in a capped vial, using a Heat Systems model 350 sonicator equipped with an inverted cup (bath type) probe at the maximum setting while the bath is circulated at 15EC. Alternatively, negatively charged vesicles can be prepared without sonication to produce multilamellar vesicles or by extrusion through nucleopore membranes to produce unilamellar vesicles of discrete size. Other methods are known and available to those of skill in the art.

[0432] The liposomes can comprise multilamellar vesicles (MLVs), small unilamellar vesicles (SUVs), or large unilamellar vesicles (LUVs), with SUVs being preferred. The various liposome-nucleic acid complexes are prepared using methods well known in the art. See, e.g., Straubinger et al., Methods of Immunology (1983), 101:512-527, which is herein incorporated by reference. For example, MLVs containing nucleic acid can be prepared by depositing a thin film of phospholipid on the walls of a glass tube and subsequently hydrating with a solution of the material to be encapsulated. SUVs are prepared by extended sonication of MLVs to produce a homogeneous population of unilamellar liposomes. The material to be entrapped is added to a suspension of preformed MLVs and then sonicated. When using liposomes containing cationic lipids, the dried lipid film is resuspended in an appropriate solution such as sterile water or an isotonic buffer solution such as 10 mM Tris/NaCl, sonicated, and then the preformed liposomes are mixed directly with the DNA. The liposome and DNA form a very stable complex due to binding of the positively charged liposomes to the cationic DNA. SUVs find use with small nucleic acid fragments. LUVs are prepared by a number of methods, well known in the art. Commonly used methods include Ca²⁺-EDTA chelation (Papahadjopoulos et al., Biochim. Biophys. Acta (1975) 394:483; Wilson et al., Cell 17:77 (1979); ether injection (Deamer, D. and Bangham, A., Biochim. Biophys. Acta 443:629 (1976); Ostro et al., Biochem. Biophys. Res. Commun. 76:836 (1977); Fraley et al., Proc. Natl. Acad. Sci. USA 76:3348 (1979)); detergent dialysis (Enoch, H. and Strittmatter, P., Proc. Natl. Acad. Sci. USA 76:145 (1979)); and reverse-phase evaporation (REV) (Fraley et al., J. Biol. Chem. 255:10431 (1980); Szoka et al., Proc. Natl. Acad. Sci. USA 75:145 (1978); Schaefer-Ridder et al., Science 215:166 (1982)), which are herein incorporated by reference.

[0433] Generally, the ratio of DNA to liposomes will be from about 10:1 to about 1:10. Preferably, the ration will be from about 5:1 to about 1:5. More preferably, the ration will be about 3:1 to about 1:3. Still more preferably, the ratio will be about 1:1.

[0434] U.S. Pat. No. 5,676,954 (which is herein incorporated by reference) reports on the injection of genetic material, complexed with cationic liposomes carriers, into mice. U.S. Pat. Nos. 4,897,355, 4,946,787, 5,049,386, 5,459,127, 5,589,466, 5,693,622, 5,580,859, 5,703,055, and international publication no. WO 94/9469 (which are herein incorporated by reference) provide cationic lipids for use in transfecting DNA into cells and mammals. U.S. Pat. Nos. 5,589,466, 5,693,622, 5,580,859, 5,703,055, and International Publication No. WO 94/9469 provide methods for delivering DNA-cationic lipid complexes to mammals.

[0435] In certain embodiments, cells are engineered, ex vivo or in vivo, using a retroviral particle containing RNA, which comprises a sequence encoding a polypeptide of the present invention. Retroviruses from which the retroviral plasmid vectors may be derived include, but are not limited to, Moloney Murine Leukemia Virus, spleen necrosis virus, Rous sarcoma Virus, Harvey Sarcoma Virus, avian leukosis virus, gibbon ape leukemia virus, human immunodeficiency virus, Myeloproliferative Sarcoma Virus, and mammary tumor virus.

[0436] The retroviral plasmid vector is employed to transduce packaging cell lines to form producer cell lines. Examples of packaging cells which may be transfected include, but are not limited to, the PE501, PA317, R-2, R-AM, PA12, T19-14×, VT-19-17-H2, RCRE, RCRIP, GP+E-86, GP+envAm12, and DAN cell lines as described in Miller, Human Gene Therapy 1:5-14 (1990), which is incorporated herein by reference in its entirety. The vector may transduce the packaging cells through any means known in the art. Such means include, but are not limited to, electroporation, the use of liposomes, and CaPO₄ precipitation. In one alternative, the retroviral plasmid vector may be encapsulated into a liposome, or coupled to a lipid, and then administered to a host.

[0437] The producer cell line generates infectious retroviral vector particles, which include polynucleotide encoding a polypeptide of the present invention. Such retroviral vector particles then may be employed, to transduce eukaryotic cells, either in vitro or in vivo. The transduced eukaryotic cells will express a polypeptide of the present invention.

[0438] In certain other embodiments, cells are engineered, ex vivo or in vivo, with polynucleotide contained in an adenovirus vector. Adenovirus can be manipulated such that it encodes and expresses a polypeptide of the present invention, and at the same time is inactivated in terms of its ability to replicate in a normal lytic viral life cycle. Adenovirus expression is achieved without integration of the viral DNA into the host cell chromosome, thereby alleviating concerns about insertional mutagenesis. Furthermore, adenoviruses have been used as live enteric vaccines for many years with an excellent safety profile (Schwartz, et al., Am. Rev. Respir. Dis.109:233-238 (1974)). Finally, adenovirus mediated gene transfer has been demonstrated in a number of instances including transfer of alpha-1-antitrypsin and CFTR to the lungs of cotton rats (Rosenfeld et al., Science 252:431-434 (1991); Rosenfeld et al., Cell 68:143-155 (1991)). Furthermore, extensive studies to attempt to establish adenovirus as a causative agent in human cancer were uniformly negative (Green et al., Proc. Natl. Acad. Sci. USA 76:6606 (1979)).

[0439] Suitable adenoviral vectors useful in the present invention are described, for example, in Kozarsky and Wilson, Curr. Opin. Genet. Devel. 3:499-503 (1993); Rosenfeld et al., Cell 68:143-155 (1992); Engelhardt et al., Human Genet. Ther. 4:759-769 (1993); Yang et al., Nature Genet. 7:362-369 (1994); Wilson et al., Nature 365:691-692 (1993); and U.S. Pat. No. 5,652,224, which are herein incorporated by reference. For example, the adenovirus vector Ad2 is useful and can be grown in human 293 cells. These cells contain the E1 region of adenovirus and constitutively express E1 and E1, which complement the defective adenoviruses by providing the products of the genes deleted from the vector. In addition to Ad2, other varieties of adenovirus (e.g., Ad3, Ad5, and Ad7) are also useful in the present invention.

[0440] Preferably, the adenoviruses used in the present invention are replication deficient. Replication deficient adenoviruses require the aid of a helper virus and/or packaging cell line to form infectious particles. The resulting virus is capable of infecting cells and can express a polynucleotide of interest which is operably linked to a promoter, but cannot replicate in most cells. Replication deficient adenoviruses may be deleted in one or more of all or a portion of the following genes: E1, E1, E3, E4, E2a, or L1 through L5.

[0441] In certain other embodiments, the cells are engineered, ex vivo or in vivo, using an adeno-associated virus (AAV). AAVs are naturally occurring defective viruses that require helper viruses to produce infectious particles (Muzyczka, N., Curr. Topics in Microbiol. Immunol. 158:97 (1992)). It is also one of the few viruses that may integrate its DNA into non-dividing cells. Vectors containing as little as 300 base pairs of AAV can be packaged and can integrate, but space for exogenous DNA is limited to about 4.5 kb. Methods for producing and using such AAVs are known in the art. See, for example, U.S. Pat. Nos. 5,139,941, 5,173,414, 5,354,678, 5,436,146, 5,474,935, 5,478,745, and 5,589,377.

[0442] For example, an appropriate AAV vector for use in the present invention will include all the sequences necessary for DNA replication, encapsidation, and host-cell integration. The polynucleotide construct is inserted into the AAV vector using standard cloning methods, such as those found in Sambrook et al., Molecular Cloning: A Laboratory Manual, Cold Spring Harbor Press (1989). The recombinant AAV vector is then transfected into packaging cells which are infected with a helper virus, using any standard technique, including lipofection, electroporation, calcium phosphate precipitation, etc. Appropriate helper viruses include adenoviruses, cytomegaloviruses, vaccinia viruses, or herpes viruses. Once the packaging cells are transfected and infected, they will produce infectious AAV viral particles, which contain the polynucleotide construct. These viral particles are then used to transduce eukaryotic cells, either ex vivo or in vivo. The transduced cells will contain the polynucleotide construct integrated into its genome, and will express a polypeptide of the invention.

[0443] Another method of gene therapy involves operably associating heterologous control regions and endogenous colon or colon cancer antigen polynucleotide sequences (e.g., encoding a colon or colon cancer antigen polypeptide of the present invention) via homologous recombination (see, e.g., U.S. Pat. No. 5,641,670, issued Jun. 24, 1997; International Publication No. WO 96/2941 1, published Sep. 26, 1996; International Publication No. WO 94/12650, published Aug. 4, 1994; Koller et al., Proc. Natl. Acad. Sci. USA 86:8932-8935 (1989); and Zijlstra et al., Nature 342:435-438 (1989), which are herein incorporated by reference. This method involves the activation of a gene which is present in the target cells, but which is not normally expressed in the cells, or is expressed at a lower level than desired.

[0444] Polynucleotide constructs are made, using standard techniques known in the art, which contain the promoter with targeting sequences flanking the promoter. Suitable promoters are described herein. The targeting sequence is sufficiently complementary to an endogenous sequence to permit homologous recombination of the promoter-targeting sequence with the endogenous sequence. The targeting sequence will be sufficiently near the 5′ end of the desired endogenous polynucleotide sequence so the promoter will be operably linked to the endogenous sequence upon homologous recombination.

[0445] The promoter and the targeting sequences can be amplified using PCR. Preferably, the amplified promoter contains distinct restriction enzyme sites on the 5′ and 3′ ends. Preferably, the 3′ end of the first targeting sequence contains the same restriction enzyme site as the 5′ end of the amplified promoter and the 5′ end of the second targeting sequence contains the same restriction site as the 3′ end of the amplified promoter. The amplified promoter and targeting sequences are digested and ligated together.

[0446] The promoter-targeting sequence construct is delivered to the cells, either as naked polynucleotide, or in conjunction with transfection-facilitating agents, such as liposomes, viral sequences, viral particles, whole viruses, lipofection, precipitating agents, etc., described in more detail above. The P promoter-targeting sequence can be delivered by any method, included direct needle injection, intravenous injection, topical administration, catheter infusion, particle accelerators, etc. The methods are described in more detail below.

[0447] The promoter-targeting sequence construct is taken up by cells. Homologous recombination between the construct and the endogenous sequence takes place, such that an endogenous sequence is placed under the control of the promoter. The promoter then drives the expression of the endogenous sequence.

[0448] The polynucleotide encoding a polypeptide of the present invention may contain a secretory signal sequence that facilitates secretion of the protein. Typically, the signal sequence is positioned in the coding region of the polynucleotide to be expressed towards or at the 5′ end of the coding region. The signal sequence may be homologous or heterologous to the colon or colon cancer antigen polynucleotide of interest and may be homologous or heterologous to the cells to be transfected. Additionally, the signal sequence may be chemically synthesized using methods known in the art.

[0449] Any mode of administration of any of the above-described polynucleotides constructs can be used so long as the mode results in the expression of one or more molecules in an amount sufficient to provide a therapeutic effect. This includes direct needle injection, systemic injection, catheter infusion, biolistic injectors, particle accelerators (i.e., “gene guns”), gelfoam sponge depots, other commercially available depot materials, osmotic pumps (e.g., Alza minipumps), oral or suppositorial solid (tablet or pill) pharmaceutical formulations, and decanting or topical applications during surgery. For example, direct injection of naked calcium phosphate-precipitated plasmid into rat liver and rat spleen or a protein-coated plasmid into the portal vein has resulted in gene expression of the foreign gene in the rat livers (Kaneda et al., Science 243:375 (1989)).

[0450] A preferred method of local administration is by direct injection. Preferably, a recombinant molecule of the present invention complexed with a delivery vehicle is administered by direct injection into or locally within the area of arteries. Administration of a composition locally within the area of arteries refers to injecting the composition centimeters and preferably, millimeters within arteries.

[0451] Another method of local administration is to contact a polynucleotide construct of the present invention in or around a surgical wound. For example, a patient can undergo surgery and the polynucleotide construct can be coated on the surface of tissue inside the wound or the construct can be injected into areas of tissue inside the wound.

[0452] Therapeutic compositions useful in systemic administration, include recombinant molecules of the present invention complexed to a targeted delivery vehicle of the present invention. Suitable delivery vehicles for use with systemic administration comprise liposomes comprising ligands for targeting the vehicle to a particular site. In specific embodiments, suitable delivery vehicles for use with systemic administration comprise liposomes comprising polypeptides of the invention for targeting the vehicle to a particular site.

[0453] Preferred methods of systemic administration, include intravenous injection, aerosol, oral and percutaneous (topical) delivery. Intravenous injections can be performed using methods standard in the art. Aerosol delivery can also be performed using methods standard in the art (see, for example, Stribling et al., Proc. Natl. Acad. Sci. USA 189:11277-11281, 1992, which is incorporated herein by reference). Oral delivery can be performed by complexing a polynucleotide construct of the present invention to a carrier capable of withstanding degradation by digestive enzymes in the gut of an animal. Examples of such carriers, include plastic capsules or tablets, such as those known in the art. Topical delivery can be performed by mixing a polynucleotide construct of the present invention with a lipophilic reagent (e.g., DMSO) that is capable of passing into the skin.

[0454] Determining an effective amount of substance to be delivered can depend upon a number of factors including, for example, the chemical structure and biological activity of the substance, the age and weight of the animal, the precise condition requiring treatment and its severity, and the route of administration. The frequency of treatments depends upon a number of factors, such as the amount of polynucleotide constructs administered per dose, as well as the health and history of the subject. The precise amount, number of doses, and timing of doses will be determined by the attending physician or veterinarian.

[0455] Therapeutic compositions of the present invention can be administered to any animal, preferably to mammals and birds. Preferred mammals include humans, dogs, cats, mice, rats, rabbits sheep, cattle, horses and pigs, with humans being particularly preferred.

[0456] Biological Activities

[0457] Polynucleotides or polypeptides, or agonists or antagonists of the present invention, can be used in assays to test for one or more biological activities. If these polynucleotides or polypeptides, or agonists or antagonists of the present invention, do exhibit activity in a particular assay, it is likely that these molecules may be involved in the diseases associated with the biological activity. Thus, the polynucleotides and polypeptides, and agonists or antagonists could be used to treat, prevent diagnose and/or prognose the associated disease.

[0458] The colon or colon cancer antigen polynucleotides and polypeptides of the invention are predicted to have predominant expression in colon tissues.

[0459] Thus, the colon or colon cancer antigens of the invention may be useful as therapeutic molecules. Each would be useful for diagnosis, detection, treatment and/or prevention of diseases or disorders of the colon, including but not limited to congenital abnormalities, colonic diverticulitis, colonic diverticulosis, toxic megacolon, constipation, disorders caused by parasites and protozoa, bacteria and viral infection, inflammatory bowel disease, neoplastic disorders, such as, polyps, adenomas, leiomyomas, carcinoids, lipomas, and angiomas, cancers, such as, rectal cancer, adenocarcinoma, colorectal carcinoma, colon cancer, colon carcinoma, colorectal cancer; colonic diseases; miscellaneous intestinal inflammatory disorders, including acquired immunodeficiency syndrome, HIV enteropathy, transplantation, drug-induced intestinal injury, radiation enterocolitis, neutropenic colitis, diverticular colon disease (DCD), inflammatory colonic disease, ischemic colitis, radiation proctitis, non-inflammatory bowel disease (non-IBD), colonic inflammation, colitis, diarrhea and dysentary, malabsorption syndromes, mesenteric vascular occlusion, pneumatosis cystoides intestinalis, protein-losing enteropathies (intestinal lymphagiectasis); intestinal obstruction, intestinal perforation, sigmoid diseases, and/or as described under “Gastrointestinal Disorders” below.

[0460] In a preferred embodiment, polynucleotides of the invention (e.g., a nucleic acid sequence of SEQ ID NO:X or the complement thereof; or the cDNA sequence contained in Clone ID NO:Z, or fragments or variants thereof) and/or polypeptides of the invention (e.g., an amino acid sequence contained in SEQ ID NO:Y, an amino acid sequence encoded by SEQ ID NO:X, or the complement threof, an amino acid sequence encoded by the cDNA sequence contained in Clone ID NO:Z and fragments or variants thereof as described herein) are useful for the diagnosis, detection, treatement, and/or prevention of diseases or disorders of the tissues/cells corresponding to the library source disclosed in column 8 of Table 1A expressing the corresponding colon or colon cancer sequence disclosed in the same row of Table 1A. In certain embodiments, a polypeptide of the invention, or polynucleotides, antibodies, agonists, or antagonists corresponding to that polypeptide, may be used to diagnose and/or prognose diseases and/or disorders associated with the tissue(s) in which the polypeptide of the invention is expressed, including one, two, three, four, five, or more tissues disclosed in Table 1A, column 8 (Tissue Distribution Library Code).

[0461] Particularly, the colon or colon cancer antigens may be a useful therapeutic for colon cancer. Treatment, diagnosis, detection, and/or prevention of colon disorders could be carried out using a colon or colon cancer antigen or soluble form of a colon or colon cancer antigen, a colon or colon cancer antigen ligand, gene therapy, or ex vivo applications. Moreover, inhibitors of a colon or colon cancer antigen, either blocking antibodies or mutant forms, could modulate the expression of the colon or colon cancer antigen. These inhibitors may be useful to treat, diagnose, detect, and/or prevent diseases associated with the misregulation of a colon or colon cancer antigen.

[0462] In one embodiment, the invention provides a method for the specific delivery of compositions of the invention to cells (e.g., normal or diseased colon cells) by administering polypeptides of the invention (e.g., colon or colon cancer antigen polypeptides or anti-colon or colon cancer antigen antibodies) that are associated with heterologous polypeptides or nucleic acids. In one example, the invention provides a method for delivering a therapeutic protein into the targeted cell (e.g., an aberrant colon cell or colon cancer cell). In another example, the invention provides a method for delivering a single stranded nucleic acid (e.g., antisense or ribozymes) or double stranded nucleic acid (e.g., DNA that can integrate into the cell's genome or replicate episomally and that can be transcribed) into the targeted cell.

[0463] In another embodiment, the invention provides a method for the specific destruction of cells (e.g., the destruction of aberrant colon cells, including, but not limited to, colon tumor cells) by administering polypeptides of the invention (e.g., colon or colon cancer antigen polypeptides or fragments thereof, or anti-colon or colon cancer antigen antibodies) in association with toxins or cytotoxic prodrugs.

[0464] By “toxin” is meant compounds that bind and activate endogenous cytotoxic effector systems, radioisotopes, holotoxins, modified toxins, catalytic subunits of toxins, cytotoxins (cytotoxic agents), or any molecules or enzymes not normally present in or on the surface of a cell that under defined conditions cause the cell's death. Toxins that may be used according to the methods of the invention include, but are not limited to, radioisotopes known in the art, compounds such as, for example, antibodies (or complement fixing containing portions thereof) that bind an inherent or induced endogenous cytotoxic effector system, thymidine kinase, endonuclease, RNAse, alpha toxin, ricin, abrin, Pseudomonas exotoxin A, diphtheria toxin, saporin, momordin, gelonin, pokeweed antiviral protein, alpha-sarcin and cholera toxin. “Toxin” also includes a cytostatic or cytocidal agent, a therapeutic agent or a radioactive metal ion, e.g., alpha-emitters such as, for example, ²¹³Bi, or other radioisotopes such as, for example, ¹⁰³Pd, ¹³³Xe, ¹³¹I, ⁶⁸Ge, ⁵⁷Co, ⁶⁵Zn, ⁸⁵Sr, ³²P, ³⁵S, ⁹⁰Y, ¹⁵³Sm, ¹⁵³Gd, ¹⁶⁹Yb, ⁵¹Cr, ⁵⁴Mn, ⁷⁵Se, ¹¹³Sn, ⁹⁰Yttrium, ¹¹⁷Tin, ¹⁸⁶Rhenium, ¹⁶⁶Holmium, and ¹⁸⁸Rhenium; luminescent labels, such as luminol; and fluorescent labels, such as fluorescein and rhodamine, and biotin.

[0465] Techniques known in the art may be applied to label antibodies of the invention. Such techniques include, but are not limited to, the use of bifunctional conjugating agents (see e.g., U.S. Pat. Nos. 5,756,065; 5,714,631; 5,696,239; 5,652,361; 5,505,931; 5,489,425; 5,435,990; 5,428,139; 5,342,604; 5,274,119; 4,994,560; and 5,808,003; the contents of each of which are hereby incorporated by reference in its entirety). A cytotoxin or cytotoxic agent includes any agent that is detrimental to cells. Examples include paclitaxol, cytochalasin B, gramicidin D, ethidium bromide, emetine, mitomycin, etoposide, tenoposide, vincristine, vinblastine, colchicin, doxorubicin, daunorubicin, dihydroxy anthracin dione, mitoxantrone, mithramycin, actinomycin D, 1-dehydrotestosterone, glucocorticoids, procaine, tetracaine, lidocaine, propranolol, and puromycin and analogs or homologs thereof. Therapeutic agents include, but are not limited to, antimetabolites (e.g., methotrexate, 6-mercaptopurine, 6-thioguanine, cytarabine, 5-fluorouracil decarbazine), alkylating agents (e.g., mechlorethamine, thioepa chlorambucil, melphalan, carmustine (BSNU) and lomustine (CCNU), cyclothosphamide, busulfan, dibromomannitol, streptozotocin, mitomycin C, and cis-dichlorodiamine platinum (II) (DDP) cisplatin), anthracyclines (e.g., daunorubicin (formerly daunomycin) and doxorubicin), antibiotics (e.g., dactinomycin (formerly actinomycin), bleomycin, mithramycin, and anthramycin (AMC)), and anti-mitotic agents (e.g., vincristine and vinblastine).

[0466] By “cytotoxic prodrug” is meant a non-toxic compound that is converted by an enzyme, normally present in the cell, into a cytotoxic compound. Cytotoxic prodrugs that may be used according to the methods of the invention include, but are not limited to, glutamyl derivatives of benzoic acid mustard alkylating agent, phosphate derivatives of etoposide or mitomycin C, cytosine arabinoside, daunorubisin, and phenoxyacetamide derivatives of doxorubicin.

[0467] It will be appreciated that conditions caused by a decrease in the standard or normal level of a colon or colon cancer antigen activity in an individual, particularly disorders of the colon, can be treated by administration of a colon or colon cancer antigen polypeptide (e.g., such as, for example, the complete colon or colon cancer antigen polypeptide, the soluble form of the extracellular domain of a colon or colon cancer antigen polypeptide, or cells expressing the complete protein) or agonist. Thus, the invention also provides a method of treatment of an individual in need of an increased level of colon or colon cancer antigen activity comprising administering to such an individual a pharmaceutical composition comprising an amount of an isolated colon or colon cancer antigen polypeptide of the invention, or agonist thereof (e.g., an agonistic anti-colon or colon cancer antigen antibody), effective to increase the colon or colon cancer antigen activity level in such an individual.

[0468] It will also be appreciated that conditions caused by a increase in the standard or normal level of colon or colon cancer antigen activity in an individual, particularly disorders of the colon, can be treated by administration of colon or colon cancer antigen polypeptides (e.g., such as, for example, the complete colon or colon cancer antigen polypeptide, the soluble form of the extracellular domain of a colon or colon cancer antigen polypeptide, or cells expressing the complete protein) or antagonist (e.g., an antagonistic colon or colon cancer antigen antibody). Thus, the invention also provides a method of treatment of an individual in need of an decreased level of colon or colon cancer antigen activity comprising administering to such an individual a pharmaceutical composition comprising an amount of an isolated colon or colon cancer antigen polypeptide of the invention, or antagonist thereof (e.g., an antagonistic anti-colon or colon cancer antigen antibody), effective to decrease the colon or colon cancer antigen activity level in such an individual.

[0469] More generally, polynucleotides, translation products and antibodies corresponding to this gene may be useful for the diagnosis, prognosis, prevention, and/or treatment of diseases and/or disorders associated with the following systems.

[0470] Gastrointestinal Disorders

[0471] Polynucleotides or polypeptides, or agonists or antagonists of the present invention, may be used to treat, prevent, diagnose, and/or prognose gastrointestinal disorders, including inflammatory diseases and/or conditions, infections, cancers (e.g., intestinal neoplasms (carcinoid tumor of the small intestine, non-Hodgkin's lymphoma of the small intestine, small bowl lymphoma)), and ulcers, such as peptic ulcers.

[0472] Gastrointestinal disorders include dysphagia, odynophagia, inflammation of the esophagus, peptic esophagitis, gastric reflux, submucosal fibrosis and stricturing, Mallory-Weiss lesions, leiomyomas, lipomas, epidermal cancers, adeoncarcinomas, gastric retention disorders, gastroenteritis, gastric atrophy, gastric/stomach cancers, polyps of the stomach, autoimmune disorders such as pernicious anemia, pyloric stenosis, gastritis (bacterial, viral, eosinophilic, stress-induced, chronic erosive, atrophic, plasma cell, and Ménétrier's), and peritoneal diseases (e.g., chyloperioneum, hemoperitoneum, mesenteric cyst, mesenteric lymphadenitis, mesenteric vascular occlusion, panniculitis, neoplasms, peritonitis, pneumoperitoneum, bubphrenic abscess).

[0473] Gastrointestinal disorders also include disorders associated with the small intestine, such as malabsorption syndromes, distension, irritable bowel syndrome, sugar intolerance, celiac disease, duodenal ulcers, duodenitis, tropical sprue, Whipple's disease, intestinal lymphangiectasia, Crohn's disease, appendicitis, obstructions of the ileum, Meckel's diverticulum, multiple diverticula, failure of complete rotation of the small and large intestine, lymphoma, and bacterial and parasitic diseases (such as Traveler's diarrhea, typhoid and paratyphoid, cholera, infection by Roundworms (Ascariasis lumbricoides), Hookworms (Ancylostoma duodenale), Threadworms (Enterobius vermicularis), Tapeworms (Taenia saginata, Echinococcus granulosus, Diphyllobothrium spp., and T. solium).

[0474] Liver diseases and/or disorders include intrahepatic cholestasis (alagille syndrome, biliary liver cirrhosis), fatty liver (alcoholic fatty liver, reye syndrome), hepatic vein thrombosis, hepatolentricular degeneration, hepatomegaly, hepatopulmonary syndrome, hepatorenal syndrome, portal hypertension (esophageal and gastric varices), liver abscess (amebic liver abscess), liver cirrhosis (alcoholic, biliary and experimental), alcoholic liver diseases (fatty liver, hepatitis, cirrhosis), parasitic (hepatic echinococcosis, fascioliasis, amebic liver abscess), jaundice (hemolytic, hepatocellular, and cholestatic), cholestasis, portal hypertension, liver enlargement, ascites, hepatitis (alcoholic hepatitis, animal hepatitis, chronic hepatitis (autoimmune, hepatitis B, hepatitis C, hepatitis D, drug induced), toxic hepatitis, viral human hepatitis (hepatitis A, hepatitis B, hepatitis C, hepatitis D, hepatitis E), Wilson's disease, granulomatous hepatitis, secondary biliary cirrhosis, hepatic encephalopathy, portal hypertension, varices, hepatic encephalopathy, primary biliary cirrhosis, primary sclerosing cholangitis, hepatocellular adenoma, hemangiomas, bile stones, liver failure (hepatic encephalopathy, acute liver failure), and liver neoplasms (angiomyolipoma, calcified liver metastases, cystic liver metastases, epithelial tumors, fibrolamellar hepatocarcinoma, focal nodular hyperplasia, hepatic adenoma, hepatobiliary cystadenoma, hepatoblastoma, hepatocellular carcinoma, hepatoma, liver cancer, liver hemangioendothelioma, mesenchymal hamartoma, mesenchymal tumors of liver, nodular regenerative hyperplasia, benign liver tumors (Hepatic cysts [Simple cysts, Polycystic liver disease, Hepatobiliary cystadenoma, Choledochal cyst], Mesenchymal tumors [Mesenchymal hamartoma, Infantile hemangioendothelioma, Hemangioma, Peliosis hepatis, Lipomas, Inflammatory pseudotumor, Miscellaneous], Epithelial tumors [Bile duct epithelium (Bile duct hamartoma, Bile duct adenoma), Hepatocyte (Adenoma, Focal nodular hyperplasia, Nodular regenerative hyperplasia)], malignant liver tumors [hepatocellular, hepatoblastoma, hepatocellular carcinoma, cholangiocellular, cholangiocarcinoma, cystadenocarcinoma, tumors of blood vessels, angiosarcoma, Karposi's sarcoma, hemangioendothelioma, other tumors, embryonal sarcoma, fibrosarcoma, leiomyosarcoma, rhabdomyosarcoma, carcinosarcoma, teratoma, carcinoid, squamous carcinoma, primary lymphoma]), peliosis hepatis, erythrohepatic porphyria, hepatic porphyria (acute intermittent porphyria, porphyria cutanea tarda), Zellweger syndrome).

[0475] Pancreatic diseases and/or disorders include acute pancreatitis, chronic pancreatitis (acute necrotizing pancreatitis, alcoholic pancreatitis), neoplasms (adenocarcinoma of the pancreas, cystadenocarcinoma, insulinoma, gastrinoma, and glucagonoma, cystic neoplasms, islet-cell tumors, pancreoblastoma), and other pancreatic diseases (e.g., cystic fibrosis, cyst (pancreatic pseudocyst, pancreatic fistula, insufficiency)).

[0476] Gallbladder diseases include gallstones (cholelithiasis and choledocholithiasis), postcholecystectomy syndrome, diverticulosis of the gallbladder, acute cholecystitis, chronic cholecystitis, bile duct tumors, and mucocele.

[0477] Diseases and/or disorders of the large intestine include antibiotic-associated colitis, diverticulitis, ulcerative colitis, acquired megacolon, abscesses, fungal and bacterial infections, anorectal disorders (e.g., fissures, hemorrhoids), colonic diseases (colitis, colonic neoplasms [colon cancer, adenomatous colon polyps (e.g., villous adenoma), colon carcinoma, colon cancer], colonic diverticulitis, colonic diverticulosis, megacolon [Hirschsprung disease, toxic megacolon]; sigmoid diseases [proctocolitis, sigmoin neoplasms]), constipation, Crohn's disease, diarrhea (infantile diarrhea, dysentery), duodenal diseases (duodenal neoplasms, duodenal obstruction, duodenal ulcer, duodenitis), enteritis (enterocolitis), HIV enteropathy, ileal diseases (ileal neoplasms, ileitis), immunoproliferative small intestinal disease, inflammatory bowel disease (ulcerative colitis, Crohn's disease), intestinal atresia, parasitic diseases (anisakiasis, balantidiasis, blastocystis infections, cryptosporidiosis, dientamoebiasis, amebic dysentery, giardiasis), intestinal fistula (rectal fistula), intestinal neoplasms (cecal neoplasms, colonic neoplasms, duodenal neoplasms, ileal neoplasms, intestinal polyps, jejunal neoplasms, rectal neoplasms), intestinal obstruction (afferent loop syndrome, duodenal obstruction, impacted feces, intestinal pseudo-obstruction [cecal volvulus], intussusception), intestinal perforation, intestinal polyps (colonic polyps, gardner syndrome, peutz-jeghers syndrome), jejunal diseases (jejunal neoplasms), malabsorption syndromes (blind loop syndrome, celiac disease, lactose intolerance, short bowl syndrome, tropical sprue, whipple's disease), mesenteric vascular occlusion, pneumatosis cystoides intestinalis, protein-losing enteropathies (intestinal lymphagiectasis), rectal diseases (anus diseases, fecal incontinence, hemorrhoids, proctitis, rectal fistula, rectal prolapse, rectocele), peptic ulcer (duodenal ulcer, peptic esophagitis, hemorrhage, perforation, stomach ulcer, Zollinger-Ellison syndrome), postgastrectomy syndromes (dumping syndrome), stomach diseases (e.g., achlorhydria, duodenogastric reflux (bile reflux), gastric antral vascular ectasia, gastric fistula, gastric outlet obstruction, gastritis (atrophic or hypertrophic), gastroparesis, stomach dilatation, stomach diverticulum, stomach neoplasms (gastric cancer, gastric polyps, gastric adenocarcinoma, hyperplastic gastric polyp), stomach rupture, stomach ulcer, stomach volvulus), tuberculosis, visceroptosis, vomiting (e.g., hematemesis, hyperemesis gravidarum, postoperative nausea and vomiting) and hemorrhagic colitis.

[0478] Further diseases and/or disorders of the gastrointestinal system include biliary tract diseases, such as, gastroschisis, fistula (e.g., biliary fistula, esophageal fistula, gastric fistula, intestinal fistula, pancreatic fistula), neoplasms (e.g., biliary tract neoplasms, esophageal neoplasms, such as adenocarcinoma of the esophagus, esophageal squamous cell carcinoma, gastrointestinal neoplasms, pancreatic neoplasms, such as adenocarcinoma of the pancreas, mucinous cystic neoplasm of the pancreas, pancreatic cystic neoplasms, pancreatoblastoma, and peritoneal neoplasms), esophageal disease (e.g., bullous diseases, candidiasis, glycogenic acanthosis, ulceration, barrett esophagus varices, atresia, cyst, diverticulum (e.g., Zenker's diverticulum), fistula (e.g., tracheoesophageal fistula), motility disorders (e.g., CREST syndrome, deglutition disorders, achalasia, spasm, gastroesophageal reflux), neoplasms, perforation (e.g., Boerhaave syndrome, Mallory-Weiss syndrome), stenosis, esophagitis, diaphragmatic hernia (e.g., hiatal hernia); gastrointestinal diseases, such as, gastroenteritis (e.g., cholera morbus, norwalk virus infection), hemorrhage (e.g., hematemesis, melena, peptic ulcer hemorrhage), stomach neoplasms (gastric cancer, gastric polyps, gastric adenocarcinoma, stomach cancer)), hernia (e.g., congenital diaphragmatic hernia, femoral hernia, inguinal hernia, obturator hernia, umbilical hernia, ventral hernia), and intestinal diseases (e.g., cecal diseases (appendicitis, cecal neoplasms)).

[0479] Immune Activity

[0480] Polynucleotides, polypeptides, antibodies, and/or agonists or antagonists of the present invention may be useful in treating, preventing, diagnosing and/or prognosing diseases, disorders, and/or conditions of the immune system, by, for example, activating or inhibiting the proliferation, differentiation, or mobilization (chemotaxis) of immune cells. Immune cells develop through a process called hematopoiesis, producing myeloid (platelets, red blood cells, neutrophils, and macrophages) and lymphoid (B and T lymphocytes) cells from pluripotent stem cells. The etiology of these immune diseases, disorders, and/or conditions may be genetic, somatic, such as cancer and some autoimmune diseases, acquired (e.g., by chemotherapy or toxins), or infectious. Moreover, polynucleotides, polypeptides, antibodies, and/or agonists or antagonists of the present invention can be used as a marker or detector of a particular immune system disease or disorder.

[0481] In another embodiment, a polypeptide of the invention, or polynucleotides, antibodies, agonists, or antagonists corresponding to that polypeptide, may be used to treat diseases and disorders of the immune system and/or to inhibit or enhance an immune response generated by cells associated with the tissue(s) in which the polypeptide of the invention is expressed, including one, two, three, four, five, or more tissues disclosed in Table 1A, column 8 (Tissue Distribution Library Code).

[0482] Polynucleotides, polypeptides, antibodies, and/or agonists or antagonists of the present invention may be useful in treating, preventing, diagnosing, and/or prognosing immunodeficiencies, including both congenital and acquired immunodeficiencies. Examples of B cell immunodeficiencies in which immunoglobulin levels B cell function and/or B cell numbers are decreased include: X-linked agammaglobulinemia (Bruton's disease), X-linked infantile agammaglobulinemia, X-linked immunodeficiency with hyper IgM, non X-linked immunodeficiency with hyper IgM, X-linked lymphoproliferative syndrome (XLP), agammaglobulinemia including congenital and acquired agammaglobulinemia, adult onset agammaglobulinemia, late-onset agammaglobulinemia, dysgammaglobulinemia, hypogammaglobulinemia, unspecified hypogammaglobulinemia, recessive agammaglobulinemia (Swiss type), Selective IgM deficiency, selective IgA deficiency, selective IgG subclass deficiencies, IgG subclass deficiency (with or without IgA deficiency), Ig deficiency with increased IgM, IgG and IgA deficiency with increased IgM, antibody deficiency with normal or elevated Igs, Ig heavy chain deletions, kappa chain deficiency, B cell lymphoproliferative disorder (BLPD), common variable immunodeficiency (CVID), common variable immunodeficiency (CVI) (acquired), and transient hypogammaglobulinemia of infancy.

[0483] In specific embodiments, ataxia-telangiectasia or conditions associated with ataxia-telangiectasia are treated, prevented, diagnosed, and/or prognosing using the polypeptides or polynucleotides of the invention, and/or agonists or antagonists thereof.

[0484] Examples of congenital immunodeficiencies in which T cell and/or B cell function and/or number is decreased include, but are not limited to: DiGeorge anomaly, severe combined immunodeficiencies (SCID) (including, but not limited to, X-linked SCID, autosomal recessive SCID, adenosine deaminase deficiency, purine nucleoside phosphorylase (PNP) deficiency, Class II MHC deficiency (Bare lymphocyte syndrome), Wiskott-Aldrich syndrome, and ataxia telangiectasia), thymic hypoplasia, third and fourth pharyngeal pouch syndrome, 22q11.2 deletion, chronic mucocutaneous candidiasis, natural killer cell deficiency (NK), idiopathic CD4+ T-lymphocytopenia, immunodeficiency with predominant T cell defect (unspecified), and unspecified immunodeficiency of cell mediated immunity.

[0485] In specific embodiments, DiGeorge anomaly or conditions associated with DiGeorge anomaly are treated, prevented, diagnosed, and/or prognosed using polypeptides or polynucleotides of the invention, or antagonists or agonists thereof.

[0486] Other immunodeficiencies that may be treated, prevented, diagnosed, and/or prognosed using polypeptides or polynucleotides of the invention, and/or agonists or antagonists thereof, include, but are not limited to, chronic granulomatous disease, Chédiak-Higashi syndrome, myeloperoxidase deficiency, leukocyte glucose-6-phosphate dehydrogenase deficiency, X-linked lymphoproliferative syndrome (XLP), leukocyte adhesion deficiency, complement component deficiencies (including C1, C2, C3, C4, C5, C6, C7, C8 and/or C9 deficiencies), reticular dysgenesis, thymic alymphoplasia-aplasia, immunodeficiency with thymoma, severe congenital leukopenia, dysplasia with immunodeficiency, neonatal neutropenia, short limbed dwarfism, and Nezelof syndrome-combined immunodeficiency with Igs.

[0487] In a preferred embodiment, the immunodeficiencies and/or conditions associated with the immunodeficiencies recited above are treated, prevented, diagnosed and/or prognosed using polynucleotides, polypeptides, antibodies, and/or agonists or antagonists of the present invention.

[0488] In a preferred embodiment polynucleotides, polypeptides, antibodies, and/or agonists or antagonists of the present invention could be used as an agent to boost immunoresponsiveness among immunodeficient individuals. In specific embodiments, polynucleotides, polypeptides, antibodies, and/or agonists or antagonists of the present invention could be used as an agent to boost immunoresponsiveness among B cell and/or T cell immunodeficient individuals.

[0489] The polynucleotides, polypeptides, antibodies, and/or agonists or antagonists of the present invention may be useful in treating, preventing, diagnosing and/or prognosing autoimmune disorders. Many autoimmune disorders result from inappropriate recognition of self as foreign material by immune cells. This inappropriate recognition results in an immune response leading to the destruction of the host tissue. Therefore, the administration of polynucleotides and polypeptides of the invention that can inhibit an immune response, particularly the proliferation, differentiation, or chemotaxis of T-cells, may be an effective therapy in preventing autoimmune disorders.

[0490] Autoimmune diseases or disorders that may be treated, prevented, diagnosed and/or prognosed by polynucleotides, polypeptides, antibodies, and/or agonists or antagonists of the present invention include, but are not limited to, one or more of the following: systemic lupus erythematosus, rheumatoid arthritis, ankylosing spondylitis, multiple sclerosis, autoimmune thyroiditis, Hashimoto's thyroiditis, autoimmune hemolytic anemia, hemolytic anemia, thrombocytopenia, autoimmune thrombocytopenia purpura, autoimmune neonatal thrombocytopenia, idiopathic thrombocytopenia purpura, purpura (e.g., Henloch-Scoenlein purpura), autoimmunocytopenia, Goodpasture's syndrome, Pemphigus vulgaris, myasthenia gravis, Grave's disease (hyperthyroidism), and insulin-resistant diabetes mellitus.

[0491] Additional disorders that are likely to have an autoimmune component that may be treated, prevented, and/or diagnosed with the compositions of the invention include, but are not limited to, type II collagen-induced arthritis, antiphospholipid syndrome, dermatitis, allergic encephalomyelitis, myocarditis, relapsing polychondritis, rheumatic heart disease, neuritis, uveitis ophthalmia, polyendocrinopathies, Reiter's Disease, Stiff-Man Syndrome, autoimmune pulmonary inflammation, autism, Guillain-Barre Syndrome, insulin dependent diabetes mellitus, and autoimmune inflammatory eye disorders.

[0492] Additional disorders that are likely to have an autoimmune component that may be treated, prevented, diagnosed and/or prognosed with the compositions of the invention include, but are not limited to, scleroderma with anti-collagen antibodies (often characterized, e.g., by nucleolar and other nuclear antibodies), mixed connective tissue disease (often characterized, e.g., by antibodies to extractable nuclear antigens (e.g., ribonucleoprotein)), polymyositis (often characterized, e.g., by nonhistone ANA), pernicious anemia (often characterized, e.g., by antiparietal cell, microsomes, and intrinsic factor antibodies), idiopathic Addison's disease (often characterized, e.g., by humoral and cell-mediated adrenal cytotoxicity, infertility (often characterized, e.g., by antispermatozoal antibodies), glomerulonephritis (often characterized, e.g., by glomerular basement membrane antibodies or immune complexes), bullous pemphigoid (often characterized, e.g., by IgG and complement in basement membrane), Sjogren's syndrome (often characterized, e.g., by multiple tissue antibodies, and/or a specific nonhistone ANA (SS-B)), diabetes mellitus (often characterized, e.g., by cell-mediated and humoral islet cell antibodies), and adrenergic drug resistance (including adrenergic drug resistance with asthma or cystic fibrosis) (often characterized, e.g., by beta-adrenergic receptor antibodies).

[0493] Additional disorders that may have an autoimmune component that may be treated, prevented, diagnosed and/or prognosed with the compositions of the invention include, but are not limited to, chronic active hepatitis (often characterized, e.g., by smooth muscle antibodies), primary biliary cirrhosis (often characterized, e.g., by mitochondria antibodies), other endocrine gland failure (often characterized, e.g., by specific tissue antibodies in some cases), vitiligo (often characterized, e.g., by melanocyte antibodies), vasculitis (often characterized, e.g., by Ig and complement in vessel walls and/or low serum complement), post-MI (often characterized, e.g., by myocardial antibodies), cardiotomy syndrome (often characterized, e.g., by myocardial antibodies), urticaria (often characterized, e.g., by IgG and IgM antibodies to IgE), atopic dermatitis (often characterized, e.g., by IgG and IgM antibodies to IgE), asthma (often characterized, e.g., by IgG and IgM antibodies to IgE), and many other inflammatory, granulomatous, degenerative, and atrophic disorders.

[0494] In a preferred embodiment, the autoimmune diseases and disorders and/or conditions associated with the diseases and disorders recited above are treated, prevented, diagnosed and/or prognosed using for example, antagonists or agonists, polypeptides or polynucleotides, or antibodies of the present invention. In a specific preferred embodiment, rheumatoid arthritis is treated, prevented, and/or diagnosed using polynucleotides, polypeptides, antibodies, and/or agonists or antagonists of the present invention.

[0495] In another specific preferred embodiment, systemic lupus erythematosus is treated, prevented, and/or diagnosed using polynucleotides, polypeptides, antibodies, and/or agonists or antagonists of the present invention. In another specific preferred embodiment, idiopathic thrombocytopenia purpura is treated, prevented, and/or diagnosed using polynucleotides, polypeptides, antibodies, and/or agonists or antagonists of the present invention.

[0496] In another specific preferred embodiment IgA nephropathy is treated, prevented, and/or diagnosed using polynucleotides, polypeptides, antibodies, and/or agonists or antagonists of the present invention.

[0497] In a preferred embodiment, the autoimmune diseases and disorders and/or conditions associated with the diseases and disorders recited above are treated, prevented, diagnosed and/or prognosed using polynucleotides, polypeptides, antibodies, and/or agonists or antagonists of the present invention.

[0498] In preferred embodiments, polypeptides, antibodies, polynucleotides and/or agonists or antagonists of the present invention are used as a immunosuppressive agent(s).

[0499] Polynucleotides, polypeptides, antibodies, and/or agonists or antagonists of the present invention may be useful in treating, preventing, prognosing, and/or diagnosing diseases, disorders, and/or conditions of hematopoietic cells. Polynucleotides, polypeptides, antibodies, and/or agonists or antagonists of the present invention could be used to increase differentiation and proliferation of hematopoietic cells, including the pluripotent stem cells, in an effort to treat or prevent those diseases, disorders, and/or conditions associated with a decrease in certain (or many) types hematopoietic cells, including but not limited to, leukopenia, neutropenia, anemia, and thrombocytopenia. Alternatively, Polynucleotides, polypeptides, antibodies, and/or agonists or antagonists of the present invention could be used to increase differentiation and proliferation of hematopoietic cells, including the pluripotent stem cells, in an effort to treat or prevent those diseases, disorders, and/or conditions associated with an increase in certain (or many) types of hematopoietic cells, including but not limited to, histiocytosis.

[0500] Allergic reactions and conditions, such as asthma (particularly allergic asthma) or other respiratory problems, may also be treated, prevented, diagnosed and/or prognosed using polypeptides, antibodies, or polynucleotides of the invention, and/or agonists or antagonists thereof. Moreover, these molecules can be used to treat, prevent, prognose, and/or diagnose anaphylaxis, hypersensitivity to an antigenic molecule, or blood group incompatibility.

[0501] Additionally, polypeptides or polynucleotides of the invention, and/or agonists or antagonists thereof, may be used to treat, prevent, diagnose and/or prognose IgE-mediated allergic reactions. Such allergic reactions include, but are not limited to, asthma, rhinitis, and eczema. In specific embodiments, polynucleotides, polypeptides, antibodies, and/or agonists or antagonists of the present invention may be used to modulate IgE concentrations in vitro or in vivo.

[0502] Moreover, polynucleotides, polypeptides, antibodies, and/or agonists or antagonists of the present invention have uses in the diagnosis, prognosis, prevention, and/or treatment of inflammatory conditions. For example, since polypeptides, antibodies, or polynucleotides of the invention, and/or agonists or antagonists of the invention may inhibit the activation, proliferation and/or differentiation of cells involved in an inflammatory response, these molecules can be used to prevent and/or treat chronic and acute inflammatory conditions. Such inflammatory conditions include, but are not limited to, for example, inflammation associated with infection (e.g., septic shock, sepsis, or systemic inflammatory response syndrome), ischemia-reperfusion injury, endotoxin lethality, complement-mediated hyperacute rejection, nephritis, cytokine or chemokine induced lung injury, inflammatory bowel disease, Crohn's disease, over production of cytokines (e.g., TNF or IL-1.), respiratory disorders (e.g., asthma and allergy); gastrointestinal disorders (e.g., inflammatory bowel disease); cancers (e.g., gastric, ovarian, lung, bladder, liver, and breast); CNS disorders (e.g., multiple sclerosis; ischemic brain injury and/or stroke, traumatic brain injury, neurodegenerative disorders (e.g., Parkinson's disease and Alzheimer's disease); AIDS-related dementia; and prion disease); cardiovascular disorders (e.g., atherosclerosis, myocarditis, cardiovascular disease, and cardiopulmonary bypass complications); as well as many additional diseases, conditions, and disorders that are characterized by inflammation (e.g., hepatitis, rheumatoid arthritis, gout, trauma, pancreatitis, sarcoidosis, dermatitis, renal ischemia-reperfusion injury, Grave's disease, systemic lupus erythematosus, diabetes mellitus, and allogenic transplant rejection).

[0503] Because inflammation is a fundamental defense mechanism, inflammatory disorders can effect virtually any tissue of the body. Accordingly, polynucleotides, polypeptides, and antibodies of the invention, as well as agonists or antagonists thereof, have uses in the treatment of tissue-specific inflammatory disorders, including, but not limited to, adrenalitis, alveolitis, angiocholecystitis, appendicitis, balanitis, blepharitis, bronchitis, bursitis, carditis, cellulitis, cervicitis, cholecystitis, chorditis, cochlitis, colitis, conjunctivitis, cystitis, dermatitis, diverticulitis, encephalitis, endocarditis, esophagitis, eustachitis, fibrositis, folliculitis, gastritis, gastroenteritis, gingivitis, glossitis, hepatosplenitis, keratitis, labyrinthitis, laryngitis, lymphangitis, mastitis, media otitis, meningitis, metritis, mucitis, myocarditis, myosititis, myringitis, nephritis, neuritis, orchitis, osteochondritis, otitis, pericarditis, peritendonitis, peritonitis, pharyngitis, phlebitis, poliomyelitis, prostatitis, pulpitis, retinitis, rhinitis, salpingitis, scleritis, sclerochoroiditis, scrotitis, sinusitis, spondylitis, steatitis, stomatitis, synovitis, syringitis, tendonitis, tonsillitis, urethritis, and vaginitis.

[0504] In specific embodiments, polypeptides, antibodies, or polynucleotides of the invention, and/or agonists or antagonists thereof, are useful to diagnose, prognose, prevent, and/or treat organ transplant rejections and graft-versus-host disease. Organ rejection occurs by host immune cell destruction of the transplanted tissue through an immune response. Similarly, an immune response is also involved in GVHD, but, in this case, the foreign transplanted immune cells destroy the host tissues. Polypeptides, antibodies, or polynucleotides of the invention, and/or agonists or antagonists thereof, that inhibit an immune response, particularly the activation, proliferation, differentiation, or chemotaxis of T-cells, may be an effective therapy in preventing organ rejection or GVHD. In specific embodiments, polypeptides, antibodies, or polynucleotides of the invention, and/or agonists or antagonists thereof, that inhibit an immune response, particularly the activation, proliferation, differentiation, or chemotaxis of T-cells, may be an effective therapy in preventing experimental allergic and hyperacute xenograft rejection.

[0505] In other embodiments, polypeptides, antibodies, or polynucleotides of the invention, and/or agonists or antagonists thereof, are useful to diagnose, prognose, prevent, and/or treat immune complex diseases, including, but not limited to, serum sickness, post streptococcal glomerulonephritis, polyarteritis nodosa, and immune complex-induced vasculitis.

[0506] Polypeptides, antibodies, polynucleotides and/or agonists or antagonists of the invention can be used to treat, detect, and/or prevent infectious agents. For example, by increasing the immune response, particularly increasing the proliferation activation and/or differentiation of B and/or T cells, infectious diseases may be treated, detected, and/or prevented. The immune response may be increased by either enhancing an existing immune response, or by initiating a new immune response. Alternatively, polynucleotides, polypeptides, antibodies, and/or agonists or antagonists of the present invention may also directly inhibit the infectious agent (refer to section of application listing infectious agents, etc), without necessarily eliciting an immune response.

[0507] In another embodiment, polypeptides, antibodies, polynucleotides and/or agonists or antagonists of the present invention are used as a vaccine adjuvant that enhances immune responsiveness to an antigen. In a specific embodiment, polypeptides, antibodies, polynucleotides and/or agonists or antagonists of the present invention are used as an adjuvant to enhance tumor-specific immune responses.

[0508] In another specific embodiment, polypeptides, antibodies, polynucleotides and/or agonists or antagonists of the present invention are used as an adjuvant to enhance anti-viral immune responses. Anti-viral immune responses that may be enhanced using the compositions of the invention as an adjuvant, include virus and virus associated diseases or symptoms described herein or otherwise known in the art. In specific embodiments, the compositions of the invention are used as an adjuvant to enhance an immune response to a virus, disease, or symptom selected from the group consisting of: AIDS, meningitis, Dengue, EBV, and hepatitis (e.g., hepatitis B). In another specific embodiment, the compositions of the invention are used as an adjuvant to enhance an immune response to a virus, disease, or symptom selected from the group consisting of: HIV/AIDS, respiratory syncytial virus, Dengue, rotavirus, Japanese B encephalitis, influenza A and B, parainfluenza, measles, cytomegalovirus, rabies, Junin, Chikungunya, Rift Valley Fever, herpes simplex, and yellow fever.

[0509] In another specific embodiment, polypeptides, antibodies, polynucleotides and/or agonists or antagonists of the present invention are used as an adjuvant to enhance anti-bacterial or anti-fungal immune responses. Anti-bacterial or anti-fungal immune responses that may be enhanced using the compositions of the invention as an adjuvant, include bacteria or fungus and bacteria or fungus associated diseases or symptoms described herein or otherwise known in the art. In specific embodiments, the compositions of the invention are used as an adjuvant to enhance an immune response to a bacteria or fungus, disease, or symptom selected from the group consisting of: tetanus, Diphtheria, botulism, and meningitis type B.

[0510] In another specific embodiment, the compositions of the invention are used as an adjuvant to enhance an immune response to a bacteria or fungus, disease, or symptom selected from the group consisting of: Vibrio cholerae, Mycobacterium leprae, Salmonella typhi, Salmonella paratyphi, Meisseria meningitidis, Streptococcus pneumoniae, Group B streptococcus, Shigella spp., Enterotoxigenic Escherichia coli, Enterohemorrhagic E. coli, and Borrelia burgdorferi.

[0511] In another specific embodiment, polypeptides, antibodies, polynucleotides and/or agonists or antagonists of the present invention are used as an adjuvant to enhance anti-parasitic immune responses. Anti-parasitic immune responses that may be enhanced using the compositions of the invention as an adjuvant, include parasite and parasite associated diseases or symptoms described herein or otherwise known in the art. In specific embodiments, the compositions of the invention are used as an adjuvant to enhance an immune response to a parasite. In another specific embodiment, the compositions of the invention are used as an adjuvant to enhance an immune response to Plasmodium (malaria) or Leishmania.

[0512] In another specific embodiment, polypeptides, antibodies, polynucleotides and/or agonists or antagonists of the present invention may also be employed to treat infectious diseases including silicosis, sarcoidosis, and idiopathic pulmonary fibrosis; for example, by preventing the recruitment and activation of mononuclear phagocytes.

[0513] In another specific embodiment, polypeptides, antibodies, polynucleotides and/or agonists or antagonists of the present invention are used as an antigen for the generation of antibodies to inhibit or enhance immune mediated responses against polypeptides of the invention.

[0514] In one embodiment, polypeptides, antibodies, polynucleotides and/or agonists or antagonists of the present invention are administered to an animal (e.g., mouse, rat, rabbit, hamster, guinea pig, pigs, micro-pig, chicken, camel, goat, horse, cow, sheep, dog, cat, non-human primate, and human, most preferably human) to boost the immune system to produce increased quantities of one or more antibodies (e.g., IgG, IgA, IgM, and IgE), to induce higher affinity antibody production and immunoglobulin class switching (e.g., IgG, IgA, IgM, and IgE), and/or to increase an immune response.

[0515] In another specific embodiment, polypeptides, antibodies, polynucleotides and/or agonists or antagonists of the present invention are used as a stimulator of B cell responsiveness to pathogens.

[0516] In another specific embodiment, polypeptides, antibodies, polynucleotides and/or agonists or antagonists of the present invention are used as an activator of T cells.

[0517] In another specific embodiment, polypeptides, antibodies, polynucleotides and/or agonists or antagonists of the present invention are used as an agent that elevates the immune status of an individual prior to their receipt of immunosuppressive therapies.

[0518] In another specific embodiment, polypeptides, antibodies, polynucleotides and/or agonists or antagonists of the present invention are used as an agent to induce higher affinity antibodies.

[0519] In another specific embodiment, polypeptides, antibodies, polynucleotides and/or agonists or antagonists of the present invention are used as an agent to increase serum immunoglobulin concentrations.

[0520] In another specific embodiment, polypeptides, antibodies, polynucleotides and/or agonists or antagonists of the present invention are used as an agent to accelerate recovery of immunocompromised individuals.

[0521] In another specific embodiment, polypeptides, antibodies, polynucleotides and/or agonists or antagonists of the present invention are used as an agent to boost immunoresponsiveness among aged populations and/or neonates.

[0522] In another specific embodiment, polypeptides, antibodies, polynucleotides and/or agonists or antagonists of the present invention are used as an immune system enhancer prior to, during, or after bone marrow transplant and/or other transplants (e.g., allogeneic or xenogeneic organ transplantation). With respect to transplantation, compositions of the invention may be administered prior to, concomitant with, and/or after transplantation. In a specific embodiment, compositions of the invention are administered after transplantation, prior to the beginning of recovery of T-cell populations. In another specific embodiment, compositions of the invention are first administered after transplantation after the beginning of recovery of T cell populations, but prior to full recovery of B cell populations.

[0523] In another specific embodiment, polypeptides, antibodies, polynucleotides and/or agonists or antagonists of the present invention are used as an agent to boost immunoresponsiveness among individuals having an acquired loss of B cell function. Conditions resulting in an acquired loss of B cell function that may be ameliorated or treated by administering the polypeptides, antibodies, polynucleotides and/or agonists or antagonists thereof, include, but are not limited to, HIV Infection, AIDS, bone marrow transplant, and B cell chronic lymphocytic leukemia (CLL).

[0524] In another specific embodiment, polypeptides, antibodies, polynucleotides and/or agonists or antagonists of the present invention are used as an agent to boost immunoresponsiveness among individuals having a temporary immune deficiency. Conditions resulting in a temporary immune deficiency that may be ameliorated or treated by administering the polypeptides, antibodies, polynucleotides and/or agonists or antagonists thereof, include, but are not limited to, recovery from viral infections (e.g., influenza), conditions associated with malnutrition, recovery from infectious mononucleosis, or conditions associated with stress, recovery from measles, recovery from blood transfusion, and recovery from surgery.

[0525] In another specific embodiment, polypeptides, antibodies, polynucleotides and/or agonists or antagonists of the present invention are used as a regulator of antigen presentation by monocytes, dendritic cells, and/or B-cells. In one embodiment, polynucleotides, polypeptides, antibodies, and/or agonists or antagonists of the present invention enhance antigen presentation or antagonizes antigen presentation in vitro or in vivo. Moreover, in related embodiments, said enhancement or antagonism of antigen presentation may be useful as an anti-tumor treatment or to modulate the immune system.

[0526] In another specific embodiment, polypeptides, antibodies, polynucleotides and/or agonists or antagonists of the present invention are used as an agent to direct an individual's immune system towards development of a humoral response (i.e. TH2) as opposed to a TH1 cellular response.

[0527] In another specific embodiment, polypeptides, antibodies, polynucleotides and/or agonists or antagonists of the present invention are used as a means to induce tumor proliferation and thus make it more susceptible to anti-neoplastic agents. For example, multiple myeloma is a slowly dividing disease and is thus refractory to virtually all anti-neoplastic regimens. If these cells were forced to proliferate more rapidly their susceptibility profile would likely change.

[0528] In another specific embodiment, polypeptides, antibodies, polynucleotides and/or agonists or antagonists of the present invention are used as a stimulator of B cell production in pathologies such as AIDS, chronic lymphocyte disorder and/or Common Variable Immunodificiency.

[0529] In another specific embodiment, polypeptides, antibodies, polynucleotides and/or agonists or antagonists of the present invention are used as a therapy for generation and/or regeneration of lymphoid tissues following surgery, trauma or genetic defect. In another specific embodiment, polypeptides, antibodies, polynucleotides and/or agonists or antagonists of the present invention are used in the pretreatment of bone marrow samples prior to transplant.

[0530] In another specific embodiment, polypeptides, antibodies, polynucleotides and/or agonists or antagonists of the present invention are used as a gene-based therapy for genetically inherited disorders resulting in immuno-incompetence/immunodeficiency such as observed among SCID patients.

[0531] In another specific embodiment, polypeptides, antibodies, polynucleotides and/or agonists or antagonists of the present invention are used as a means of activating monocytes/macrophages to defend against parasitic diseases that effect monocytes such as Leishmania.

[0532] In another specific embodiment, polypeptides, antibodies, polynucleotides and/or agonists or antagonists of the present invention are used as a means of regulating secreted cytokines that are elicited by polypeptides of the invention.

[0533] In another embodiment, polypeptides, antibodies, polynucleotides and/or agonists or antagonists of the present invention are used in one or more of the applications decribed herein, as they may apply to veterinary medicine.

[0534] In another specific embodiment, polypeptides, antibodies, polynucleotides and/or agonists or antagonists of the present invention are used as a means of blocking various aspects of immune responses to foreign agents or self. Examples of diseases or conditions in which blocking of certain aspects of immune responses may be desired include autoimmune disorders such as lupus, and arthritis, as well as immunoresponsiveness to skin allergies, inflammation, bowel disease, injury and diseases/disorders associated with pathogens.

[0535] In another specific embodiment, polypeptides, antibodies, polynucleotides and/or agonists or antagonists of the present invention are used as a therapy for preventing the B cell proliferation and Ig secretion associated with autoimmune diseases such as idiopathic thrombocytopenic purpura, systemic lupus erythematosus and multiple sclerosis.

[0536] In another specific embodiment, polypeptides, antibodies, polynucleotides and/or agonists or antagonists of the present invention are used as a inhibitor of B and/or T cell migration in endothelial cells. This activity disrupts tissue architecture or cognate responses and is useful, for example in disrupting immune responses, and blocking sepsis.

[0537] In another specific embodiment, polypeptides, antibodies, polynucleotides and/or agonists or antagonists of the present invention are used as a therapy for chronic hypergammaglobulinemia evident in such diseases as monoclonal gammopathy of undetermined significance (MGUS), Waldenstrom's disease, related idiopathic monoclonal gammopathies, and plasmacytomas.

[0538] In another specific embodiment, polypeptides, antibodies, polynucleotides and/or agonists or antagonists of the present invention may be employed for instance to inhibit polypeptide chemotaxis and activation of macrophages and their precursors, and of neutrophils, basophils, B lymphocytes and some T-cell subsets, e.g., activated and CD8 cytotoxic T cells and natural killer cells, in certain autoimmune and chronic inflammatory and infective diseases. Examples of autoimmune diseases are described herein and include multiple sclerosis, and insulin-dependent diabetes.

[0539] The polypeptides, antibodies, polynucleotides and/or agonists or antagonists of the present invention may also be employed to treat idiopathic hyper-cosinophilic syndrome by, for example, preventing eosinophil production and migration.

[0540] In another specific embodiment, polypeptides, antibodies, polynucleotides and/or agonists or antagonists of the present invention are used to enhance or inhibit complement mediated cell lysis.

[0541] In another specific embodiment, polypeptides, antibodies, polynucleotides and/or agonists or antagonists of the present invention are used to enhance or inhibit antibody dependent cellular cytotoxicity.

[0542] In another specific embodiment, polypeptides, antibodies, polynucleotides and/or agonists or antagonists of the present invention may also be employed for treating atherosclerosis, for example, by preventing monocyte infiltration in the artery wall.

[0543] In another specific embodiment, polypeptides, antibodies, polynucleotides and/or agonists or antagonists of the present invention may be employed to treat adult respiratory distress syndrome (ARDS).

[0544] In another specific embodiment, polypeptides, antibodies, polynucleotides and/or agonists or antagonists of the present invention may be useful for stimulating wound and tissue repair, stimulating angiogenesis, and/or stimulating the repair of vascular or lymphatic diseases or disorders. Additionally, agonists and antagonists of the invention may be used to stimulate the regeneration of mucosal surfaces.

[0545] In a specific embodiment, polynucleotides or polypeptides, and/or agonists thereof are used to diagnose, prognose, treat, and/or prevent a disorder characterized by primary or acquired immunodeficiency, deficient serum immunoglobulin production, recurrent infections, and/or immune system dysfunction. Moreover, polynucleotides or polypeptides, and/or agonists thereof may be used to treat or prevent infections of the joints, bones, skin, and/or parotid glands, blood-borne infections (e.g., sepsis, meningitis, septic arthritis, and/or osteomyelitis), autoimmune diseases (e.g., those disclosed herein), inflammatory disorders, and malignancies, and/or any disease or disorder or condition associated with these infections, diseases, disorders and/or malignancies) including, but not limited to, CVID, other primary immune deficiencies, HIV disease, CLL, recurrent bronchitis, sinusitis, otitis media, conjunctivitis, pneumonia, hepatitis, meningitis, herpes zoster (e.g., severe herpes zoster), and/or pneumocystis carnii. Other diseases and disorders that may be prevented, diagnosed, prognosed, and/or treated with polynucleotides or polypeptides, and/or agonists of the present invention include, but are not limited to, HIV infection, HTLV-BLV infection, lymphopenia, phagocyte bactericidal dysfunction anemia, thrombocytopenia, and hemoglobinuria.

[0546] In another embodiment, polynucleotides, polypeptides, antibodies, and/or agonists or antagonists of the present invention are used to treat, and/or diagnose an individual having common variable immunodeficiency disease (“CVID”; also known as “acquired agammaglobulinemia” and “acquired hypogammaglobulinemia”) or a subset of this disease.

[0547] In a specific embodiment, polynucleotides, polypeptides, antibodies, and/or agonists or antagonists of the present invention may be used to diagnose, prognose, prevent, and/or treat cancers or neoplasms including immune cell or immune tissue-related cancers or neoplasms. Examples of cancers or neoplasms that may be prevented, diagnosed, or treated by polynucleotides, polypeptides, antibodies, and/or agonists or antagonists of the present invention include, but are not limited to, acute myelogenous leukemia, chronic myelogenous leukemia, Hodgkin's disease, non-Hodgkin's lymphoma, acute lymphocytic anemia (ALL) Chronic lymphocyte leukemia, plasmacytomas, multiple myeloma, Burkitt's lymphoma, EBV-transformed diseases, and/or diseases and disorders described in the section entitled “Hyperproliferative Disorders” elsewhere herein.

[0548] In another specific embodiment, polypeptides, antibodies, polynucleotides and/or agonists or antagonists of the present invention are used as a therapy for decreasing cellular proliferation of Large B-cell Lymphomas.

[0549] In another specific embodiment, polypeptides, antibodies, polynucleotides and/or agonists or antagonists of the present invention are used as a means of decreasing the involvement of B cells and Ig associated with Chronic Myelogenous Leukemia.

[0550] In specific embodiments, the compositions of the invention are used as an agent to boost immunoresponsiveness among B cell immunodeficient individuals, such as, for example, an individual who has undergone a partial or complete splenectomy.

[0551] Antagonists of the invention include, for example, binding and/or inhibitory antibodies, antisense nucleic acids, ribozymes or soluble forms of the polypeptides of the present invention (e.g., Fc fusion protein; see, e.g., Example 9). Agonists of the invention include, for example, binding or stimulatory antibodies, and soluble forms of the polypeptides (e.g., Fc fusion proteins; see, e.g., Example 9). Polypeptides, antibodies, polynucleotides and/or agonists or antagonists of the present invention may be employed in a composition with a pharmaceutically acceptable carrier, e.g., as described herein.

[0552] In another embodiment, polypeptides, antibodies, polynucleotides and/or agonists or antagonists of the present invention are administered to an animal (including, but not limited to, those listed above, and also including transgenic animals) incapable of producing functional endogenous antibody molecules or having an otherwise compromised endogenous immune system, but which is capable of producing human immunoglobulin molecules by means of a reconstituted or partially reconstituted immune system from another animal (see, e.g., published PCT Application Nos. WO98/24893, WO/9634096, WO/9633735, and WO/9110741). Administration of polypeptides, antibodies, polynucleotides and/or agonists or antagonists of the present invention to such animals is useful for the generation of monoclonal antibodies against the polypeptides, antibodies, polynucleotides and/or agonists or antagonists of the present invention.

[0553] Blood-Related Disorders

[0554] The polynucleotides, polypeptides, antibodies, and/or agonists or antagonists of the present invention may be used to modulate hemostatic (the stopping of bleeding) or thrombolytic (clot dissolving) activity. For example, by increasing hemostatic or thrombolytic activity, polynucleotides or polypeptides, and/or agonists or antagonists of the present invention could be used to treat or prevent blood coagulation diseases, disorders, and/or conditions (e.g., afibrinogenemia, factor deficiencies, hemophilia), blood platelet diseases, disorders, and/or conditions (e.g., thrombocytopenia), or wounds resulting from trauma, surgery, or other causes. Alternatively, polynucleotides, polypeptides, antibodies, and/or agonists or antagonists of the present invention that can decrease hemostatic or thrombolytic activity could be used to inhibit or dissolve clotting. These molecules could be important in the treatment or prevention of heart attacks (infarction), strokes, or scarring.

[0555] In specific embodiments, the polynucleotides, polypeptides, antibodies, and/or agonists or antagonists of the present invention may be used to prevent, diagnose, prognose, and/or treat thrombosis, arterial thrombosis, venous thrombosis, thromboembolism, pulmonary embolism, atherosclerosis, myocardial infarction, transient ischemic attack, unstable angina. In specific embodiments, the polynucleotides, polypeptides, antibodies, and/or agonists or antagonists of the present invention may be used for the prevention of occulsion of saphenous grafts, for reducing the risk of periprocedural thrombosis as might accompany angioplasty procedures, for reducing the risk of stroke in patients with atrial fibrillation including nonrheumatic atrial fibrillation, for reducing the risk of embolism associated with mechanical heart valves and or mitral valves disease. Other uses for the polynucleotides, polypeptides, antibodies, and/or agonists or antagonists of the present invention, include, but are not limited to, the prevention of occlusions in extrcorporeal devices (e.g., intravascular canulas, vascular access shunts in hemodialysis patients, hemodialysis machines, and cardiopulmonary bypass machines).

[0556] In another embodiment, a polypeptide of the invention, or polynucleotides, antibodies, agonists, or antagonists corresponding to that polypeptide, may be used to prevent, diagnose, prognose, and/or treat diseases and disorders of the blood and/or blood forming organs associated with the tissue(s) in which the polypeptide of the invention is expressed, including one, two, three, four, five, or more tissues disclosed in Table 1A, column 8 (Tissue Distribution Library Code).

[0557] The polynucleotides, polypeptides, antibodies, and/or agonists or antagonists of the present invention may be used to modulate hematopoietic activity (the formation of blood cells). For example, the polynucleotides, polypeptides, antibodies, and/or agonists or antagonists of the present invention may be used to increase the quantity of all or subsets of blood cells, such as, for example, erythrocytes, lymphocytes (B or T cells), myeloid cells (e.g., basophils, eosinophils, neutrophils, mast cells, macrophages) and platelets. The ability to decrease the quantity of blood cells or subsets of blood cells may be useful in the prevention, detection, diagnosis and/or treatment of anemias and leukopenias described below. Alternatively, the polynucleotides, polypeptides, antibodies, and/or agonists or antagonists of the present invention may be used to decrease the quantity of all or subsets of blood cells, such as, for example, erythrocytes, lymphocytes (B or T cells), myeloid cells (e.g., basophils, eosinophils, neutrophils, mast cells, macrophages) and platelets. The ability to decrease the quantity of blood cells or subsets of blood cells may be useful in the prevention, detection, diagnosis and/or treatment of leukocytoses, such as, for example eosinophilia.

[0558] The polynucleotides, polypeptides, antibodies, and/or agonists or antagonists of the present invention may be used to prevent, treat, or diagnose blood dyscrasia.

[0559] Anemias are conditions in which the number of red blood cells or amount of hemoglobin (the protein that carries oxygen) in them is below normal. Anemia may be caused by excessive bleeding, decreased red blood cell production, or increased red blood cell destruction (hemolysis). The polynucleotides, polypeptides, antibodies, and/or agonists or antagonists of the present invention may be useful in treating, preventing, and/or diagnosing anemias. Anemias that may be treated prevented or diagnosed by the polynucleotides, polypeptides, antibodies, and/or agonists or antagonists of the present invention include iron deficiency anemia, hypochromic anemia, microcytic anemia, chlorosis, hereditary siderob;astic anemia, idiopathic acquired sideroblastic anemia, red cell aplasia, megaloblastic anemia (e.g., pernicious anemia, (vitamin B12 deficiency) and folic acid deficiency anemia), aplastic anemia, hemolytic anemias (e.g., autoimmune helolytic anemia, microangiopathic hemolytic anemia, and paroxysmal nocturnal hemoglobinuria). The polynucleotides, polypeptides, antibodies, and/or agonists or antagonists of the present invention may be useful in treating, preventing, and/or diagnosing anemias associated with diseases including but not limited to, anemias associated with systemic lupus erythematosus, cancers, lymphomas, chronic renal disease, and enlarged spleens. The polynucleotides, polypeptides, antibodies, and/or agonists or antagonists of the present invention may be useful in treating, preventing, and/or diagnosing anemias arising from drug treatments such as anemias associated with methyldopa, dapsone, and/or sulfadrugs. Additionally, rhe polynucleotides, polypeptides, antibodies, and/or agonists or antagonists of the present invention may be useful in treating, preventing, and/or diagnosing anemias associated with abnormal red blood cell architecture including but not limited to, hereditary spherocytosis, hereditary elliptocytosis, glucose-6-phosphate dehydrogenase deficiency, and sickle cell anemia.

[0560] The polynucleotides, polypeptides, antibodies, and/or agonists or antagonists of the present invention may be useful in treating, preventing, and/or diagnosing hemoglobin abnormalities, (e.g., those associated with sickle cell anemia, hemoglobin C disease, hemoglobin S-C disease, and hemoglobin E disease). Additionally, the polynucleotides, polypeptides, antibodies, and/or agonists or antagonists of the present invention may be useful in diagnosing, prognosing, preventing, and/or treating thalassemias, including, but not limited to major and minor forms of alpha-thalassemia and beta-thalassemia.

[0561] In another embodiment, the polynucleotides, polypeptides, antibodies, and/or agonists or antagonists of the present invention may be useful in diagnosing, prognosing, preventing, and/or treating bleeding disorders including, but not limited to, thrombocytopenia (e.g., idiopathic thrombocytopenic purpura, and thrombotic thrombocytopenic purpura), Von Willebrand's disease, hereditary platelet disorders (e.g., storage pool disease such as Chediak-Higashi and Hermansky-Pudlak syndromes, thromboxane A2 dysfunction, thromboasthenia, and Bernard-Soulier syndrome), hemolytic-uremic syndrome, hemophelias such as hemophelia A or Factor VII deficiency and Christmas disease or Factor IX deficiency, Hereditary Hemorhhagic Telangiectsia, also known as Rendu-Osler-Weber syndrome, allergic purpura (Henoch Schonlein purpura) and disseminated intravascular coagulation.

[0562] The effect of the polynucleotides, polypeptides, antibodies, and/or agonists or antagonists of the present invention on the clotting time of blood may be monitored using any of the clotting tests known in the art including, but not limited to, whole blood partial thromboplastin time (PTT), the activated partial thromboplastin time (aPTT), the activated clotting time (ACT), the recalcified activated clotting time, or the Lee-White Clotting time.

[0563] Several diseases and a variety of drugs can cause platelet dysfunction. Thus, in a specific embodiment, the polynucleotides, polypeptides, antibodies, and/or agonists or antagonists of the present invention may be useful in diagnosing, prognosing, preventing, and/or treating acquired platelet dysfunction such as platelet dysfunction accompanying kidney failure, leukemia, multiple myeloma, cirrhosis of the liver, and systemic lupus erythematosus as well as platelet dysfunction associated with drug treatments, including treatment with aspirin, ticlopidine, nonsteroidal anti-inflammatory drugs (used for arthritis, pain, and sprains), and penicillin in high doses.

[0564] In another embodiment, the polynucleotides, polypeptides, antibodies, and/or agonists or antagonists of the present invention may be useful in diagnosing, prognosing, preventing, and/or treating diseases and disorders characterized by or associated with increased or decreased numbers of white blood cells. Leukopenia occurs when the number of white blood cells decreases below normal. Leukopenias include, but are not limited to, neutropenia and lymphocytopenia. An increase in the number of white blood cells compared to normal is known as leukocytosis. The body generates increased numbers of white blood cells during infection. Thus, leukocytosis may simply be a normal physiological parameter that reflects infection. Alternatively, leukocytosis may be an indicator of injury or other disease such as cancer. Leokocytoses, include but are not limited to, eosinophilia, and accumulations of macrophages. In specific embodiments, the polynucleotides, polypeptides, antibodies, and/or agonists or antagonists of the present invention may be useful in diagnosing, prognosing, preventing, and/or treating leukopenia. In other specific embodiments, the polynucleotides, polypeptides, antibodies, and/or agonists or antagonists of the present invention may be useful in diagnosing, prognosing, preventing, and/or treating leukocytosis

[0565] Leukopenia may be a generalized decreased in all types of white blood cells, or may be a specific depletion of particular types of white blood cells. Thus, in specific embodiments, the polynucleotides, polypeptides, antibodies, and/or agonists or antagonists of the present invention may be useful in diagnosing, prognosing, preventing, and/or treating decreases in neutrophil numbers, known as neutropenia. Neutropenias that may be diagnosed, prognosed, prevented, and/or treated by the polynucleotides, polypeptides, antibodies, and/or agonists or antagonists of the present invention include, but are not limited to, infantile genetic agranulocytosis, familial neutropenia, cyclic neutropenia, neutropenias resulting from or associated with dietary deficiencies (e.g., vitamin B 12 deficiency or folic acid deficiency), neutropenias resulting from or associated with drug treatments (e.g., antibiotic regimens such as penicillin treatment, sulfonamide treatment, anticoagulant treatment, anticonvulsant drugs, anti-thyroid drugs, and cancer chemotherapy), and neutropenias resulting from increased neutrophil destruction that may occur in association with some bacterial or viral infections, allergic disorders, autoimmune diseases, conditions in which an individual has an enlarged spleen (e.g., Felty syndrome, malaria and sarcoidosis), and some drug treatment regimens.

[0566] The polynucleotides, polypeptides, antibodies, and/or agonists or antagonists of the present invention may be useful in diagnosing, prognosing, preventing, and/or treating lymphocytopenias (decreased numbers of B and/or T lymphocytes), including, but not limited lymphocytopenias resulting from or associated with stress, drug treatments (e.g., drug treatment with corticosteroids, cancer chemotherapies, and/or radiation therapies), AIDS infection and/or other diseases such as, for example, cancer, rheumatoid arthritis, systemic lupus erythematosus, chronic infections, some viral infections and/or hereditary disorders (e.g., DiGeorge syndrome, Wiskott-Aldrich Syndome, severe combined immunodeficiency, ataxia telangiectsia).

[0567] The polynucleotides, polypeptides, antibodies, and/or agonists or antagonists of the present invention may be useful in diagnosing, prognosing, preventing, and/or treating diseases and disorders associated with macrophage numbers and/or macrophage function including, but not limited to, Gaucher's disease, Niemann-Pick disease, Letterer-Siwe disease and Hand-Schuller-Christian disease.

[0568] In another embodiment, the polynucleotides, polypeptides, antibodies, and/or agonists or antagonists of the present invention may be useful in diagnosing, prognosing, preventing, and/or treating diseases and disorders associated with eosinophil numbers and/or eosinophil function including, but not limited to, idiopathic hypereosinophilic syndrome, eosinophilia-myalgia syndrome, and Hand-Schuller-Christian disease.

[0569] In yet another embodiment, the polynucleotides, polypeptides, antibodies, and/or agonists or antagonists of the present invention may be useful in diagnosing, prognosing, preventing, and/or treating leukemias and lymphomas including, but not limited to, acute lymphocytic (lymphpblastic) leukemia (ALL), acute myeloid (myelocytic, myelogenous, myeloblastic, or myelomonocytic) leukemia, chronic lymphocytic leukemia (e.g., B cell leukemias, T cell leukemias, Sezary syndrome, and Hairy cell leukenia), chronic myelocytic (myeloid, myelogenous, or granulocytic) leukemia, Hodgkin's lymphoma, non-hodgkin's lymphoma, Burkitt's lymphoma, and mycosis fungoides.

[0570] In other embodiments, the polynucleotides, polypeptides, antibodies, and/or agonists or antagonists of the present invention may be useful in diagnosing, prognosing, preventing, and/or treating diseases and disorders of plasma cells including, but not limited to, plasma cell dyscrasias, monoclonal gammaopathies, monoclonal gammopathies of undetermined significance, multiple myeloma, macroglobulinemia, Waldenstrom's macroglobulinemia, cryoglobulinemia, and Raynaud's phenomenon.

[0571] In other embodiments, the polynucleotides, polypeptides, antibodies, and/or agonists or antagonists of the present invention may be useful in treating, preventing, and/or diagnosing myeloproliferative disorders, including but not limited to, polycythemia vera, relative polycythemia, secondary polycythemia, myelofibrosis, acute myelofibrosis, agnogenic myelod metaplasia, thrombocythemia, (including both primary and seconday thrombocythemia) and chronic myelocytic leukemia.

[0572] In other embodiments, the polynucleotides, polypeptides, antibodies, and/or agonists or antagonists of the present invention may be useful as a treatment prior to surgery, to increase blood cell production.

[0573] In other embodiments, the polynucleotides, polypeptides, antibodies, and/or agonists or antagonists of the present invention may be useful as an agent to enhance the migration, phagocytosis, superoxide production, antibody dependent cellular cytotoxicity of neutrophils, eosionophils and macrophages.

[0574] In other embodiments, the polynucleotides, polypeptides, antibodies, and/or agonists or antagonists of the present invention may be useful as an agent to increase the number of stem cells in circulation prior to stem cells pheresis. In another specific embodiment, the polynucleotides, polypeptides, antibodies, and/or agonists or antagonists of the present invention may be useful as an agent to increase the number of stem cells in circulation prior to platelet pheresis.

[0575] In other embodiments, the polynucleotides, polypeptides, antibodies, and/or agonists or antagonists of the present invention may be useful as an agent to increase cytokine production.

[0576] In other embodiments, the polynucleotides, polypeptides, antibodies, and/or agonists or antagonists of the present invention may be useful in preventing, diagnosing, and/or treating primary hematopoietic disorders.

[0577] Hyperproliferative Disorders

[0578] Colon or colon cancer associated polynucleotides or polypeptides, or agonists or antagonists thereof, can be used to treat, prevent, diagnose and/or prognose hyperproliferative diseases, disorders, and/or conditions, including neoplasms.

[0579] In a specific embodiment, colon or colon cancer associated polynucleotides or polypeptides, or agonists or antagonists thereof, can be used to treat, prevent, and/or diagnose hyperproliferative diseases, disorders, and/or conditions of the colon.

[0580] In a preferred embodiment, colon or colon cancer associated polynucleotides or polypeptides, or agonists or antagonists thereof, can be used to treat, prevent, and/or diagnose colon neoplasms.

[0581] Colon or colon cancer associated polynucleotides or polypeptides, or agonists or antagonists of the invention, may inhibit the proliferation of the disorder through direct or indirect interactions. Alternatively, colon or colon cancer associated polynucleotides or polypeptides, or agonists or antagonists thereof, may proliferate other cells, which can inhibit the hyperproliferative disorder.

[0582] For example, by increasing an immune response, particularly increasing antigenic qualities of the hyperproliferative disorder or by proliferating, differentiating, or mobilizing T-cells, hyperproliferative diseases, disorders, and/or conditions can be treated, prevented, and/or diagnosed. This immune response may be increased by either enhancing an existing immune response, or by initiating a new immune response. Alternatively, decreasing an immune response may also be a method of treating, preventing, and/or diagnosing hyperproliferative diseases, disorders, and/or conditions, such as a chemotherapeutic agent.

[0583] Examples of hyperproliferative diseases, disorders, and/or conditions that can be treated, prevented, and/or diagnosed by colon cancer associated polynucleotides or polypeptides, or agonists or antagonists thereof, include, but are not limited to neoplasms located in the: prostate, colon, abdomen, bone, breast, digestive system, liver, pancreas, peritoneum, endocrine glands (adrenal, parathyroid, pituitary, testicles, ovary, thymus, thyroid), eye, head and neck, nervous (central and peripheral), lymphatic system, pelvic, skin, soft tissue, spleen, thoracic, and urogenital.

[0584] Similarly, other hyperproliferative disorders can also be treated or detected by polynucleotides or polypeptides, or agonists or antagonists of the present invention. Examples of such hyperproliferative disorders include, but are not limited to: Acute Childhood Lymphoblastic Leukemia, Acute Lymphoblastic Leukemia, Acute Lymphocytic Leukemia, Acute Myeloid Leukemia, Adrenocortical Carcinoma, Adult (Primary) Hepatocellular Cancer, Adult (Primary) Liver Cancer, Adult Acute Lymphocytic Leukemia, Adult Acute Myeloid Leukemia, Adult Hodgkin's Disease, Adult Hodgkin's Lymphoma, Adult Lymphocytic Leukemia, Adult Non-Hodgkin's Lymphoma, Adult Primary Liver Cancer, Adult Soft Tissue Sarcoma, AIDS-Related Lymphoma, AIDS-Related Malignancies, Anal Cancer, Astrocytoma, Bile Duct Cancer, Bladder Cancer, Bone Cancer, Brain Stem Glioma, Brain Tumors, Breast Cancer, Cancer of the Renal Pelvis and Ureter, Central Nervous System (Primary) Lymphoma, Central Nervous System Lymphoma, Cerebellar Astrocytoma, Cerebral Astrocytoma, Cervical Cancer, Childhood (Primary) Hepatocellular Cancer, Childhood (Primary) Liver Cancer, Childhood Acute Lymphoblastic Leukemia, Childhood Acute Myeloid Leukemia, Childhood Brain Stem Glioma, Childhood Cerebellar Astrocytoma, Childhood Cerebral Astrocytoma, Childhood Extracranial Germ Cell Tumors, Childhood Hodgkin's Disease, Childhood Hodgkin's Lymphoma, Childhood Hypothalamic and Visual Pathway Glioma, Childhood Lymphoblastic Leukemia, Childhood Medulloblastoma, Childhood Non-Hodgkin's Lymphoma, Childhood Pineal and Supratentorial Primitive Neuroectodermal Tumors, Childhood Primary Liver Cancer, Childhood Rhabdomyosarcoma, Childhood Soft Tissue Sarcoma, Childhood Visual Pathway and Hypothalamic Glioma, Chronic Lymphocytic Leukemia, Chronic Myelogenous Leukemia, Colon Cancer, Cutaneous T-Cell Lymphoma, Endocrine Pancreas Islet Cell Carcinoma, Endometrial Cancer, Ependymoma, Epithelial Cancer, Esophageal Cancer, Ewing's Sarcoma and Related Tumors, Exocrine Pancreatic Cancer, Extracranial Germ Cell Tumor, Extragonadal Germ Cell Tumor, Extrahepatic Bile Duct Cancer, Eye Cancer, Female Breast Cancer, Gaucher's Disease, Gallbladder Cancer, Gastric Cancer, Gastrointestinal Carcinoid Tumor, Gastrointestinal Tumors, Germ Cell Tumors, Gestational Trophoblastic Tumor, Hairy Cell Leukemia, Head and Neck Cancer, Hepatocellular Cancer, Hodgkin's Disease, Hodgkin's Lymphoma, Hypergammaglobulinemia, Hypopharyngeal Cancer, Intestinal Cancers, Intraocular Melanoma, Islet Cell Carcinoma, Islet Cell Pancreatic Cancer, Kaposi's Sarcoma, Kidney Cancer, Laryngeal Cancer, Lip and Oral Cavity Cancer, Liver Cancer, Lung Cancer, Lymphoproliferative Disorders, Macroglobulinemia, Male Breast Cancer, Malignant Mesothelioma, Malignant Thymoma, Medulloblastoma, Melanoma, Mesothelioma, Metastatic Occult Primary Squamous Neck Cancer, Metastatic Primary Squamous Neck Cancer, Metastatic Squamous Neck Cancer, Multiple Myeloma, Multiple Myeloma/Plasma Cell Neoplasm, Myelodysplastic Syndrome, Myelogenous Leukemia, Myeloid Leukemia, Myeloproliferative Disorders, Nasal Cavity and Paranasal Sinus Cancer, Nasopharyngeal Cancer, Neuroblastoma, Non-Hodgkin's Lymphoma During Pregnancy, Nonmelanoma Skin Cancer, Non-Small Cell Lung Cancer, Occult Primary Metastatic Squamous Neck Cancer, Oropharyngeal Cancer, Osteo-/Malignant Fibrous Sarcoma, Osteosarcoma/Malignant Fibrous Histiocytoma, Osteosarcoma/Malignant Fibrous Histiocytoma of Bone, Ovarian Epithelial Cancer, Ovarian Germ Cell Tumor, Ovarian Low Malignant Potential Tumor, Pancreatic Cancer, Paraproteinemias, Purpura, Parathyroid Cancer, Penile Cancer, Pheochromocytoma, Pituitary Tumor, Plasma Cell Neoplasm/Multiple Myeloma, Primary Central Nervous System Lymphoma, Primary Liver Cancer, Prostate Cancer, Rectal Cancer, Renal Cell Cancer, Renal Pelvis and Ureter Cancer, Retinoblastoma, Rhabdomyosarcoma, Salivary Gland Cancer, Sarcoidosis Sarcomas, Sezary Syndrome, Skin Cancer, Small Cell Lung Cancer, Small Intestine Cancer, Soft Tissue Sarcoma, Squamous Neck Cancer, Stomach Cancer, Supratentorial Primitive Neuroectodermal and Pineal Tumors, T-Cell Lymphoma, Testicular Cancer, Thymoma, Thyroid Cancer, Transitional Cell Cancer of the Renal Pelvis and Ureter, Transitional Renal Pelvis and Ureter Cancer, Trophoblastic Tumors, Ureter and Renal Pelvis Cell Cancer, Urethral Cancer, Uterine Cancer, Uterine Sarcoma, Vaginal Cancer, Visual Pathway and Hypothalamic Glioma, Vulvar Cancer, Waldenstrom's Macroglobulinemia, Wilms' Tumor, and any other hyperproliferative disease, besides neoplasia, located in an organ system listed above.

[0585] In another preferred embodiment, polynucleotides or polypeptides, or agonists or antagonists of the present invention are used to diagnose, prognose, prevent, and/or treat premalignant conditions and to prevent progression to a neoplastic or malignant state, including but not limited to those disorders described above. Such uses are indicated in conditions known or suspected of preceding progression to neoplasia or cancer, in particular, where non-neoplastic cell growth consisting of hyperplasia, metaplasia, or most particularly, dysplasia has occurred (for review of such abnormal growth conditions, see Robbins and Angell, 1976, Basic Pathology, 2d Ed., W. B. Saunders Co., Philadelphia, pp. 68-79.)

[0586] Hyperplasia is a form of controlled cell proliferation, involving an increase in cell number in a tissue or organ, without significant alteration in structure or function. Hyperplastic disorders which can be diagnosed, prognosed, prevented, and/or treated with compositions of the invention (including polynucleotides, polypeptides, agonists or antagonists) include, but are not limited to, angiofollicular mediastinal lymph node hyperplasia, angiolymphoid hyperplasia with eosinophilia, a typical melanocytic hyperplasia, basal cell hyperplasia, benign giant lymph node hyperplasia, cementum hyperplasia, congenital adrenal hyperplasia, congenital sebaceous hyperplasia, cystic hyperplasia, cystic hyperplasia of the breast, denture hyperplasia, ductal hyperplasia, endometrial hyperplasia, fibromuscular hyperplasia, focal epithelial hyperplasia, gingival hyperplasia, inflammatory fibrous hyperplasia, inflammatory papillary hyperplasia, intravascular papillary endothelial hyperplasia, nodular hyperplasia of prostate, nodular regenerative hyperplasia, pseudoepitheliomatous hyperplasia, senile sebaceous hyperplasia, and verrucous hyperplasia.

[0587] Metaplasia is a form of controlled cell growth in which one type of adult or fully differentiated cell substitutes for another type of adult cell. Metaplastic disorders which can be diagnosed, prognosed, prevented, and/or treated with compositions of the invention (including polynucleotides, polypeptides, agonists or antagonists) include, but are not limited to, agnogenic myeloid metaplasia, apocrine metaplasia, a typical metaplasia, autoparenchymatous metaplasia, connective tissue metaplasia, epithelial metaplasia, intestinal metaplasia, metaplastic anemia, metaplastic ossification, metaplastic polyps, myeloid metaplasia, primary myeloid metaplasia, secondary myeloid metaplasia, squamous metaplasia, squamous metaplasia of amnion, and symptomatic myeloid metaplasia.

[0588] Dysplasia is frequently a forerunner of cancer, and is found mainly in the epithelia; it is the most disorderly form of non-neoplastic cell growth, involving a loss in individual cell uniformity and in the architectural orientation of cells. Dysplastic cells often have abnormally large, deeply stained nuclei, and exhibit pleomorphism. Dysplasia characteristically occurs where there exists chronic irritation or inflammation. Dysplastic disorders which can be diagnosed, prognosed, prevented, and/or treated with compositions of the invention (including polynucleotides, polypeptides, agonists or antagonists) include, but are not limited to, anhidrotic ectodermal dysplasia, anterofacial dysplasia, asphyxiating thoracic dysplasia, atriodigital dysplasia, bronchopulmonary dysplasia, cerebral dysplasia, cervical dysplasia, chondroectodermal dysplasia, cleidocranial dysplasia, congenital ectodermal dysplasia, craniodiaphysial dysplasia, craniocarpotarsal dysplasia, craniometaphysial dysplasia, dentin dysplasia, diaphysial dysplasia, ectodermal dysplasia, enamel dysplasia, encephalo-ophthalmic dysplasia, dysplasia epiphysialis hemimelia, dysplasia epiphysialis multiplex, dysplasia epiphysialis punctata, epithelial dysplasia, faciodigitogenital dysplasia, familial fibrous dysplasia of jaws, familial white folded dysplasia, fibromuscular dysplasia, fibrous dysplasia of bone, florid osseous dysplasia, hereditary renal-retinal dysplasia, hidrotic ectodermal dysplasia, hypohidrotic ectodermal dysplasia, lymphopenic thymic dysplasia, mammary dysplasia, mandibulofacial dysplasia, metaphysial dysplasia, Mondini dysplasia, monostotic fibrous dysplasia, mucoepithelial dysplasia, multiple epiphysial dysplasia, oculoauriculovertebral dysplasia, oculodentodigital dysplasia, oculovertebral dysplasia, odontogenic dysplasia, ophthalmomandibulomelic dysplasia, periapical cemental dysplasia, polyostotic fibrous dysplasia, pseudoachondroplastic spondyloepiphysial dysplasia, retinal dysplasia, septo-optic dysplasia, spondyloepiphysial dysplasia, and ventriculoradial dysplasia.

[0589] Additional pre-neoplastic disorders which can be diagnosed, prognosed, prevented, and/or treated with compositions of the invention (including polynucleotides, polypeptides, agonists or antagonists) include, but are not limited to, benign dysproliferative disorders (e.g., benign tumors, fibrocystic conditions, tissue hypertrophy, intestinal polyps, colon polyps, and esophageal dysplasia), leukoplakia, keratoses, Bowen's disease, Farmer's Skin, solar cheilitis, and solar keratosis.

[0590] In another embodiment, a polypeptide of the invention, or polynucleotides, antibodies, agonists, or antagonists corresponding to that polypeptide, may be used to diagnose and/or prognose disorders associated with the tissue(s) in which the polypeptide of the invention is expressed, including one, two, three, four, five, or more tissues disclosed in Table 1A, 7 (Tissue Distribution Library Code).

[0591] In another embodiment, polynucleotides, polypeptides, antibodies, and/or agonists or antagonists of the present invention conjugated to a toxin or a radioactive isotope, as described herein, may be used to treat cancers and neoplasms, including, but not limited to those described herein. In a further preferred embodiment, polynucleotides, polypeptides, antibodies, and/or agonists or antagonists of the present invention conjugated to a toxin or a radioactive isotope, as described herein, may be used to treat acute myelogenous leukemia.

[0592] Additionally, polynucleotides, polypeptides, and/or agonists or antagonists of the invention may affect apoptosis, and therefore, would be useful in treating a number of diseases associated with increased cell survival or the inhibition of apoptosis. For example, diseases associated with increased cell survival or the inhibition of apoptosis that could be diagnosed, prognosed, prevented, and/or treated by polynucleotides, polypeptides, and/or agonists or antagonists of the invention, include cancers (such as follicular lymphomas, carcinomas with p53 mutations, and hormone-dependent tumors, including, but not limited to colon cancer, cardiac tumors, pancreatic cancer, melanoma, retinoblastoma, glioblastoma, lung cancer, intestinal cancer, testicular cancer, stomach cancer, neuroblastoma, myxoma, myoma, lymphoma, endothelioma, osteoblastoma, osteoclastoma, osteosarcoma, chondrosarcoma, adenoma, breast cancer, prostate cancer, Kaposi's sarcoma and ovarian cancer); autoimmune disorders such as, multiple sclerosis, Sjogren's syndrome, Hashimoto's thyroiditis, biliary cirrhosis, Behçet's disease, Crohn's disease, polymyositis, systemic lupus erythematosus and immune-related glomerulonephritis and rheumatoid arthritis) and viral infections (such as herpes viruses, pox viruses and adenoviruses), inflammation, graft v. host disease, acute graft rejection, and chronic graft rejection.

[0593] In preferred embodiments, polynucleotides, polypeptides, and/or agonists or antagonists of the invention are used to inhibit growth, progression, and/or metastasis of cancers, in particular those listed above.

[0594] Additional diseases or conditions associated with increased cell survival that could be diagnosed, prognosed, prevented, and/or treated by polynucleotides, polypeptides, and/or agonists or antagonists of the invention, include, but are not limited to, progression, and/or metastases of malignancies and related disorders such as leukemia (including acute leukemias (e.g., acute lymphocytic leukemia, acute myelocytic leukemia (including myeloblastic, promyelocytic, myelomonocytic, monocytic, and erythroleukemia)) and chronic leukemias (e.g., chronic myelocytic (granulocytic) leukemia and chronic lymphocytic leukemia)), polycythemia vera, lymphomas (e.g., Hodgkin's disease and non-Hodgkin's disease), multiple myeloma, Waldenstrom's macroglobulinemia, heavy chain disease, and solid tumors including, but not limited to, sarcomas and carcinomas such as fibrosarcoma, myxosarcoma, liposarcoma, chondrosarcoma, osteogenic sarcoma, chordoma, angiosarcoma, endotheliosarcoma, lymphangiosarcoma, lymphangioendotheliosarcoma, synovioma, mesothelioma, Ewing's tumor, leiomyosarcoma, rhabdomyosarcoma, colon carcinoma, pancreatic cancer, breast cancer, ovarian cancer, prostate cancer, squamous cell carcinoma, basal cell carcinoma, adenocarcinoma, sweat gland carcinoma, sebaceous gland carcinoma, papillary carcinoma, papillary adenocarcinomas, cystadenocarcinoma, medullary carcinoma, bronchogenic carcinoma, renal cell carcinoma, hepatoma, bile duct carcinoma, choriocarcinoma, seminoma, embryonal carcinoma, Wilm's tumor, cervical cancer, testicular tumor, lung carcinoma, small cell lung carcinoma, bladder carcinoma, epithelial carcinoma, glioma, astrocytoma, medulloblastoma, craniopharyngioma, ependymoma, pinealoma, emangioblastoma, acoustic neuroma, oligodendroglioma, menangioma, melanoma, neuroblastoma, and retinoblastoma.

[0595] Diseases associated with increased apoptosis that could be diagnosed, prognosed, prevented, and/or treated by polynucleotides, polypeptides, and/or agonists or antagonists of the invention, include AIDS; neurodegenerative disorders (such as Alzheimer's disease, Parkinson's disease, amyotrophic lateral sclerosis, retinitis pigmentosa, cerebellar degeneration and brain tumor or prior associated disease); autoimmune disorders (such as, multiple sclerosis, Sjogren's syndrome, Hashimoto's thyroiditis, biliary cirrhosis, Behcet's disease, Crohn's disease, polymyositis, systemic lupus erythematosus and immune-related glomerulonephritis and rheumatoid arthritis) myelodysplastic syndromes (such as aplastic anemia), graft v. host disease, ischemic injury (such as that caused by myocardial infarction, stroke and reperfusion injury), liver injury (e.g., hepatitis related liver injury, ischemia/reperfusion injury, cholestosis (bile duct injury) and liver cancer); toxin-induced liver disease (such as that caused by alcohol), septic shock, cachexia and anorexia.

[0596] Hyperproliferative diseases and/or disorders that could be diagnosed, prognosed, prevented, and/or treated by polynucleotides, polypeptides, and/or agonists or antagonists of the invention, include, but are not limited to, neoplasms located in the liver, abdomen, bone, breast, digestive system, pancreas, peritoneum, endocrine glands (adrenal, parathyroid, pituitary, testicles, ovary, thymus, thyroid), eye, head and neck, nervous system (central and peripheral), lymphatic system, pelvis, skin, soft tissue, spleen, thorax, and urogenital tract.

[0597] Similarly, other hyperproliferative disorders can also be diagnosed, prognosed, prevented, and/or treated by polynucleotides, polypeptides, and/or agonists or antagonists of the invention. Examples of such hyperproliferative disorders include, but are not limited to: hypergammaglobulinemia, lymphoproliferative disorders, paraproteinemias, purpura, sarcoidosis, Sezary Syndrome, Waldenstron's macroglobulinemia, Gaucher's Disease, histiocytosis, and any other hyperproliferative disease, besides neoplasia, located in an organ system listed above.

[0598] One preferred embodiment utilizes polynucleotides of the present invention to inhibit aberrant cellular division, by gene therapy using the present invention, and/or protein fusions or fragments thereof.

[0599] Thus, the present invention provides a method for treating cell proliferative diseases, disorders, and/or conditions by inserting into an abnormally proliferating cell a polynucleotide of the present invention, wherein said polynucleotide represses said cell proliferation, disease, disorder, and/or condition.

[0600] In a preferred embodiment, the present invention provides a method for treating cell proliferative diseases, disorders and/or conditions of the colon cancer by inserting into a cell, a polynucleotide of the present invention, wherein said polynucleotide represses said cell proliferation, disease and/or disorder.

[0601] Another embodiment of the present invention provides a method of treating cell-proliferative diseases, disorders, and/or conditions in individuals comprising administration of one or more active gene copies of the present invention to an abnormally proliferating cell or cells. In a preferred embodiment, polynucleotides of the present invention is a DNA construct comprising a recombinant expression vector effective in expressing a DNA sequence encoding said polynucleotides. In another preferred embodiment of the present invention, the DNA construct encoding the polynucleotides of the present invention is inserted into cells to be treated utilizing a retrovirus, or more preferably an adenoviral vector (see, e.g., G J. Nabel, et. al., PNAS 96: 324-326 (1999), which is hereby incorporated by reference). In a most preferred embodiment, the viral vector is defective and will not transform non-proliferating cells, only proliferating cells. Moreover, in a preferred embodiment, the polynucleotides of the present invention inserted into proliferating cells either alone, or in combination with or fused to other polynucleotides, can then be modulated via an external stimulus (i.e., magnetic, specific small molecule, chemical, or drug administration, etc.), which acts upon the promoter upstream of said polynucleotides to induce expression of the encoded protein product. As such the beneficial therapeutic affect of the present invention may be expressly modulated (i.e., to increase, decrease, or inhibit expression of the present invention) based upon said external stimulus.

[0602] Polynucleotides of the present invention may be useful in repressing expression of oncogenic genes or antigens. By “repressing expression of the oncogenic genes “is intended the suppression of the transcription of the gene, the degradation of the gene transcript (pre-message RNA), the inhibition of splicing, the destruction of the messenger RNA, the prevention of the post-translational modifications of the protein, the destruction of the protein, or the inhibition of the normal function of the protein.

[0603] For local administration to abnormally proliferating cells, polynucleotides of the present invention may be administered by any method known to those of skill in the art including, but not limited to transfection, electroporation, microinjection of cells, or in vehicles such as liposomes, lipofectin, or as naked polynucleotides, or any other method described throughout the specification. The polynucleotide of the present invention may be delivered by known gene delivery systems such as, but not limited to, retroviral vectors (Gilboa, J. Virology 44:845 (1982); Hocke, Nature 320:275 (1986); Wilson, et al., Proc. Natl. Acad. Sci. U.S.A. 85:3014), vaccinia virus system (Chakrabarty et al., Mol. Cell Biol. 5:3403 (1985) or other efficient DNA delivery systems (Yates et al., Nature 313:812 (1985)) known to those skilled in the art. These references are exemplary only and are hereby incorporated by reference. In order to specifically deliver or transfect cells which are abnormally proliferating and spare non-dividing cells, it is preferable to utilize a retrovirus, or adenoviral (as described in the art and elsewhere herein) delivery system known to those of skill in the art. Since host DNA replication is required for retroviral DNA to integrate and the retrovirus will be unable to self replicate due to the lack of the retrovirus genes needed for its life cycle. Utilizing such a retroviral delivery system for polynucleotides of the present invention will target said gene and constructs to abnormally proliferating cells and will spare the non-dividing normal cells.

[0604] The polynucleotides of the present invention may be delivered directly to cell proliferative disorder/disease sites in internal organs, body cavities and the like by use of imaging devices used to guide an injecting needle directly to the disease site. The polynucleotides of the present invention may also be administered to disease sites at the time of surgical intervention.

[0605] By “cell proliferative disease” is meant any human or animal disease or disorder, affecting any one or any combination of organs, cavities, or body parts, which is characterized by single or multiple local abnormal proliferations of cells, groups of cells, or tissues, whether benign or malignant.

[0606] Any amount of the polynucleotides of the present invention may be administered as long as it has a biologically inhibiting effect on the proliferation of the treated cells. Moreover, it is possible to administer more than one of the polynucleotide of the present invention simultaneously to the same site. By “biologically inhibiting” is meant partial or total growth inhibition as well as decreases in the rate of proliferation or growth of the cells. The biologically inhibitory dose may be determined by assessing the effects of the polynucleotides of the present invention on target malignant or abnormally proliferating cell growth in tissue culture, tumor growth in animals and cell cultures, or any other method known to one of ordinary skill in the art.

[0607] The present invention is further directed to antibody-based therapies which involve administering of anti-polypeptides and anti-polynucleotide antibodies to a mammalian, preferably human, patient for treating one or more of the described diseases, disorders, and/or conditions. Methods for producing anti-polypeptides and anti-polynucleotide antibodies polyclonal and monoclonal antibodies are described in detail elsewhere herein. Such antibodies may be provided in pharmaceutically acceptable compositions as known in the art or as described herein.

[0608] A summary of the ways in which the antibodies of the present invention may be used therapeutically includes binding polynucleotides or polypeptides of the present invention locally or systemically in the body or by direct cytotoxicity of the antibody, e.g., as mediated by complement (CDC) or by effector cells (ADCC). Some of these approaches are described in more detail below. Armed with the teachings provided herein, one of ordinary skill in the art will know how to use the antibodies of the present invention for diagnostic, monitoring or therapeutic purposes without undue experimentation.

[0609] In particular, the antibodies, fragments and derivatives of the present invention are useful for treating a subject having or developing cell proliferative and/or differentiation diseases, disorders, and/or conditions as described herein. Such treatment comprises administering a single or multiple doses of the antibody, or a fragment, derivative, or a conjugate thereof.

[0610] The antibodies of this invention may be advantageously utilized in combination with other monoclonal or chimeric antibodies, or with lymphokines or hematopoietic growth factors, for example, which serve to increase the number or activity of effector cells which interact with the antibodies.

[0611] It is preferred to use high affinity and/or potent in vivo inhibiting and/or neutralizing antibodies against polypeptides or polynucleotides of the present invention, fragments or regions thereof, for both immunoassays directed to and therapy of diseases, disorders, and/or conditions related to polynucleotides or polypeptides, including fragments thereof, of the present invention. Such antibodies, fragments, or regions, will preferably have an affinity for polynucleotides or polypeptides, including fragments thereof. Preferred binding affinities include those with a dissociation constant or Kd less than 5×10⁻⁶M, 10⁻⁶M, 5×10⁻⁷M, 10⁻⁷M, 5×10⁻⁸M, 10⁻⁸M, 5×10⁻⁹M, 10⁻⁹M, 5×10⁻¹⁰M, 10⁻¹⁰M, 5×10⁻¹¹M, 10⁻¹¹M, 5×10⁻¹²M, 10⁻¹²M, 5×10⁻¹³M, 10⁻¹³M, 5×10⁻¹⁴M, 10⁻¹⁴M, 5×10⁻⁵M, and 10⁻¹⁵M.

[0612] Moreover, colon or colon cancer antigen polypeptides of the present invention or fragments thereof, are useful in inhibiting the angiogenesis of proliferative cells or tissues, either alone, as a protein fusion, or in combination with other polypeptides directly or indirectly, as described elsewhere herein. In a most preferred embodiment, said anti-angiogenesis effect may be achieved indirectly, for example, through the inhibition of hematopoietic, tumor-specific cells, such as tumor-associated macrophages (see, e.g., Joseph I B, et al. J Natl Cancer Inst, 90(21):1648-53 (1998), which is hereby incorporated by reference). Antibodies directed to polypeptides or polynucleotides of the present invention may also result in inhibition of angiogenesis directly, or indirectly (see, e.g., Witte L, et al., Cancer Metastasis Rev. 17(2):155-61 (1998), which is hereby incorporated by reference)).

[0613] Polypeptides, including protein fusions, of the present invention, or fragments thereof may be useful in inhibiting proliferative cells or tissues through the induction of apoptosis. Said polypeptides may act either directly, or indirectly to induce apoptosis of proliferative cells and tissues, for example in the activation of a death-domain receptor, such as tumor necrosis factor (TNF) receptor-1, CD95 (Fas/APO-1), TNF-receptor-related apoptosis-mediated protein (TRAMP) and TNF-related apoptosis-inducing ligand (TRAIL) receptor-1 and -2 (see, e.g., Schulze-Osthoff K, et.al., Eur J Biochem 254(3):439-59 (1998), which is hereby incorporated by reference). Moreover, in another preferred embodiment of the present invention, said polypeptides may induce apoptosis through other mechanisms, such as in the activation of other proteins which will activate apoptosis, or through stimulating the expression of said proteins, either alone or in combination with small molecule drugs or adjuvants, such as apoptonin, galectins, thioredoxins, antiinflammatory proteins (See for example, Mutat. Res. 400(1-2):447-55 (1998), Med Hypotheses.50(5):423-33 (1998), Chem. Biol. Interact. Apr 24;1 11-112:23-34 (1998), J. Mo. Med. 76(6):402-12 (1998), Int. J. Tissue React. 20(1):3-15 (1998), which are all hereby incorporated by reference).

[0614] Polypeptides, including protein fusions to, or fragments thereof, of the present invention are useful in inhibiting the metastasis of proliferative cells or tissues. Inhibition may occur as a direct result of administering polypeptides, or antibodies directed to said polypeptides as described elsewhere herein, or indirectly, such as activating the expression of proteins known to inhibit metastasis, for example alpha 4 integrins, (See, e.g., Curr Top Microbiol Immunol 1998;231:125-41, which is hereby incorporated by reference). Such therapeutic affects of the present invention may be achieved either alone, or in combination with small molecule drugs or adjuvants.

[0615] In another embodiment, the invention provides a method of delivering compositions containing the polypeptides of the invention (e.g., compositions containing polypeptides or anti-colon or colon cancer antigen polypeptide antibodies associated with heterologous polypeptides, heterologous nucleic acids, toxins, or prodrugs) to targeted cells expressing the polypeptide of the present invention. Colon or colon cancer antigen polypeptides or anti-colon or colon cancer antigen polypeptide antibodies of the invention may be associated with heterologous polypeptides, heterologous nucleic acids, toxins, or prodrugs via hydrophobic, hydrophilic, ionic and/or covalent interactions.

[0616] Polypeptides, protein fusions to, or fragments thereof, of the present invention are useful in enhancing the immunogenicity and/or antigenicity of proliferating cells or tissues, either directly, such as would occur if the polypeptides of the present invention ‘vaccinated’ the immune response to respond to proliferative antigens and immunogens, or indirectly, such as in activating the expression of proteins known to enhance the immune response (e.g. chemokines), to said antigens and immunogens. Urinary System Disorders

[0617] Polynucleotides, polypeptides, antibodies, and/or agonists or antagonists of the present invention, may be used to treat, prevent, diagnose, and/or prognose disorders of the urinary system, including but not limited to disorders of the renal system, bladder, ureters, and urethra. Renal disorders include, but are not limited to, kidney failure, nephritis, blood vessel disorders of kidney, metabolic and congenital kidney disorders, urinary disorders of the kidney, autoimmune disorders, sclerosis and necrosis, electrolyte imbalance, and kidney cancers.

[0618] Kidney failure diseases includenal failure, and edstage renalure, chronic kidney failure, atheroembolic renal failure, and end-stage renal disease. Inflammatory diseases of the kidney include acute glomerulonephritis, postinfectious glomerulonephritis, rapidly progressive glomerulonephritis, nephrotic syndrome, membranous glomerulonephritis, familial nephrotic syndrome, membranoproliferative glomerulonephritis I and II, mesangial proliferative glomerulonephritis, chronic glomerulonephritis, acute tubulointerstitial nephritis, chronic tubulointerstitial nephritis, acute post-streptococcal glomerulonephritis (PSGN), pyelonephritis, lupus nephritis, chronic nephritis, interstitial nephritis, and post-streptococcal glomerulonephritis.

[0619] Blood vessel disorders of the kidneys include, but are not limited to, kidney infarction, atheroembolic kidney disease, cortical necrosis, malignant nephrosclerosis, renal vein thrombosis, renal underperfusion, renal ischemia-reperfusion, renal artery embolism, and renal artery stenosis. Kidney disorders resulting form urinary tract problems include, but are not limited to, pyelonephritis, hydronephrosis, urolithiasis (renal lithiasis, nephrolithiasis), reflux nephropathy, urinary tract infections, urinary retention, and acute or chronic unilateral obstructive uropathy.

[0620] Metabolic and congenital disorders of the kidneys include, but are not limited to, renal tubular acidosis, renal glycosuria, nephrogenic diabetes insipidus, cystinuria, Fanconi's syndrome, vitamin D-resistant rickets, Hartnup disease, Bartter's syndrome, Liddle's syndrome, polycystic kidney disease, medullary cystic disease, medullary sponge kidney, Alport's syndrome, nail-patella syndrome, congenital nephrotic syndrome, CRUSH syndrome, horseshoe kidney, diabetic nephropathy, nephrogenic diabetes insipidus, analgesic nephropathy, kidney stones, and membranous nephropathy, Kidney disorders resulting from an autoimmune response include, but are not limited to, systemic lupus erythematosus (SLE), Goodpasture syndrome, IgA nephropathy, and IgM mesangial proliferative glomerulonephritis.

[0621] Sclerotic or necrotic disorders of the kidney include, but are not limited to, glomerulosclerosis, diabetic nephropathy, focal segmental glomerulosclerosis (FSGS), necrotizing glomerulonephritis, and renal papillary necrosis. Kidneys may also develop carcinomas, including, but not limited to, hypernephroma, nephroblastoma, renal cell cancer, transitional cell cancer, squamous cell cancer, and Wilm's tumor.

[0622] Kidney disorders may also result in electrolyte imbalances, including, but not limited to, nephrocalcinosis, pyuria, edema, hydronephritis, proteinuria, hyponatremia, hypematremia, hypokalemia, hyperkalemia, hypocalcemia, hypercalcemia, hypophosphatemia, and hyperphosphatemia.

[0623] Bladder disorders include, but are not limited to, benign prostatic hyperplasia (BPH), interstitial cystitis (IC), prostatitis, proteinuria, urinary tract infections, urinary incontinence, urinary retention. Disorders of the ureters and urethra include, but are not limited to, acute or chronic unilateral obstructive uropathy. The bladder, ureters, and urethra may also develop carcinomas, including, but not limited to, superficial bladder canccer, invasive bladder cancer, carcinoma of the ureter, and urethra cancers.

[0624] Polypeptides may be administered using any method known in the art, including, but not limited to, direct needle injection at the delivery site, intravenous injection, topical administration, catheter infusion, biolistic injectors, particle accelerators, gelfoam sponge depots, other commercially available depot materials, osmotic pumps, oral or suppositorial solid pharmaceutical formulations, decanting or topical applications during surgery, aerosol delivery. Such methods are known in the art. Polypeptides may be administered as part of a Therapeutic, described in more detail below. Methods of delivering polynucleotides are described in more detail herein.

[0625] Cardiovascular Disorders

[0626] Polynucleotides or polypeptides, or agonists or antagonists of the present invention, may be used to treat, prevent, diagnose, and/or prognose cardiovascular disorders, including, but not limited to, peripheral artery disease, such as limb ischemia.

[0627] Cardiovascular disorders include cardiovascular abnormalities, such as arterio-arterial fistula, arteriovenous fistula, cerebral arteriovenous malformations, congenital heart defects, pulmonary atresia, and Scimitar Syndrome. Congenital heart defects include aortic coarctation, cor triatriatum, coronary vessel anomalies, crisscross heart, dextrocardia, patent ductus arteriosus, Ebstein's anomaly, Eisenmenger complex, hypoplastic left heart syndrome, levocardia, tetralogy of fallot, transposition of great vessels, double outlet right ventricle, tricuspid atresia, persistent truncus arteriosus, total anomalous pulmonary venous connection, hypoplastic left heart syndrome, and heart septal defects, such as aortopulmonary septal defect, endocardial cushion defects, Lutembacher's Syndrome, atrioventricular canal defect, trilogy of Fallot, ventricular heart septal defects.

[0628] Cardiovascular disorders also include heart disease, such as arrhythmias, carcinoid heart disease, high cardiac output, low cardiac output, cardiac tamponade, endocarditis (including bacterial), heart aneurysm, cardiac arrest, sudden cardiac death, congestive heart failure, congestive cardiomyopathy, paroxysmal dyspnea, cardiac edema, heart hypertrophy, congestive cardiomyopathy, left ventricular hypertrophy, right ventricular hypertrophy, post-infarction heart rupture, ventricular septal rupture, heart valve diseases, myocardial diseases, myocardial ischemia, pericardial effusion, pericarditis (including constrictive and tuberculous), pneumopericardium, postpericardiotomy syndrome, pulmonary heart disease, rheumatic heart disease, ventricular dysfunction, hyperemia, cardiovascular pregnancy complications, Scimitar Syndrome, diastolic dysfunction, enlarged heart, heart block, J-curve phenomenon, rheumatic heart disease, Marfan syndrome, cardiovascular syphilis, and cardiovascular tuberculosis.

[0629] Arrhythmias include sinus arrhythmia, atrial fibrillation, atrial flutter, bradycardia, extrasystole, Adams-Stokes Syndrome, bundle-branch block, sinoatrial block, long QT syndrome, parasystole, Lown-Ganong-Levine Syndrome, Mahaim-type pre-excitation syndrome, Wolff-Parkinson-White syndrome, sick sinus syndrome, tachycardias, and ventricular fibrillation. Tachycardias include paroxysmal tachycardia, supraventricular tachycardia, accelerated idioventricular rhythm, atrioventricular nodal reentry tachycardia, ectopic atrial tachycardia, ectopic junctional tachycardia, sinoatrial nodal reentry tachycardia, sinus tachycardia, Torsades de Pointes, and ventricular tachycardia.

[0630] Heart valve disease include aortic valve insufficiency, aortic valve stenosis, heart murmurs, aortic valve prolapse, mitral valve prolapse, tricuspid valve prolapse, mitral valve insufficiency, mitral valve stenosis, pulmonary atresia, pulmonary valve insufficiency, pulmonary valve stenosis, tricuspid atresia, tricuspid valve insufficiency, tricuspid valve stenosis, and bicuspid aortic valve.

[0631] Myocardial diseases include alcoholic cardiomyopathy, congestive cardiomyopathy, hypertrophic cardiomyopathy, aortic subvalvular stenosis, pulmonary subvalvular stenosis, restrictive cardiomyopathy, Chagas cardiomyopathy, endocardial fibroelastosis, endomyocardial fibrosis, Kearns Syndrome, Barth syndrome, myocardial reperfusion injury, and myocarditis.

[0632] Myocardial ischemias include coronary disease, such as angina pectoris, Prinzmetal's angina, unstable angina, coronary aneurysm, coronary arteriosclerosis, coronary thrombosis, coronary vasospasm, myocardial infarction and myocardial stunning.

[0633] Cardiovascular diseases also include vascular diseases such as aneurysms, angiodysplasia, angiomatosis, bacillary angiomatosis, Hippel-Lindau Disease, Klippel-Trenaunay-Weber Syndrome, Sturge-Weber Syndrome, angioneurotic edema, aortic diseases, Takayasu's Arteritis, aortitis, Leriche's Syndrome, arterial occlusive diseases, arteritis, enarteritis, polyarteritis nodosa, cerebrovascular disorders, diabetic angiopathies, diabetic retinopathy, embolisms, thrombosis, erythromelalgia, hemorrhoids, hepatic veno-occlusive disease, hypertension, hypotension (shock), ischemia, peripheral vascular diseases, phlebitis, superficial phlebitis, pulmonary veno-occlusive disease, chronic obstructive pulmonary disease, Buerger's disease, Raynaud's disease, CREST syndrome, retinal vein occlusion, Scimitar syndrome, superior vena cava syndrome, telangiectasia, atacia telangiectasia, hereditary hemorrhagic telangiectasia, deep vein thrombosis, varicocele, varicose veins, varicose ulcer, vasculitis, and venous insufficiency.

[0634] Aneurysms include dissecting aneurysms, false aneurysms, infected aneurysms, ruptured aneurysms, aortic aneurysms, cerebral aneurysms, coronary aneurysms, heart aneurysms, and iliac aneurysms.

[0635] Arterial occlusive diseases include arteriosclerosis, arteriolosclerosis, atherosclerosis, intermittent claudication, carotid stenosis, fibromuscular dysplasias, mesenteric vascular occlusion, Moyamoya disease, renal artery obstruction, retinal artery occlusion, and thromboangiitis obliterans.

[0636] Cerebrovascular disorders include carotid artery diseases, cerebral amyloid angiopathy, cerebral aneurysm, cerebral anoxia, cerebral arteriosclerosis, cerebral arteriovenous malformation, cerebral artery diseases, cerebral embolism and thrombosis, carotid artery thrombosis, sinus thrombosis, Wallenberg's syndrome, cerebral hemorrhage, epidural hematoma, subdural hematoma, subaraxhnoid hemorrhage, cerebral infarction, cerebral ischemia (including transient), subclavian steal syndrome, periventricular leukomalacia, vascular headache, cluster headache, migraine, and vertebrobasilar insufficiency.

[0637] Embolisms include air embolisms, amniotic fluid embolisms, cholesterol embolisms, blue toe syndrome, fat embolisms, pulmonary embolisms, and thromoboembolisms. Thrombosis include coronary thrombosis, hepatic vein thrombosis, deep vein thrombosis, retinal vein occlusion, carotid artery thrombosis, sinus thrombosis, Wallenberg's syndrome, and thrombophlebitis.

[0638] Ischemia includes cerebral ischemia, ischemic colitis, silent ischemia, compartment syndromes, anterior compartment syndrome, myocardial ischemia, reperfusion injuries, and peripheral limb ischemia. Vasculitis includes aortitis, arteritis, Behcet's Syndrome, Churg-Strauss Syndrome, mucocutaneous lymph node syndrome, thromboangiitis obliterans, hypersensitivity vasculitis, Schoenlein-Henoch purpura, allergic cutaneous vasculitis, and Wegener's granulomatosis.

[0639] Cardiovascular diseases can also occur due to electrolyte imbalances that include, but are not limited to hyponatremia, hypernatremia, hypokalemia, hyperkalemia, hypocalcemia, hypercalcemia, hypophosphatemia, and hyperphophatemia. Neoplasm and/or cancers of the cardiovascular system include, but are not limited to, myxomas, fibromas, and rhabdomyomas.

[0640] Polypeptides may be administered using any method known in the art, including, but not limited to, direct needle injection at the delivery site, intravenous injection, topical administration, catheter infusion, biolistic injectors, particle accelerators, gelfoam sponge depots, other commercially available depot materials, osmotic pumps, oral or suppositorial solid pharmaceutical formulations, decanting or topical applications during surgery, aerosol delivery. Such methods are known in the art. Polypeptides may be administered as part of a Therapeutic, described in more detail below. Methods of delivering polynucleotides are described in more detail herein.

[0641] Respiratory Disorders

[0642] Polynucleotides or polypeptides, or agonists or antagonists of the present invention may be used to treat, prevent, diagnose, and/or prognose diseases and/or disorders of the respiratory system.

[0643] Diseases and disorders of the respiratory system include, but are not limited to, nasal vestibulitis, nonallergic rhinitis (e.g., acute rhinitis, chronic rhinitis, atrophic rhinitis, vasomotor rhinitis), nasal polyps, and sinusitis, juvenile angiofibromas, cancer of the nose and juvenile papillomas, vocal cord polyps, nodules (singer's nodules), contact ulcers, vocal cord paralysis, laryngoceles, pharyngitis (e.g., viral and bacterial), tonsillitis, tonsillar cellulitis, parapharyngeal abscess, laryngitis, laryngoceles, and throat cancers (e.g., cancer of the nasopharynx, tonsil cancer, larynx cancer), lung cancer (e.g., squamous cell carcinoma, small cell (oat cell) carcinoma, large cell carcinoma, and adenocarcinoma), allergic disorders (eosinophilic pneumonia, hypersensitivity pneumonitis (e.g., extrinsic allergic alveolitis, allergic interstitial pneumonitis, organic dust pneumoconiosis, allergic bronchopulmonary aspergillosis, asthma, Wegener's granulomatosis (granulomatous vasculitis), Goodpasture's syndrome)), pneumonia (e.g., bacterial pneumonia (e.g., Streptococcus pneumoniae (pneumoncoccal pneumonia), Staphylococcus aureus (staphylococcal pneumonia), Gram-negative bacterial pneumonia (caused by, e.g., Klebsiella and Pseudomas spp.), Mycoplasma pneumoniae pneumonia, Hemophilus influenzae pneumonia, Legionella pneumophila (Legionnaires' disease), and Chlamydia psittaci (Psittacosis)), and viral pneumonia (e.g., influenza, chickenpox (varicella).

[0644] Additional diseases and disorders of the respiratory system include, but are not limited to bronchiolitis, polio (poliomyelitis), croup, respiratory syncytial viral infection, mumps, erythema infectiosum (fifth disease), roseola infantum, progressive rubella panencephalitis, german measles, and subacute sclerosing panencephalitis), fungal pneumonia (e.g., Histoplasmosis, Coccidioidomycosis, Blastomycosis, fungal infections in people with severely suppressed immune systems (e.g., cryptococcosis, caused by Cryptococcus neoformans; aspergillosis, caused by Aspergillus spp.; candidiasis, caused by Candida; and mucormycosis)), Pneumocystis carinii (pneumocystis pneumonia), a typical pneumonias (e.g., Mycoplasma and Chlamydia spp.), opportunistic infection pneumonia, nosocomial pneumonia, chemical pneumonitis, and aspiration pneumonia, pleural disorders (e.g., pleurisy, pleural effusion, and pneumothorax (e.g., simple spontaneous pneumothorax, complicated spontaneous pneumothorax, tension pneumothorax)), obstructive airway diseases (e.g., asthma, chronic obstructive pulmonary disease (COPD), emphysema, chronic or acute bronchitis), occupational lung diseases (e.g., silicosis, black lung (coal workers' pneumoconiosis), asbestosis, berylliosis, occupational asthsma, byssinosis, and benign pneumoconioses), Infiltrative Lung Disease (e.g., pulmonary fibrosis (e.g., fibrosing alveolitis, usual interstitial pneumonia), idiopathic pulmonary fibrosis, desquamative interstitial pneumonia, lymphoid interstitial pneumonia, histiocytosis X (e.g., Letterer-Siwe disease, Hand-Schuller-Christian disease, eosinophilic granuloma), idiopathic pulmonary hemosiderosis, sarcoidosis and pulmonary alveolar proteinosis), Acute respiratory distress syndrome (also called, e.g., adult respiratory distress syndrome), edema, pulmonary embolism, bronchitis (e.g., viral, bacterial), bronchiectasis, atelectasis, lung abscess (caused by, e.g., Staphylococcus aureus or Legionella pneumophila), and cystic fibrosis.

[0645] Anti-Angiogenesis Activity

[0646] The naturally occurring balance between endogenous stimulators and inhibitors of angiogenesis is one in which inhibitory influences predominate. Rastinejad et al., Cell 56:345-355 (1989). In those rare instances in which neovascularization occurs under normal physiological conditions, such as wound healing, organ regeneration, embryonic development, and female reproductive processes, angiogenesis is stringently regulated and spatially and temporally delimited. Under conditions of pathological angiogenesis such as that characterizing solid tumor growth, these regulatory controls fail. Unregulated angiogenesis becomes pathologic and sustains progression of many neoplastic and non-neoplastic diseases. A number of serious diseases are dominated by abnormal neovascularization including solid tumor growth and metastases, arthritis, some types of eye disorders, and psoriasis. See, e.g., reviews by Moses et al., Biotech. 9:630-634 (1991); Folkman et al., N. Engl. J. Med., 333:1757-1763 (1995); Auerbach et al., J. Microvasc. Res. 29:401-411 (1985); Folkman, Advances in Cancer Research, eds. Klein and Weinhouse, Academic Press, New York, pp. 175-203 (1985); Patz, Am. J. Opthalmol. 94:715-743 (1982); and Folkman et al., Science 221:719-725 (1983). In a number of pathological conditions, the process of angiogenesis contributes to the disease state. For example, significant data have accumulated which suggest that the growth of solid tumors is dependent on angiogenesis. Folkman and Klagsbrun, Science 235:442-447 (1987).

[0647] The present invention provides for treatment of diseases or disorders associated with neovascularization by administration of the polynucleotides and/or polypeptides of the invention, as well as agonists or antagonists of the present invention. Malignant and metastatic conditions which can be treated with the polynucleotides and polypeptides, or agonists or antagonists of the invention include, but are not limited to, malignancies, solid tumors, and cancers described herein and otherwise known in the art (for a review of such disorders, see Fishman et al., Medicine, 2d Ed., J. B. Lippincott Co., Philadelphia (1985)). Thus, the present invention provides a method of treating an angiogenesis-related disease and/or disorder, comprising administration to an individual in need thereof a therapeutically effective amount of a polynucleotide, polypeptide, antagonist and/or agonist of the invention. For example, polynucleotides, polypeptides, antagonists and/or agonists may be utilized in a variety of additional methods in order to therapeutically treat a cancer or tumor. Cancers which may be treated with polynucleotides, polypeptides, antagonists and/or agonists include, but are not limited to solid tumors, including prostate, lung, breast, ovarian, stomach, pancreas, larynx, esophagus, testes, liver, parotid, biliary tract, colon, rectum, cervix, uterus, endometrium, kidney, bladder, thyroid cancer; primary tumors and metastases; melanomas; glioblastoma; Kaposi's sarcoma; leiomyosarcoma; non- small cell lung cancer; colon cancer; advanced malignancies; and blood born tumors such as leukemias. For example, polynucleotides, polypeptides, antagonists and/or agonists may be delivered topically, in order to treat cancers such as skin cancer, head and neck tumors, breast tumors, and Kaposi's sarcoma.

[0648] Within yet other aspects, polynucleotides, polypeptides, antagonists and/or agonists may be utilized to treat superficial forms of bladder cancer by, for example, intravesical administration. Polynucleotides, polypeptides, antagonists and/or agonists may be delivered directly into the tumor, or near the tumor site, via injection or a catheter. Of course, as the artisan of ordinary skill will appreciate, the appropriate mode of administration will vary according to the cancer to be treated. Other modes of delivery are discussed herein.

[0649] Polynucleotides, polypeptides, antagonists and/or agonists may be useful in treating other disorders, besides cancers, which involve angiogenesis. These disorders include, but are not limited to: benign tumors, for example hemangiomas, acoustic neuromas, neurofibromas, trachomas, and pyogenic granulomas; artheroscleric plaques; ocular angiogenic diseases, for example, diabetic retinopathy, retinopathy of prematurity, macular degeneration, corneal graft rejection, neovascular glaucoma, retrolental fibroplasia, rubeosis, retinoblastoma, uvietis and Pterygia (abnormal blood vessel growth) of the eye; rheumatoid arthritis; psoriasis; delayed wound healing; endometriosis; vasculogenesis; granulations; hypertrophic scars (keloids); nonunion fractures; scleroderma; trachoma; vascular adhesions; myocardial angiogenesis; coronary collaterals; cerebral collaterals; arteriovenous malformations; ischemic limb angiogenesis; Osler-Webber Syndrome; plaque neovascularization; telangiectasia; hemophiliac joints; angiofibroma; fibromuscular dysplasia; wound granulation; Crohn's disease; and atherosclerosis.

[0650] For example, within one aspect of the present invention methods are provided for treating hypertrophic scars and keloids, comprising the step of administering a polynucleotide, polypeptide, antagonist and/or agonist of the invention to a hypertrophic scar or keloid.

[0651] Within one embodiment of the present invention polynucleotides, polypeptides, antagonists and/or agonists of the invention are directly injected into a hypertrophic scar or keloid, in order to prevent the progression of these lesions. This therapy is of particular value in the prophylactic treatment of conditions which are known to result in the development of hypertrophic scars and keloids (e.g., burns), and is preferably initiated after the proliferative phase has had time to progress (approximately 14 days after the initial injury), but before hypertrophic scar or keloid development. As noted above, the present invention also provides methods for treating neovascular diseases of the eye, including for example, corneal neovascularization, neovascular glaucoma, proliferative diabetic retinopathy, retrolental fibroplasia and macular degeneration.

[0652] Moreover, ocular disorders associated with neovascularization which can be treated with the polynucleotides and polypeptides of the present invention (including agonists and/or antagonists) include, but are not limited to: neovascular glaucoma, diabetic retinopathy, retinoblastoma, retrolental fibroplasia, uveitis, retinopathy of prematurity macular degeneration, corneal graft neovascularization, as well as other eye inflammatory diseases, ocular tumors and diseases associated with choroidal or iris neovascularization. See, e.g., reviews by Waltman et al., Am. J. Ophthal. 85:704-710 (1978) and Gartner et al., Surv. Ophthal. 22:291-312 (1978).

[0653] Thus, within one aspect of the present invention methods are provided for treating neovascular diseases of the eye such as corneal neovascularization (including corneal graft neovascularization), comprising the step of administering to a patient a therapeutically effective amount of a compound (as described above) to the cornea, such that the formation of blood vessels is inhibited. Briefly, the cornea is a tissue, which normally lacks blood vessels. In certain pathological conditions however, capillaries may extend into the cornea from the pericorneal vascular plexus of the limbus. When the cornea becomes vascularized, it also becomes clouded, resulting in a decline in the patient's visual acuity. Visual loss may become complete if the cornea completely opacitates. A wide variety of disorders can result in corneal neovascularization, including for example, corneal infections (e.g., trachoma, herpes simplex keratitis, leishmaniasis and onchocerciasis), immunological processes (e.g., graft rejection and Stevens-Johnson's syndrome), alkali burns, trauma, inflammation (of any cause), toxic and nutritional deficiency states, and as a complication of wearing contact lenses.

[0654] Within particularly preferred embodiments of the invention, may be prepared for topical administration in saline (combined with any of the preservatives and antimicrobial agents commonly used in ocular preparations), and administered in eyedrop form. The solution or suspension may be prepared in its pure form and administered several times daily. Alternatively, anti-angiogenic compositions, prepared as described above, may also be administered directly to the cornea. Within preferred embodiments, the anti-angiogenic composition is prepared with a muco-adhesive polymer, which binds to cornea. Within further embodiments, the anti-angiogenic factors or anti-angiogenic compositions may be utilized as an adjunct to conventional steroid therapy. Topical therapy may also be useful prophylactically in corneal lesions which are known to have a high probability of inducing an angiogenic response (such as chemical burns). In these instances the treatment, likely in combination with steroids, may be instituted immediately to help prevent subsequent complications.

[0655] Within other embodiments, the compounds described above may be injected directly into the corneal stroma by an ophthalmologist under microscopic guidance. The preferred site of injection may vary with the morphology of the individual lesion, but the goal of the administration would be to place the composition at the advancing front of the vasculature (i.e., interspersed between the blood vessels and the normal cornea). In most cases this would involve perilimbic corneal injection to “protect” the cornea from the advancing blood vessels. This method may also be utilized shortly after a corneal insult in order to prophylactically prevent corneal neovascularization. In this situation, the material could be injected in the perilimbic cornea interspersed between the corneal lesion and its undesired potential limbic blood supply. Such methods may also be utilized in a similar fashion to prevent capillary invasion of transplanted corneas. In a sustained-release form, injections might only be required 2-3 times per year. A steroid could also be added to the injection solution to reduce inflammation resulting from the injection itself.

[0656] Within another aspect of the present invention, methods are provided for treating neovascular glaucoma, comprising the step of administering to a patient a therapeutically effective amount of a polynucleotide, polypeptide, antagonist and/or agonist to the eye, such that the formation of blood vessels is inhibited. In one embodiment, the compound may be administered topically to the eye in order to treat early forms of neovascular glaucoma. Within other embodiments, the compound may be implanted by injection into the region of the anterior chamber angle. Within other embodiments, the compound may also be placed in any location such that the compound is continuously released into the aqueous humor. Within another aspect of the present invention, methods are provided for treating proliferative diabetic retinopathy, comprising the step of administering to a patient a therapeutically effective amount of a polynucleotide, polypeptide, antagonist and/or agonist to the eyes, such that the formation of blood vessels is inhibited.

[0657] Within particularly preferred embodiments of the invention, proliferative diabetic retinopathy may be treated by injection into the aqueous humor or the vitreous, in order to increase the local concentration of the polynucleotide, polypeptide, antagonist and/or agonist in the retina. Preferably, this treatment should be initiated prior to the acquisition of severe disease requiring photocoagulation.

[0658] Within another aspect of the present invention, methods are provided for treating retrolental fibroplasia, comprising the step of administering to a patient a therapeutically effective amount of a polynucleotide, polypeptide, antagonist and/or agonist to the eye, such that the formation of blood vessels is inhibited. The compound may be administered topically, via intravitreous injection and/or via intraocular implants.

[0659] Additionally, disorders which can be treated with the polynucleotides, polypeptides, agonists and/or agonists include, but are not limited to, hemangioma, arthritis, psoriasis, angiofibroma, atherosclerotic plaques, delayed wound healing, granulations, hemophilic joints, hypertrophic scars, nonunion fractures, Osler-Weber syndrome, pyogenic granuloma, scleroderma, trachoma, and vascular adhesions.

[0660] Moreover, disorders and/or states, which can be treated, prevented, diagnosed and/or prognosed with the polynucleotides, polypeptides, agonists and/or agonists of the invention include, but are not limited to, solid tumors, blood born tumors such as leukemias, tumor metastasis, Kaposi's sarcoma, benign tumors, for example hemangiomas, acoustic neuromas, neurofibromas, trachomas, and pyogenic granulomas, rheumatoid arthritis, psoriasis, ocular angiogenic diseases, for example, diabetic retinopathy, retinopathy of prematurity, macular degeneration, corneal graft rejection, neovascular glaucoma, retrolental fibroplasia, rubeosis, retinoblastoma, and uvietis, delayed wound healing, endometriosis, vascluogenesis, granulations, hypertrophic scars (keloids), nonunion fractures, scleroderma, trachoma, vascular adhesions, myocardial angiogenesis, coronary collaterals, cerebral collaterals, arteriovenous malformations, ischemic limb angiogenesis, Osler-Webber Syndrome, plaque neovascularization, telangiectasia, hemophiliac joints, angiofibroma fibromuscular dysplasia, wound granulation, Crohn's disease, atherosclerosis, birth control agent by preventing vascularization required for embryo implantation controlling menstruation, diseases that have angiogenesis as a pathologic consequence such as cat scratch disease (Rochele minalia quintosa), ulcers (Helicobacter pylori), Bartonellosis and bacillary angiomatosis.

[0661] In one aspect of the birth control method, an amount of the compound sufficient to block embryo implantation is administered before or after intercourse and fertilization have occurred, thus providing an effective method of birth control, possibly a “morning after” method. Polynucleotides, polypeptides, agonists and/or agonists may also be used in controlling menstruation or administered as either a peritoneal lavage fluid or for peritoneal implantation in the treatment of endometriosis.

[0662] Polynucleotides, polypeptides, agonists and/or agonists of the present invention may be incorporated into surgical sutures in order to prevent stitch granulomas.

[0663] Polynucleotides, polypeptides, agonists and/or agonists may be utilized in a wide variety of surgical procedures. For example, within one aspect of the present invention a compositions (in the form of, for example, a spray or film) may be utilized to coat or spray an area prior to removal of a tumor, in order to isolate normal surrounding tissues from malignant tissue, and/or to prevent the spread of disease to surrounding tissues. Within other aspects of the present invention, compositions (e.g., in the form of a spray) may be delivered via endoscopic procedures in order to coat tumors, or inhibit angiogenesis in a desired locale. Within yet other aspects of the present invention, surgical meshes, which have been coated with anti- angiogenic compositions of the present invention may be utilized in any procedure wherein a surgical mesh might be utilized. For example, within one embodiment of the invention a surgical mesh laden with an anti-angiogenic composition may be utilized during abdominal cancer resection surgery (e.g., subsequent to colon resection) in order to provide support to the structure, and to release an amount of the anti-angiogenic factor.

[0664] Within further aspects of the present invention, methods are provided for treating tumor excision sites, comprising administering a polynucleotide, polypeptide, agonist and/or agonist to the resection margins of a tumor subsequent to excision, such that the local recurrence of cancer and the formation of new blood vessels at the site is inhibited. Within one embodiment of the invention, the anti-angiogenic compound is administered directly to the tumor excision site (e.g., applied by swabbing, brushing or otherwise coating the resection margins of the tumor with the anti-angiogenic compound). Alternatively, the anti-angiogenic compounds may be incorporated into known surgical pastes prior to administration. Within particularly preferred embodiments of the invention, the anti-angiogenic compounds are applied after hepatic resections for malignancy, and after neurosurgical operations.

[0665] Within one aspect of the present invention, polynucleotides, polypeptides, agonists and/or agonists may be administered to the resection margin of a wide variety of tumors, including for example, breast, colon, brain and hepatic tumors. For example, within one embodiment of the invention, anti-angiogenic compounds may be administered to the site of a neurological tumor subsequent to excision, such that the formation of new blood vessels at the site are inhibited.

[0666] The polynucleotides, polypeptides, agonists and/or agonists of the present invention may also be administered along with other anti-angiogenic factors. Representative examples of other anti-angiogenic factors include: Anti-Invasive Factor, retinoic acid and derivatives thereof, paclitaxel, Suramin, Tissue Inhibitor of Metalloproteinase-1, Tissue Inhibitor of Metalloproteinase-2, Plasminogen Activator Inhibitor-1, Plasminogen Activator Inhibitor-2, and various forms of the lighter “d group” transition metals.

[0667] Lighter “d group” transition metals include, for example, vanadium, molybdenum, tungsten, titanium, niobium, and tantalum species. Such transition metal species may form transition metal complexes. Suitable complexes of the above-mentioned transition metal species include oxo transition metal complexes.

[0668] Representative examples of vanadium complexes include oxo vanadium complexes such as vanadate and vanadyl complexes. Suitable vanadate complexes include metavanadate and orthovanadate complexes such as, for example, ammonium metavanadate, sodium metavanadate, and sodium orthovanadate. Suitable vanadyl complexes include, for example, vanadyl acetylacetonate and vanadyl sulfate including vanadyl sulfate hydrates such as vanadyl sulfate mono- and trihydrates.

[0669] Representative examples of tungsten and molybdenum complexes also include oxo complexes. Suitable oxo tungsten complexes include tungstate and tungsten oxide complexes. Suitable tungstate complexes include ammonium tungstate, calcium tungstate, sodium tungstate dihydrate, and tungstic acid. Suitable tungsten oxides include tungsten (IV) oxide and tungsten (VI) oxide. Suitable oxo molybdenum complexes include molybdate, molybdenum oxide, and molybdenyl complexes. Suitable molybdate complexes include ammonium molybdate and its hydrates, sodium molybdate and its hydrates, and potassium molybdate and its hydrates. Suitable molybdenum oxides include molybdenum (VI) oxide, molybdenum (VI) oxide, and molybdic acid. Suitable molybdenyl complexes include, for example, molybdenyl acetylacetonate. Other suitable tungsten and molybdenum complexes include hydroxo derivatives derived from, for example, glycerol, tartaric acid, and sugars.

[0670] A wide variety of other anti-angiogenic factors may also be utilized within the context of the present invention. Representative examples include platelet factor 4; protamine sulphate; sulphated chitin derivatives (prepared from queen crab shells), (Murata et al., Cancer Res. 51:22-26 (1991)); Sulphated Polysaccharide Peptidoglycan Complex (SP-PG) (the function of this compound may be enhanced by the presence of steroids such as estrogen, and tamoxifen citrate); Staurosporine; modulators of matrix metabolism, including for example, proline analogs, cishydroxyproline, d,L-3,4-dehydroproline, Thiaproline, alpha,alpha-dipyridyl, aminopropionitrile fumarate; 4-propyl-5-(4-pyridinyl)-2 (3H)-oxazolone; Methotrexate; Mitoxantrone; Heparin; Interferons; 2 Macroglobulin-serum; ChIMP-3 (Pavloff et al., J. Bio. Chem. 267:17321-17326 (1992)); Chymostatin (Tomkinson et al., Biochem J. 286:475-480 (1992)); Cyclodextrin Tetradecasulfate; Eponemycin; Camptothecin; Fumagillin (Ingber et al., Nature 348:555-557 (1990)); Gold Sodium Thiomalate (“GST”; Matsubara and Ziff, J. Clin. Invest. 79:1440-1446 (1987)); anticollagenase-serum; alpha2-antiplasmin (Holmes et al., J. Biol. Chem. 262(4):1659-1664 (1987)); Bisantrene (National Cancer Institute); Lobenzarit disodium (N-(2)-carboxyphenyl-4-chloroanthronilic acid disodium or “CCA”; Takeuchi et al., Agents Actions 36:312-316, 1992); Thalidomide; Angostatic steroid; AGM-1470; carboxynaminolmidazole; and metalloproteinase inhibitors such as BB94.

[0671] Musculoskeletal System Disorders

[0672] Polynucleotides, polypeptides, antibodies, and/or agonists or antagonists of the present invention, may be used to treat, prevent, diagnose, and/or prognose disorders of the musculoskeletal system, including but not limited to, disorders of the bone, joints, ligaments, tendons, bursa, muscle, and/or neoplasms and cancers associated with musculoskeletal tissue.

[0673] Diseases or disorders of the bone include, but are not limited to, Albers-Schönberg disease, bowlegs, heel spurs, Köhler's bone disease, knock-knees, Legg-Calvé-Perthes disease, Marfan's syndrome, mucopolysaccharidoses, Osgood-Schlatter disease, osteochondroses, osteochondrodysplasia, osteomyelitis, osteopetroses, osteoporosis (postmenopausal, senile, and juvenile), Paget's disease, Scheuermann's disease, scoliosis, Sever's disease, and patellofemoral stress syndrome.

[0674] Joint diseases or disorders include, but are not limited to, ankylosing spondylitis, Behçet's syndrome, CREST syndrome, Ehlers-Danlos syndrome, infectious arthritis, discoid lupus erythematosus, systemic lupus erythematosus, Lyme disease, osteoarthritis, psoriatic arthritis, relapsing polychondrites, Reiter's syndrome, rheumatoid arthritis (adult and juvenile), scleroderma, and Still's disease.

[0675] Diseases or disorders affecting ligaments, tendons, or bursa include, but are not limited to, ankle sprain, bursitis, posterior Achilles tendon bursitis (Haglund's deformity), anterior Achilles tendon bursitis (Albert's disease), tendinitis, tenosynovitis, poplieus tendinitis, Achilles tendinitis, medial or lateral epicondylitis, rotator cuff tendinitis, spasmodic torticollis, and fibromyalgia syndrome.

[0676] Muscle diseases or disorders include, but are not limited to, Becker's muscular dystrophy, Duchenne's muscular dystrophy, Landouzy-Dejerine muscular dystrophy, Leyden-Möbius muscular dystrophy, Erb's muscular dystrophy, Charcot's joints, dermatomyositis, gout, pseudogout, glycogen storage diseases, Pompe's disease, mitochondrial myopathy, periodic paralysis, polymyalgia rheumatica, polymyositis, Steinert's disease, Thomsen's disease, anterolateral and posteromedial shin splints, posterior femoral muscle strain, and fibromyositis.

[0677] Musculoskeletal tissue may also develop cancers and/or neoplasms that include, but are not limited to, osteochondroma, benign chondroma, chondroblastoma, chondromyxoid fibroma, osteoid osteoma, giant cell tumor, multiple myeloma, osteosarcoma, fibrosarcoma, malignant fibrous histiocytoma, chondrosarcoma, Ewing's tumor, and malignant lymphoma of bone.

[0678] Neural Activity and Neurological Diseases

[0679] The polynucleotides, polypeptides and agonists or antagonists of the invention may be used for the diagnosis and/or treatment of diseases, disorders, damage or injury of the brain and/or nervous system. Nervous system disorders that can be treated with the compositions of the invention (e.g., polypeptides, polynucleotides, and/or agonists or antagonists), include, but are not limited to, nervous system injuries, and diseases or disorders which result in either a disconnection of axons, a diminution or degeneration of neurons, or demyelination. Nervous system lesions which may be treated in a patient (including human and non-human mammalian patients) according to the methods of the invention, include but are not limited to, the following lesions of either the central (including spinal cord, brain) or peripheral nervous systems: (1) ischemic lesions, in which a lack of oxygen in a portion of the nervous system results in neuronal injury or death, including cerebral infarction or ischemia, or spinal cord infarction or ischemia; (2) traumatic lesions, including lesions caused by physical injury or associated with surgery, for example, lesions which sever a portion of the nervous system, or compression injuries; (3) malignant lesions, in which a portion of the nervous system is destroyed or injured by malignant tissue which is either a nervous system associated malignancy or a malignancy derived from non-nervous system tissue; (4) infectious lesions, in which a portion of the nervous system is destroyed or injured as a result of infection, for example, by an abscess or associated with infection by human immunodeficiency virus, herpes zoster, or herpes simplex virus or with Lyme disease, tuberculosis, or syphilis; (5) degenerative lesions, in which a portion of the nervous system is destroyed or injured as a result of a degenerative process including but not limited to, degeneration associated with Parkinson's disease, Alzheimer's disease, Huntington's chorea, or amyotrophic lateral sclerosis (ALS); (6) lesions associated with nutritional diseases or disorders, in which a portion of the nervous system is destroyed or injured by a nutritional disorder or disorder of metabolism including, but not limited to, vitamin B12 deficiency, folic acid deficiency, Wernicke disease, tobacco-alcohol amblyopia, Marchiafava-Bignami disease (primary degeneration of the corpus callosum), and alcoholic cerebellar degeneration; (7) neurological lesions associated with systemic diseases including, but not limited to, diabetes (diabetic neuropathy, Bell's palsy), systemic lupus erythematosus, carcinoma, or sarcoidosis; (8) lesions caused by toxic substances including alcohol, lead, or particular neurotoxins; and (9) demyelinated lesions in which a portion of the nervous system is destroyed or injured by a demyelinating disease including, but not limited to, multiple sclerosis, human immunodeficiency virus-associated myelopathy, transverse myelopathy or various etiologies, progressive multifocal leukoencephalopathy, and central pontine myelinolysis.

[0680] In one embodiment, the polypeptides, polynucleotides, or agonists or antagonists of the invention are used to protect neural cells from the damaging effects of hypoxia. In a further preferred embodiment, the polypeptides, polynucleotides, or agonists or antagonists of the invention are used to protect neural cells from the damaging effects of cerebral hypoxia. According to this embodiment, the compositions of the invention are used to treat or prevent neural cell injury associated with cerebral hypoxia. In one non-exclusive aspect of this embodiment, the polypeptides, polynucleotides, or agonists or antagonists of the invention, are used to treat or prevent neural cell injury associated with cerebral ischemia. In another non-exclusive aspect of this embodiment, the polypeptides, polynucleotides, or agonists or antagonists of the invention are used to treat or prevent neural cell injury associated with cerebral infarction.

[0681] In another preferred embodiment, the polypeptides, polynucleotides, or agonists or antagonists of the invention are used to treat or prevent neural cell injury associated with a stroke. In a specific embodiment, the polypeptides, polynucleotides, or agonists or antagonists of the invention are used to treat or prevent cerebral neural cell injury associated with a stroke.

[0682] In another preferred embodiment, the polypeptides, polynucleotides, or agonists or antagonists of the invention are used to treat or prevent neural cell injury associated with a heart attack. In a specific embodiment, the polypeptides, polynucleotides, or agonists or antagonists of the invention are used to treat or prevent cerebral neural cell injury associated with a heart attack.

[0683] The compositions of the invention which are useful for treating or preventing a nervous system disorder may be selected by testing for biological activity in promoting the survival or differentiation of neurons. For example, and not by way of limitation, compositions of the invention which elicit any of the following effects may be useful according to the invention: (1) increased survival time of neurons in culture either in the presence or absence of hypoxia or hypoxic conditions; (2) increased sprouting of neurons in culture or in vivo; (3) increased production of a neuron-associated molecule in culture or in vivo, e.g., choline acetyltransferase or acetylcholinesterase with respect to motor neurons; or (4) decreased symptoms of neuron dysfunction in vivo. Such effects may be measured by any method known in the art. In preferred, non-limiting embodiments, increased survival of neurons may routinely be measured using a method set forth herein or otherwise known in the art, such as, for example, in Zhang et al., Proc Natl Acad Sci USA 97:3637-42 (2000) or in Arakawa et al., J. Neurosci., 10:3507-15 (1990); increased sprouting of neurons may be detected by methods known in the art, such as, for example, the methods set forth in Pestronk et al., Exp. Neurol., 70:65-82 (1980), or Brown et al., Ann. Rev. Neurosci., 4:17-42 (1981); increased production of neuron-associated molecules may be measured by bioassay, enzymatic assay, antibody binding, Northern blot assay, etc., using techniques known in the art and depending on the molecule to be measured; and motor neuron dysfunction may be measured by assessing the physical manifestation of motor neuron disorder, e.g., weakness, motor neuron conduction velocity, or functional disability.

[0684] In specific embodiments, motor neuron disorders that may be treated according to the invention include, but are not limited to, disorders such as infarction, infection, exposure to toxin, trauma, surgical damage, degenerative disease or malignancy that may affect motor neurons as well as other components of the nervous system, as well as disorders that selectively affect neurons such as amyotrophic lateral sclerosis, and including, but not limited to, progressive spinal muscular atrophy, progressive bulbar palsy, primary lateral sclerosis, infantile and juvenile muscular atrophy, progressive bulbar paralysis of childhood (Fazio-Londe syndrome), poliomyelitis and the post polio syndrome, and Hereditary Motorsensory Neuropathy (Charcot-Marie-Tooth Disease).

[0685] Further, polypeptides or polynucleotides of the invention may play a role in neuronal survival; synapse formation; conductance; neural differentiation, etc. Thus, compositions of the invention (including polynucleotides, polypeptides, and agonists or antagonists) may be used to diagnose and/or treat or prevent diseases or disorders associated with these roles, including, but not limited to, learning and/or cognition disorders. The compositions of the invention may also be useful in the treatment or prevention of neurodegenerative disease states and/or behavioural disorders. Such neurodegenerative disease states and/or behavioral disorders include, but are not limited to, Alzheimer's Disease, Parkinson's Disease, Huntington's Disease, Tourette Syndrome, schizophrenia, mania, dementia, paranoia, obsessive compulsive disorder, panic disorder, learning disabilities, ALS, psychoses, autism, and altered behaviors, including disorders in feeding, sleep patterns, balance, and perception. In addition, compositions of the invention may also play a role in the treatment, prevention and/or detection of developmental disorders associated with the developing embryo, or sexually-linked disorders.

[0686] Additionally, polypeptides, polynucleotides and/or agonists or antagonists of the invention, may be useful in protecting neural cells from diseases, damage, disorders, or injury, associated with cerebrovascular disorders including, but not limited to, carotid artery diseases (e.g., carotid artery thrombosis, carotid stenosis, or Moyamoya Disease), cerebral amyloid angiopathy, cerebral aneurysm, cerebral anoxia, cerebral arteriosclerosis, cerebral arteriovenous malformations, cerebral artery diseases, cerebral embolism and thrombosis (e.g., carotid artery thrombosis, sinus thrombosis, or Wallenberg's Syndrome), cerebral hemorrhage (e.g., epidural or subdural hematoma, or subarachnoid hemorrhage), cerebral infarction, cerebral ischemia (e.g., transient cerebral ischemia, Subclavian Steal Syndrome, or vertebrobasilar insufficiency), vascular dementia (e.g., multi-infarct), leukomalacia, periventricular, and vascular headache (e.g., cluster headache or migraines).

[0687] In accordance with yet a further aspect of the present invention, there is provided a process for utilizing polynucleotides or polypeptides, as well as agonists or antagonists of the present invention, for therapeutic purposes, for example, to stimulate neurological cell proliferation and/or differentiation. Therefore, polynucleotides, polypeptides, agonists and/or antagonists of the invention may be used to treat and/or detect neurologic diseases. Moreover, polynucleotides or polypeptides, or agonists or antagonists of the invention, can be used as a marker or detector of a particular nervous system disease or disorder.

[0688] Examples of neurologic diseases which can be treated or detected with polynucleotides, polypeptides, agonists, and/or antagonists of the present invention include brain diseases, such as metabolic brain diseases which includes phenylketonuria such as maternal phenylketonuria, pyruvate carboxylase deficiency, pyruvate dehydrogenase complex deficiency, Wernicke's Encephalopathy, brain edema, brain neoplasms such as cerebellar neoplasms which include infratentorial neoplasms, cerebral ventricle neoplasms such as choroid plexus neoplasms, hypothalamic neoplasms, supratentorial neoplasms, canavan disease, cerebellar diseases such as cerebellar ataxia which include spinocerebellar degeneration such as ataxia telangiectasia, cerebellar dyssynergia, Friederich's Ataxia, Machado-Joseph Disease, olivopontocerebellar atrophy, cerebellar neoplasms such as infratentorial neoplasms, diffuse cerebral sclerosis such as encephalitis periaxialis, globoid cell leukodystrophy, metachromatic leukodystrophy and subacute sclerosing panencephalitis.

[0689] Additional neurologic diseases which can be treated or detected with polynucleotides, polypeptides, agonists, and/or antagonists of the present invention include cerebrovascular disorders (such as carotid artery diseases which include carotid artery thrombosis, carotid stenosis and Moyamoya Disease), cerebral amyloid angiopathy, cerebral aneurysm, cerebral anoxia, cerebral arteriosclerosis, cerebral arteriovenous malformations, cerebral artery diseases, cerebral embolism and thrombosis such as carotid artery thrombosis, sinus thrombosis and Wallenberg's Syndrome, cerebral hemorrhage such as epidural hematoma, subdural hematoma and subarachnoid hemorrhage, cerebral infarction, cerebral ischemia such as transient cerebral ischemia, Subclavian Steal Syndrome and vertebrobasilar insufficiency, vascular dementia such as multi-infarct dementia, periventricular leukomalacia, vascular headache such as cluster headache and migraine.

[0690] Additional neurologic diseases which can be treated or detected with polynucleotides, polypeptides, agonists, and/or antagonists of the present invention include dementia such as AIDS Dementia Complex, presenile dementia such as Alzheimer's Disease and Creutzfeldt-Jakob Syndrome, senile dementia such as Alzheimer's Disease and progressive supranuclear palsy, vascular dementia such as multi-infarct dementia, encephalitis which include encephalitis periaxialis, viral encephalitis such as epidemic encephalitis, Japanese Encephalitis, St. Louis Encephalitis, tick-borne encephalitis and West Nile Fever, acute disseminated encephalomyelitis, meningoencephalitis such as uveomeningoencephalitic syndrome, Postencephalitic Parkinson Disease and subacute sclerosing panencephalitis, encephalomalacia such as periventricular leukomalacia, epilepsy such as generalized epilepsy which includes infantile spasms, absence epilepsy, myoclonic epilepsy which includes MERRF Syndrome, tonic-clonic epilepsy, partial epilepsy such as complex partial epilepsy, frontal lobe epilepsy and temporal lobe epilepsy, post-traumatic epilepsy, status epilepticus such as Epilepsia Partialis Continua, and Hallervorden-Spatz Syndrome.

[0691] Additional neurologic diseases which can be treated or detected with polynucleotides, polypeptides, agonists, and/or antagonists of the present invention include hydrocephalus such as Dandy-Walker Syndrome and normal pressure hydrocephalus, hypothalamic diseases such as hypothalamic neoplasms, cerebral malaria, narcolepsy which includes cataplexy, bulbar poliomyelitis, cerebri pseudotumor, Rett Syndrome, Reye's Syndrome, thalamic diseases, cerebral toxoplasmosis, intracranial tuberculoma and Zellweger Syndrome, central nervous system infections such as AIDS Dementia Complex, Brain Abscess, subdural empyema, encephalomyelitis such as Equine Encephalomyelitis, Venezuelan Equine Encephalomyelitis, Necrotizing Hemorrhagic Encephalomyelitis, Visna, and cerebral malaria.

[0692] Additional neurologic diseases which can be treated or detected with polynucleotides, polypeptides, agonists, and/or antagonists of the present invention include meningitis such as arachnoiditis, aseptic meningtitis such as viral meningtitis which includes lymphocytic choriomeningitis, Bacterial meningtitis which includes Haemophilus Meningtitis, Listeria Meningtitis, Meningococcal Meningtitis such as Waterhouse-Friderichsen Syndrome, Pneumococcal Meningtitis and meningeal tuberculosis, fungal meningitis such as Cryptococcal Meningtitis, subdural effusion, meningoencephalitis such as uvemeningoencephalitic syndrome, myelitis such as transverse myelitis, neurosyphilis such as tabes dorsalis, poliomyelitis which includes bulbar poliomyelitis and postpoliomyelitis syndrome, prion diseases (such as Creutzfeldt-Jakob Syndrome, Bovine Spongiform Encephalopathy, Gerstmann-Straussler Syndrome, Kuru, Scrapie), and cerebral toxoplasmosis.

[0693] Additional neurologic diseases which can be treated or detected with polynucleotides, polypeptides, agonists, and/or antagonists of the present invention include central nervous system neoplasms such as brain neoplasms that include cerebellar neoplasms such as infratentorial neoplasms, cerebral ventricle neoplasms such as choroid plexus neoplasms, hypothalamic neoplasms and supratentorial neoplasms, meningeal neoplasms, spinal cord neoplasms which include epidural neoplasms, demyelinating diseases such as Canavan Diseases, diffuse cerebral sceloris which includes adrenoleukodystrophy, encephalitis periaxialis, globoid cell leukodystrophy, diffuse cerebral sclerosis such as metachromatic leukodystrophy, allergic encephalomyelitis, necrotizing hemorrhagic encephalomyelitis, progressive multifocal leukoencephalopathy, multiple sclerosis, central pontine myelinolysis, transverse myelitis, neuromyelitis optica, Scrapie, Swayback, Chronic Fatigue Syndrome, Visna, High Pressure Nervous Syndrome, Meningism, spinal cord diseases such as amyotonia congenita, amyotrophic lateral sclerosis, spinal muscular atrophy such as Werdnig-Hoffinann Disease, spinal cord compression, spinal cord neoplasms such as epidural neoplasms, syringomyelia, Tabes Dorsalis, Stiff-Man Syndrome, mental retardation such as Angelman Syndrome, Cri-du-Chat Syndrome, De Lange's Syndrome, Down Syndrome, Gangliosidoses such as gangliosidoses G(M1), Sandhoff Disease, Tay-Sachs Disease, Hartnup Disease, homocystinuria, Laurence-Moon-Biedl Syndrome, Lesch-Nyhan Syndrome, Maple Syrup Urine Disease, mucolipidosis such as fucosidosis, neuronal ceroid-lipofuscinosis, oculocerebrorenal syndrome, phenylketonuria such as maternal phenylketonuria, Prader-Willi Syndrome, Rett Syndrome, Rubinstein-Taybi Syndrome, Tuberous Sclerosis, WAGR Syndrome, nervous system abnormalities such as holoprosencephaly, neural tube defects such as anencephaly which includes hydrangencephaly, Arnold-Chairi Deformity, encephalocele, meningocele, meningomyelocele, spinal dysraphism such as spina bifida cystica and spina bifida occulta.

[0694] Additional neurologic diseases which can be treated or detected with polynucleotides, polypeptides, agonists, and/or antagonists of the present invention include hereditary motor and sensory neuropathies which include Charcot-Marie Disease, Hereditary optic atrophy, Refsum's Disease, hereditary spastic paraplegia, Werdnig-Hoffmann Disease, Hereditary Sensory and Autonomic Neuropathies such as Congenital Analgesia and Familial Dysautonomia, Neurologic manifestations (such as agnosia that include Gerstmann's Syndrome, Amnesia such as retrograde amnesia, apraxia, neurogenic bladder, cataplexy, communicative disorders such as hearing disorders that includes deaffiess, partial hearing loss, loudness recruitment and tinnitus, language disorders such as aphasia which include agraphia, anomia, broca aphasia, and Wernicke Aphasia, Dyslexia such as Acquired Dyslexia, language development disorders, speech disorders such as aphasia which includes anomia, broca aphasia and Wernicke Aphasia, articulation disorders, communicative disorders such as speech disorders which include dysarthria, echolalia, mutism and stuttering, voice disorders such as aphonia and hoarseness, decerebrate state, delirium, fasciculation, hallucinations, meningism, movement disorders such as angelman syndrome, ataxia, athetosis, chorea, dystonia, hypokinesia, muscle hypotonia, myoclonus, tic, torticollis and tremor, muscle hypertonia such as muscle rigidity such as stiff-man syndrome, muscle spasticity, paralysis such as facial paralysis which includes Herpes Zoster Oticus, Gastroparesis, Hemiplegia, ophthalmoplegia such as diplopia, Duane's Syndrome, Horner's Syndrome, Chronic progressive external ophthalmoplegia such as Kearns Syndrome, Bulbar Paralysis, Tropical Spastic Paraparesis, Paraplegia such as Brown-Sequard Syndrome, quadriplegia, respiratory paralysis and vocal cord paralysis, paresis, phantom limb, taste disorders such as ageusia and dysgeusia, vision disorders such as amblyopia, blindness, color vision defects, diplopia, hemianopsia, scotoma and subnormal vision, sleep disorders such as hypersomnia which includes Kleine-Levin Syndrome, insomnia, and somnambulism, spasm such as trismus, unconsciousness such as coma, persistent vegetative state and syncope and vertigo, neuromuscular diseases such as amyotonia congenita, amyotrophic lateral sclerosis, Lambert-Eaton Myasthenic Syndrome, motor neuron disease, muscular atrophy such as spinal muscular atrophy, Charcot-Marie Disease and Werdnig-Hoffinann Disease, Postpoliomyelitis Syndrome, Muscular Dystrophy, Myasthenia Gravis, Myotonia Atrophica, Myotonia Confenita, Nemaline Myopathy, Familial Periodic Paralysis, Multiplex Paramyloclonus, Tropical Spastic Paraparesis and Stiff-Man Syndrome, peripheral nervous system diseases such as acrodynia, amyloid neuropathies, autonomic nervous system diseases such as Adie's Syndrome, Barre-Lieou Syndrome, Familial Dysautonomia, Horner's Syndrome, Reflex Sympathetic Dystrophy and Shy-Drager Syndrome, Cranial Nerve Diseases such as Acoustic Nerve Diseases such as Acoustic Neuroma which includes Neurofibromatosis 2, Facial Nerve Diseases such as Facial Neuralgia,Melkersson-Rosenthal Syndrome, ocular motility disorders which includes amblyopia, nystagmus, oculomotor nerve paralysis, ophthalmoplegia such as Duane's Syndrome, Horner's Syndrome, Chronic Progressive External Ophthalmoplegia which includes Kearns Syndrome, Strabismus such as Esotropia and Exotropia, Oculomotor Nerve Paralysis, Optic Nerve Diseases such as Optic Atrophy which includes Hereditary Optic Atrophy, Optic Disk Drusen, Optic Neuritis such as Neuromyelitis Optica, Papilledema, Trigeminal Neuralgia, Vocal Cord Paralysis, Demyelinating Diseases such as Neuromyelitis Optica and Swayback, and Diabetic neuropathies such as diabetic foot.

[0695] Additional neurologic diseases which can be treated or detected with polynucleotides, polypeptides, agonists, and/or antagonists of the present invention include nerve compression syndromes such as carpal tunnel syndrome, tarsal tunnel syndrome, thoracic outlet syndrome such as cervical rib syndrome, ulnar nerve compression syndrome, neuralgia such as causalgia, cervico-brachial neuralgia, facial neuralgia and trigeminal neuralgia, neuritis such as experimental allergic neuritis, optic neuritis, polyneuritis, polyradiculoneuritis and radiculities such as polyradiculitis, hereditary motor and sensory neuropathies such as Charcot-Marie Disease, Hereditary Optic Atrophy, Refsum's Disease, Hereditary Spastic Paraplegia and Werdnig-Hoffmann Disease, Hereditary Sensory and Autonomic Neuropathies which include Congenital Analgesia and Familial Dysautonomia, POEMS Syndrome, Sciatica, Gustatory Sweating and Tetany).

[0696] Endocrine Disorders

[0697] Polynucleotides or polypeptides, or agonists or antagonists of the present invention, may be used to treat, prevent, diagnose, and/or prognose disorders and/or diseases related to hormone imbalance, and/or disorders or diseases of the endocrine system.

[0698] Hormones secreted by the glands of the endocrine system control physical growth, sexual function, metabolism, and other functions. Disorders may be classified in two ways: disturbances in the production of hormones, and the inability of tissues to respond to hormones. The etiology of these hormone imbalance or endocrine system diseases, disorders or conditions may be genetic, somatic, such as cancer and some autoimmune diseases, acquired (e.g., by chemotherapy, injury or toxins), or infectious. Moreover, polynucleotides, polypeptides, antibodies, and/or agonists or antagonists of the present invention can be used as a marker or detector of a particular disease or disorder related to the endocrine system and/or hormone imbalance.

[0699] Endocrine system and/or hormone imbalance and/or diseases encompass disorders of uterine motility including, but not limited to: complications with pregnancy and labor (e.g., pre-term labor, post-term pregnancy, spontaneous abortion, and slow or stopped labor); and disorders and/or diseases of the menstrual cycle (e.g., dysmenorrhea and endometriosis).

[0700] Endocrine system and/or hormone imbalance disorders and/or diseases include disorders and/or diseases of the pancreas, such as, for example, diabetes mellitus, diabetes insipidus, congenital pancreatic agenesis, pheochromocytoma—islet cell tumor syndrome; disorders and/or diseases of the adrenal glands such as, for example, Addison's Disease, corticosteroid deficiency, virilizing disease, hirsutism, Cushing's Syndrome, hyperaldosteronism, pheochromocytoma; disorders and/or diseases of the pituitary gland, such as, for example, hyperpituitarism, hypopituitarism, pituitary dwarfism, pituitary adenoma, panhypopituitarism, acromegaly, gigantism; disorders and/or diseases of the thyroid, including but not limited to, hyperthyroidism, hypothyroidism, Plummer's disease, Graves' disease (toxic diffuse goiter), toxic nodular goiter, thyroiditis (Hashimoto's thyroiditis, subacute granulomatous thyroiditis, and silent lymphocytic thyroiditis), Pendred's syndrome, myxedema, cretinism, thyrotoxicosis, thyroid hormone coupling defect, thymic aplasia, Hurthle cell tumours of the thyroid, thyroid cancer, thyroid carcinoma, Medullary thyroid carcinoma; disorders and/or diseases of the parathyroid, such as, for example, hyperparathyroidism, hypoparathyroidism; disorders and/or diseases of the hypothalamus.

[0701] In addition, endocrine system and/or hormone imbalance disorders and/or diseases may also include disorders and/or diseases of the testes or ovaries, including cancer. Other disorders and/or diseases of the testes or ovaries further include, for example, ovarian cancer, polycystic ovary syndrome, Klinefelter's syndrome, vanishing testes syndrome (bilateral anorchia), congenital absence of Leydig's cells, cryptorchidism, Noonan's syndrome, myotonic dystrophy, capillary haemangioma of the testis (benign), neoplasias of the testis and neo-testis.

[0702] Moreover, endocrine system and/or hormone imbalance disorders and/or diseases may also include disorders and/or diseases such as, for example, polyglandular deficiency syndromes, pheochromocytoma, neuroblastoma, multiple Endocrine neoplasia, and disorders and/or cancers of endocrine tissues.

[0703] In another embodiment, a polypeptide of the invention, or polynucleotides, antibodies, agonists, or antagonists corresponding to that polypeptide, may be used to diagnose, prognose, prevent, and/or treat endocrine diseases and/or disorders associated with the tissue(s) in which the polypeptide of the invention is expressed, including one, two, three, four, five, or more tissues disclosed in Table 1A, column 8 (Tissue Distribution Library Code).

[0704] Reproductive System Disorders

[0705] The polynucleotides or polypeptides, or agonists or antagonists of the invention may be used for the diagnosis, treatment, or prevention of diseases and/or disorders of the reproductive system. Reproductive system disorders that can be treated by the compositions of the invention, include, but are not limited to, reproductive system injuries, infections, neoplastic disorders, congenital defects, and diseases or disorders which result in infertility, complications with pregnancy, labor, or parturition, and postpartum difficulties.

[0706] Reproductive system disorders and/or diseases include diseases and/or disorders of the testes, including, but not limited to, testicular atrophy, testicular feminization, cryptorchism (unilateral and bilateral), anorchia, ectopic testis, epididymitis and orchitis (typically resulting from infections such as, for example, gonorrhea, mumps, tuberculosis, and syphilis), testicular torsion, vasitis nodosa, germ cell tumors (e.g., seminomas, embryonal cell carcinomas, teratocarcinomas, choriocarcinomas, yolk sac tumors, and teratomas), stromal tumors (e.g., Leydig cell tumors), hydrocele, hematocele, varicocele, spermatocele, inguinal hernia, and disorders of sperm production (e.g., immotile cilia syndrome, aspermia, asthenozoospermia, azoospermia, oligospermia, and teratozoospermia).

[0707] Reproductive system disorders also include, but are not limited to, disorders of the prostate gland, such as acute non-bacterial prostatitis, chronic non-bacterial prostatitis, acute bacterial prostatitis, chronic bacterial prostatitis, prostatodystonia, prostatosis, granulomatous prostatitis, malacoplakia, benign prostatic hypertrophy or hyperplasia, and prostate neoplastic disorders, including adenocarcinomas, transitional cell carcinomas, ductal carcinomas, and squamous cell carcinomas.

[0708] Additionally, the compositions of the invention may be useful in the diagnosis, treatment, and/or prevention of disorders or diseases of the penis and urethra, including, but not limited to, inflammatory disorders, such as balanoposthitis, balanitis xerotica obliterans, phimosis, paraphimosis, syphilis, herpes simplex virus, gonorrhea, non-gonococcal urethritis, chlamydia, mycoplasma, trichomonas, HIV, AIDS, Reiter's syndrome, condyloma acuminatum, condyloma latum, and pearly penile papules; urethral abnormalities, such as hypospadias, epispadias, and phimosis; premalignant lesions, including Erythroplasia of Queyrat, Bowen's disease, Bowenoid paplosis, giant condyloma of Buscke-Lowenstein, and varrucous carcinoma; penile cancers, including squamous cell carcinomas, carcinoma in situ, verrucous carcinoma, and disseminated penile carcinoma; urethral neoplastic disorders, including penile urethral carcinoma, bulbomembranous urethral carcinoma, and prostatic urethral carcinoma; and erectile disorders, such as priapism, Peyronie's disease, erectile dysfunction, and impotence.

[0709] Moreover, diseases and/or disorders of the vas deferens include, but are not limited to, vasculititis and CBAVD (congenital bilateral absence of the vas deferens); additionally, the polynucleotides, polypeptides, and agonists or antagonists of the present invention may be used in the diagnosis, treatment, and/or prevention of diseases and/or disorders of the seminal vesicles, including but not limited to, hydatid disease, congenital chloride diarrhea, and polycystic kidney disease.

[0710] Other disorders and/or diseases of the male reproductive system that may be diagnosed, treated, and/or prevented with the compositions of the invention include, but are not limited to, Klinefelter's syndrome, Young's syndrome, premature ejaculation, diabetes mellitus, cystic fibrosis, Kartagener's syndrome, high fever, multiple sclerosis, and gynecomastia.

[0711] Further, the polynucleotides, polypeptides, and agonists or antagonists of the present invention may be used in the diagnosis, treatment, and/or prevention of diseases and/or disorders of the vagina and vulva, including, but not limited to, bacterial vaginosis, candida vaginitis, herpes simplex virus, chancroid, granuloma inguinale, lymphogranuloma venereum, scabies, human papillomavirus, vaginal trauma, vulvar trauma, adenosis, chlamydia vaginitis, gonorrhea, trichomonas vaginitis, condyloma acuminatum, syphilis, molluscum contagiosum, atrophic vaginitis, Paget's disease, lichen sclerosus, lichen planus, vulvodynia, toxic shock syndrome, vaginismus, vulvovaginitis, vulvar vestibulitis, and neoplastic disorders, such as squamous cell hyperplasia, clear cell carcinoma, basal cell carcinoma, melanomas, cancer of Bartholin's gland, and vulvar intraepithelial neoplasia.

[0712] Disorders and/or diseases of the uterus that may be diagnosed, treated, and/or prevented with the compositions of the invention include, but are not limited to, dysmenorrhea, retroverted uterus, endometriosis, fibroids, adenomyosis, anovulatory bleeding, amenorrhea, Cushing's syndrome, hydatidiform moles, Asherman's syndrome, premature menopause, precocious puberty, uterine polyps, dysfunctional uterine bleeding (e.g., due to aberrant hormonal signals), and neoplastic disorders, such as adenocarcinomas, keiomyosarcomas, and sarcomas. Additionally, the polypeptides, polynucleotides, or agonists or antagonists of the invention may be useful as a marker or detector of, as well as in the diagnosis, treatment, and/or prevention of congenital uterine abnormalities, such as bicornuate uterus, septate uterus, simple unicornuate uterus, unicornuate uterus with a noncavitary rudimentary horn, unicornuate uterus with a non-communicating cavitary rudimentary horn, unicornuate uterus with a communicating cavitary horn, arcuate uterus, uterine didelfus, and T-shaped uterus.

[0713] Ovarian diseases and/or disorders that may be diagnosed, treated, and/or prevented with the compositions of the invention include, but are not limited to, anovulation, polycystic ovary syndrome (Stein-Leventhal syndrome), ovarian cysts, ovarian hypofunction, ovarian insensitivity to gonadotropins, ovarian overproduction of androgens, right ovarian vein syndrome, amenorrhea, hirutism, and ovarian cancer (including, but not limited to, primary and secondary cancerous growth, Sertoli-Leydig tumors, endometriod carcinoma of the ovary, ovarian papillary serous adenocarcinoma, ovarian mucinous adenocarcinoma, and Ovarian Krukenberg tumors).

[0714] Cervical diseases and/or disorders that may be diagnosed, treated, and/or prevented with the compositions of the invention include, but are not limited to, cervicitis, chronic cervicitis, mucopurulent cervicitis, cervical dysplasia, cervical polyps, Nabothian cysts, cervical erosion, cervical incompetence, and cervical neoplasms (including, for example, cervical carcinoma, squamous metaplasia, squamous cell carcinoma, adenosquamous cell neoplasia, and columnar cell neoplasia).

[0715] Additionally, diseases and/or disorders of the reproductive system that may be diagnosed, treated, and/or prevented with the compositions of the invention include, but are not limited to, disorders and/or diseases of pregnancy, including miscarriage and stillbirth, such as early abortion, late abortion, spontaneous abortion, induced abortion, therapeutic abortion, threatened abortion, missed abortion, incomplete abortion, complete abortion, habitual abortion, missed abortion, and septic abortion; ectopic pregnancy, anemia, Rh incompatibility, vaginal bleeding during pregnancy, gestational diabetes, intrauterine growth retardation, polyhydramnios, HELLP syndrome, abruptio placentae, placenta previa, hyperemesis, preeclampsia, eclampsia, herpes gestationis, and urticaria of pregnancy. Additionally, the polynucleotides, polypeptides, and agonists or antagonists of the present invention may be used in the diagnosis, treatment, and/or prevention of diseases that can complicate pregnancy, including heart disease, heart failure, rheumatic heart disease, congenital heart disease, mitral valve prolapse, high blood pressure, anemia, kidney disease, infectious disease (e.g., rubella, cytomegalovirus, toxoplasmosis, infectious hepatitis, chlamydia, HIV, AIDS, and genital herpes), diabetes mellitus, Graves' disease, thyroiditis, hypothyroidism, Hashimoto's thyroiditis, chronic active hepatitis, cirrhosis of the liver, primary biliary cirrhosis, asthma, systemic lupus eryematosis, rheumatoid arthritis, myasthenia gravis, idiopathic thrombocytopenic purpura, appendicitis, ovarian cysts, gallbladder disorders, and obstruction of the intestine.

[0716] Complications associated with labor and parturition that may be diagnosed, treated, and/or prevented with the compositions of the invention include, but are not limited to, premature rupture of the membranes, pre-term labor, post-term pregnancy, postmaturity, labor that progresses too slowly, fetal distress (e.g., abnormal heart rate (fetal or maternal), breathing problems, and abnormal fetal position), shoulder dystocia, prolapsed umbilical cord, amniotic fluid embolism, and aberrant uterine bleeding.

[0717] Further, diseases and/or disorders of the postdelivery period, that may be diagnosed, treated, and/or prevented with the compositions of the invention, include, but are not limited to, endometritis, myometritis, parametritis, peritonitis, pelvic thrombophlebitis, pulmonary embolism, endotoxemia, pyelonephritis, saphenous thrombophlebitis, mastitis, cystitis, postpartum hemorrhage, and inverted uterus.

[0718] Other disorders and/or diseases of the female reproductive system that may be diagnosed, treated, and/or prevented by the polynucleotides, polypeptides, and agonists or antagonists of the present invention include, but are not limited to, Turner's syndrome, pseudohermaphroditism, premenstrual syndrome, pelvic inflammatory disease, pelvic congestion (vascular engorgement), frigidity, anorgasmia, dyspareunia, ruptured fallopian tube, and Mittelschmerz.

[0719] Developmental and Inherited Disorders

[0720] Polynuceotides or polypeptides, or agonists or antagonists of the present invention may be used to treat, prevent, diagnose, and/or prognose diseases associated with mixed fetal tissues, including, but not limited to, developmental and inherited disorders or defects of the nervous system, musculoskelelal system, execretory system, cardiovascular system, hematopoietic system, gastrointestinal system, reproductive system, and respiratory system. Compositions of the present invention may also be used to treat, prevent, diagnose, and/or prognose developmental and inherited disorders or defects associated with, but not limited to, skin, hair, visual, and auditory tissues, metabolism. Additionally, the compositions of the invention may be useful in the diagnosis, treatment, and/or prevention of disorders or diseases associated with, but not limited to, chromosomal or genetic abnormalities and hyperproliferation or neoplasia.

[0721] Disorders or defects of the nervous system associated with developmental or inherited abnormalities that may be diagnosed, treated, and/or prevented with the compostions of the invention include, but are not limited to, adrenoleukodystrophy, agenesis of corpus callosum, Alexander disease, anencephaly, Angelman syndrome, Arnold-Chiari deformity, Batten disease, Canavan disease, cephalic disorders, Charcot-Marie-Tooth disease, encephalocele, Friedreich's ataxia, Gaucher's disease, Gorlin syndrome, Hallervorden-Spatz disease, hereditary spastic paraplegia, Huntington disease, hydranencephaly, hydrocephalus, Joubert syndrome, Lesch-Nyhan syndrome, leukodystrophy, Menkes disease, microcephaly, Niemann-Pick Type C1, neurofibromatosis, porencephaly, progeria, proteus syndrome, Refsum disease, spina bifida, Sturge-Weber syndrome, Tay-Sachs disease, tuberous sclerosis, and von Hippel-Lindau disease.

[0722] Developmental and inherited disorders resulting in disorders or defects of the musculoskeletal system that may be diagnosed, treated, and/or prevented with the compositions of the invention include, but are not limited to, achondroplasia, atlanto-occipital fusion, arthrogryposis mulitplex congenita, autosomal recessive muscular dystrophy, Becker's muscular dystrophy, cerebral palsy, choanal atresia, cleft lip, cleft palate, clubfoot, congenital amputation, congenital dislocation of the hip, congenital torticollis, congenital scoliosis, dopa-repsonsive dystonia, Duchenne muscular dystrophy, early-onset generalized dystonia, femoral torsion, Gorlin syndrome, hypophosphatasia, Klippel-Feil syndrome, knee dislocation, myoclonic dystonia, myotonic dystrophy, nail-patella syndrome, osteogenesis imperfecta, paroxysmal dystonia, progeria, prune-belly syndrome, rapid-onset dystonia parkinsonism, scolosis, syndactyly, Treacher Collins' syndrome, velocardiofacial syndrome, and X-linked dystonia-parkinsonism.

[0723] Developmental or hereditary disorders or defects of the excretory system that may be diagnosed, treated, and/or prevented with the compositions of the invention include, but are not limited to, Alport's syndrome, Bartter's syndrome, bladder diverticula, bladder exstrophy, cystinuria, epispadias, Fanconi's syndrome, Hartup disease, horseshoe kidney, hypospadias, kidney agenesis, kidney ectopia, kidney malrotation, Liddle's syndrome, medullary cystic disease, medullary sponge, multicystic kidney, kidney polycystic kidney disease, nail-patella syndrome, Potter's syndrome, urinary tract flow obstruction, vitamin D-resistant rickets, and Wilm's tumor.

[0724] Cardiovascular disorders or defects of developmental or hereditary origin that may be diagnosed, treated, and/or prevented with the compositions of the inventtion include, but are not limited to, aortic valve stenosis, atrial septal defects, artioventricular (A-V) canal defect, bicuspid aortic valve, coarctation or the aorta, dextrocardia, Ebstein's anomaly, Eisenmenger's complex, hypoplastic left heart syndrome, Marfan syndrome, patent ductus arteriosus, progeria, pulmonary atresia, pulmonary valve stenosis, subaortic stenosis, tetralogy of fallot, total anomalous pulmonary venous (P-V) connection, transposition of the great arteries, tricuspid atresia, truncus arteriosus, ventricular septal defects. Developmental or inherited disorders resulting in disorders involving the hematopoietic system that may be diagnosed, treated, and/or prevented with the compositions of the invention include, but not limited to, Bernard-Soulier syndrome, Chediak-Higashi syndrome, hemophilia, Hermansky-Pudlak syndrome, sickle cell anemia, storage pool disease, thromboxane A2 dysfunction, thrombasthenia, and von Willebrand's disease.

[0725] The compositions of the invention may also be used to diagnose, treat, and/or prevent developmental and inherited disorders resulting in disorders or defects of the gastrointestinal system, including, but not limited to, anal atresia, biliary atresia, esophageal atresia, diaphragmatic hernia, Hirschsprung's disease, Meckel's diverticulum, oligohydramnios, omphalocele, polyhydramnios, porphyria, situs inversus viscera. Developmental or inherited disorders resulting in metabolic disorders that may be diagnosed, treated, and/or prevented with the compositions of the invention include, but are not limited to, alpha-1 antitrypsin deficiency, cystic fibrosis, hemochromatosis, lysosomal storage disease, phenylketonuria, Wilson's disease, and Zellweger syndrome.

[0726] Disorders of the reproductive system that are developmentally or hereditary related that may also be diagnosed, treated, and/or prevented with the compositions of the invention include, but are not limited to, androgen insensitivity syndrome, ambiguous genitalia, autosomal sex reversal, congenital adreneal hyperplasia, gonadoblastoma, ovarian germ cell cancer, pseudohermphroditism, true hermaphroditism, undescended testis, XX male syndrome, and XY female type gonadal dysgenesis. The compositions of the invention may also be used to diagnose, treat, and/or prevent developmental or inherited respiratory defects including, but not limited to, askin tumor, azygos lobe, congenital diaphragmatic hernia, congenital lobar emphysema, cystic adenomatoid malformation, lobar emphysema, hyaline membrane disease, and pectus excavatum.

[0727] Developmental or inherited disorders may also result from chromosomal or genetic aberration that may be diagnosed, treated, and/or prevented with the compositions of the invention including, but not limited to, 4p-syndrome, cri du chat syndrome, Digeorge syndrome, Down's syndrome, Edward's syndrome, fragile X syndrome, Klinefelter's syndrome, Patau's syndrome, Prader-Willi syndrome, progeria, Turner's syndrome, triple X syndrome, and XYY syndrome. Other developmental disorders that can be diagnosed, treated, and/or prevented with the compositions of the invention, include, but are not limited to, fetal alcohol syndrome, and can be caused by environmental factors surrounding the developing fetus.

[0728] The compositions of the invention may further be able to be used to diagnose, treat, and/or prevent errors in development or a genetic disposition that may result in hyperproliferative disorders or neoplasms, including, but not limited to, acute childhood lymphoblastic leukemia, askin tumor, Beckwith-Wiedemann syndrome, childhood acute myeloid leukemia, childhood brain stem glioma, childhood cerebellar astrocytoma, childhood extracranial germ cell tumors childhood (primary), gonadoblastoma, hepatocellular cancer, childhood Hodgkin's disease, childhood Hodgkin's lymphoma, childhood hypothalamic and visual pathway glioma, childhood (primary) liver cancer, childhood lymphoblastic leukemia, childhood medulloblastoma, childhood non-Hodgkin's lymphoma, childhood pineal and supratentorial primitive neuroectodermal tumors, childhood primary liver cancer, childhood rhabdomyosarcoma, childhood soft tissue sarcoma, Gorlin syndrome, familial multiple endrocrine neoplasia type I, neuroblastoma, ovarian germ cell cancer, pheochromocytoma, retinoblastoma, and Wilm's tumor.

[0729] Polypeptides may be administered using any method known in the art, including, but not limited to, direct needle injection at the delivery site, intravenous injection, topical administration, catheter infusion, biolistic injectors, particle accelerators, gelfoam sponge depots, other commercially available depot materials, osmotic pumps, oral or suppositorial solid pharmaceutical formulations, decanting or topical applications during surgery, aerosol delivery. Such methods are known in the art. Polypeptides may be administered as part of a Therapeutic, described in more detail below. Methods of delivering polynucleotides are described in more detail herein.

[0730] Diseases at the Cellular Level

[0731] Diseases associated with increased cell survival or the inhibition of apoptosis that could be treated, prevented, diagnosed and/or prognosed using polynucleotides or polypeptides, as well as antagonists or agonists of the present invention, include cancers (such as follicular lymphomas, carcinomas with p53 mutations, and hormone-dependent tumors, including, but not limited to colon cancer, cardiac tumors, pancreatic cancer, melanoma, retinoblastoma, glioblastoma, lung cancer, intestinal cancer, testicular cancer, stomach cancer, neuroblastoma, myxoma, myoma, lymphoma, endothelioma, osteoblastoma, osteoclastoma, osteosarcoma, chondrosarcoma, adenoma, breast cancer, prostate cancer, Kaposi's sarcoma and ovarian cancer); autoimmune disorders (such as, multiple sclerosis, Sjogren's syndrome, Hashimoto 's thyroiditis, biliary cirrhosis, Behcet's disease, Crohn's disease, polymyositis, systemic lupus erythematosus and immune-related glomerulonephritis and rheumatoid arthritis) and viral infections (such as herpes viruses, pox viruses and adenoviruses), inflammation, graft v. host disease, acute graft rejection, and chronic graft rejection.

[0732] In preferred embodiments, polynucleotides, polypeptides, and/or antagonists of the invention are used to inhibit growth, progression, and/or metastasis of cancers, in particular those [listed above] involving colon tissues.

[0733] Additional diseases or conditions associated with increased cell survival that could be treated or detected by polynucleotides or polypeptides, or agonists or antagonists of the present invention include, but are not limited to, progression, and/or metastases of malignancies and related disorders such as leukemia (including acute leukemias (e.g., acute lymphocytic leukemia, acute myelocytic leukemia (including myeloblastic, promyelocytic, myelomonocytic, monocytic, and erythroleukemia)) and chronic leukemias (e.g., chronic myelocytic (granulocytic) leukemia and chronic lymphocytic leukemia)), polycythemia vera, lymphomas (e.g., Hodgkin's disease and non-Hodgkin's disease), multiple myeloma, Waldenstrom's macroglobulinemia, heavy chain disease, and solid tumors including, but not limited to, sarcomas and carcinomas such as fibrosarcoma, myxosarcoma, liposarcoma, chondrosarcoma, osteogenic sarcoma, chordoma, angiosarcoma, endotheliosarcoma, lymphangiosarcoma, lymphangioendotheliosarcoma, synovioma, mesothelioma, Ewing's tumor, leiomyosarcoma, rhabdomyosarcoma, colon carcinoma, pancreatic cancer, breast cancer, ovarian cancer, prostate cancer, squamous cell carcinoma, basal cell carcinoma, adenocarcinoma, sweat gland carcinoma, sebaceous gland carcinoma, papillary carcinoma, papillary adenocarcinomas, cystadenocarcinoma, medullary carcinoma, bronchogenic carcinoma, renal cell carcinoma, hepatoma, bile duct carcinoma, choriocarcinoma, seminoma, embryonal carcinoma, Wilm's tumor, cervical cancer, testicular tumor, lung carcinoma, small cell lung carcinoma, bladder carcinoma, epithelial carcinoma, glioma, astrocytoma, medulloblastoma, craniopharyngioma, ependymoma, pinealoma, hemangioblastoma, acoustic neuroma, oligodendroglioma, menangioma, melanoma, neuroblastoma, and retinoblastoma.

[0734] Diseases associated with increased apoptosis that could be treated, prevented, diagnosted, and/or prognosed using polynucleotides or polypeptides, as well as agonists or antagonists of the present invention, include, but are not limited to, AIDS; neurodegenerative disorders (such as Alzheimer's disease, Parkinson's disease, Amyotrophic lateral sclerosis, Retinitis piginentosa, Cerebellar degeneration and brain tumor or prior associated disease); autoimmune disorders (such as, multiple sclerosis, Sjogren's syndrome, Hashimoto's thyroiditis, biliary cirrhosis, Behcet's disease, Crohn's disease, polymyositis, systemic lupus erythematosus and immune-related glomerulonephritis and rheumatoid arthritis) myelodysplastic syndromes (such as aplastic anemia), graft v. host disease, ischemic injury (such as that caused by myocardial infarction, stroke and reperfusion injury), liver injury (e.g., hepatitis related liver injury, ischemia/reperfusion injury, cholestosis (bile duct injury) and liver cancer); toxin-induced liver disease (such as that caused by alcohol), septic shock, cachexia and anorexia.

[0735] Wound Healing and Epithelial Cell Proliferation

[0736] In accordance with yet a further aspect of the present invention, there is provided a process for utilizing polynucleotides or polypeptides, as well as agonists or antagonists of the present invention, for therapeutic purposes, for example, to stimulate epithelial cell proliferation and basal keratinocytes for the purpose of wound healing, and to stimulate hair follicle production and healing of dermal wounds. Polynucleotides or polypeptides, as well as agonists or antagonists of the present invention, may be clinically useful in stimulating wound healing including surgical wounds, excisional wounds, deep wounds involving damage of the dermis and epidermis, eye tissue wounds, dental tissue wounds, oral cavity wounds, diabetic ulcers, dermal ulcers, cubitus ulcers, arterial ulcers, venous stasis ulcers, burns resulting from heat exposure or chemicals, and other abnormal wound healing conditions such as uremia, malnutrition, vitamin deficiencies and complications associated with systemic treatment with steroids, radiation therapy and antineoplastic drugs and antimetabolites. Polynucleotides or polypeptides, as well as agonists or antagonists of the present invention, could be used to promote dermal reestablishment subsequent to dermal loss.

[0737] Polynucleotides or polypeptides, as well as agonists or antagonists of the present invention, could be used to increase the adherence of skin grafts to a wound bed and to stimulate re-epithelialization from the wound bed. The following are types of grafts that polynucleotides or polypeptides, agonists or antagonists of the present invention, could be used to increase adherence to a wound bed: autografts, artificial skin, allografts, autodermic graft, autoepdermic grafts, avacular grafts, Blair-Brown grafts, bone graft, brephoplastic grafts, cutis graft, delayed graft, dermic graft, epidermic graft, fascia graft, full thickness graft, heterologous graft, xenograft, homologous graft, hyperplastic graft, lamellar graft, mesh graft, mucosal graft, Ollier-Thiersch graft, omenpal graft, patch graft, pedicle graft, penetrating graft, split skin graft, thick split graft. Polynucleotides or polypeptides, as well as agonists or antagonists of the present invention, can be used to promote skin strength and to improve the appearance of aged skin.

[0738] It is believed that polynucleotides or polypeptides, as well as agonists or antagonists of the present invention, will also produce changes in hepatocyte proliferation, and epithelial cell proliferation in the lung, breast, pancreas, stomach, small intestine, and large intestine. Polynucleotides or polypeptides, as well as agonists or antagonists of the present invention, could promote proliferation of epithelial cells such as sebocytes, hair follicles, hepatocytes, type II pneumocytes, mucin-producing goblet cells, and other epithelial cells and their progenitors contained within the skin, lung, liver, and gastrointestinal tract. Polynucleotides or polypeptides, agonists or antagonists of the present invention, may promote proliferation of endothelial cells, keratinocytes, and basal keratinocytes.

[0739] Polynucleotides or polypeptides, as well as agonists or antagonists of the present invention, could also be used to reduce the side effects of gut toxicity that result from radiation, chemotherapy treatments or viral infections. Polynucleotides or polypeptides, as well as agonists or antagonists of the present invention, may have a cytoprotective effect on the small intestine mucosa. Polynucleotides or polypeptides, as well as agonists or antagonists of the present invention, may also stimulate healing of mucositis (mouth ulcers) that result from chemotherapy and viral infections.

[0740] Polynucleotides or polypeptides, as well as agonists or antagonists of the present invention, could further be used in full regeneration of skin in full and partial thickness skin defects, including burns, (i.e., repopulation of hair follicles, sweat glands, and sebaceous glands), treatment of other skin defects such as psoriasis. Polynucleotides or polypeptides, as well as agonists or antagonists of the present invention, could be used to treat epidermolysis bullosa, a defect in adherence of the epidermis to the underlying dermis which results in frequent, open and painful blisters by accelerating reepithelialization of these lesions. Polynucleotides or polypeptides, as well as agonists or antagonists of the present invention, could also be used to treat gastric and doudenal ulcers and help heal by scar formation of the mucosal lining and regeneration of glandular mucosa and duodenal mucosal lining more rapidly. Inflammatory bowel diseases, such as Crohn's disease and ulcerative colitis, are diseases, which result in destruction of the mucosal surface of the small or large intestine, respectively. Thus, polynucleotides or polypeptides, as well as agonists or antagonists of the present invention, could be used to promote the resurfacing of the mucosal surface to aid more rapid healing and to prevent progression of inflammatory bowel disease. Treatment with polynucleotides or polypeptides, agonists or antagonists of the present invention, is expected to have a significant effect on the production of mucus throughout the gastrointestinal tract and could be used to protect the intestinal mucosa from injurious substances that are ingested or following surgery. Polynucleotides or polypeptides, as well as agonists or antagonists of the present invention, could be used to treat diseases associate with the under expression.

[0741] Moreover, polynucleotides or polypeptides, as well as agonists or antagonists of the present invention, could be used to prevent and heal damage to the lungs due to various pathological states. Polynucleotides or polypeptides, as well as agonists or antagonists of the present invention, could stimulate proliferation and differentiation and promote the repair of alveoli and brochiolar epithelium to prevent or treat acute or chronic lung damage. For example, emphysema, which results in the progressive loss of aveoli, and inhalation injuries, i.e., resulting from smoke inhalation and burns, that cause necrosis of the bronchiolar epithelium and alveoli could be effectively treated using polynucleotides or polypeptides, agonists or antagonists of the present invention. Also, polynucleotides or polypeptides, as well as agonists or antagonists of the present invention, could be used to stimulate the proliferation of and differentiation of type II pneumocytes, which may help treat or prevent disease such as hyaline membrane diseases, such as infant respiratory distress syndrome and bronchopulmonary displasia, in premature infants.

[0742] Polynucleotides or polypeptides, as well as agonists or antagonists of the present invention, could stimulate the proliferation and differentiation of hepatocytes and, thus, could be used to alleviate or treat liver diseases and pathologies such as fulminant liver failure caused by cirrhosis, liver damage caused by viral hepatitis and toxic substances (i.e., acetaminophen, carbon tetraholoride and other hepatotoxins known in the art).

[0743] In addition, polynucleotides or polypeptides, as well as agonists or antagonists of the present invention, could be used treat or prevent the onset of diabetes mellitus. In patients with newly diagnosed Types I and II diabetes, where some islet cell function remains, polynucleotides or polypeptides, as well as agonists or antagonists of the present invention, could be used to maintain the islet function so as to alleviate, delay or prevent permanent manifestation of the disease. Also, polynucleotides or polypeptides, as well as agonists or antagonists of the present invention, could be used as an auxiliary in islet cell transplantation to improve or promote islet cell function.

[0744] Infectious Disease

[0745] Polynucleotides or polypeptides, as well as agonists or antagonists of the present invention can be used to treat or detect infectious agents. For example, by increasing the immune response, particularly increasing the proliferation and differentiation of B and/or T cells, infectious diseases may be treated. The immune response may be increased by either enhancing an existing immune response, or by initiating a new immune response. Alternatively, polynucleotides or polypeptides, as well as agonists or antagonists of the present invention may also directly inhibit the infectious agent, without necessarily eliciting an immune response.

[0746] Viruses are one example of an infectious agent that can cause disease or symptoms that can be treated or detected by a polynucleotide or polypeptide and/or agonist or antagonist of the present invention. Examples of viruses, include, but are not limited to Examples of viruses, include, but are not limited to the following DNA and RNA viruses and viral families: Arbovirus, Adenoviridae, Arenaviridae, Arterivirus, Birnaviridae, Bunyaviridae, Caliciviridae, Circoviridae, Coronaviridae, Dengue, EBV, HIV, Flaviviridae, Hepadnaviridae (Hepatitis), Herpesviridae (such as, Cytomegalovirus, Herpes Simplex, Herpes Zoster), Mononegavirus (e.g., Paramyxoviridae, Morbillivirus, Rhabdoviridae), Orthomyxoviridae (e.g., Influenza A, Influenza B, and parainfluenza), Papiloma virus, Papovaviridae, Parvoviridae, Picornaviridae, Poxyiridae (such as Smallpox or Vaccinia), Reoviridae (e.g., Rotavirus), Retroviridae (HTLV-I, HTLV-II, Lentivirus), and Togaviridae (e.g., Rubivirus). Viruses falling within these families can cause a variety of diseases or symptoms, including, but not limited to: arthritis, bronchiollitis, respiratory syncytial virus, encephalitis, eye infections (e.g., conjunctivitis, keratitis), chronic fatigue syndrome, hepatitis (A, B, C, E, Chronic Active, Delta), Japanese B encephalitis, Junin, Chikungunya, Rift Valley fever, yellow fever, meningitis, opportunistic infections (e.g., AIDS), pneumonia, Burkitt's Lymphoma, chickenpox, hemorrhagic fever, Measles, Mumps, Parainfluenza, Rabies, the common cold, Polio, leukemia, Rubella, sexually transmitted diseases, skin diseases (e.g., Kaposi's, warts), and viremia. polynucleotides or polypeptides, or agonists or antagonists of the invention, can be used to treat or detect any of these symptoms or diseases. In specific embodiments, polynucleotides, polypeptides, or agonists or antagonists of the invention are used to treat: meningitis, Dengue, EBV, and/or hepatitis (e.g., hepatitis B). In an additional specific embodiment polynucleotides, polypeptides, or agonists or antagonists of the invention are used to treat patients nonresponsive to one or more other commercially available hepatitis vaccines. In a further specific embodiment polynucleotides, polypeptides, or agonists or antagonists of the invention are used to treat AIDS.

[0747] Similarly, bacterial or fungal agents that can cause disease or symptoms and that can be treated or detected by a polynucleotide or polypeptide and/or agonist or antagonist of the present invention include, but not limited to, include, but not limited to, the following Gram-Negative and Gram-positive bacteria and bacterial families and fungi: Actinomycetales (e.g., Corynebacterium, Mycobacterium, Norcardia), Cryptococcus neoformans, Aspergillosis, Bacillaceae (e.g., Anthrax, Clostridium), Bacteroidaceae, Blastomycosis, Bordetella, Borrelia (e.g., Borrelia burgdorferi, Brucellosis, Candidiasis, Campylobacter, Coccidioidomycosis, Cryptococcosis, Dermatocycoses, E. coli (e.g., Enterotoxigenic E. coli and Enterohemorrhagic E. coli), Enterobacteriaceae (Klebsiella, Salmonella (e.g., Salmonella typhi, and Salmonella paratyphi), Serratia, Yersinia), Erysipelothrix, Helicobacter, Legionellosis, Leptospirosis, Listeria, Mycoplasmatales, Mycobacterium leprae, Vibrio cholerae, Neisseriaceae (e.g., Acinetobacter, Gonorrhea, Menigococcal), Meisseria meningitidis, Pasteurellacea Infections (e.g., Actinobacillus, Heamophilus (e.g., Heamophilus influenza type B), Pasteurella), Pseudomonas, Rickettsiaceae, Chlamydiaceae, Treponema spp., Leptospira spp., Shigella spp., Staphylococcal, Meningiococcal, Pneumococcal and Streptococcal (e.g., Streptococcus pneumoniae and Group B Streptococcus). These bacterial or fungal families can cause the following diseases or symptoms, including, but not limited to: bacteremia, endocarditis, eye infections (conjunctivitis, tuberculosis, uveitis), gingivitis, opportunistic infections (e.g., AIDS related infections), paronychia, prosthesis-related infections, Reiter's Disease, respiratory tract infections, such as Whooping Cough or Empyema, sepsis, Lyme Disease, Cat-Scratch Disease, Dysentery, Paratyphoid Fever, food poisoning, Typhoid, pneumonia, Gonorrhea, meningitis (e.g., mengitis types A and B), Chlamydia, Syphilis, Diphtheria, Leprosy, Paratuberculosis, Tuberculosis, Lupus, Botulism, gangrene, tetanus, impetigo, Rheumatic Fever, Scarlet Fever, sexually transmitted diseases, skin diseases (e.g., cellulitis, dermatocycoses), toxemia, urinary tract infections, wound infections. Polynucleotides or polypeptides, agonists or antagonists of the invention, can be used to treat or detect any of these symptoms or diseases. In specific embodiments, Ppolynucleotides, polypeptides, agonists or antagonists of the invention are used to treat: tetanus, Diptheria, botulism, and/or meningitis type B.

[0748] Moreover, parasitic agents causing disease or symptoms that can be treated or detected by a polynucleotide or polypeptide and/or agonist or antagonist of the present invention include, but not limited to, the following families or class: Amebiasis, Babesiosis, Coccidiosis, Cryptosporidiosis, Dientamoebiasis, Dourine, Ectoparasitic, Giardiasis, Helminthiasis, Leishmaniasis, Theileriasis, Toxoplasmosis, Trypanosomiasis, and Trichomonas and Sporozoans (e.g., Plasmodium virax, Plasmodium falciparium, Plasmodium malariae and Plasmodium ovale). These parasites can cause a variety of diseases or symptoms, including, but not limited to: Scabies, Trombiculiasis, eye infections, intestinal disease (e.g., dysentery, giardiasis), liver disease, lung disease, opportunistic infections (e.g., AIDS related), malaria, pregnancy complications, and toxoplasmosis. polynucleotides or polypeptides, or agonists or antagonists of the invention, can be used to treat or detect any of these symptoms or diseases.

[0749] Polynucleotides or polypeptides, as well as agonists or antagonists of the present invention of the present invention could either be by administering an effective amount of a polypeptide to the patient, or by removing cells from the patient, supplying the cells with a polynucleotide of the present invention, and returning the engineered cells to the patient (ex vivo therapy). Moreover, the polypeptide or polynucleotide of the present invention can be used as an antigen in a vaccine to raise an immune response against infectious disease.

[0750] Regeneration

[0751] Polynucleotides or polypeptides, as well as agonists or antagonists of the present invention can be used to differentiate, proliferate, and attract cells, leading to the regeneration of tissues. (See, Science 276:59-87 (1997).) The regeneration of tissues could be used to repair, replace, or protect tissue damaged by congenital defects, trauma (wounds, burns, incisions, or ulcers), age, disease (e.g. osteoporosis, osteocarthritis, periodontal disease, liver failure), surgery, including cosmetic plastic surgery, fibrosis, reperfusion injury, or systemic cytokine damage.

[0752] Tissues that could be regenerated using the present invention include organs (e.g., pancreas, liver, intestine, kidney, skin, endothelium), muscle (smooth, skeletal or cardiac), vasculature (including vascular and lymphatics), nervous, hematopoietic, and skeletal (bone, cartilage, tendon, and ligament) tissue. Preferably, regeneration occurs without or decreased scarring. Regeneration also may include angiogenesis.

[0753] Moreover, polynucleotides or polypeptides, as well as agonists or antagonists of the present invention, may increase regeneration of tissues difficult to heal. For example, increased tendon/ligament regeneration would quicken recovery time after damage. Polynucleotides or polypeptides, as well as agonists or antagonists of the present invention could also be used prophylactically in an effort to avoid damage. Specific diseases that could be treated include of tendinitis, carpal tunnel syndrome, and other tendon or ligament defects. A further example of tissue regeneration of non-healing wounds includes pressure ulcers, ulcers associated with vascular insufficiency, surgical, and traumatic wounds.

[0754] Similarly, nerve and brain tissue could also be regenerated by using polynucleotides or polypeptides, as well as agonists or antagonists of the present invention, to proliferate and differentiate nerve cells. Diseases that could be treated using this method include central and peripheral nervous system diseases, neuropathies, or mechanical and traumatic disorders (e.g., spinal cord disorders, head trauma, cerebrovascular disease, and stoke). Specifically, diseases associated with peripheral nerve injuries, peripheral neuropathy (e.g., resulting from chemotherapy or other medical therapies), localized neuropathies, and central nervous system diseases (e.g., Alzheimer's disease, Parkinson's disease, Huntington's disease, amyotrophic lateral sclerosis, and Shy-Drager syndrome), could all be treated using the polynucleotides or polypeptides, as well as agonists or antagonists of the present invention. Chemotaxis

[0755] Polynucleotides or polypeptides, as well as agonists or antagonists of the present invention may have chemotaxis activity. A chemotaxic molecule attracts or mobilizes cells (e.g., monocytes, fibroblasts, neutrophils, T-cells, mast cells, eosinophils, epithelial and/or endothelial cells) to a particular site in the body, such as inflammation, infection, or site of hyperproliferation. The mobilized cells can then fight off and/or heal the particular trauma or abnormality.

[0756] Polynucleotides or polypeptides, as well as agonists or antagonists of the present invention may increase chemotaxic activity of particular cells. These chemotactic molecules can then be used to treat inflammation, infection, hyperproliferative disorders, or any immune system disorder by increasing the number of cells targeted to a particular location in the body. For example, chemotaxic molecules can be used to treat wounds and other trauma to tissues by attracting immune cells to the injured location. Chemotactic molecules of the present invention can also attract fibroblasts, which can be used to treat wounds.

[0757] It is also contemplated that polynucleotides or polypeptides, as well as agonists or antagonists of the present invention may inhibit chemotactic activity. These molecules could also be used to treat disorders. Thus, polynucleotides or polypeptides, as well as agonists or antagonists of the present invention could be used as an inhibitor of chemotaxis.

[0758] Binding Activity

[0759] A polypeptide of the present invention may be used to screen for molecules that bind to the polypeptide or for molecules to which the polypeptide binds. The binding of the polypeptide and the molecule may activate (agonist), increase, inhibit (antagonist), or decrease activity of the polypeptide or the molecule bound. Examples of such molecules include antibodies, oligonucleotides, proteins (e.g., receptors), or small molecules.

[0760] Preferably, the molecule is closely related to the natural ligand of the polypeptide, e.g., a fragment of the ligand, or a natural substrate, a ligand, a structural or functional mimetic. (See, Coligan et al., Current Protocols in Immunology 1(2):Chapter 5 (1991).) Similarly, the molecule can be closely related to the natural receptor to which the polypeptide binds, or at least, a fragment of the receptor capable of being bound by the polypeptide (e.g., active site). In either case, the molecule can be rationally designed using known techniques.

[0761] Preferably, the screening for these molecules involves producing appropriate cells, which express the polypeptide. Preferred cells include cells from mammals, yeast, Drosophila, or E. Coli. Cells expressing the polypeptide (or cell membrane containing the expressed polypeptide) are then preferably contacted with a test compound potentially containing the molecule to observe binding, stimulation, or inhibition of activity of either the polypeptide or the molecule.

[0762] The assay may simply test binding of a candidate compound to the polypeptide, wherein binding is detected by a label, or in an assay involving competition with a labeled competitor. Further, the assay may test whether the candidate compound results in a signal generated by binding to the polypeptide.

[0763] Alternatively, the assay can be carried out using cell-free preparations, polypeptide/molecule affixed to a solid support, chemical libraries, or natural product mixtures. The assay may also simply comprise the steps of mixing a candidate compound with a solution containing a polypeptide, measuring polypeptide/molecule activity or binding, and comparing the polypeptide/molecule activity or binding to a standard.

[0764] Preferably, an ELISA assay can measure polypeptide level or activity in a sample (e.g., biological sample) using a monoclonal or polyclonal antibody. The antibody can measure polypeptide level or activity by either binding, directly or indirectly, to the polypeptide or by competing with the polypeptide for a substrate.

[0765] Additionally, the receptor to which the polypeptide of the present invention binds can be identified by numerous methods known to those of skill in the art, for example, ligand panning and FACS sorting (Coligan, et al., Current Protocols in Immun., 1(2), Chapter 5, (1991)). For example, expression cloning is employed wherein polyadenylated RNA is prepared from a cell responsive to the polypeptides, for example, NIH3T3 cells which are known to contain multiple receptors for the FGF family proteins, and SC-3 cells, and a cDNA library created from this RNA is divided into pools and used to transfect COS cells or other cells that are not responsive to the polypeptides. Transfected cells which are grown on glass slides are exposed to the polypeptide of the present invention, after they have been labeled. The polypeptides can be labeled by a variety of means including iodination or inclusion of a recognition site for a site-specific protein kinase.

[0766] Following fixation and incubation, the slides are subjected to auto-radiographic analysis. Positive pools are identified and sub-pools are prepared and re-transfected using an iterative sub-pooling and re-screening process, eventually yielding a single clones that encodes the putative receptor.

[0767] As an alternative approach for receptor identification, the labeled polypeptides can be photoaffinity linked with cell membrane or extract preparations that express the receptor molecule. Cross-linked material is resolved by PAGE analysis and exposed to X-ray film. The labeled complex containing the receptors of the polypeptides can be excised, resolved into peptide fragments, and subjected to protein microsequencing. The amino acid sequence obtained from microsequencing would be used to design a set of degenerate oligonucleotide probes to screen a cDNA library to identify the genes encoding the putative receptors.

[0768] Moreover, the techniques of gene-shuffling, motif-shuffling, exon-shuffling, and/or codon-shuffling (collectively referred to as “DNA shuffling”) may be employed to modulate the activities of the polypeptide of the present invention thereby effectively generating agonists and antagonists of the polypeptide of the present invention. See generally, U.S. Pat. Nos. 5,605,793, 5,811,238, 5,830,721, 5,834,252, and 5,837,458, and Patten, P. A., et al., Curr. Opinion Biotechnol. 8:724-33 (1997); Harayama, S. Trends Biotechnol. 16(2):76-82 (1998); Hansson L. O., et al., J. Mol. Biol. 287:265-76 (1999); and Lorenzo, M. M. and Blasco, R. Biotechniques 24(2):308-13 (1998); each of these patents and publications are hereby incorporated by reference). In one embodiment, alteration of polynucleotides and corresponding polypeptides may be achieved by DNA shuffling. DNA shuffling involves the assembly of two or more DNA segments into a desired molecule by homologous, or site-specific, recombination. In another embodiment, polynucleotides and corresponding polypeptides may be altered by being subjected to random mutagenesis by error-prone PCR, random nucleotide insertion or other methods prior to recombination. In another embodiment, one or more components, motifs, sections, parts, domains, fragments, etc., of the polypeptide of the present invention may be recombined with one or more components, motifs, sections, parts, domains, fragments, etc. of one or more heterologous molecules. In preferred embodiments, the heterologous molecules are family members. In further preferred embodiments, the heterologous molecule is a growth factor such as, for example, platelet-derived growth factor (PDGF), insulin-like growth factor (IGF-I), transforming growth factor (TGF)-alpha, epidermal growth factor (EGF), fibroblast growth factor (FGF), TGF-beta, bone morphogenetic protein (BMP)-2, BMP-4, BMP-5, BMP-6, BMP-7, activins A and B, decapentaplegic(dpp), 60A, OP-2, dorsalin, growth differentiation factors (GDFs), nodal, MIS, inhibin-alpha, TGF-beta1, TGF-beta2, TGF-beta3, TGF-beta5, and glial-derived neurotrophic factor (GDNF).

[0769] Other preferred fragments are biologically active fragments of the polypeptide of the present invention. Biologically active fragments are those exhibiting activity similar, but not necessarily identical, to an activity of the polypeptide of the present invention. The biological activity of the fragments may include an improved desired activity, or a decreased undesirable activity.

[0770] Additionally, this invention provides a method of screening compounds to identify those, which modulate the action of the polypeptide of the present invention. An example of such an assay comprises combining a mammalian fibroblast cell, the polypeptide of the present invention, the compound to be screened and ³[H] thymidine under cell culture conditions where the fibroblast cell would normally proliferate. A control assay may be performed in the absence of the compound to be screened and compared to the amount of fibroblast proliferation in the presence of the compound to determine if the compound stimulates proliferation by determining the uptake of ³[H] thymidine in each case. The amount of fibroblast cell proliferation is measured by liquid scintillation chromatography, which measures the incorporation of ³[H] thymidine. Both agonist and antagonist compounds may be identified by this procedure.

[0771] In another method, a mammalian cell or membrane preparation expressing a receptor for a polypeptide of the present invention is incubated with a labeled polypeptide of the present invention in the presence of the compound. The ability of the compound to enhance or block this interaction could then be measured. Alternatively, the response of a known second messenger system following interaction of a compound to be screened and the receptor is measured and the ability of the compound to bind to the receptor and elicit a second messenger response is measured to determine if the compound is a potential agonist or antagonist. Such second messenger systems include but are not limited to, cAMP guanylate cyclase, ion channels or phosphoinositide hydrolysis.

[0772] All of these above assays can be used as diagnostic or prognostic markers. The molecules discovered using these assays can be used to treat disease or to bring about a particular result in a patient (e.g., blood vessel growth) by activating or inhibiting the polypeptide/molecule. Moreover, the assays can discover agents which may inhibit or enhance the production of the polypeptides of the invention from suitably manipulated cells or tissues.

[0773] Therefore, the invention includes a method of identifying compounds which bind to a polypeptide of the invention comprising the steps of: (a) incubating a candidate binding compound with a polypeptide of the present invention; and (b) determining if binding has occurred. Moreover, the invention includes a method of identifying agonists/antagonists comprising the steps of: (a) incubating a candidate compound with a polypeptide of the present invention, (b) assaying a biological activity, and (b) determining if a biological activity of the polypeptide has been altered.

[0774] Targeted Delivery

[0775] In another embodiment, the invention provides a method of delivering compositions to targeted cells expressing a receptor for a polypeptide of the invention, or cells expressing a cell bound form of a polypeptide of the invention.

[0776] As discussed herein, polypeptides or antibodies of the invention may be associated with heterologous polypeptides, heterologous nucleic acids, toxins, or prodrugs via hydrophobic, hydrophilic, ionic and/or covalent interactions. In one embodiment, the invention provides a method for the specific delivery of compositions of the invention to cells by administering polypeptides of the invention (including antibodies) that are associated with heterologous polypeptides or nucleic acids. In one example, the invention provides a method for delivering a therapeutic protein into the targeted cell. In another example, the invention provides a method for delivering a single stranded nucleic acid (e.g., antisense or ribozymes) or double stranded nucleic acid (e.g., DNA that can integrate into the cell's genome or replicate episomally and that can be transcribed) into the targeted cell.

[0777] In another embodiment, the invention provides a method for the specific destruction of cells (e.g., the destruction of tumor cells) by administering polypeptides of the invention (e.g., polypeptides of the invention or antibodies of the invention) in association with toxins or cytotoxic prodrugs.

[0778] By “toxin” is meant compounds that bind and activate endogenous cytotoxic effector systems, radioisotopes, holotoxins, modified toxins, catalytic subunits of toxins, or any molecules or enzymes not normally present in or on the surface of a cell that under defined conditions cause the cell's death. Toxins that may be used according to the methods of the invention include, but are not limited to, radioisotopes known in the art, compounds such as, for example, antibodies (or complement fixing containing portions thereof) that bind an inherent or induced endogenous cytotoxic effector system, thymidine kinase, endonuclease, RNAse, alpha toxin, ricin, abrin, Pseudomonas exotoxin A, diphtheria toxin, saporin, momordin, gelonin, pokeweed antiviral protein, alpha-sarcin and cholera toxin. By “cytotoxic prodrug” is meant a non-toxic compound that is converted by an enzyme, normally present in the cell, into a cytotoxic compound. Cytotoxic prodrugs that may be used according to the methods of the invention include, but are not limited to, glutamyl derivatives of benzoic acid mustard alkylating agent, phosphate derivatives of etoposide or mitomycin C, cytosine arabinoside, daunorubisin, and phenoxyacetamide derivatives of doxorubicin.

[0779] Drug Screening

[0780] Further contemplated is the use of the polypeptides of the present invention, or the polynucleotides encoding these polypeptides, to screen for molecules, which modify the activities of the polypeptides of the present invention. Such a method would include contacting the polypeptide of the present invention with a selected compound(s) suspected of having antagonist or agonist activity, and assaying the activity of these polypeptides following binding.

[0781] This invention is particularly useful for screening therapeutic compounds by using the polypeptides of the present invention, or binding fragments thereof, in any of a variety of drug screening techniques. The polypeptide or fragment employed in such a test may be affixed to a solid support, expressed on a cell surface, free in solution, or located intracellularly. One method of drug screening utilizes eukaryotic or prokaryotic host cells which are stably transformed with recombinant nucleic acids expressing the polypeptide or fragment. Drugs are screened against such transformed cells in competitive binding assays. One may measure, for example, the formulation of complexes between the agent being tested and a polypeptide of the present invention.

[0782] Thus, the present invention provides methods of screening for drugs or any other agents, which affect activities mediated by the polypeptides of the present invention. These methods comprise contacting such an agent with a polypeptide of the present invention or a fragment thereof and assaying for the presence of a complex between the agent and the polypeptide or a fragment thereof, by methods well known in the art. In such a competitive binding assay, the agents to screen are typically labeled. Following incubation, free agent is separated from that present in bound form, and the amount of free or uncomplexed label is a measure of the ability of a particular agent to bind to the polypeptides of the present invention.

[0783] Another technique for drug screening provides high throughput screening for compounds having suitable binding affinity to the polypeptides of the present invention, and is described in great detail in European Patent Application 84/03564, published on Sep. 13, 1984, which is incorporated herein by reference herein. Briefly stated, large numbers of different small peptide test compounds are synthesized on a solid substrate, such as plastic pins or some other surface. The peptide test compounds are reacted with polypeptides of the present invention and washed. Bound polypeptides are then detected by methods well known in the art. Purified polypeptides are coated directly onto plates for use in the aforementioned drug screening techniques. In addition, non-neutralizing antibodies may be used to capture the peptide and immobilize it on the solid support.

[0784] This invention also contemplates the use of competitive drug screening assays in which neutralizing antibodies capable of binding polypeptides of the present invention specifically compete with a test compound for binding to the polypeptides or fragments thereof. In this manner, the antibodies are used to detect the presence of any peptide which shares one or more antigenic epitopes with a polypeptide of the invention.

[0785] Antisense and Ribozyme (Antagonists)

[0786] In specific embodiments, antagonists according to the present invention are nucleic acids corresponding to the sequences contained in SEQ ID NO:X, or the complementary strand thereof, and/or to cDNA sequences contained in cDNA Clone ID NO:Z identified for example, in Table 1A. In one embodiment, antisense sequence is generated internally, by the organism, in another embodiment, the antisense sequence is separately administered (see, for example, O'Connor, J., Neurochem. 56:560 (1991). Oligodeoxynucleotides as Antisense Inhibitors of Gene Expression, CRC Press, Boca Raton, Fla. (1988). Antisense technology can be used to control gene expression through antisense DNA or RNA, or through triple-helix formation. Antisense techniques are discussed for example, in Okano, J., Neurochem. 56:560 (1991); Oligodeoxynucleotides as Antisense Inhibitors of Gene Expression, CRC Press, Boca Raton, Fla. (1988). Triple helix formation is discussed in, for instance, Lee et al., Nucleic Acids Research 6:3073 (1979); Cooney et al., Science 241:456 (1988); and Dervan et al., Science 251:1300 (1991). The methods are based on binding of a polynucleotide to a complementary DNA or RNA.

[0787] For example, the use of c-myc and c-myb antisense RNA constructs to inhibit the growth of the non-lymphocytic leukemia cell line HL-60 and other cell lines was previously described. (Wickstrom et al. (1988); Anfossi et al. (1989)). These experiments were performed in vitro by incubating cells with the oligoribonucleotide. A similar procedure for in vivo use is described in WO 91/15580. Briefly, a pair of oligonucleotides for a given antisense RNA is produced as follows: A sequence complimentary to the first 15 bases of the open reading frame is flanked by an EcoR1 site on the 5′ end and a HindIII site on the 3′ end. Next, the pair of oligonucleotides is heated at 90° C. for one minute and then annealed in 2× ligation buffer (20 mM TRIS HCl pH 7.5, 10 mM MgCl2, 10 MM dithiothreitol (DTT) and 0.2 mM ATP) and then ligated to the EcoR1/Hind III site of the retroviral vector PMv7 (WO 91/15580).

[0788] For example, the 5′ coding portion of a polynucleotide that encodes the polypeptide of the present invention may be used to design an antisense RNA oligonucleotide of from about 10 to 40 base pairs in length. A DNA oligonucleotide is designed to be complementary to a region of the gene involved in transcription thereby preventing transcription and the production of the receptor. The antisense RNA oligonucleotide hybridizes to the mRNA in vivo and blocks translation of the mRNA molecule into receptor polypeptide.

[0789] In one embodiment, the antisense nucleic acid of the invention is produced intracellularly by transcription from an exogenous sequence. For example, a vector or a portion thereof, is transcribed, producing an antisense nucleic acid (RNA) of the invention. Such a vector would contain a sequence encoding the antisense nucleic acid. Such a vector can remain episomal or become chromosomally integrated, as long as it can be transcribed to produce the desired antisense RNA. Such vectors can be constructed by recombinant DNA technology methods standard in the art. Vectors can be plasmid, viral, or others known in the art, used for replication and expression in vertebrate cells. Expression of the sequence encoding the polypeptide of the present invention or fragments thereof, can be by any promoter known in the art to act in vertebrate, preferably human cells. Such promoters can be inducible or constitutive. Such promoters include, but are not limited to, the SV40 early promoter region (Bernoist and Chambon, Nature 29:304-310 (1981), the promoter contained in the 3′ long terminal repeat of Rous sarcoma virus (Yamamoto et al., Cell 22:787-797 (1980), the herpes thymidine promoter (Wagner et al., Proc. Natl. Acad. Sci. U.S.A. 78:1441-1445 (1981), the regulatory sequences of the metallothionein gene (Brinster, et al., Nature 296:39-42 (1982)), etc.

[0790] The antisense nucleic acids of the invention comprise a sequence complementary to at least a portion of an RNA transcript of a gene of the present invention. However, absolute complementarity, although preferred, is not required. A sequence “complementary to at least a portion of an RNA,” referred to herein, means a sequence having sufficient complementarity to be able to hybridize with the RNA, forming a stable duplex; in the case of double stranded antisense nucleic acids, a single strand of the duplex DNA may thus be tested, or triplex formation may be assayed. The ability to hybridize will depend on both the degree of complementarity and the length of the antisense nucleic acid. Generally, the larger the hybridizing nucleic acid, the more base mismatches with a RNA it may contain and still form a stable duplex (or triplex as the case may be). One skilled in the art can ascertain a tolerable degree of mismatch by use of standard procedures to determine the melting point of the hybridized complex.

[0791] Oligonucleotides that are complementary to the 5′ end of the message, e.g., the 5′ untranslated sequence up to and including the AUG initiation codon, should work most efficiently at inhibiting translation. However, sequences complementary to the 3′ untranslated sequences of mRNAs have been shown to be effective at inhibiting translation of mRNAs as well. See generally, Wagner, R., 1994, Nature 372:333-335. Thus, oligonucleotides complementary to either the 5′- or 3′-non-translated, non-coding regions of polynucleotide sequences described herein could be used in an antisense approach to inhibit translation of endogenous mRNA. Oligonucleotides complementary to the 5′ untranslated region of the mRNA should include the complement of the AUG start codon. Antisense oligonucleotides complementary to mRNA coding regions are less efficient inhibitors of translation but could be used in accordance with the invention. Whether designed to hybridize to the 5′-, 3′- or coding region of mRNA of the present invention, antisense nucleic acids should be at least six nucleotides in length, and are preferably oligonucleotides ranging from 6 to about 50 nucleotides in length. In specific aspects the oligonucleotide is at least 10 nucleotides, at least 17 nucleotides, at least 25 nucleotides or at least 50 nucleotides.

[0792] The polynucleotides of the invention can be DNA or RNA or chimeric mixtures or derivatives or modified versions thereof, single-stranded or double-stranded. The oligonucleotide can be modified at the base moiety, sugar moiety, or phosphate backbone, for example, to improve stability of the molecule, hybridization, etc. The oligonucleotide may include other appended groups such as peptides (e.g., for targeting host cell receptors in vivo), or agents facilitating transport across the cell membrane (see, e.g., Letsinger et al., 1989, Proc. Natl. Acad. Sci. U.S.A. 86:6553-6556; Lemaitre et al., 1987, Proc. Natl. Acad. Sci. 84:648-652; PCT Publication No. WO88/09810, published Dec. 15, 1988) or the blood-brain barrier (see, e.g., PCT Publication No. WO89/10134, published Apr. 25, 1988), hybridization-triggered cleavage agents. (See, e.g., Krol et al., 1988, BioTechniques 6:958-976) or intercalating agents. (See, e.g., Zon, 1988, Pharm. Res. 5:539-549). To this end, the oligonucleotide may be conjugated to another molecule, e.g., a peptide, hybridization triggered cross-linking agent, transport agent, hybridization-triggered cleavage agent, etc.

[0793] The antisense oligonucleotide may comprise at least one modified base moiety which is selected from the group including, but not limited to, 5-fluorouracil, 5-bromouracil, 5-chlorouracil, 5-iodouracil, hypoxanthine, xantine, 4-acetylcytosine, 5-(carboxyhydroxylmethyl) uracil, 5-carboxymethylaminomethyl-2-thiouridine, 5-carboxymethylaminomethyluracil, dihydrouracil, beta-D-galactosylqueosine, inosine, N6-isopentenyladenine, 1-methylguanine, 1-methylinosine, 2,2-dimethylguanine, 2-methyladenine, 2-methylguanine, 3-methylcytosine, 5-methylcytosine, N6-adenine, 7-methylguanine, 5-methylaminomethyluracil, 5-methoxyaminomethyl-2-thiouracil, beta-D-mannosylqueosine, 5′-methoxycarboxymethyluracil, 5-methoxyuracil, 2-methylthio-N-6-isopentenyladenine, uracil-5-oxyacetic acid (v), wybutoxosine, pseudouracil, queosine, 2-thiocytosine, 5-methyl-2-thiouracil, 2-thiouracil, 4-thiouracil, 5-methyluracil, uracil-5-oxyacetic acid methylester, uracil-5-oxyacetic acid (v), 5-methyl-2-thiouracil, 3-(3-amino-3-N-2-carboxypropyl) uracil, (acp3)w, and 2,6-diaminopurine.

[0794] The antisense oligonucleotide may also comprise at least one modified sugar moiety selected from the group including, but not limited to, arabinose, 2-fluoroarabinose, xylulose, and hexose.

[0795] In yet another embodiment, the antisense oligonucleotide comprises at least one modified phosphate backbone selected from the group including, but not limited to, a phosphorothioate, a phosphorodithioate, a phosphoramidothioate, a phosphoramidate, a phosphordiamidate, a methylphosphonate, an alkyl phosphotriester, and a formacetal or analog thereof.

[0796] In yet another embodiment, the antisense oligonucleotide is an a-anomeric oligonucleotide. An a-anomeric oligonucleotide forms specific double-stranded hybrids with complementary RNA in which, contrary to the usual b-units, the strands run parallel to each other (Gautier et al., 1987, Nucl. Acids Res. 15:6625-6641). The oligonucleotide is a 2′-0-methylribonucleotide (Inoue et al., 1987, Nucl. Acids Res. 15:6131-6148), or a chimeric RNA-DNA analogue (Inoue et al., 1987, FEBS Lett. 215:327-330).

[0797] Polynucleotides of the invention may be synthesized by standard methods known in the art, e.g. by use of an automated DNA synthesizer (such as are commercially available from Biosearch, Applied Biosystems, etc.). As examples, phosphorothioate oligonucleotides may be synthesized by the method of Stein et al. (1988, Nucl. Acids Res. 16:3209), methylphosphonate oligonucleotides can be prepared by use of controlled pore glass polymer supports (Sarin et al., 1988, Proc. Natl. Acad. Sci. U.S.A. 85:7448-7451), etc.

[0798] While antisense nucleotides complementary to the coding region sequence could be used, those complementary to the transcribed untranslated region are most preferred.

[0799] Potential antagonists according to the invention also include catalytic RNA, or a ribozyme (See, e.g., PCT International Publication WO 90/11364, published Oct. 4, 1990; Sarver et al, Science 247:1222-1225 (1990). While ribozymes that cleave mRNA at site specific recognition sequences can be used to destroy mRNAs, the use of hammerhead ribozymes is preferred. Hammerhead ribozymes cleave mRNAs at locations dictated by flanking regions that form complementary base pairs with the target mRNA. The sole requirement is that the target mRNA have the following sequence of two bases: 5′-UG-3′. The construction and production of hammerhead ribozymes is well known in the art and is described more fully in Haseloff and Gerlach, Nature 334:585-591 (1988). There are numerous potential hammerhead ribozyme cleavage sites within the nucleotide sequence of SEQ ID NO:X. Preferably, the ribozyme is engineered so that the cleavage recognition site is located near the 5′ end of the mRNA; i.e., to increase efficiency and minimize the intracellular accumulation of non-functional mRNA transcripts.

[0800] As in the antisense approach, the ribozymes of the invention can be composed of modified oligonucleotides (e.g. for improved stability, targeting, etc.) and should be delivered to cells which express in vivo. DNA constructs encoding the ribozyme may be introduced into the cell in the same manner as described above for the introduction of antisense encoding DNA. A preferred method of delivery involves using a DNA construct “encoding” the ribozyme under the control of a strong constitutive promoter, such as, for example, pol III or pol II promoter, so that transfected cells will produce sufficient quantities of the ribozyme to destroy endogenous messages and inhibit translation. Since ribozymes unlike antisense molecules, are catalytic, a lower intracellular concentration is required for efficiency.

[0801] Antagonist/agonist compounds may be employed to inhibit the cell growth and proliferation effects of the polypeptides of the present invention on neoplastic cells and tissues, i.e. stimulation of angiogenesis of tumors, and, therefore, retard or prevent abnormal cellular growth and proliferation, for example, in tumor formation or growth.

[0802] The antagonist/agonist may also be employed to prevent hyper-vascular diseases, and prevent the proliferation of epithelial lens cells after extracapsular cataract surgery. Prevention of the mitogenic activity of the polypeptides of the present invention may also be desirous in cases such as restenosis after balloon angioplasty.

[0803] The antagonist/agonist may also be employed to prevent the growth of scar tissue during wound healing.

[0804] The antagonist/agonist may also be employed to treat the diseases described herein.

[0805] Thus, the invention provides a method of treating disorders or diseases, including but not limited to the disorders or diseases listed throughout this application, associated with overexpression of a polynucleotide of the present invention by administering to a patient (a) an antisense molecule directed to the polynucleotide of the present invention, and/or (b) a ribozyme directed to the polynucleotide of the present invention.

[0806] Binding Peptides and Other Molecules

[0807] The invention also encompasses screening methods for identifying polypeptides and nonpolypeptides that bind colon or colon cancer antigen polypeptides, and the colon or colon cancer antigen binding molecules identified thereby. These binding molecules are useful, for example, as agonists and antagonists of the colon or colon cancer antigen polypeptides. Such agonists and antagonists can be used, in accordance with the invention, in the therapeutic embodiments described in detail, below.

[0808] This method comprises the steps of: (1) contacting colon or colon cancer antigen polypeptides or colon or colon cancer antigen-like polypeptides with a plurality of molecules; and (2) identifying a molecule that binds the colon or colon cancer antigen polypeptides or colon or colon cancer antigen-like polypeptides.

[0809] The step of contacting the colon or colon cancer antigen polypeptides or colon or colon cancer antigen-like polypeptides with the plurality of molecules may be effected in a number of ways. For example, one may contemplate immobilizing the colon or colon cancer antigen polypeptides or colon or colon cancer antigen-like polypeptides on a solid support and bringing a solution of the plurality of molecules in contact with the immobilized colon or colon cancer antigen polypeptides or colon or colon cancer antigen-like polypeptides. Such a procedure would be akin to an affinity chromatographic process, with the affinity matrix being comprised of the immobilized colon or colon cancer antigen polypeptides or colon or colon cancer antigen-like polypeptides. The molecules having a selective affinity for the colon or colon cancer antigen polypeptides or colon or colon cancer antigen-like polypeptides can then be purified by affinity selection. The nature of the solid support, process for attachment of the colon or colon cancer antigen polypeptides or colon or colon cancer antigen-like polypeptides to the solid support, solvent, and conditions of the affinity isolation or selection are largely conventional and well known to those of ordinary skill in the art.

[0810] Alternatively, one may also separate a plurality of polypeptides into substantially separate fractions comprising a subset of or individual polypeptides. For instance, one can separate the plurality of polypeptides by gel electrophoresis, column chromatography, or like method known to those of ordinary skill for the separation of polypeptides. The individual polypeptides can also be produced by a transformed host cell in such a way as to be expressed on or about its outer surface (e.g., a recombinant phage). Individual isolates can then be “probed” by the colon or colon cancer antigen polypeptides or colon or colon cancer antigen-like polypeptides, optionally in the presence of an inducer should one be required for expression, to determine if any selective affinity interaction takes place between the colon or colon cancer antigen polypeptides or colon or colon cancer antigen-like polypeptides and the individual clone. Prior to contacting the colon or colon cancer antigen polypeptides or colon or colon cancer antigen-like polypeptides with each fraction comprising individual polypeptides, the polypeptides could first be transferred to a solid support for additional convenience. Such a solid support may simply be a piece of filter membrane, such as one made of nitrocellulose or nylon. In this manner, positive clones could be identified from a collection of transformed host cells of an expression library, which harbor a DNA construct encoding a polypeptide having a selective affinity for colon or colon cancer antigen polypeptides or colon or colon cancer antigen-like polypeptides. Furthermore, the amino acid sequence of the polypeptide having a selective affinity for the colon or colon cancer antigen polypeptides or colon or colon cancer antigen-like polypeptides can be determined directly by conventional means or the coding sequence of the DNA encoding the polypeptide can frequently be determined more conveniently. The primary sequence can then be deduced from the corresponding DNA sequence. If the amino acid sequence is to be determined from the polypeptide itself, one may use microsequencing techniques. The sequencing technique may include mass spectroscopy.

[0811] In certain situations, it may be desirable to wash away any unbound colon or colon cancer antigen polypeptides or colon or colon cancer antigen-like polypeptides, or alternatively, unbound polypeptides, from a mixture of the colon or colon cancer antigen polypeptides or colon or colon cancer antigen-like polypeptides and the plurality of polypeptides prior to attempting to determine or to detect the presence of a selective affinity interaction. Such a wash step may be particularly desirable when the colon or colon cancer antigen polypeptides or colon or colon cancer antigen-like polypeptides or the plurality of polypeptides is bound to a solid support.

[0812] The plurality of molecules provided according to this method may be provided by way of diversity libraries, such as random or combinatorial peptide or nonpeptide libraries which can be screened for molecules that specifically bind colon or colon cancer antigen polypeptides. Many libraries are known in the art that can be used, e.g., chemically synthesized libraries, recombinant (e.g., phage display libraries), and in vitro translation-based libraries. Examples of chemically synthesized libraries are described in Fodor et al., 1991, Science 251:767-773; Houghten et al., 1991, Nature 354:84-86; Lam et al., 1991, Nature 354:82-84; Medynski, 1994, Bio/Technology 12:709-710;Gallop et al., 1994, J. Medicinal Chemistry 37(9):1233-1251; Ohlmeyer et al., 1993, Proc. Natl. Acad. Sci. USA 90:10922-10926; Erb et al., 1994, Proc. Natl. Acad. Sci. USA 91:11422-11426; Houghten et al., 1992, Biotechniques 13:412; Jayawickreme et al., 1994, Proc. Natl. Acad. Sci. USA 91:1614-1618; Salmon et al., 1993, Proc. Natl. Acad. Sci. USA 90:11708-11712; PCT Publication No. WO 93/20242; and Brenner and Lerner, 1992, Proc. Natl. Acad. Sci. USA 89:5381-5383.

[0813] Examples of phage display libraries are described in Scott and Smith, 1990, Science 249:386-390; Devlin et al., 1990, Science, 249:404-406; Christian, R. B., et al., 1992, J. Mol. Biol. 227:711-718); Lenstra, 1992, J. Immunol. Meth. 152:149-157; Kay et al., 1993, Gene 128:59-65; and PCT Publication No. WO 94/18318 dated Aug. 18, 1994.

[0814] In vitro translation-based libraries include but are not limited to those described in PCT Publication No. WO 91/05058 dated Apr. 18, 1991; and Mattheakis et al., 1994, Proc. Natl. Acad. Sci. USA 91:9022-9026.

[0815] By way of examples of nonpeptide libraries, a benzodiazepine library (see e.g., Bunin et al., 1994, Proc. Natl. Acad. Sci. USA 91:4708-4712) can be adapted for use. Peptoid libraries (Simon et al., 1992, Proc. Natl. Acad. Sci. USA 89:9367-9371) can also be used. Another example of a library that can be used, in which the amide functionalities in peptides have been permethylated to generate a chemically transformed combinatorial library, is described by Ostresh et al. (1994, Proc. Natl. Acad. Sci. USA 91:11138-11142).

[0816] The variety of non-peptide libraries that are useful in the present invention is great. For example, Ecker and Crooke, 1995, Bio/Technology 13:351-360 list benzodiazepines, hydantoins, piperazinediones, biphenyls, sugar analogs, beta-mercaptoketones, arylacetic acids, acylpiperidines, benzopyrans, cubanes, xanthines, aminimides, and oxazolones as among the chemical species that form the basis of various libraries.

[0817] Non-peptide libraries can be classified broadly into two types: decorated monomers and oligomers. Decorated monomer libraries employ a relatively simple scaffold structure upon which a variety functional groups is added. Often the scaffold will be a molecule with a known useful pharmacological activity. For example, the scaffold might be the benzodiazepine structure.

[0818] Non-peptide oligomer libraries utilize a large number of monomers that are assembled together in ways that create new shapes that depend on the order of the monomers. Among the monomer units that have been used are carbamates, pyrrolinones, and morpholinos. Peptoids, peptide-like oligomers in which the side chain is attached to the alpha amino group rather than the alpha carbon, form the basis of another version of non-peptide oligomer libraries. The first non-peptide oligomer libraries utilized a single type of monomer and thus contained a repeating backbone. Recent libraries have utilized more than one monomer, giving the libraries added flexibility.

[0819] Screening the libraries can be accomplished by any of a variety of commonly known methods. See, e.g., the following references, which disclose screening of peptide libraries: Parmley and Smith, 1989, Adv. Exp. Med. Biol. 251:215-218; Scott and Smith, 1990, Science 249:386-390; Fowlkes et al., 1992; BioTechniques 13:422-427; Oldenburg et al., 1992, Proc. Natl. Acad. Sci. USA 89:5393-5397; Yu et al., 1994, Cell 76:933-945; Staudt et al., 1988, Science 241:577-580; Bock et al., 1992, Nature 355:564-566; Tuerk et al., 1992, Proc. Natl. Acad. Sci. USA 89:6988-6992; Ellington et al., 1992, Nature 355:850-852; U.S. Pat. No. 5,096,815, U.S. Pat. No. 5,223,409, and U.S. Pat. No. 5,198,346, all to Ladner et al.; Rebar and Pabo, 1993, Science 263:671-673; and CT Publication No. WO 94/18318.

[0820] In a specific embodiment, screening to identify a molecule that binds colon or colon cancer antigen polypeptides can be carried out by contacting the library members with a colon or colon cancer antigen polypeptides or colon or colon cancer antigen-like polypeptides immobilized on a solid phase and harvesting those library members that bind to the colon or colon cancer antigen polypeptides or colon or colon cancer antigen-like polypeptides. Examples of such screening methods, termed “panning” techniques are described by way of example in Parmley and Smith, 1988, Gene 73:305-318; Fowlkes et al., 1992, BioTechniques 13:422-427; International Publication No. WO 94/18318; and in references cited herein.

[0821] In another embodiment, the two-hybrid system for selecting interacting proteins in yeast (Fields and Song, 1989, Nature 340:245-246; Chien et al., 1991, Proc. Natl. Acad. Sci. USA 88:9578-9582) can be used to identify molecules that specifically bind to colon or colon cancer antigen polypeptides or colon or colon cancer antigen-like polypeptides.

[0822] Where the colon or colon cancer antigen binding molecule is a polypeptide, the polypeptide can be conveniently selected from any peptide library, including random peptide libraries, combinatorial peptide libraries, or biased peptide libraries. The term “biased” is used herein to mean that the method of generating the library is manipulated so as to restrict one or more parameters that govern the diversity of the resulting collection of molecules, in this case peptides.

[0823] Thus, a truly random peptide library would generate a collection of peptides in which the probability of finding a particular amino acid at a given position of the peptide is the same for all 20 amino acids. A bias can be introduced into the library, however, by specifying, for example, that a lysine occurs every fifth amino acid or that positions 4, 8, and 9 of a decapeptide library be fixed to include only arginine. Clearly, many types of biases can be contemplated, and the present invention is not restricted to any particular bias. Furthermore, the present invention contemplates specific types of peptide libraries, such as phage displayed peptide libraries and those that utilize a DNA construct comprising a lambda phage vector with a DNA insert.

[0824] As mentioned above, in the case of a colon or colon cancer antigen binding molecule that is a polypeptide, the polypeptide may have about 6 to less than about 60 amino acid residues, preferably about 6 to about 10 amino acid residues, and most preferably, about 6 to about 22 amino acids. In another embodiment, a colon or colon cancer antigen binding polypeptide has in the range of 15-100 amino acids, or 20-50 amino acids.

[0825] The selected colon or colon cancer antigen binding polypeptide can be obtained by chemical synthesis or recombinant expression.

[0826] Other Activities

[0827] A polypeptide, polynucleotide, agonist, or antagonist of the present invention, as a result of the ability to stimulate vascular endothelial cell growth, may be employed in treatment for stimulating re-vascularization of ischemic tissues due to various disease conditions such as thrombosis, arteriosclerosis, and other cardiovascular conditions. The polypeptide, polynucleotide, agonist, or antagonist of the present invention may also be employed to stimulate angiogenesis and limb regeneration, as discussed above.

[0828] A polypeptide, polynucleotide, agonist, or antagonist of the present invention may also be employed for treating wounds due to injuries, burns, post-operative tissue repair, and ulcers since they are mitogenic to various cells of different origins, such as fibroblast cells and skeletal muscle cells, and therefore, facilitate the repair or replacement of damaged or diseased tissue.

[0829] A polypeptide, polynucleotide, agonist, or antagonist of the present invention may also be employed to stimulate neuronal growth and to treat and prevent neuronal damage which occurs in certain neuronal disorders or neuro-degenerative conditions such as Alzheimer's disease, Parkinson's disease, and AIDS-related complex. A polypeptide, polynucleotide, agonist, or antagonist of the present invention may have the ability to stimulate chondrocyte growth; therefore, they may be employed to enhance bone and periodontal regeneration and aid in tissue transplants or bone grafts.

[0830] A polypeptide, polynucleotide, agonist, or antagonist of the present invention may be also employed to prevent skin aging due to sunburn by stimulating keratinocyte growth.

[0831] A polypeptide, polynucleotide, agonist, or antagonist of the present invention may also be employed for preventing hair loss, since FGF family members activate hair-forming cells and promotes melanocyte growth. Along the same lines, a polypeptide, polynucleotide, agonist, or antagonist of the present invention may be employed to stimulate growth and differentiation of hematopoietic cells and bone marrow cells when used in combination with other cytokines.

[0832] A polypeptide, polynucleotide, agonist, or antagonist of the present invention may also be employed to maintain organs before transplantation or for supporting cell culture of primary tissues. A polypeptide, polynucleotide, agonist, or antagonist of the present invention may also be employed for inducing tissue of mesodermal origin to differentiate in early embryos.

[0833] A polypeptide, polynucleotide, agonist, or antagonist of the present invention may also increase or decrease the differentiation or proliferation of embryonic stem cells, besides, as discussed above, hematopoietic lineage.

[0834] A polypeptide, polynucleotide, agonist, or antagonist of the present invention may also be used to modulate mammalian characteristics, such as body height, weight, hair color, eye color, skin, percentage of adipose tissue, pigmentation, size, and shape (e.g., cosmetic surgery). Similarly, a polypeptide, polynucleotide, agonist, or antagonist of the present invention may be used to modulate mammalian metabolism affecting catabolism, anabolism, processing, utilization, and storage of energy.

[0835] A polypeptide, polynucleotide, agonist, or antagonist of the present invention may be used to change a mammal's mental state or physical state by influencing biorhythms, caricadic rhythms, depression (including depressive disorders), tendency for violence, tolerance for pain, reproductive capabilities (preferably by Activin or Inhibin-like activity), hormonal or endocrine levels, appetite, libido, memory, stress, or other cognitive qualities.

[0836] A polypeptide, polynucleotide, agonist, or antagonist of the present invention may also be used as a food additive or preservative, such as to increase or decrease storage capabilities, fat content, lipid, protein, carbohydrate, vitamins, minerals, cofactors or other nutritional components.

[0837] The above-recited applications have uses in a wide variety of hosts. Such hosts include, but are not limited to, human, murine, rabbit, goat, guinea pig, camel, horse, mouse, rat, hamster, pig, micro-pig, chicken, goat, cow, sheep, dog, cat, non-human primate, and human. In specific embodiments, the host is a mouse, rabbit, goat, guinea pig, chicken, rat, hamster, pig, sheep, dog or cat. In preferred embodiments, the host is a mammal. In most preferred embodiments, the host is a human.

[0838] Other Preferred Embodiments

[0839] Other preferred embodiments of the claimed invention include an isolated nucleic acid molecule comprising a nucleotide sequence which is at least 95% identical to a sequence of at least about 50 contiguous nucleotides in the nucleotide sequence of SEQ ID NO:X or the complementary strand thereto, the nucleotide sequence as defined in column 5 of Table 1A or columns 8 and 9 of Table 2 or the complementary strand thereto, and/or cDNA contained in Clone ID NO:Z.

[0840] Also preferred is a nucleic acid molecule wherein said sequence of contiguous nucleotides is included in the nucleotide sequence of the portion of SEQ ID NO:X as defined in column 5, “ORF (From-To)”, in Table 1A.

[0841] Also preferred is a nucleic acid molecule wherein said sequence of contiguous nucleotides is included in the nucleotide sequence of the portion of SEQ ID NO:X as defined in columns 8 and 9, “NT From” and “NT To” respectively, in Table 2.

[0842] Also preferred is an isolated nucleic acid molecule comprising a nucleotide sequence which is at least 95% identical to a sequence of at least about 150 contiguous nucleotides in the nucleotide sequence of SEQ ID NO:X or the complementary strand thereto, the nucleotide sequence as defined in column 5 of Table 1A or columns 8 and 9 of Table 2 or the complementary strand thereto, and/or cDNA contained in Clone ID NO:Z.

[0843] Further preferred is an isolated nucleic acid molecule comprising a nucleotide sequence which is at least 95% identical to a sequence of at least about 500 contiguous nucleotides in the nucleotide sequence of SEQ ID NO:X or the complementary strand thereto, the nucleotide sequence as defined in column 5 of Table 1A or columns 8 and 9 of Table 2 or the complementary strand thereto, and/or cDNA contained in Clone ID NO:Z.

[0844] A further preferred embodiment is a nucleic acid molecule comprising a nucleotide sequence which is at least 95% identical to the nucleotide sequence of the portion of SEQ ID NO:X defined in column 5, “ORF (From-To)”, in Table 1A.

[0845] A further preferred embodiment is a nucleic acid molecule comprising a nucleotide sequence which is at least 95% identical to the nucleotide sequence of the portion of SEQ ID NO:X defined in columns 8 and 9, “NT From” and “NT To”, respectively, in Table 2.

[0846] A further preferred embodiment is an isolated nucleic acid molecule comprising a nucleotide sequence which is at least 95% identical to the complete nucleotide sequence of SEQ ID NO:X or the complementary strand thereto, the nucleotide sequence as defined in column 5 of Table 1A or columns 8 and 9 of Table 2 or the complementary strand thereto, and/or cDNA contained in Clone ID NO:Z.

[0847] Also preferred is an isolated nucleic acid molecule which hybridizes under stringent hybridization conditions to a nucleic acid molecule comprising a nucleotide sequence of SEQ ID NO:X or the complementary strand thereto, the nucleotide sequence as defined in column 5 of Table 1A or columns 8 and 9 of Table 2 or the complementary strand thereto, and/or cDNA contained in Clone ID NO:Z, wherein said nucleic acid molecule which hybridizes does not hybridize under stringent hybridization conditions to a nucleic acid molecule having a nucleotide sequence consisting of only A residues or of only T residues.

[0848] Also preferred is a composition of matter comprising a DNA molecule which comprises the cDNA contained in Clone ID NO:Z.

[0849] Also preferred is an isolated nucleic acid molecule comprising a nucleotide sequence which is at least 95% identical to a sequence of at least 50 contiguous nucleotides of the cDNA sequence contained in Clone ID NO:Z.

[0850] Also preferred is an isolated nucleic acid molecule, wherein said sequence of at least 50 contiguous nucleotides is included in the nucleotide sequence of an open reading frame sequence encoded by cDNA contained in Clone ID NO:Z.

[0851] Also preferred is an isolated nucleic acid molecule comprising a nucleotide sequence which is at least 95% identical to sequence of at least 150 contiguous nucleotides in the nucleotide sequence encoded by cDNA contained in Clone ID NO:Z.

[0852] A further preferred embodiment is an isolated nucleic acid molecule comprising a nucleotide sequence which is at least 95% identical to sequence of at least 500 contiguous nucleotides in the nucleotide sequence encoded by cDNA contained in Clone ID NO:Z.

[0853] A further preferred embodiment is an isolated nucleic acid molecule comprising a nucleotide sequence which is at least 95% identical to the complete nucleotide sequence encoded by cDNA contained in Clone ID NO:Z.

[0854] A further preferred embodiment is a method for detecting in a biological sample a nucleic acid molecule comprising a nucleotide sequence which is at least 95% identical to a sequence of at least 50 contiguous nucleotides in a sequence selected from the group consisting of: a nucleotide sequence of SEQ ID NO:X or the complementary strand thereto; the nucleotide sequence as defined in column 5 of Table 1A or columns 8 and 9 of Table 2 or the complementary strand thereto; and a nucleotide sequence encoded by cDNA contained in Clone ID NO:Z; which method comprises a step of comparing a nucleotide sequence of at least one nucleic acid molecule in said sample with a sequence selected from said group and determining whether the sequence of said nucleic acid molecule in said sample is at least 95% identical to said selected sequence.

[0855] Also preferred is the above method wherein said step of comparing sequences comprises determining the extent of nucleic acid hybridization between nucleic acid molecules in said sample and a nucleic acid molecule comprising said sequence selected from said group. Similarly, also preferred is the above method wherein said step of comparing sequences is performed by comparing the nucleotide sequence determined from a nucleic acid molecule in said sample with said sequence selected from said group. The nucleic acid molecules can comprise DNA molecules or RNA molecules.

[0856] A further preferred embodiment is a method for identifying the species, tissue or cell type of a biological sample which method comprises a step of detecting nucleic acid molecules in said sample, if any, comprising a nucleotide sequence that is at least 95% identical to a sequence of at least 50 contiguous nucleotides in a sequence selected from the group consisting of: a nucleotide sequence of SEQ ID NO:X or the complementary strand thereto; the nucleotide sequence as defined in column 5 of Table 1A or columns 8 and 9 of Table 2 or the complementary strand thereto; and a nucleotide sequence of the cDNA contained in Clone ID NO:Z.

[0857] The method for identifying the species, tissue or cell type of a biological sample can comprise a step of detecting nucleic acid molecules comprising a nucleotide sequence in a panel of at least two nucleotide sequences, wherein at least one sequence in said panel is at least 95% identical to a sequence of at least 50 contiguous nucleotides in a sequence selected from said group.

[0858] Also preferred is a method for diagnosing in a subject a pathological condition associated with abnormal structure or expression of a nucleotide sequence of SEQ ID NO:X or the complementary strand thereto; the nucleotide sequence as defined in column 5 of Table 1A or columns 8 and 9 of Table 2 or the complementary strand thereto; or the cDNA contained in Clone ID NO:Z which encodes a protein, wherein the method comprises a step of detecting in a biological sample obtained from said subject nucleic acid molecules, if any, comprising a nucleotide sequence that is at least 95% identical to a sequence of at least 50 contiguous nucleotides in a sequence selected from the group consisting of: a nucleotide sequence of SEQ ID NO:X or the complementary strand thereto; the nucleotide sequence as defined in column 5 of Table 1A or columns 8 and 9 of Table 2 or the complementary strand thereto; and a nucleotide sequence of cDNA contained in Clone ID NO:Z.

[0859] The method for diagnosing a pathological condition can comprise a step of detecting nucleic acid molecules comprising a nucleotide sequence in a panel of at least two nucleotide sequences, wherein at least one sequence in said panel is at least 95% identical to a sequence of at least 50 contiguous nucleotides in a sequence selected from said group.

[0860] Also preferred is a composition of matter comprising isolated nucleic acid molecules wherein the nucleotide sequences of said nucleic acid molecules comprise a panel of at least two nucleotide sequences, wherein at least one sequence in said panel is at least 95% identical to a sequence of at least 50 contiguous nucleotides in a sequence selected from the group consisting of: a nucleotide sequence of SEQ ID NO:X or the complementary strand thereto; the nucleotide sequence as defined in column 5 of Table 1A or columns 8 and 9 of Table 2 or the complementary strand thereto; and a nucleotide sequence encoded by cDNA contained in Clone ID NO:Z. The nucleic acid molecules can comprise DNA molecules or RNA molecules.

[0861] Also preferred is a composition of matter comprising isolated nucleic acid molecules wherein the nucleotide sequences of said nucleic acid molecules comprise a DNA microarray or “chip” of at least 1, 2, 3, 4, 5, 6, 7, 8, 9, 10, 15, 20, 25, 30, 40, 50, 100, 150, 200, 250, 300, 500, 1000, 2000, 3000, or 4000 nucleotide sequences, wherein at least one sequence in said DNA microarray or “chip” is at least 95% identical to a sequence of at least 50 contiguous nucleotides in a sequence selected from the group consisting of: a nucleotide sequence of SEQ ID NO:X wherein X is any integer as defined in Table 1A; and a nucleotide sequence encoded by a human cDNA clone identified by a cDNA “Clone ID” in Table 1A.

[0862] Also preferred is an isolated polypeptide comprising an amino acid sequence at least 90% identical to a sequence of at least about 10 contiguous amino acids in the polypeptide sequence of SEQ ID NO:Y; a polypeptide encoded by SEQ ID NO:X or the complementary strand thereto; the polypeptide encoded by the nucleotide sequence as defined in columns 8 and 9 of Table 2; and/or a polypeptide encoded by cDNA contained in Clone ID NO:Z.

[0863] Also preferred is an isolated polypeptide comprising an amino acid sequence at least 95% identical to a sequence of at least about 30 contiguous amino acids in the amino acid sequence of SEQ ID NO:Y; a polypeptide encoded by SEQ ID NO:X or the complementary strand thereto; the polypeptide encoded by the nucleotide sequence as defined in columns 8 and 9 of Table 2; and/or a polypeptide encoded by cDNA contained in Clone ID NO:Z.

[0864] Further preferred is an isolated polypeptide comprising an amino acid sequence at least 95% identical to a sequence of at least about 100 contiguous amino acids in the amino acid sequence of SEQ ID NO:Y; a polypeptide encoded by SEQ ID NO:X or the complementary strand thereto; the polypeptide encoded by the nucleotide sequence as defined in columns 8 and 9 of Table 2; and/or a polypeptide encoded by cDNA contained in Clone ID NO:Z.

[0865] Further preferred is an isolated polypeptide comprising an amino acid sequence at least 95% identical to the complete amino acid sequence of SEQ ID NO:Y; a polypeptide encoded by SEQ ID NO:X or the complementary strand thereto; the polypeptide encoded by the nucleotide sequence as defined in columns 8 and 9 of Table 2; and/or a polypeptide encoded by cDNA contained in Clone ID NO:Z.

[0866] Further preferred is an isolated polypeptide comprising an amino acid sequence at least 90% identical to a sequence of at least about 10 contiguous amino acids in the complete amino acid sequence of a polypeptide encoded by contained in Clone ID NO:Z

[0867] Also preferred is a polypeptide wherein said sequence of contiguous amino acids is included in the amino acid sequence of a portion of said polypeptide encoded by cDNA contained in Clone ID NO:Z; a polypeptide encoded by SEQ ID NO:X or the complementary strand thereto; the polypeptide encoded by the nucleotide sequence as defined in columns 8 and 9 of Table 2; and/or the polypeptide sequence of SEQ ID NO:Y.

[0868] Also preferred is an isolated polypeptide comprising an amino acid sequence at least 95% identical to a sequence of at least about 30 contiguous amino acids in the amino acid sequence of a polypeptide encoded by the cDNA contained in Clone ID NO:Z.

[0869] Also preferred is an isolated polypeptide comprising an amino acid sequence at least 95% identical to a sequence of at least about 100 contiguous amino acids in the amino acid sequence of a polypeptide encoded by cDNA contained in Clone ID NO:Z.

[0870] Also preferred is an isolated polypeptide comprising an amino acid sequence at least 95% identical to the amino acid sequence of a polypeptide encoded by the cDNA contained in Clone ID NO:Z.

[0871] Further preferred is an isolated antibody which binds specifically to a polypeptide comprising an amino acid sequence that is at least 90% identical to a sequence of at least 10 contiguous amino acids in a sequence selected from the group consisting of: a polypeptide sequence of SEQ ID NO:Y; a polypeptide encoded by SEQ ID NO:X or the complementary strand thereto; the polypeptide encoded by the nucleotide sequence as defined in columns 8 and 9 of Table 2; and a polypeptide encoded by the cDNA contained in Clone ID NO:Z.

[0872] Further preferred is a method for detecting in a biological sample a polypeptide comprising an amino acid sequence which is at least 90% identical to a sequence of at least 10 contiguous amino acids in a sequence selected from the group consisting of: a polypeptide sequence of SEQ ID NO:Y; a polypeptide encoded by SEQ ID NO:X or the complementary strand thereto; the polypeptide encoded by the nucleotide sequence as defined in columns 8 and 9 of Table 2; and a polypeptide encoded by the cDNA contained in Clone ID NO:Z; which method comprises a step of comparing an amino acid sequence of at least one polypeptide molecule in said sample with a sequence selected from said group and determining whether the sequence of said polypeptide molecule in said sample is at least 90% identical to said sequence of at least 10 contiguous amino acids.

[0873] Also preferred is the above method wherein said step of comparing an amino acid sequence of at least one polypeptide molecule in said sample with a sequence selected from said group comprises determining the extent of specific binding of polypeptides in said sample to an antibody which binds specifically to a polypeptide comprising an amino acid sequence that is at least 90% identical to a sequence of at least 10 contiguous amino acids in a sequence selected from the group consisting of: a polypeptide sequence of SEQ ID NO:Y; a polypeptide encoded by SEQ ID NO:X or the complementary strand thereto; the polypeptide encoded by the nucleotide sequence as defined in columns 8 and 9 of Table 2; and a polypeptide encoded by the cDNA contained in Clone ID NO:Z.

[0874] Also preferred is the above method wherein said step of comparing sequences is performed by comparing the amino acid sequence determined from a polypeptide molecule in said sample with said sequence selected from said group.

[0875] Also preferred is a method for identifying the species, tissue or cell type of a biological sample which method comprises a step of detecting polypeptide molecules in said sample, if any, comprising an amino acid sequence that is at least 90% identical to a sequence of at least 10 contiguous amino acids in a sequence selected from the group consisting of: polypeptide sequence of SEQ ID NO:Y; a polypeptide encoded by SEQ ID NO:X or the complementary strand thereto; the polypeptide encoded by the nucleotide sequence as defined in columns 8 and 9 of Table 2; and a polypeptide encoded by the cDNA contained in Clone ID NO:Z.

[0876] Also preferred is the above method for identifying the species, tissue or cell type of a biological sample, which method comprises a step of detecting polypeptide molecules comprising an amino acid sequence in a panel of at least two amino acid sequences, wherein at least one sequence in said panel is at least 90% identical to a sequence of at least 10 contiguous amino acids in a sequence selected from the above group.

[0877] Also preferred is a method for diagnosing in a subject a pathological condition associated with abnormal structure or expression of a nucleic acid sequence identified in Table 1A or Table 2 encoding a polypeptide, which method comprises a step of detecting in a biological sample obtained from said subject polypeptide molecules comprising an amino acid sequence in a panel of at least two amino acid sequences, wherein at least one sequence in said panel is at least 90% identical to a sequence of at least 10 contiguous amino acids in a sequence selected from the group consisting of: polypeptide sequence of SEQ ID NO:Y; a polypeptide encoded by SEQ ID NO:X or the complementary strand thereto; the polypeptide encoded by the nucleotide sequence as defined in columns 8 and 9 of Table 2; and a polypeptide encoded by the cDNA contained in Clone ID NO:Z.

[0878] In any of these methods, the step of detecting said polypeptide molecules includes using an antibody.

[0879] Also preferred is an isolated nucleic acid molecule comprising a nucleotide sequence which is at least 95% identical to a nucleotide sequence encoding a polypeptide wherein said polypeptide comprises an amino acid sequence that is at least 90% identical to a sequence of at least 10 contiguous amino acids in a sequence selected from the group consisting of: polypeptide sequence of SEQ ID NO:Y; a polypeptide encoded by SEQ ID NO:X or the complementary strand thereto; the polypeptide encoded by the nucleotide sequence as defined in columns 8 and 9 of Table 2; and a polypeptide encoded by the cDNA contained in Clone ID NO:Z.

[0880] Also preferred is an isolated nucleic acid molecule, wherein said nucleotide sequence encoding a polypeptide has been optimized for expression of said polypeptide in a prokaryotic host.

[0881] Also preferred is a polypeptide molecule, wherein said polypeptide comprises an amino acid sequence selected from the group consisting of: polypeptide sequence of SEQ ID NO:Y; a polypeptide encoded by SEQ ID NO:X or the complementary strand thereto; the polypeptide encoded by the nucleotide sequence as defined in columns 8 and 9 of Table 2; and a polypeptide encoded by the cDNA contained in Clone ID NO:Z.

[0882] Further preferred is a method of making a recombinant vector comprising inserting any of the above isolated nucleic acid molecule into a vector. Also preferred is the recombinant vector produced by this method. Also preferred is a method of making a recombinant host cell comprising introducing the vector into a host cell, as well as the recombinant host cell produced by this method.

[0883] Also preferred is a method of making an isolated polypeptide comprising culturing this recombinant host cell under conditions such that said polypeptide is expressed and recovering said polypeptide. Also preferred is this method of making an isolated polypeptide, wherein said recombinant host cell is a eukaryotic cell and said polypeptide is a human protein comprising an amino acid sequence selected from the group consisting of: polypeptide sequence of SEQ ID NO:Y; a polypeptide encoded by SEQ ID NO:X or the complementary strand thereto; the polypeptide encoded by the nucleotide sequence as defined in columns 8 and 9 of Table 2; and a polypeptide encoded by the cDNA contained in Clone ID NO:Z. The isolated polypeptide produced by this method is also preferred.

[0884] Also preferred is a method of treatment of an individual in need of an increased level of a protein activity, which method comprises administering to such an individual a Therapeutic comprising an amount of an isolated polypeptide, polynucleotide, immunogenic fragment or analogue thereof, binding agent, antibody, or antigen binding fragment of the claimed invention effective to increase the level of said protein activity in said individual.

[0885] Also preferred is a method of treatment of an individual in need of a decreased level of a protein activity, which method comprised administering to such an individual a Therapeutic comprising an amount of an isolated polypeptide, polynucleotide, immunogenic fragment or analogue thereof, binding agent, antibody, or antigen binding fragment of the claimed invention effective to decrease the level of said protein activity in said individual.

[0886] Also preferred is a method of treatment of an individual in need of a specific delivery of toxic compositions to diseased cells (e.g., tumors, leukemias or lymphomas), which method comprises administering to such an individual a Therapeutic comprising an amount of an isolated polypeptide of the invention, including, but not limited to a binding agent, or antibody of the claimed invention that are associated with toxin or cytotoxic prodrugs.

[0887] Having generally described the invention, the same will be more readily understood by reference to the following examples, which are provided by way of illustration and are not intended as limiting.

TABLE 6

| ATCC Deposits | Deposit Date | ATCC Designation Number |
|---|---|---|
| LP01, LP02, LP03, LP04, | May 20, 1997 | 209059, 209060, 209061, 209062, 209063, |
| LP05, LP06, LP07, LP08, | | 209064, 209065, 209066, 209067, 209068, |
| LP09, LP10, LP11, | | 209069 |
| LP12 | Jan. 12, 1998 | 209579 |
| LP13 | Jan. 12, 1998 | 209578 |
| LP14 | Jul. 16, 1998 | 203067 |
| LP15 | Jul. 16, 1998 | 203068 |
| LP16 | Feb. 1, 1999 | 203609 |
| LP17 | Feb. 1, 1999 | 203610 |
| LP20 | Nov. 17, 1998 | 203485 |
| LP21 | Jun. 18, 1999 | PTA-252 |
| LP22 | Jun. 18, 1999 | PTA-253 |
| PA-005 Phage | Oct. 28, 1999 | PTA-881 |
| PA-005 | Oct. 28, 1999 | PTA-882 |

### EXAMPLES

### Example 1

### Isolation of a Selected cDNA Clone from the Deposited Sample

[0888] Each Clone ID NO:Z is contained in a plasmid. Table 7 identifies the vectors used to construct the cDNA library from which each clone was isolated. In many cases, the vector used to construct the library is a phage vector from which a plasmid has been excised. The following correlates the related plasmid for each phage vector used in constructing the cDNA library. For example, where a particular clone is identified in Table 7 as being isolated in the vector “Lambda Zap,” the corresponding deposited clone is in “pBluescript.”

| Vector Used to Construct Library | Corresponding Deposited Plasmid |
|---|---|
| Lambda Zap | pBluescript (pBS) |
| Uni-Zap XR | pBluescript (pBS) |
| Zap Express | pBK |
| lafmid BA | plafmid BA |
| pSport1 | pSport1 |
| pCMVSport 2.0 | pCMVSport 2.0 |
| pCMVSport 3.0 | pCMVSport 3.0 |
| pCR ® 2.1 | pCR ® 2.1 |

[0889] Vectors Lambda Zap (U.S. Pat. Nos. 5,128,256 and 5,286,636), Uni-Zap XR (U.S. Pat. Nos. 5,128,256 and 5,286,636), Zap Express (U.S. Pat. Nos. 5,128,256 and 5,286,636), pBluescript (pBS) (Short, J. M. et al., Nucleic Acids Res. 16:7583-7600 (1988); Alting-Mees, M. A. and Short, J. M., Nucleic Acids Res. 17:9494 (1989)) and pBK (Alting-Mees, M. A. et al., Strategies 5:58-61 (1992)) are commercially available from Stratagene Cloning Systems, Inc., 11011 N. Torrey Pines Road, La Jolla, Calif., 92037. pBS contains an ampicillin resistance gene and pBK contains a neomycin resistance gene. Both can be transformed into E. coli strain XL-1 Blue, also available from Stratagene. pBS comes in 4 forms SK+, SK−, KS+ and KS. The S and K refers to the orientation of the polylinker to the T7 and T3 primer sequences which flank the polylinker region (“S” is for SacI and “K” is for KpnI which are the first sites on each respective end of the linker). ”+” or “−” refer to the orientation of the f1 origin of replication (“ori”), such that in one orientation, single stranded rescue initiated from the f1 ori generates sense strand DNA and in the other, antisense.

[0890] Vectors pSport1, pCMVSport 2.0 and pCMVSport 3.0, were obtained from Life Technologies, Inc., P. O. Box 6009, Gaithersburg, Md. 20897. All Sport vectors contain an ampicillin resistance gene and may be transformed into E. coli strain DH10B, also available from Life Technologies. (See, for instance, Gruber, C. E., et al., Focus 15:59 (1993).) Vector lafinid BA (Bento Soares, Columbia University, NY) contains an ampicillin resistance gene and can be transformed into E. coli strain XL-1 Blue. Vector pCR® 2.1, which is available from Invitrogen, 1600 Faraday Avenue, Carlsbad, Calif. 92008, contains an ampicillin resistance gene and may be transformed into E. coli strain DH10B, available from Life Technologies. (See, for instance, Clark, J. M., Nuc. Acids Res. 16:9677-9686 (1988) and Mead, D. et al., Bio/Technology 9: (1991).) Preferably, a polynucleotide of the present invention does not comprise the vector sequences identified for the particular clone in Table 7, as well as the corresponding plasmid vector sequences designated above.

[0891] The deposited material in the sample assigned the ATCC Deposit Number cited by reference to Tables 1, 2, 6 and 7 for any given cDNA clone also may contain one or more additional plasmids, each comprising a cDNA clone different from that given clone. Thus, deposits sharing the same ATCC Deposit Number contain at least a plasmid for each Clone ID NO:Z.

TABLE 7

| | | | ATCC |
|---|---|---|---|
| Libraries owned by Catalog | Catalog Description | Vector | Deposit |
| HUKA HUKB HUKC HUKD HUKE | Human Uterine Cancer | Lambda ZAP II | LP01 |
| HUKF HUKG | | | |
| HCNA HCNB | Human Colon | Lambda Zap II | LP01 |
| HFFA | Human Fetal Brain, random primed | Lambda Zap II | LP01 |
| HTWA | Resting T-Cell | Lambda ZAP II | LP01 |
| HBQA | Early Stage Human Brain, random | Lambda ZAP II | LP01 |
| | primed | | |
| HLMB HLMF HLMG HLMH HLMI | breast lymph node CDNA library | Lambda ZAP II | LP01 |
| HLMJ HLMM HLMN | | | |
| HCQA HCQB | human colon cancer | Lamda ZAP II | LP01 |
| HMEA HMEC HMED HMEE HMEF | Human Microvascular Endothelial | Lambda ZAP II | LP01 |
| HMEG HMEI HMEJ HMEK HMEL | Cells, fract. A | | |
| HUSA HUSC | Human Umbilical Vein Endothelial | Lambda ZAP II | LP01 |
| | Cells, fract. A | | |
| HLQA HLQB | Hepatocellular Tumor | Lambda ZAP II | LP01 |
| HHGA HHGB HHGC HHGD | Hemangiopericytoma | Lambda ZAP II | LP01 |
| HSDM | Human Striatum Depression, re-rescue | Lambda ZAP II | LP01 |
| HUSH | H Umbilical Vein Endothelial Cells, | Lambda ZAP II | LP01 |
| | frac A, re-excision | | |
| HSGS | Salivary gland, subtracted | Lambda ZAP II | LP01 |
| HFXA HFXB HFXC HFXD HFXE | Brain frontal cortex | Lambda ZAP II | LP01 |
| HFXF HFXG HFXH | | | |
| HPQA HPQB HPQC | PERM TF274 | Lambda ZAP II | LP01 |
| HFXJ HFXK | Brain Frontal Cortex, re-excision | Lambda ZAP II | LP01 |
| HCWA HCWB HCWC HCWD HCWE | CD34 positive cells (Cord Blood) | ZAP Express | LP02 |
| HCWF HCWG HCWH HCWI HCWJ | | | |
| HCWK | | | |
| HCUA HCUB HCUC | CD34 depleted Buffy Coat (Cord | ZAP Express | LP02 |
| | Blood) | | |
| HRSM | A-14 cell line | ZAP Express | LP02 |
| HRSA | A1-CELL LINE | ZAP Express | LP02 |
| HCUD HCUE HCUF HCUG HCUH | CD34 depleted Buffy Coat (Cord | ZAP Express | LP02 |
| HCUI | Blood), re-excision | | |
| HBXE HBXF HBXG | H. Whole Brain #2, re-excision | ZAP Express | LP02 |
| HRLM | L8 cell line | ZAP Express | LP02 |
| HBXA HBXB HBXC HBXD | Human Whole Brain #2 - Oligo dT > | ZAP Express | LP02 |
| | 1.5 Kb | | |
| HUDA HUDB HUDC | Testes | ZAP Express | LP02 |
| HHTM HHTN HHTO | H. hypothalamus, frac A; re-excision | ZAP Express | LP02 |
| HHTL | H. hypothalamus, frac A | ZAP Express | LP02 |
| HASA HASD | Human Adult Spleen | Uni-ZAP XR | LP03 |
| HFKC HFKD HFKE HFKF HFKG | Human Fetal Kidney | Uni-ZAP XR | LP03 |
| HE8A HE8B HE8C HE8D HE8E HE8F | Human 8 Week Whole Embryo | Uni-ZAP XR | LP03 |
| HE8M HE8N | | | |
| HGBA HGBD HGBE HGBF HGBG | Human Gall Bladder | Uni-ZAP XR | LP03 |
| HGBH HGBI | | | |
| HLHA HLHB HLHC HLHD HLHE | Human Fetal Lung III | Uni-ZAP XR | LP03 |
| HLHF HLHG HLHH HLHQ | | | |
| HPMA HPMB HPMC HPMD HPME | Human Placenta | Uni-ZAP XR | LP03 |
| HPMF HPMG HPMH | | | |
| HPRA HPRB HPRC HPRD | Human Prostate | Uni-ZAP XR | LP03 |
| HSIA HSIC HSID HSIE | Human Adult Small Intestine | Uni-ZAP XR | LP03 |
| HTEA HTEB HTEC HTED HTEE | Human Testes | Uni-ZAP XR | LP03 |
| HTEF HTEG HTEH HTEI HTEJ HTEK | | | |
| HTPA HTPB HTPC HTPD HTPE | Human Pancreas Tumor | Uni-ZAP XR | LP03 |
| HTTA HTTB HTTC HTTD HTTE HTTF | Human Testes Tumor | Uni-ZAP XR | LP03 |
| HAPA HAPB HAPC HAPM | Human Adult Pulmonary | Uni-ZAP XR | LP03 |
| HETA HETB HETC HETD HETE | Human Endometrial Tumor | Uni-ZAP XR | LP03 |
| HETF HETG HETH HETI | | | |
| HHFB HHFC HHFD HHFE HHFF | Human Fetal Heart | Uni-ZAP XR | LP03 |
| HHFG HHFH HHFI | | | |
| HHPB HHPC HHPD HHPE HHPF | Human Hippocampus | Uni-ZAP XR | LP03 |
| HHPG HHPH | | | |
| HCE1 HCE2 HCE3 HCE4 HCE5 HCEB | Human Cerebellum | Uni-ZAP XR | LP03 |
| HCEC HCED HCEE HCEF HCEG | | | |
| HUVB HUVC HUVD HUVE | Human Umbilical Vein, Endo. remake | Uni-ZAP XR | LP03 |
| HSTA HSTB HSTC HSTD | Human Skin Tumor | Uni-ZAP XR | LP03 |
| HTAA HTAB HTAC HTAD HTAE | Human Activated T-Cells | Uni-ZAP XR | LP03 |
| HFEA HFEB HFEC | Human Fetal Epithelium (Skin) | Uni-ZAP XR | LP03 |
| HJPA HJPB HJPC HJPD | HUMAN JURKAT MEMBRANE | Uni-ZAP XR | LP03 |
| | BOUND POLYSOMES | | |
| HESA | Human epithelioid sarcoma | Uni-Zap XR | LP03 |
| HLTA HLTB HLTC HLTD HLTE HLTF | Human T-Cell Lymphoma | Uni-ZAP XR | LP03 |
| HFTA HFTB HFTC HFTD | Human Fetal Dura Mater | Uni-ZAP XR | LP03 |
| HRDA HRDB HRDC HRDD HRDE | Human Rhabdomyosarcoma | Uni-ZAP XR | LP03 |
| HRDF | | | |
| HCAA HCAB HCAC | Cem cells cyclohexamide treated | Uni-ZAP XR | LP03 |
| HRGA HRGB HRGC HRGD | Raji Cells, cyclohexamide treated | Uni-ZAP XR | LP03 |
| HSUA HSUB HSUC HSUM | Supt Cells, cyclohexamide treated | Uni-ZAP XR | LP03 |
| HT4A HT4C HT4D | Activated T-Cells, 12 hrs. | Uni-ZAP XR | LP03 |
| HE9A HE9B HE9C HE9D HE9E HE9F | Nine Week Old Early Stage Human | Uni-ZAP XR | LP03 |
| HE9G HE9H HE9M HE9N | | | |
| HATA HATB HATC HATD HATE | Human Adrenal Gland Tumor | Uni-ZAP XR | LP03 |
| HT5A | Activated T-Cells, 24 hrs. | Uni-ZAP XR | LP03 |
| HFGA HFGM | Human Fetal Brain | Uni-ZAP XR | LP03 |
| HNEA HNEB HNEC HNED HNEE | Human Neutrophil | Uni-ZAP XR | LP03 |
| HBGB HBGD | Human Primary Breast Cancer | Uni-ZAP XR | LP03 |
| HBNA HBNB | Human Normal Breast | Uni-ZAP XR | LP03 |
| HCAS | Cem Cells, cyclohexamide treated, | Uni-ZAP XR | LP03 |
| | subtra | | |
| HHPS | Human Hippocampus, subtracted | pBS | LP03 |
| HKCS HKCU | Human Colon Cancer, subtracted | pBS | LP03 |
| HRGS | Raji cells, cyclohexamide treated, | pBS | LP03 |
| | subtracted | | |
| HSUT | Supt cells, cyclohexamide treated, | pBS | LP03 |
| | differentially expressed | | |
| HT4S | Activated T-Cells, 12 hrs, subtracted | Uni-ZAP XR | LP03 |
| HCDA HCDB HCDC HCDD HCDE | Human Chondrosarcoma | Uni-ZAP XR | LP03 |
| HOAA HOAB HOAC | Human Osteosarcoma | Uni-ZAP XR | LP03 |
| HTLA HTLB HTLC HTLD HTLE | Human adult testis, large inserts | Uni-ZAP XR | LP03 |
| HTLF | | | |
| HLMA HLMC HLMD | Breast Lymph node cDNA library | Uni-ZAP XR | LP03 |
| H6EA H6EB H6EC | HL-60, PMA 4 H | Uni-ZAP XR | LP03 |
| HTXA HTXB HTXC HTXD HTXE | Activated T-Cell (12hs)/Thiouridine | Uni-ZAP XR | LP03 |
| HTXF HTXG HTXH | labelledEco | | |
| HNFA HNFB HNFC HNFD HNFE | Human Neutrophil, Activated | Uni-ZAP XR | LP03 |
| HNFF HNFG HNFH HNFJ | | | |
| HTOB HTOC | HUMAN TONSILS, FRACTION 2 | Uni-ZAP XR | LP03 |
| HMGB | Human OB MG63 control fraction I | Uni-ZAP XR | LP03 |
| HOPB | Human OB HOS control fraction I | Uni-ZAP XR | LP03 |
| HORB | Human OB HOS treated (10 nM E2) | Uni-ZAP XR | LP03 |
| | fraction I | | |
| HSVA HSVB HSVC | Human Chronic Synovitis | Uni-ZAP XR | LP03 |
| HROA | HUMAN STOMACH | Uni-ZAP XR | LP03 |
| HBJA HBJB HBJC HBJD HBJE HBJF | HUMAN B CELL LYMPHOMA | Uni-ZAP XR | LP03 |
| HBJG HBJH HBJI HBJJ HBJK | | | |
| HCRA HCRB HCRC | human corpus colosum | Uni-ZAP XR | LP03 |
| HODA HODB HODC HODD | human ovarian cancer | Uni-ZAP XR | LP03 |
| HDSA | Dermatofibrosarcoma Protuberance | Uni-ZAP XR | LP03 |
| HMWA HMWB HMWC HMWD | Bone Marrow Cell Line (RS4; 11) | Uni-ZAP XR | LP03 |
| HMWE HMWF HMWG HMWH | | | |
| HMWI HMWJ | | | |
| HSOA | stomach cancer (human) | Uni-ZAP XR | LP03 |
| HERA | SKIN | Uni-ZAP XR | LP03 |
| HMDA | Brain-medulloblastoma | Uni-ZAP XR | LP03 |
| HGLA HGLB HGLD | Glioblastoma | Uni-ZAP XR | LP03 |
| HEAA | H. Atrophic Endometrium | Uni-ZAP XR | LP03 |
| HBCA HBCB | H. Lymph node breast Cancer | Uni-ZAP XR | LP03 |
| HPWT | Human Prostate BPH, re-excision | Uni-ZAP XR | LP03 |
| HFVG HFVH HFVI | Fetal Liver, subtraction II | pBS | LP03 |
| HNFI | Human Neutrophils, Activated, re- | pBS | LP03 |
| | excision | | |
| HBMB HBMC HBMD | Human Bone Marrow, re-excision | pBS | LP03 |
| HKML HKMM HKMN | H. Kidney Medulla, re-excision | pBS | LP03 |
| HKIX HKIY | H. Kidney Cortex, subtracted | pBS | LP03 |
| HADT | H. Amygdala Depression, subtracted | pBS | LP03 |
| H6AS | Hl-60, untreated, subtracted | Uni-ZAP XR | LP03 |
| H6ES | HL-60, PMA 4 H, subtracted | Uni-ZAP XR | LP03 |
| H6BS | HL-60, RA 4 h, Subtracted | Uni-ZAP XR | LP03 |
| H6CS | HL-60, PMA 1 d, subtracted | Uni-ZAP XR | LP03 |
| HTXJ HTXK | Activated T-cell(12 h)/Thiouridine-re- | Uni-ZAP XR | LP03 |
| | excision | | |
| HMSA HMSB HMSC HMSD HMSE | Monocyte activated | Uni-ZAP XR | LP03 |
| HMSF HMSG HMSH HMSI HMSJ | | | |
| HMSK | | | |
| HAGA HAGB HAGC HAGD HAGE | Human Amygdala | Uni-ZAP XR | LP03 |
| HAGF | | | |
| HSRA HSRB HSRE | STROMAL-OSTEOCLASTOMA | Uni-ZAP XR | LP03 |
| HSRD HSRF HSRG HSRH | Human Osteoclastoma Stromal Cells - | Uni-ZAP XR | LP03 |
| | unamplified | | |
| HSQA HSQB HSQC HSQD HSQE | Stromal cell TF274 | Uni-ZAP XR | LP03 |
| HSQF HSQG | | | |
| HSKA HSKB HSKC HSKD HSKE | Smooth muscle, serum treated | Uni-ZAP XR | LP03 |
| HSKF HSKZ | | | |
| HSLA HSLB HSLC HSLD HSLE | Smooth muscle, control | Uni-ZAP XR | LP03 |
| HSLF HSLG | | | |
| HSDA HSDD HSDE HSDF HSDG | Spinal cord | Uni-ZAP XR | LP03 |
| HSDH | | | |
| HPWS | Prostate-BPH subtracted II | pBS | LP03 |
| HSKW HSKX HSKY | Smooth Muscle- HASTE normalized | pBS | LP03 |
| HFPB HFPC HFPD | H. Frontal cortex, epileptic; re-excision | Uni-ZAP XR | LP03 |
| HSDI HSDJ HSDK | Spinal Cord, re-excision | Uni-ZAP XR | LP03 |
| HSKN HSKO | Smooth Muscle Serum Treated, Norm | pBS | LP03 |
| HSKG HSKH HSKI | Smooth muscle, serum induced, re-exc | pBS | LP03 |
| HFCA HFCB HFCC HFCD HFCE | Human Fetal Brain | Uni-ZAP XR | LP04 |
| HFCF | | | |
| HPTA HPTB HPTD | Human Pituitary | Uni-ZAP XR | LP04 |
| HTHB HTHC HTHD | Human Thymus | Uni-ZAP XR | LP04 |
| HE6B HE6C HE6D HE6E HE6F HE6G | Human Whole Six Week Old Embryo | Uni-ZAP XR | LP04 |
| HE6S | | | |
| HSSA HSSB HSSC HSSD HSSE HSSF | Human Synovial Sarcoma | Uni-ZAP XR | LP04 |
| HSSG HSSH HSSI HSSJ HSSK | | | |
| HE7T | 7 Week Old Early Stage Human, | Uni-ZAP XR | LP04 |
| | subtracted | | |
| HEPA HEPB HEPC | Human Epididymus | Uni-ZAP XR | LP04 |
| HSNA HSNB HSNC HSNM HSNN | Human Synovium | Uni-ZAP XR | LP04 |
| HPFB HPFC HPFD HPFE | Human Prostate Cancer, Stage C | Uni-ZAP XR | LP04 |
| | fraction | | |
| HE2A HE2D HE2E HE2H HE2I HE2M | 12 Week Old Early Stage Human | Uni-ZAP XR | LP04 |
| HE2N HE2O | | | |
| HE2B HE2C HE2F HE2G HE2P HE2Q | 12 Week Old Early Stage Human, II | Uni-ZAP XR | LP04 |
| HPTS HPTT HPTU | Human Pituitary, subtracted | Uni-ZAP XR | LP04 |
| HAUA HAUB HAUC | Amniotic Cells - TNF induced | Uni-ZAP XR | LP04 |
| HAQA HAQB HAQC HAQD | Amniotic Cells - Primary Culture | Uni-ZAP XR | LP04 |
| HWTA HWTB HWTC | wilm's tumor | Uni-ZAP XR | LP04 |
| HBSD | Bone Cancer, re-excision | Uni-ZAP XR | LP04 |
| HSGB | Salivary gland, re-excision | Uni-ZAP XR | LP04 |
| HSJA HSJB HSJC | Smooth muscle-ILb induced | Uni-ZAP XR | LP04 |
| HSXA HSXB HSXC HSXD | Human Substantia Nigra | Uni-ZAP XR | LP04 |
| HSHA HSHB HSHC | Smooth muscle, IL1b induced | Uni-ZAP XR | LP04 |
| HOUA HOUB HOUC HOUD HOUE | Adipocytes | Uni-ZAP XR | LP04 |
| HPWA HPWB HPWC HPWD HPWE | Prostate BPH | Uni-ZAP XR | LP04 |
| HELA HELB HELC HELD HELE | Endothelial cells-control | Uni-ZAP XR | LP04 |
| HELF HELG HELH | | | |
| HEMA HEMB HEMC HEMD HEME | Endothelial-induced | Uni-ZAP XR | LP04 |
| HEMF HEMG HEMH | | | |
| HBIA HBIB HBIC | Human Brain, Striatum | Uni-ZAP XR | LP04 |
| HHSA HHSB HHSC HHSD HHSE | Human Hypothalmus, Schizophrenia | Uni-ZAP XR | LP04 |
| HNGA HNGB HNGC HNGD HNGE | neutrophils control | Uni-ZAP XR | LP04 |
| HNGF HNGG HNGH HNGI HNGJ | | | |
| HNHA HNHB HNHC HNHD HNHE | Neutrophils IL-1 and LPS induced | Uni-ZAP XR | LP04 |
| HNHF HNHG HNHH HNHI HNHJ | | | |
| HSDB HSDC | STRIATUM DEPRESSION | Uni-ZAP XR | LP04 |
| HHPT | Hypothalamus | Uni-ZAP XR | LP04 |
| HSAT HSAU HSAV HSAW HSAX | Anergic T-cell | Uni-ZAP XR | LP04 |
| HSAY HSAZ | | | |
| HBMS HBMT HBMU HBMV HBMW | Bone marrow | Uni-ZAP XR | LP04 |
| HBMX | | | |
| HOEA HOEB HOEC HOED HOEE | Osteoblasts | Uni-ZAP XR | LP04 |
| HOEF HOEJ | | | |
| HAIA HAIB HAIC HAID HAIE HAIF | Epithelial-TNFa and INF induced | Uni-ZAP XR | LP04 |
| HTGA HTGB HTGC HTGD | Apoptotic T-cell | Uni-ZAP XR | LP04 |
| HMCA HMCB HMCC HMCD HMCE | Macrophage-oxLDL | Uni-ZAP XR | LP04 |
| HMAA HMAB HMAC HMAD HMAE | Macrophage (GM-CSF treated) | Uni-ZAP XR | LP04 |
| HMAF HMAG | | | |
| HPHA | Normal Prostate | Uni-ZAP XR | LP04 |
| HPIA HPIB HPIC | LNCAP prostate cell line | Uni-ZAP XR | LP04 |
| HPJA HPJB HPJC | PC3 Prostate cell line | Uni-ZAP XR | LP04 |
| HOSE HOSF HOSG | Human Osteoclastoma, re-excision | Uni-ZAP XR | LP04 |
| HTGE HTGF | Apoptotic T-cell, re-excision | Uni-ZAP XR | LP04 |
| HMAJ HMAK | H Macrophage (GM-CSF treated), re- | Uni-ZAP XR | LP04 |
| | excision | | |
| HACB HACC HACD | Human Adipose Tissue, re-excision | Uni-ZAP XR | LP04 |
| HFPA | H. Frontal Cortex, Epileptic | Uni-ZAP XR | LP04 |
| HFAA HFAB HFAC HFAD HFAE | Alzheimer's, spongy change | Uni-ZAP XR | LP04 |
| HFAM | Frontal Lobe, Dementia | Uni-ZAP XR | LP04 |
| HMIA HMIB HMIC | Human Manic Depression Tissue | Uni-ZAP XR | LP04 |
| HTSA HTSE HTSF HTSG HTSH | Human Thymus | pBS | LP05 |
| HPBA HPBB HPBC HPBD HPBE | Human Pineal Gland | pBS | LP05 |
| HSAA HSAB HSAC | HSA 172 Cells | pBS | LP05 |
| HSBA HSBB HSBC HSBM | HSC172 cells | pBS | LP05 |
| HJAA HJAB HJAC HJAD | Jurkat T-cell G1 phase | pBS | LP05 |
| HJBA HJBB HJBC HJBD | Jurkat T-Cell, S phase | pBS | LP05 |
| HAFA HAFB | Aorta endothelial cells + TNF-a | pBS | LP05 |
| HAWA HAWB HAWC | Human White Adipose | pBS | LP05 |
| HTNA HTNB | Human Thyroid | pBS | LP05 |
| HONA | Normal Ovary, Premenopausal | pBS | LP05 |
| HARA HARB | Human Adult Retina | pBS | LP05 |
| HLJA HLJB | Human Lung | pCMVSport 1 | LP06 |
| HOFM HOFN HOFO | H. Ovarian Tumor, II, OV5232 | pCMVSport 2.0 | LP07 |
| HOGA HOGB HOGC | OV Oct. 3, 1995 | pCMVSport 2.0 | LP07 |
| HCGL | CD34 + cells, II | pCMVSport 2.0 | LP07 |
| HDLA | Hodgkin's Lymphoma I | pCMVSport 2.0 | LP07 |
| HDTA HDTB HDTC HDTD HDTE | Hodgkin's Lymphoma II | pCMVSport 2.0 | LP07 |
| HKAA HKAB HKAC HKAD HKAE | Keratinocyte | pCMVSport2.0 | LP07 |
| HKAF HKAG HKAH | | | |
| HCIM | CAPFINDER, Crohn's Disease, lib 2 | pCMVSport 2.0 | LP07 |
| HKAL | Keratinocyte, lib 2 | pCMVSport2.0 | LP07 |
| HKAT | Keratinocyte, lib 3 | pCMVSport2.0 | LP07 |
| HNDA | Nasal polyps | pCMVSport2.0 | LP07 |
| HDRA | H. Primary Dendritic Cells, lib 3 | pCMVSport2.0 | LP07 |
| HOHA HOHB HOHC | Human Osteoblasts II | pCMVSport2.0 | LP07 |
| HLDA HLDB HLDC | Liver, Hepatoma | pCMVSport3.0 | LP08 |
| HLDN HLDO HLDP | Human Liver, normal | pCMVSport3.0 | LP08 |
| HMTA | pBMC stimulated w/ poly I/C | pCMVSport3.0 | LP08 |
| HNTA | NTERA2, control | pCMVSport3.0 | LP08 |
| HDPA HDPB HDPC HDPD HDPF | Primary Dendritic Cells, lib 1 | pCMVSport3.0 | LP08 |
| HDPG HDPH HDPI HDPJ HDPK | | | |
| HDPM HDPN HDPO HDPP | Primary Dendritic cells, frac 2 | pCMVSport3.0 | LP08 |
| HMUA HMUB HMUC | Myoloid Progenitor Cell Line | pCMVSport3.0 | LP08 |
| HHEA HHEB HHEC HHED | T Cell helper I | pCMVSport3.0 | LP08 |
| HHEM HHEN HHEO HHEP | T cell helper II | pCMVSport3.0 | LP08 |
| HEQA HEQB HEQC | Human endometrial stromal cells | pCMVSport3.0 | LP08 |
| HJMA HJMB | Human endometrial stromal cells- | pCMVSport3.0 | LP08 |
| | treated with progesterone | | |
| HSWA HSWB HSWC | Human endometrial stromal cells- | pCMVSport3.0 | LP08 |
| | treated with estradiol | | |
| HSYA HSYB HSYC | Human Thymus Stromal Cells | pCMVSport3.0 | LP08 |
| HLWA HLWB HLWC | Human Placenta | pCMVSport3.0 | LP08 |
| HRAA HRAB HRAC | Rejected Kidney, lib 4 | pCMVSport3.0 | LP08 |
| HMTM | PCR, pBMC I/C treated | PCRII | LP09 |
| HMJA | H. Meniingima, M6 | pSport 1 | LP10 |
| HMKA HMKB HMKC HMKD HMKE | H. Meningima, M1 | pSport 1 | LP10 |
| HUSG HUSI | Human umbilical vein endothelial cells, | pSport 1 | LP10 |
| | IL-4 induced | | |
| HUSX HUSY | Human Umbilical Vein Endothelial | pSport 1 | LP10 |
| | Cells, uninduced | | |
| HOFA | Ovarian Tumor I, OV5232 | pSport 1 | LP10 |
| HCFA HCFB HCFC HCFD | T-Cell PHA 16 hrs | pSport 1 | LP10 |
| HCFL HCFM HCFN HCFO | T-Cell PHA 24 hrs | pSport 1 | LP10 |
| HADA HADC HADD HADE HADF | Human Adipose | pSport 1 | LP10 |
| HADG | | | |
| HOVA HOVB HOVC | Human Ovary | pSport 1 | LP10 |
| HTWB HTWC HTWD HTWE HTWF | Resting T-Cell Library, II | pSport 1 | LP10 |
| HMMA | Spleen metastic melanoma | pSport 1 | LP10 |
| HLYA HLYB HLYC HLYD HLYE | Spleen, Chronic lymphocytic leukemia | pSport 1 | LP10 |
| HCGA | CD34 + cell, I | pSport 1 | LP10 |
| HEOM HEON | Human Eosinophils | pSport 1 | LP10 |
| HTDA | Human Tonsil, Lib 3 | pSport 1 | LP10 |
| HSPA | Salivary Gland, Lib 2 | pSport 1 | LP10 |
| HCHA HCHB HCHC | Breast Cancer cell line, MDA 36 | pSport 1 | LP10 |
| HCHM HCHN | Breast Cancer Cell line, angiogenic | pSport 1 | LP10 |
| HCIA | Crohn's Disease | pSport 1 | LP10 |
| HDAA HDAB HDAC | HEL cell line | pSport 1 | LP10 |
| HABA | Human Astrocyte | pSport 1 | LP10 |
| HUFA HUFB HUFC | Ulcerative Colitis | pSport 1 | LP10 |
| HNTM | NTERA2 + retinoic acid, 14 days | pSport 1 | LP10 |
| HDQA | Primary Dendritic cells, CapFinder2, | pSport 1 | LP10 |
| | frac 1 | | |
| HDQM | Primary Dendritic Cells, CapFinder, | pSport 1 | LP10 |
| | frac 2 | | |
| HLDX | Human Liver, normal, CapFinder | pSport 1 | LP10 |
| HULA HULB HULC | Human Dermal Endothelial | pSport1 | LP10 |
| | Cells, untreated | | |
| HUMA | Human Dermal Endothelial cells, treated | pSport1 | LP10 |
| HCJA | Human Stromal Endometrial | pSport1 | LP10 |
| | fibroblasts, untreated | | |
| HCJM | Human Stromal endometrial fibroblasts, | pSport1 | LP10 |
| | treated w/ estradiol | | |
| HEDA | Human Stromal endometrial fibroblasts, | pSport1 | LP10 |
| | treated with progesterone | | |
| HFNA | Human ovary tumor cell OV350721 | pSport1 | LP10 |
| HKGA HKGB HKGC HKGD | Merkel Cells | pSport1 | LP10 |
| HISA HISB HISC | Pancreas Islet Cell Tumor | pSport1 | LP10 |
| HLSA | Skin, burned | pSport1 | LP10 |
| HBZA | Prostate, BPH, Lib 2 | pSport 1 | LP10 |
| HBZS | Prostate BPH, Lib 2, subtracted | pSport 1 | LP10 |
| HFIA HFIB HFIC | Synovial Fibroblasts (control) | pSport 1 | LP10 |
| HFIH HFII HFIJ | Synovial hypoxia | pSport 1 | LP10 |
| HFIT HFIU HFIV | Synovial IL-1/TNF stimulated | pSport 1 | LP10 |
| HGCA | Messangial cell, frac 1 | pSport1 | LP10 |
| HMVA HMVB HMVC | Bone Marrow Stromal Cell, untreated | pSport1 | LP10 |
| HFIX HFIY HFIZ | Synovial Fibroblasts (Il1/TNF), subt | pSport1 | LP10 |
| HFOX HFOY HFOZ | Synovial hypoxia-RSF subtracted | pSport1 | LP10 |
| HMQA HMQB HMQC HMQD | Human Activated Monocytes | Uni-ZAP XR | LP11 |
| HLIA HLIB HLIC | Human Liver | pCMVSport 1 | LP012 |
| HHBA HHBB HHBC HHBD HHBE | Human Heart | pCMVSport 1 | LP012 |
| HBBA HBBB | Human Brain | pCMVSport 1 | LP012 |
| HLJA HLJB HLJC HLJD HLJE | Human Lung | pCMVSport 1 | LP012 |
| HOGA HOGB HOGC | Ovarian Tumor | pCMVSport 2.0 | LP012 |
| HTJM | Human Tonsils, Lib 2 | pCMVSport 2.0 | LP012 |
| HAMF HAMG | KMH2 | pCMVSport 3.0 | LP012 |
| HAJA HAJB HAJC | L428 | pCMVSport 3.0 | LP012 |
| HWBA HWBB HWBC HWBD HWBE | Dendritic cells, pooled | pCMVSport 3.0 | LP012 |
| HWAA HWAB HWAC HWAD HWAE | Human Bone Marrow, treated | pCMVSport 3.0 | LP012 |
| HYAA HYAB HYAC | B Cell lymphoma | pCMVSport 3.0 | LP012 |
| HWHG HWHH HWHI | Healing groin wound, 6.5 hours post | pCMVSport 3.0 | LP012 |
| | incision | | |
| HWHP HWHQ HWHR | Healing groin wound; 7.5 hours post | pCMVSport 3.0 | LP012 |
| | incision | | |
| HARM | Healing groin wound - zero hr post- | pCMVSport 3.0 | LP012 |
| | incision (control) | | |
| HBIM | Olfactory epithelium; nasalcavity | pCMVSport 3.0 | LP012 |
| HWDA | Healing Abdomen wound; 70&90 min | pCMVSport 3.0 | LP012 |
| | post incision | | |
| HWEA | Healing Abdomen Wound; 15 days post | pCMVSport 3.0 | LP012 |
| | incision | | |
| HWJA | Healing Abdomen Wound; 21&29 days | pCMVSport 3.0 | LP012 |
| HNAL | Human Tongue, frac 2 | pSport1 | LP012 |
| HMJA | H. Meniingima, M6 | pSport1 | LP012 |
| HMKA HMKB HMKC HMKD HMKE | H. Meningima, M1 | pSport1 | LP012 |
| HOFA | Ovarian Tumor I, OV5232 | pSport1 | LP012 |
| HCFA HCFB HCFC HCFD | T-Cell PHA 16 hrs | pSport1 | LP012 |
| HCFL HCFM HCFN HCFO | T-Cell PHA 24 hrs | pSport1 | LP012 |
| HMMA HMMB HMMC | Spleen metastic melanoma | pSport1 | LP012 |
| HTDA | Human Tonsil, Lib 3 | pSport1 | LP012 |
| HDBA | Human Fetal Thymus | pSport1 | LP012 |
| HDUA | Pericardium | pSport1 | LP012 |
| HBZA | Prostate, BPH, Lib 2 | pSport1 | LP012 |
| HWCA | Larynx tumor | pSport1 | LP012 |
| HWKA | Normal lung | pSport1 | LP012 |
| HSMB | Bone marrow stroma, treated | pSport1 | LP012 |
| HBHM | Normal trachea | pSport1 | LP012 |
| HLFC | Human Larynx | pSport1 | LP012 |
| HLRB | Siebben Polyposis | pSport1 | LP012 |
| HNIA | Mammary Gland | pSport1 | LP012 |
| HNJB | Palate carcinoma | pSport1 | LP012 |
| HNKA | Palate normal | pSport1 | LP012 |
| HMZA | Pharynx carcinoma | pSport1 | LP012 |
| HABG | Cheek Carcinoma | pSport1 | LP012 |
| HMZM | Pharynx Carcinoma | pSport1 | LP012 |
| HDRM | Larynx Carcinoma | pSport1 | LP012 |
| HVAA | Pancreas normal PCA4 No | pSport1 | LP012 |
| HICA | Tongue carcinoma | pSport1 | LP012 |
| HUKA HUKB HUKC HUKD HUKE | Human Uterine Cancer | Lambda ZAP II | LP013 |
| HFFA | Human Fetal Brain, random primed | Lambda ZAP II | LP013 |
| HTUA | Activated T-cell labeled with 4-thioluri | Lambda ZAP II | LP013 |
| HBQA | Early Stage Human Brain, random | Lambda ZAP II | LP013 |
| | primed | | |
| HMEB | Human microvascular Endothelial cells, | Lambda ZAP II | LP013 |
| | fract. B | | |
| HUSH | Human Umbilical Vein Endothelial | Lambda ZAP II | LP013 |
| | cells, fract. A, re-excision | | |
| HLQC HLQD | Hepatocellular tumor, re-excision | Lambda ZAP II | LP013 |
| HTWJ HTWK HTWL | Resting T-cell, re-excision | Lambda ZAP II | LP013 |
| HF6S | Human Whole 6 week Old Embryo (II), | pBluescript | LP013 |
| | subt | | |
| HHPS | Human Hippocampus, subtracted | pBluescript | LP013 |
| HLIS | LNCAP, differential expression | pBluescript | LP013 |
| HLHS HLHT | Early Stage Human Lung, Subtracted | pBluescript | LP013 |
| HSUS | Supt cells, cyclohexamide treated, | pBluescript | LP013 |
| | subtracted | | |
| HSUT | Supt cells, cyclohexamide treated, | pBluescript | LP013 |
| | differentially expressed | | |
| HSDS | H. Striatum Depression, subtracted | pBluescript | LP013 |
| HPTZ | Human Pituitary, Subtracted VII | pBluescript | LP013 |
| HSDX | H. Striatum Depression, subt II | pBluescript | LP013 |
| HSDZ | H. Striatum Depression, subt | pBluescript | LP013 |
| HPBA HPBB HPBC HPBD HPBE | Human Pineal Gland | pBluescript SK- | LP013 |
| HRTA | Colorectal Tumor | pBluescript SK- | LP013 |
| HSBA HSBB HSBC HSBM | HSC172 cells | pBluescript SK- | LP013 |
| HJAA HJAB HJAC HJAD | Jurkat T-cell G1 phase | pBluescript SK- | LP013 |
| HJBA HJBB HJBC HJBD | Jurkat T-cell, S1 phase | pBluescript SK- | LP013 |
| HTNA HTNB | Human Thyroid | pBluescript SK- | LP013 |
| HAHA HAHB | Human Adult Heart | Uni-ZAP XR | LP013 |
| HE6A | Whole 6 week Old Embryo | Uni-ZAP XR | LP013 |
| HFCA HFCB HFCC HFCD HFCE | Human Fetal Brain | Uni-ZAP XR | LP013 |
| HFKC HFKD HFKE HFKF HFKG | Human Fetal Kidney | Uni-ZAP XR | LP013 |
| HGBA HGBD HGBE HGBF HGBG | Human Gall Bladder | Uni-ZAP XR | LP013 |
| HPRA HPRB HPRC HPRD | Human Prostate | Uni-ZAP XR | LP013 |
| HTEA HTEB HTEC HTED HTEE | Human Testes | Uni-ZAP XR | LP013 |
| HTTA HTTB HTTC HTTD HTTE | Human Testes Tumor | Uni-ZAP XR | LP013 |
| HYBA HYBB | Human Fetal Bone | Uni-ZAP XR | LP013 |
| HFLA | Human Fetal Liver | Uni-ZAP XR | LP013 |
| HHFB HHFC HHFD HHFE HHFF | Human Fetal Heart | Uni-ZAP XR | LP013 |
| HUVB HUVC HUVD HUVE | Human Umbilical Vein, End. remake | Uni-ZAP XR | LP013 |
| HTHB HTHC HTHD | Human Thymus | Uni-ZAP XR | LP013 |
| HSTA HSTB HSTC HSTD | Human Skin Tumor | Uni-ZAP XR | LP013 |
| HTAA HTAB HTAC HTAD HTAE | Human Activated T-cells | Uni-ZAP XR | LP013 |
| HFEA HFEB HFEC | Human Fetal Epithelium (skin) | Uni-ZAP XR | LP013 |
| HJPA HJPB HJPC HJPD | Human Jurkat Membrane Bound | Uni-ZAP XR | LP013 |
| | Polysomes | | |
| HESA | Human Epithelioid Sarcoma | Uni-ZAP XR | LP013 |
| HALS | Human Adult Liver, Subtracted | Uni-ZAP XR | LP013 |
| HFTA HFTB HFTC HFTD | Human Fetal Dura Mater | Uni-ZAP XR | LP013 |
| HCAA HCAB HCAC | Cem cells, cyclohexamide treated | Uni-ZAP XR | LP013 |
| HRGA HRGB HRGC HRGD | Raji Cells, cyclohexamide treated | Uni-ZAP XR | LP013 |
| HE9A HE9B HE9C HE9D HE9E | Nine Week Old Early Stage Human | Uni-ZAP XR | LP013 |
| HSFA | Human Fibrosarcoma | Uni-ZAP XR | LP013 |
| HATA HATB HATC HATD HATE | Human Adrenal Gland Tumor | Uni-ZAP XR | LP013 |
| HTRA | Human Trachea Tumor | Uni-ZAP XR | LP013 |
| HE2A HE2D HE2E HE2H HE2I | 12 Week Old Early Stage Human | Uni-ZAP XR | LP013 |
| HE2B HE2C HE2F HE2G HE2P | 12 Week Old Early Stage Human, II | Uni-ZAP XR | LP013 |
| HNEA HNEB HNEC HNED HNEE | Human Neutrophil | Uni-ZAP XR | LP013 |
| HBGA | Human Primary Breast Cancer | Uni-ZAP XR | LP013 |
| HPTS HPTT HPTU | Human Pituitary, subtracted | Uni-ZAP XR | LP013 |
| HMQA HMQB HMQC HMQD | Human Activated Monocytes | Uni-ZAP XR | LP013 |
| HOAA HOAB HOAC | Human Osteosarcoma | Uni-ZAP XR | LP013 |
| HTOA HTOD HTOE HTOF HTOG | human tonsils | Uni-ZAP XR | LP013 |
| HMGB | Human OB MG63 control fraction I | Uni-ZAP XR | LP013 |
| HOPB | Human OB HOS control fraction I | Uni-ZAP XR | LP013 |
| HOQB | Human OB HOS treated (1 nM E2) | Uni-ZAP XR | LP013 |
| | fraction I | | |
| HAUA HAUB HAUC | Amniotic Cells - TNF induced | Uni-ZAP XR | LP013 |
| HAQA HAQB HAQC HAQD | Amniotic Cells - Primary Culture | Uni-ZAP XR | LP013 |
| HROA HROC | HUMAN STOMACH | Uni-ZAP XR | LP013 |
| HBJA HBJB HBJC HBJD HBJE | HUMAN B CELL LYMPHOMA | Uni-ZAP XR | LP013 |
| HODA HODB HODC HODD | human ovarian cancer | Uni-ZAP XR | LP013 |
| HCPA | Corpus Callosum | Uni-ZAP XR | LP013 |
| HSOA | stomach cancer (human) | Uni-ZAP XR | LP013 |
| HERA | SKIN | Uni-ZAP XR | LP013 |
| HMDA | Brain-medulloblastoma | Uni-ZAP XR | LP013 |
| HGLA HGLB HGLD | Glioblastoma | Uni-ZAP XR | LP013 |
| HWTA HWTB HWTC | wilm's tumor | Uni-ZAP XR | LP013 |
| HEAA | H. Atrophic Endometrium | Uni-ZAP XR | LP013 |
| HAPN HAPO HAPP HAPQ HAPR | Human Adult Pulmonary; re-excision | Uni-ZAP XR | LP013 |
| HLTG HLTH | Human T-cell lymphoma, re-excision | Uni-ZAP XR | LP013 |
| HAHC HAHD HAHE | Human Adult Heart; re-excision | Uni-ZAP XR | LP013 |
| HAGA HAGB HAGC HAGD HAGE | Human Amygdala | Uni-ZAP XR | LP013 |
| HSJA HSJB HSJC | Smooth muscle-ILb induced | Uni-ZAP XR | LP013 |
| HSHA HSHB HSHC | Smooth muscle, IL1b induced | Uni-ZAP XR | LP013 |
| HPWA HPWB HPWC HPWD HPWE | Prostate BPH | Uni-ZAP XR | LP013 |
| HPIA HPIB HPIC | LNCAP prostate cell line | Uni-ZAP XR | LP013 |
| HPJA HPJB HPJC | PC3 Prostate cell line | Uni-ZAP XR | LP013 |
| HBTA | Bone Marrow Stroma, TNF&LPS ind | Uni-ZAP XR | LP013 |
| HMCF HMCG HMCH HMCI HMCJ | Macrophage-oxLDL; re-excision | Uni-ZAP XR | LP013 |
| HAGG HAGH HAGI | Human Amygdala; re-excision | Uni-ZAP XR | LP013 |
| HACA | H. Adipose Tissue | Uni-ZAP XR | LP013 |
| HKFB | K562 + PMA (36 hrs), re-excision | ZAP Express | LP013 |
| HCWT HCWU HCWV | CD34 positive cells (cord blood), re-ex | ZAP Express | LP013 |
| HBWA | Whole brain | ZAP Express | LP013 |
| HBXA HBXB HBXC HBXD | Human Whole Brain #2 - Oligo dT > | ZAP Express | LP013 |
| | 1.5 Kb | | |
| HAVM | Temporal cortex-Alzheizmer | pT-Adv | LP014 |
| HAVT | Hippocampus, Alzheimer Subtracted | pT-Adv | LP014 |
| HHAS | CHME Cell Line | Uni-ZAP XR | LP014 |
| HAJR | Larynx normal | pSport 1 | LP014 |
| HWLE HWLF HWLG HWLH | Colon Normal | pSport 1 | LP014 |
| HCRM HCRN HCRO | Colon Carcinoma | pSport 1 | LP014 |
| HWLI HWLJ HWLK | Colon Normal | pSport 1 | LP014 |
| HWLQ HWLR HWLS HWLT | Colon Tumor | pSport 1 | LP014 |
| HBFM | Gastrocnemius Muscle | pSport 1 | LP014 |
| HBOD HBOE | Quadriceps Muscle | pSport 1 | LP014 |
| HBKD HBKE | Soleus Muscle | pSport 1 | LP014 |
| HCCM | Pancreatic Langerhans | pSport 1 | LP014 |
| HWGA | Larynx carcinoma | pSport 1 | LP014 |
| HWGM HWGN | Larynx carcinoma | pSport 1 | LP014 |
| HWLA HWLB HWLC | Normal colon | pSport 1 | LP014 |
| HWLM HWLN | Colon Tumor | pSport 1 | LP014 |
| HVAM HVAN HVAO | Pancreas Tumor | pSport 1 | LP014 |
| HWGQ | Larynx carcinoma | pSport 1 | LP014 |
| HAQM HAQN | Salivary Gland | pSport 1 | LP014 |
| HASM | Stomach; normal | pSport 1 | LP014 |
| HBCM | Uterus; normal | pSport 1 | LP014 |
| HCDM | Testis; normal | pSport 1 | LP014 |
| HDJM | Brain; normal | pSport 1 | LP014 |
| HEFM | Adrenal Gland, normal | pSport 1 | LP014 |
| HBAA | Rectum normal | pSport 1 | LP014 |
| HFDM | Rectum tumour | pSport 1 | LP014 |
| HGAM | Colon, normal | pSport 1 | LP014 |
| HHMM | Colon, tumour | pSport 1 | LP014 |
| HCLB HCLC | Human Lung Cancer | Lambda Zap II | LP015 |
| HRLA | L1 Cell line | ZAP Express | LP015 |
| HHAM | Hypothalamus, Alzheimer's | pCMVSport 3.0 | LP015 |
| HKBA | Ku 812F Basophils Line | pSport 1 | LP015 |
| HS2S | Saos2, Dexamethosome Treated | pSport 1 | LP016 |
| HA5A | Lung Carcinoma A549 TNFalpha | pSport 1 | LP016 |
| | activated | | |
| HTFM | TF-1 Cell Line GM-CSF Treated | pSport 1 | LP016 |
| HYAS | Thyroid Tumour | pSport 1 | LP016 |
| HUTS | Larynx Normal | pSport 1 | LP016 |
| HXOA | Larynx Tumor | pSport 1 | LP016 |
| HEAH | Ea.hy.926 cell line | pSport 1 | LP016 |
| HINA | Adenocarcinoma Human | pSport 1 | LP016 |
| HRMA | Lung Mesothelium | pSport 1 | LP016 |
| HLCL | Human Pre-Differentiated Adipocytes | Uni-Zap XR | LP017 |
| HS2A | Saos2 Cells | pSport 1 | LP020 |
| HS2I | Saos2 Cells; Vitamin D3 Treated | pSport 1 | LP020 |
| HUCM | CHME Cell Line, untreated | pSport 1 | LP020 |
| HEPN | Aryepiglottis Normal | pSport 1 | LP020 |
| HPSN | Sinus Piniformis Tumour | pSport 1 | LP020 |
| HNSA | Stomach Normal | pSport 1 | LP020 |
| HNSM | Stomach Tumour | pSport 1 | LP020 |
| HNLA | Liver Normal Met5No | pSport 1 | LP020 |
| HUTA | Liver Tumour Met 5 Tu | pSport 1 | LP020 |
| HOCN | Colon Normal | pSport 1 | LP020 |
| HOCT | Colon Tumor | pSport 1 | LP020 |
| HTNT | Tongue Tumour | pSport 1 | LP020 |
| HLXN | Larynx Normal | pSport 1 | LP020 |
| HLXT | Larynx Tumour | pSport 1 | LP020 |
| HTYN | Thymus | pSport 1 | LP020 |
| HPLN | Placenta | pSport 1 | LP020 |
| HTNG | Tongue Normal | pSport 1 | LP020 |
| HZAA | Thyroid Normal (SDCA2 No) | pSport 1 | LP020 |
| HWES | Thyroid Thyroiditis | pSport 1 | LP020 |
| HFHD | Ficolled Human Stromal Cells, 5Fu | pTrip1Ex2 | LP021 |
| | treated | | |
| HFHM, HFHN | Ficolled Human Stromal Cells, | pTrip1Ex2 | LP021 |
| | Untreated | | |
| HPCI | Hep G2 Cells, lambda library | lambda Zap-CMV XR | LP021 |
| HBCA, HBCB, HBCC | H. Lymph node breast Cancer | Uni-ZAP XR | LP021 |
| HCOK | Chondrocytes | pSPORT1 | LP022 |
| HDCA, HDCB, HDCC | Dendritic Cells From CD34 Cells | pSPORT1 | LP022 |
| HDMA, HDMB | CD40 activated monocyte dendritic | pSPORT1 | LP022 |
| | cells | | |
| HDDM, HDDN, HDDO | LPS activated derived dendritic cells | pSPORT1 | LP022 |
| HPCR | Hep G2 Cells, PCR library | lambda Zap-CMV XR | LP022 |
| HAAA, HAAB, HAAC | Lung, Cancer (4005313A3): Invasive | pSPORT1 | LP022 |
| | Poorly Differentiated Lung | | |
| | Adenocarcinoma | | |
| HIPA, HIPB, HIPC | Lung, Cancer (4005163 B7): Invasive, | pSPORT1 | LP022 |
| | Poorly Diff. Adenocarcinoma, | | |
| | Metastatic | | |
| HOOH, HOOI | Ovary, Cancer: (4004562 B6) Papillary | pSPORT1 | LP022 |
| | Serous Cystic Neoplasm, Low | | |
| | Malignant Pot | | |
| HIDA | Lung, Normal: (4005313 B1) | pSPORT1 | LP022 |
| HUJA, HUJB, HUJC, HUJD, HUJE | B-Cells | pCMVSport 3.0 | LP022 |
| HNOA, HNOB, HNOC, HNOD | Ovary, Normal: (9805C040R) | pSPORT1 | LP022 |
| HNLM | Lung, Normal: (4005313 B1) | pSPORT1 | LP022 |
| HSCL | Stromal Cells | pSPORT1 | LP022 |
| HAAX | Lung, Cancer: (4005313 A3) Invasive | pSPORT1 | LP022 |
| | Poorly-differentiated Metastatic lung | | |
| | adenocarcinoma | | |
| HUUA, HUUB, HUUC, HUUD | B-cells (unstimulated) | pTrip1Ex2 | LP022 |
| HWWA, HWWB, HWWC, HWWD, HWWE, | B-cells (stimulated) | pSPORT1 | LP022 |
| HWWF, HWWG | | | |
| HCCC | Colon, Cancer: (9808C064R) | pCMVSport 3.0 | LP023 |
| HPDO HPDP HPDQ HPDR HPD | Ovary, Cancer (9809C332): Poorly | pSport 1 | LP023 |
| | differentiated adenocarcinoma | | |
| HPCO HPCP HPCQ HPCT | Ovary, Cancer (15395A1F): Grade II | pSport 1 | LP023 |
| | Papillary Carcinoma | | |
| HOCM HOCO HOCP HOCQ | Ovary, Cancer: (15799A1F) Poorly | pSport 1 | LP023 |
| | differentiated carcinoma | | |
| HCBM HCBN HCBO | Breast, Cancer: (4004943 A5) | pSport 1 | LP023 |
| HNBT HNBU HNBV | Breast, Normal: (4005522B2) | pSport 1 | LP023 |
| HBCP HBCQ | Breast, Cancer: (4005522 A2) | pSport 1 | LP023 |
| HBCJ | Breast, Cancer: (9806C012R) | pSport 1 | LP023 |
| HSAM HSAN | Stromal cells 3.88 | pSport 1 | LP023 |
| HVCA HVCB HVCC HVCD | Ovary, Cancer: (4004332 A2) | pSport 1 | LP023 |
| HSCK HSEN HSEO | Stromal cells (HBM3.18) | pSport 1 | LP023 |
| HSCP HSCQ | stromal cell clone 2.5 | pSport 1 | LP023 |
| HUXA | Breast Cancer: (4005385 A2) | pSport 1 | LP023 |
| HCOM HCON HCOO HCOP HCOQ | Ovary, Cancer (4004650 A3): Well- | pSport 1 | LP023 |
| | Differentiated Micropapillary Serous | | |
| | Carcinoma | | |
| HBNM | Breast, Cancer: (9802C020E) | pSport 1 | LP023 |
| HVVA HVVB HVVC HVVD HVVE | Human Bone Marrow, treated | pSport 1 | LP023 |

[0892] Two nonlimiting examples are provided below for isolating a particular clone from the deposited sample of plasmid cDNAs cited for that clone in Table 7. First, a plasmid is directly isolated by screening the clones using a polynucleotide probe corresponding to the nucleotide sequence of SEQ ID NO:X.

[0893] Particularly, a specific polynucleotide with 30-40 nucleotides is synthesized using an Applied Biosystems DNA synthesizer according to the sequence reported. The oligonucleotide is labeled, for instance, with ³²P-γ-ATP using T4 polynucleotide kinase and purified according to routine methods. (E.g., Maniatis et al., Molecular Cloning: A Laboratory Manual, Cold Spring Harbor Press, Cold Spring, N.Y. (1982).) The plasmid mixture is transformed into a suitable host, as indicated above (such as XL-1 Blue (Stratagene)) using techniques known to those of skill in the art, such as those provided by the vector supplier or in related publications or patents cited above. The transformants are plated on 1.5% agar plates (containing the appropriate selection agent, e.g., ampicillin) to a density of about 150 transformants (colonies) per plate. These plates are screened using Nylon membranes according to routine methods for bacterial colony screening (e.g., Sambrook et al., Molecular Cloning: A Laboratory Manual, 2nd Edit., (1989), Cold Spring Harbor Laboratory Press, pages 1.93 to 1.104), or other techniques known to those of skill in the art.

[0894] Alternatively, two primers of 17-20 nucleotides derived from both ends of the nucleotide sequence of SEQ ID NO:X are synthesized and used to amplify the desired cDNA using the deposited cDNA plasmid as a template. The polymerase chain reaction is carried out under routine conditions, for instance, in 25 μl of reaction mixture with 0.5 ug of the above cDNA template. A convenient reaction mixture is 1.5-5 mM MgCl₂, 0.01% (w/v) gelatin, 20 μM each of dATP, dCTP, dGTP, dTTP, 25 pmol of each primer and 0.25 Unit of Taq polymerase. Thirty five cycles of PCR (denaturation at 94° C. for 1 min; annealing at 55° C. for 1 min; elongation at 72° C. for 1 min) are performed with a Perkin-Elmer Cetus automated thermal cycler. The amplified product is analyzed by agarose gel electrophoresis and the DNA band with expected molecular weight is excised and purified. The PCR product is verified to be the selected sequence by subcloning and sequencing the DNA product.

[0895] Several methods are available for the identification of the 5′ or 3′ non-coding portions of a gene which may not be present in the deposited clone. These methods include but are not limited to, filter probing, clone enrichment using specific probes, and protocols similar or identical to 5′ and 3′ “RACE” protocols which are well known in the art. For instance, a method similar to 5′ RACE is available for generating the missing 5′ end of a desired full-length transcript. (Fromont-Racine et al., Nucleic Acids Res. 21(7):1683-1684 (1993).)

[0896] Briefly, a specific RNA oligonucleotide is ligated to the 5′ ends of a population of RNA presumably containing full-length gene RNA transcripts. A primer set containing a primer specific to the ligated RNA oligonucleotide and a primer specific to a known sequence of the gene of interest is used to PCR amplify the 5′ portion of the desired full-length gene. This amplified product may then be sequenced and used to generate the full length gene.

[0897] This above method starts with total RNA isolated from the desired source, although poly-A+ RNA can be used. The RNA preparation can then be treated with phosphatase if necessary to eliminate 5′ phosphate groups on degraded or damaged RNA which may interfere with the later RNA ligase step. The phosphatase should then be inactivated and the RNA treated with tobacco acid pyrophosphatase in order to remove the cap structure present at the 5′ ends of messenger RNAs. This reaction leaves a 5′ phosphate group at the 5′ end of the cap cleaved RNA which can then be ligated to an RNA oligonucleotide using T4 RNA ligase.

[0898] This modified RNA preparation is used as a template for first strand cDNA synthesis using a gene specific oligonucleotide. The first strand synthesis reaction is used as a template for PCR amplification of the desired 5′ end using a primer specific to the ligated RNA oligonucleotide and a primer specific to the known sequence of the gene of interest. The resultant product is then sequenced and analyzed to confirm that the 5′ end sequence belongs to the desired gene.

### Example 2

### Isolation of Genomic Clones Corresponding to a Polynucleotide

[0899] A human genomic P1 library (Genomic Systems, Inc.) is screened by PCR using primers selected for the sequence corresponding to SEQ ID NO:X according to the method described in Example 1. (See also, Sambrook et al., Molecular Cloning: A Laboratory Manual, 2nd Edn., (1989), Cold Spring Harbor Laboratory Press).

### Example 3

### Tissue Specific Expression Analysis

[0900] The Human Genome Sciences, Inc. (HGS) database is derived from sequencing tissue and/or disease specific cDNA libraries. Libraries generated from a particular tissue are selected and the specific tissue expression pattern of EST groups or assembled contigs within these libraries is determined by comparison of the expression patterns of those groups or contigs within the entire database. ESTs and assembled contigs which show tissue specific expression are selected.

[0901] The original clone from which the specific EST sequence was generated, or in the case of an assembled contig, the clone from which the 5′ most EST sequence was generated, is obtained from the catalogued library of clones and the insert amplified by PCR using methods known in the art. The PCR product is denatured and then transferred in 96 or 384 well format to a nylon membrane (Schleicher and Scheull) generating an array filter of tissue specific clones. Housekeeping genes, maize genes, and known tissue specific genes are included on the filters. These targets can be used in signal normalization and to validate assay sensitivity. Additional targets are included to monitor probe length and specificity of hybridization.

[0902] Radioactively labeled hybridization probes are generated by first strand cDNA synthesis per the manufacturer's instructions (Life Technologies) from mRNA/RNA samples prepared from the specific tissue being analyzed (e.g., colon tissue, colon cancer, etc.). The hybridization probes are purified by gel exclusion chromatography, quantitated, and hybridized with the array filters in hybridization bottles at 65° C. overnight. The filters are washed under stringent conditions and signals are captured using a Fuji phosphorimager.

[0903] Data is extracted using AIS software and following background subtraction, signal normalization is performed. This includes a normalization of filter-wide expression levels between different experimental runs. Genes that are differentially expressed in the tissue of interest are identified.

### Example 4

### Chromosomal Mapping of the Polynucleotides

[0904] An oligonucleotide primer set is designed according to the sequence at the 5′ end of SEQ ID NO:X. This primer preferably spans about 100 nucleotides. This primer set is then used in a polymerase chain reaction under the following set of conditions: 30 seconds, 95° C.; 1 minute, 56° C.; 1 minute, 70° C. This cycle is repeated 32 times followed by one 5 minute cycle at 70° C. Human, mouse, and hamster DNA is used as template in addition to a somatic cell hybrid panel containing individual chromosomes or chromosome fragments (Bios, Inc). The reactions are analyzed on either 8% polyacrylamide gels or 3.5% agarose gels. Chromosome mapping is determined by the presence of an approximately 100 bp PCR fragment in the particular somatic cell hybrid.

### Example 5

### Bacterial Expression of a Polypeptide

[0905] A polynucleotide encoding a polypeptide of the present invention is amplified using PCR oligonucleotide primers corresponding to the 5′ and 3′ ends of the DNA sequence, as outlined in Example 1, to synthesize insertion fragments. The primers used to amplify the cDNA insert should preferably contain restriction sites, such as BamHI and XbaI, at the 5′ end of the primers in order to clone the amplified product into the expression vector. For example, BamHI and XbaI correspond to the restriction enzyme sites on the bacterial expression vector pQE-9. (Qiagen, Inc., Chatsworth, Calif.). This plasmid vector encodes antibiotic resistance (Ampr), a bacterial origin of replication (ori), an IPTG-regulatable promoter/operator (P/O), a ribosome binding site (RBS), a 6-histidine tag (6-His), and restriction enzyme cloning sites.

[0906] The pQE-9 vector is digested with BamHI and XbaI and the amplified fragment is ligated into the pQE-9 vector maintaining the reading frame initiated at the bacterial RBS. The ligation mixture is then used to transform the E. coli strain M15/rep4 (Qiagen, Inc.) which contains multiple copies of the plasmid pREP4, which expresses the lacI repressor and also confers kanamycin resistance (Kan^{r}). Transformants are identified by their ability to grow on LB plates and ampicillin/kanamycin resistant colonies are selected. Plasmid DNA is isolated and confirmed by restriction analysis.

[0907] Clones containing the desired constructs are grown overnight (O/N) in liquid culture in LB media supplemented with both Amp (100 ug/ml) and Kan (25 ug/ml). The O/N culture is used to inoculate a large culture at a ratio of 1:100 to 1:250. The cells are grown to an optical density 600 (O.D.⁶⁰⁰) of between 0.4 and 0.6. IPTG (Isopropyl-B-D-thiogalacto pyranoside) is then added to a final concentration of 1 mM. IPTG induces by inactivating the lacI repressor, clearing the P/O leading to increased gene expression.

[0908] Cells are grown for an extra 3 to 4 hours. Cells are then harvested by centrifugation (20 mins at 6000× g). The cell pellet is solubilized in the chaotropic agent 6 Molar Guanidine HCl by stirring for 3-4 hours at 4° C. The cell debris is removed by centrifugation, and the supernatant containing the polypeptide is loaded onto a nickel-nitrilo-tri-acetic acid (“Ni-NTA”) affinity resin column (available from QIAGEN, Inc., supra). Proteins with a 6× His tag bind to the Ni-NTA resin with high affinity and can be purified in a simple one-step procedure (for details see: The QLAexpressionist (1995) QIAGEN, Inc., supra).

[0909] Briefly, the supernatant is loaded onto the column in 6 M guanidine-HCl, pH 8. The column is first washed with 10 volumes of 6 M guanidine-HCl, pH 8, then washed with 10 volumes of 6 M guanidine-HCl pH 6, and finally the polypeptide is eluted with 6 M guanidine-HCl, pH 5.

[0910] The purified protein is then renatured by dialyzing it against phosphate-buffered saline (PBS) or 50 mM Na-acetate, pH 6 buffer plus 200 mM NaCl. Alternatively, the protein can be successfully refolded while immobilized on the Ni-NTA column. The recommended conditions are as follows: renature using a linear 6M-1M urea gradient in 500 mM NaCl, 20% glycerol, 20 mM Tris/HCl pH 7.4, containing protease inhibitors. The renaturation should be performed over a period of 1.5 hours or more. After renaturation the proteins are eluted by the addition of 250 mM immidazole. Immidazole is removed by a final dialyzing step against PBS or 50 mM sodium acetate pH 6 buffer plus 200 mM NaCl. The purified protein is stored at 4° C. or frozen at −80 C.

[0911] In addition to the above expression vector, the present invention further includes an expression vector, called pHE4a (ATCC Accession Number 209645, deposited on Feb. 25, 1998) which contains phage operator and promoter elements operatively linked to a polynucleotide of the present invention. This vector contains: 1) a neomycinphosphotransferase gene as a selection marker, 2) an E. coli origin of replication, 3) a T5 phage promoter sequence, 4) two lac operator sequences, 5) a Shine-Delgarno sequence, and 6) the lactose operon repressor gene (lacIq). The origin of replication (oriC) is derived from pUC19 (LTI, Gaithersburg, Md.). The promoter and operator sequences are made synthetically.

[0912] DNA can be inserted into the pHE4a by restricting the vector with NdeI and XbaI, BamHI, XhoI, or Asp718, running the restricted product on a gel, and isolating the larger fragment (the stuffer fragment should be about 310 base pairs). The DNA insert is generated according to the PCR protocol described in Example 1, using PCR primers having restriction sites for NdeI (5′ primer) and XbaI, BamHI, XhoI, or Asp718 (3′ primer). The PCR insert is gel purified and restricted with compatible enzymes. The insert and vector are ligated according to standard protocols.

[0913] The engineered vector could easily be substituted in the above protocol to express protein in a bacterial system.

### Example 6

### Purification of a Polypeptide from an Inclusion Body

[0914] The following alternative method can be used to purify a polypeptide expressed in E coli when it is present in the form of inclusion bodies. Unless otherwise specified, all of the following steps are conducted at 4-10° C.

[0915] Upon completion of the production phase of the E. coli fermentation, the cell culture is cooled to 4-10° C. and the cells harvested by continuous centrifugation at 15,000 rpm (Heraeus Sepatech). On the basis of the expected yield of protein per unit weight of cell paste and the amount of purified protein required, an appropriate amount of cell paste, by weight, is suspended in a buffer solution containing 100 mM Tris, 50 mM EDTA, pH 7.4. The cells are dispersed to a homogeneous suspension using a high shear mixer.

[0916] The cells are then lysed by passing the solution through a microfluidizer (Microfuidics, Corp. or APV Gaulin, Inc.) twice at 4000-6000 psi. The homogenate is then mixed with NaCl solution to a final concentration of 0.5 M NaCl, followed by centrifugation at 7000× g for 15 min. The resultant pellet is washed again using 0.5M NaCl, 100 mM Tris, 50 mM EDTA, pH 7.4.

[0917] The resulting washed inclusion bodies are solubilized with 1.5 M guanidine hydrochloride (GuHCl) for 2-4 hours. After 7000× g centrifugation for 15 min., the pellet is discarded and the polypeptide containing supernatant is incubated at 4° C. overnight to allow further GuHCl extraction.

[0918] Following high speed centrifugation (30,000× g) to remove insoluble particles, the GuHCl solubilized protein is refolded by quickly mixing the GuHCl extract with 20 volumes of buffer containing 50 mM sodium, pH 4.5, 150 mM NaCl, 2 mM EDTA by vigorous stirring. The refolded diluted protein solution is kept at 4° C. without mixing for 12 hours prior to further purification steps.

[0919] To clarify the refolded polypeptide solution, a previously prepared tangential filtration unit equipped with 0.16 μm membrane filter with appropriate surface area (e.g., Filtron), equilibrated with 40 mM sodium acetate, pH 6.0 is employed. The filtered sample is loaded onto a cation exchange resin (e.g., Poros HS-50, Perseptive Biosystems). The column is washed with 40 mM sodium acetate, pH 6.0 and eluted with 250 mM, 500 mM, 1000 mM, and 1500 mM NaCl in the same buffer, in a stepwise manner. The absorbance at 280 nm of the effluent is continuously monitored. Fractions are collected and further analyzed by SDS-PAGE.

[0920] Fractions containing the polypeptide are then pooled and mixed with 4 volumes of water. The diluted sample is then loaded onto a previously prepared set of tandem columns of strong anion (Poros HQ-50, Perseptive Biosystems) and weak anion (Poros CM-20, Perseptive Biosystems) exchange resins. The columns are equilibrated with 40 mM sodium acetate, pH 6.0. Both columns are washed with 40 mM sodium acetate, pH 6.0, 200 mM NaCl. The CM-20 column is then eluted using a 10 column volume linear gradient ranging from 0.2 M NaCl, 50 mM sodium acetate, pH 6.0 to 1.0 M NaCl, 50 mM sodium acetate, pH 6.5. Fractions are collected under constant A₂₈₀ monitoring of the effluent. Fractions containing the polypeptide (determined, for instance, by 16% SDS-PAGE) are then pooled.

[0921] The resultant polypeptide should exhibit greater than 95% purity after the above refolding and purification steps. No major contaminant bands should be observed from Commassie blue stained 16% SDS-PAGE gel when 5 μg of purified protein is loaded. The purified protein can also be tested for endotoxin/LPS contamination, and typically the LPS content is less than 0.1 ng/ml according to LAL assays.

### Example 7

### Cloning and Expression of a Polypeptide in a Baculovirus Expression System

[0922] In this example, the plasmid shuttle vector pA2 is used to insert a polynucleotide into a baculovirus to express a polypeptide. This expression vector contains the strong polyhedrin promoter of the Autographa californica nuclear polyhedrosis virus (AcMNPV) followed by convenient restriction sites such as BamHI, Xba I and Asp718. The polyadenylation site of the simian virus 40 (“SV40”) is used for efficient polyadenylation. For easy selection of recombinant virus, the plasmid contains the beta-galactosidase gene from E. coli under control of a weak Drosophila promoter in the same orientation, followed by the polyadenylation signal of the polyhedrin gene. The inserted genes are flanked on both sides by viral sequences for cell-mediated homologous recombination with wild-type viral DNA to generate a viable virus that express the cloned polynucleotide.

[0923] Many other baculovirus vectors can be used in place of the vector above, such as pAc373, pVL941, and pAcIM1, as one skilled in the art would readily appreciate, as long as the construct provides appropriately located signals for transcription, translation, secretion and the like, including a signal peptide and an in-frame AUG as required. Such vectors are described, for instance, in Luckow et al., Virology 170:31-39 (1989).

[0924] Specifically, the cDNA sequence contained in the deposited clone, including the AUG initiation codon, is amplified using the PCR protocol described in Example 1. If a naturally occurring signal sequence is used to produce the polypeptide of the present invention, the pA2 vector does not need a second signal peptide. Alternatively, the vector can be modified (pA2 GP) to include a baculovirus leader sequence, using the standard methods described in Summers et al., “A Manual of Methods for Baculovirus Vectors and Insect Cell Culture Procedures,” Texas Agricultural Experimental Station Bulletin No. 1555 (1987).

[0925] The amplified fragment is isolated from a 1% agarose gel using a commercially available kit (“Geneclean,” BIO 101 Inc., La Jolla, Calif.). The fragment then is digested with appropriate restriction enzymes and again purified on a 1% agarose gel.

[0926] The plasmid is digested with the corresponding restriction enzymes and optionally, can be dephosphorylated using calf intestinal phosphatase, using routine procedures known in the art. The DNA is then isolated from a 1% agarose gel using a commercially available kit (“Geneclean” BIO 101 Inc., La Jolla, Calif.).

[0927] The fragment and the dephosphorylated plasmid are ligated together with T4 DNA ligase. E. coli HB101 or other suitable E. coli hosts such as XL-1 Blue (Stratagene Cloning Systems, La Jolla, Calif.) cells are transformed with the ligation mixture and spread on culture plates. Bacteria containing the plasmid are identified by digesting DNA from individual colonies and analyzing the digestion product by gel electrophoresis. The sequence of the cloned fragment is confirmed by DNA sequencing.

[0928] Five μg of a plasmid containing the polynucleotide is co-transfected with 1.0 μg of a commercially available linearized baculovirus DNA (“BaculoGold™ baculovirus DNA”, Pharmingen, San Diego, Calif.), using the lipofection method described by Felgner et al., Proc. Natl. Acad. Sci. USA 84:7413-7417 (1987). One μg of BaculoGold™ virus DNA and 5 μg of the plasmid are mixed in a sterile well of a microtiter plate containing 50 μl of serum-free Grace's medium (Life Technologies Inc., Gaithersburg, Md.). Afterwards, 10 μl Lipofectin plus 90 μl Grace's medium are added, mixed and incubated for 15 minutes at room temperature. Then the transfection mixture is added drop-wise to Sf9 insect cells (ATCC CRL 1711) seeded in a 35 mm tissue culture plate with 1 ml Grace's medium without serum. The plate is then incubated for 5 hours at 27° C. The transfection solution is then removed from the plate and 1 ml of Grace's insect medium supplemented with 10% fetal calf serum is added. Cultivation is then continued at 27° C. for four days.

[0929] After four days the supernatant is collected and a plaque assay is performed, as described by Summers and Smith, supra. An agarose gel with “Blue Gal” (Life Technologies Inc., Gaithersburg) is used to allow easy identification and isolation of gal-expressing clones, which produce blue-stained plaques. (A detailed description of a “plaque assay” of this type can also be found in the user's guide for insect cell culture and baculovirology distributed by Life Technologies Inc., Gaithersburg, page 9-10.) After appropriate incubation, blue stained plaques are picked with the tip of a micropipettor (e.g., Eppendorf). The agar containing the recombinant viruses is then resuspended in a microcentrifuge tube containing 200 μl of Grace's medium and the suspension containing the recombinant baculovirus is used to infect Sf9 cells seeded in 35 mm dishes. Four days later the supernatants of these culture dishes are harvested and then they are stored at 4° C.

[0930] To verify the expression of the polypeptide, Sf9 cells are grown in Grace's medium supplemented with 10% heat-inactivated FBS. The cells are infected with the recombinant baculovirus containing the polynucleotide at a multiplicity of infection (“MOI”) of about 2. If radiolabeled proteins are desired, 6 hours later the medium is removed and is replaced with SF900 II medium minus methionine and cysteine (available from Life Technologies Inc., Rockville, Md.). After 42 hours, 5 μCi of ³⁵S-methionine and 5 μCi ³⁵S-cysteine (available from Amersham) are added. The cells are further incubated for 16 hours and then are harvested by centrifugation. The proteins in the supernatant as well as the intracellular proteins are analyzed by SDS-PAGE followed by autoradiography (if radiolabeled).

[0931] Microsequencing of the amino acid sequence of the amino terminus of purified protein may be used to determine the amino terminal sequence of the produced protein.

### Example 8

### Expression of a Polypeptide in Mammalian Cells

[0932] The polypeptide of the present invention can be expressed in a mammalian cell. A typical mammalian expression vector contains a promoter element, which mediates the initiation of transcription of mRNA, a protein coding sequence, and signals required for the termination of transcription and polyadenylation of the transcript. Additional elements include enhancers, Kozak sequences and intervening sequences flanked by donor and acceptor sites for RNA splicing. Highly efficient transcription is achieved with the early and late promoters from SV40, the long terminal repeats (LTRs) from Retroviruses, e.g., RSV, HTLVI, HIVI and the early promoter of the cytomegalovirus (CMV). However, cellular elements can also be used (e.g., the human actin promoter).

[0933] Suitable expression vectors for use in practicing the present invention include, for example, vectors such as pSVL and pMSG (Pharmacia, Uppsala, Sweden), pRSVcat (ATCC 37152), pSV2dhfr (ATCC 37146), pBC12MI (ATCC 67109), pCMVSport 2.0, and pCMVSport 3.0. Mammalian host cells that could be used include, human Hela, 293, H9 and Jurkat cells, mouse NIH3T3 and C127 cells, Cos 1, Cos 7 and CVI, quail QC1-3 cells, mouse L cells and Chinese hamster ovary (CHO) cells.

[0934] Alternatively, the polypeptide can be expressed in stable cell lines containing the polynucleotide integrated into a chromosome. The co-transfection with a selectable marker such as DHFR, gpt, neomycin, or hygromycin allows the identification and isolation of the transfected cells.

[0935] The transfected gene can also be amplified to express large amounts of the encoded protein. The DHFR (dihydrofolate reductase) marker is useful in developing cell lines that carry several hundred or even several thousand copies of the gene of interest. (See, e.g., Alt, F. W., et al., J. Biol. Chem. 253:1357-1370 (1978); Hamlin, J. L. and Ma, C., Biochem. et Biophys. Acta, 1097:107-143 (1990); Page, M. J. and Sydenham, M. A., Biotechnology 9:64-68 (1991).) Another useful selection marker is the enzyme glutamine synthase (GS) (Murphy et al., Biochem J. 227:277-279 (1991); Bebbington et al., Bio/Technology 10:169-175 (1992). Using these markers, the mammalian cells are grown in selective medium and the cells with the highest resistance are selected. These cell lines contain the amplified gene(s) integrated into a chromosome. Chinese hamster ovary (CHO) and NSO cells are often used for the production of proteins.

[0936] Derivatives of the plasmid pSV2-dhfr (ATCC Accession No. 37146), the expression vectors pC4 (ATCC Accession No. 209646) and pC6 (ATCC Accession No.209647) contain the strong promoter (LTR) of the Rous Sarcoma Virus (Cullen et al., Molecular and Cellular Biology, 438-447 (March, 1985)) plus a fragment of the CMV-enhancer (Boshart et al., Cell 41:521-530 (1985).) Multiple cloning sites, e.g., with the restriction enzyme cleavage sites BamHI, XbaI and Asp718, facilitate the cloning of the gene of interest. The vectors also contain the 3′ intron, the polyadenylation and termination signal of the rat preproinsulin gene, and the mouse DHFR gene under control of the SV40 early promoter.

[0937] Specifically, the plasmid pC6, for example, is digested with appropriate restriction enzymes and then dephosphorylated using calf intestinal phosphates by procedures known in the art. The vector is then isolated from a 1% agarose gel.

[0938] A polynucleotide of the present invention is amplified according to the protocol outlined in Example 1. If a naturally occurring signal sequence is used to produce the polypeptide of the present invention, the vector does not need a second signal peptide. Alternatively, if a naturally occurring signal sequence is not used, the vector can be modified to include a heterologous signal sequence. (See, e.g., International Publication No. WO 96/34891.)

[0939] The amplified fragment is isolated from a 1% agarose gel using a commercially available kit (“Geneclean,” BIO 101 Inc., La Jolla, Calif.). The fragment then is digested with appropriate restriction enzymes and again purified on a 1% agarose gel.

[0940] The amplified fragment is then digested with the same restriction enzyme and purified on a 1% agarose gel. The isolated fragment and the dephosphorylated vector are then ligated with T4 DNA ligase. E. coli HB101 or XL-1 Blue cells are then transformed and bacteria are identified that contain the fragment inserted into plasmid pC6 using, for instance, restriction enzyme analysis.

[0941] Chinese hamster ovary cells lacking an active DHFR gene is used for transfection. Five μg of the expression plasmid pC6 or pC4 is cotransfected with 0.5 μg of the plasmid pSVneo using lipofectin (Felgner et al., supra). The plasmid pSV2-neo contains a dominant selectable marker, the neo gene from Tn5 encoding an enzyme that confers resistance to a group of antibiotics including G418. The cells are seeded in alpha minus MEM supplemented with 1 mg/ml G418. After 2 days, the cells are trypsinized and seeded in hybridoma cloning plates (Greiner, Germany) in alpha minus MEM supplemented with 10, 25, or 50 ng/ml of methotrexate plus 1 mg/ml G418. After about 10-14 days single clones are trypsinized and then seeded in 6-well petri dishes or 10 ml flasks using different concentrations of methotrexate (50 nM, 100 nM, 200 nM, 400 nM, 800 nM). Clones growing at the highest concentrations of methotrexate are then transferred to new 6-well plates containing even higher concentrations of methotrexate (1 μM, 2 μM, 5 μM, 10 mM, 20 mM). The same procedure is repeated until clones are obtained which grow at a concentration of 100-200 μM. Expression of the desired gene product is analyzed, for instance, by SDS-PAGE and Western blot or by reversed phase HPLC analysis.

### Example 9

### Protein Fusions

[0942] The polypeptides of the present invention are preferably fused to other proteins. These fusion proteins can be used for a variety of applications. For example, fusion of the present polypeptides to His-tag, HA-tag, protein A, IgG domains, and maltose binding protein facilitates purification. (See Example 5; see also EP A 394,827; Traunecker, et al., Nature 331:84-86 (1988).) Similarly, fusion to IgG-1, IgG-3, and albumin increases the halflife time in vivo. Nuclear localization signals fused to the polypeptides of the present invention can target the protein to a specific subcellular localization, while covalent heterodimer or homodimers can increase or decrease the activity of a fusion protein. Fusion proteins can also create chimeric molecules having more than one function. Finally, fusion proteins can increase solubility and/or stability of the fused protein compared to the non-fused protein. All of the types of fusion proteins described above can be made by modifying the following protocol, which outlines the fusion of a polypeptide to an IgG molecule, or the protocol described in Example 5.

[0943] Briefly, the human Fc portion of the IgG molecule can be PCR amplified, using primers that span the 5′ and 3′ ends of the sequence described below. These primers also should have convenient restriction enzyme sites that will facilitate cloning into an expression vector, preferably a mammalian expression vector.

[0944] For example, if pC4 (ATCC Accession No. 209646) is used, the human Fc portion can be ligated into the BamHI cloning site. Note that the 3′ BamHI site should be destroyed. Next, the vector containing the human Fc portion is re-restricted with BamHI, linearizing the vector, and a polynucleotide of the present invention, isolated by the PCR protocol described in Example 1, is ligated into this BamHI site. Note that the polynucleotide is cloned without a stop codon, otherwise a fusion protein will not be produced.

[0945] If the naturally occurring signal sequence is used to produce the polypeptide of the present invention, pC4 does not need a second signal peptide. Alternatively, if the naturally occurring signal sequence is not used, the vector can be modified to include a heterologous signal sequence. (See, e.g., International Publication No. WO 96/34891.)

Human IgG Fc region:

(SEQ ID NO:1)

GGGATCCGGAGCCCAAATCTTCTGACAAAACTCACACATGCCCACCGT
GCCCAGCACCTGAATTCGAGGGTGCACCGTCAGTCTTCCTCTTCCCCCC
AAAACCCAAGGACACCCTCATGATCTCCCGGACTCCTGAGGTCACATG
CGTGGTGGTGGACGTAAGCCACGAAGACCCTGAGGTCAAGTTCAACTG
GTACGTGGACGGCGTGGAGGTGCATAATGCCAAGACAAAGCCGCGGG
AGGAGCAGTACAACAGCACGTACCGTGTGGTCAGCGTCCTCACCGTCC
TGCACCAGGACTGGCTGAATGGCAAGGAGTACAAGTGCAAGGTCTCCA
ACAAAGCCCTCCCAACCCCCATCGAGAAAACCATCTCCAAAGCCAAAG
GGCAGCCCCGAGAACCACAGGTGTACACCCTGCCCCCATCCCGGGATG
AGCTGACCAAGAACCAGGTCAGCCTGACCTGCCTGGTCAAAGGCTTCT
ATCCAAGCGACATCGCCGTGGAGTGGGAGAGCAATGGGCAGCCGGAG
AACAACTACAAGACCACGCCTCCCGTGCTGGACTCCGACGGCTCCTTCT
TCCTCTACAGCAAGCTCACCGTGGACAAGAGCAGGTGGCAGCAGGGGA
ACGTCTTCTCATGCTCCGTGATGCATGAGGCTCTGCACAACCACTACAC
GCAGAAGAGCCTCTCCCTGTCTCCGGGTAAATGAGTGCGACGGCCGCG
ACTCTAGAGGAT

### Example 10

### Production of an Antibody from a Polypeptide Hybridoma Technology

[0946] The antibodies of the present invention can be prepared by a variety of methods. (See, Current Protocols, Chapter 2.) As one example of such methods, cells expressing <<Abbreviated_Name_of_HGS_Clone>> are administered to an animal to induce the production of sera containing polyclonal antibodies. In a preferred method, a preparation of <<Abbreviated_Name_of_HGS_Clone>> is prepared and purified to render it substantially free of natural contaminants. Such a preparation is then introduced into an animal in order to produce polyclonal antisera of greater specific activity.

[0947] Monoclonal antibodies specific for <<Abbreviated_Name_of_HGS_Clone>> are prepared using hybridoma technology (Kohler et al., Nature 256:495 (1975); Kohler et al., Eur. J. Immunol. 6:511 (1976); Kohler et al., Eur. J. Immunol. 6:292 (1976); Hammerling et al., in: Monoclonal Antibodies and T-Cell Hybridomas, Elsevier, N.Y., pp. 563-681 (1981)). In general, an animal (preferably a mouse) is immunized with <<Abbreviated_Name_of_HGS_Clone>> or, more preferably, with a secreted <<Abbreviated_Name_of_HGS_Clone>>-expressing cell. Such polypeptide-expressing cells are cultured in any suitable tissue culture medium, preferably in Earle's modified Eagle's medium supplemented with 10% fetal bovine serum (inactivated at about 56° C.), and supplemented with about 10 g/l of nonessential amino acids, about 1,000 U/ml of penicillin, and about 100 μg/ml of streptomycin.

[0948] The splenocytes of such mice are extracted and fused with a suitable myeloma cell line. Any suitable myeloma cell line may be employed in accordance with the present invention; however, it is preferable to employ the parent myeloma cell line (SP20), available from the ATCC. After fusion, the resulting hybridoma cells are selectively maintained in HAT medium, and then cloned by limiting dilution as described by Wands et al. (Gastroenterology 80:225-232 (1981)). The hybridoma cells obtained through such a selection are then assayed to identify clones which secrete antibodies capable of binding the <<Abbreviated_Name_of_HGS_Clone>>.

[0949] Alternatively, additional antibodies capable of binding to <<Abbreviated_Name_of_HGS_Clone>> can be produced in a two-step procedure using anti-idiotypic antibodies. Such a method makes use of the fact that antibodies are themselves antigens, and therefore, it is possible to obtain an antibody which binds to a second antibody. In accordance with this method, protein specific antibodies are used to immunize an animal, preferably a mouse. The splenocytes of such an animal are then used to produce hybridoma cells, and the hybridoma cells are screened to identify clones which produce an antibody whose ability to bind to the <<Abbreviated_Name_of_HGS_Clone>>-specific antibody can be blocked by <<Abbreviated_Name_of_HGS_Clone>>. Such antibodies comprise anti-idiotypic antibodies to the <<Abbreviated_Name_of_HGS_Clone>>-specific antibody and are used to immunize an animal to induce formation of further <<Abbreviated_Name_of_HGS_Clone>>-specific antibodies.

[0950] For in vivo use of antibodies in humans, an antibody is “humanized”. Such antibodies can be produced using genetic constructs derived from hybridoma cells producing the monoclonal antibodies described above. Methods for producing chimeric and humanized antibodies are known in the art and are discussed herein. (See, for review, Morrison, Science 229:1202 (1985); Oi et al., BioTechniques 4:214 (1986); Cabilly et al., U.S. Pat. No. 4,816,567; Taniguchi et al., EP 171496; Morrison et al., EP 173494; Neuberger et al., WO 8601533; Robinson et al., International Publication No. WO 8702671; Boulianne et al., Nature 312:643 (1984); Neuberger et al., Nature 314:268 (1985).)

[0951] Isolation of Antibody Fragments Directed Against <<Abbreviated_Name_of_HGS_Clone>> From a Library of scFvs

[0952] Naturally occurring V-genes isolated from human PBLs are constructed into a library of antibody fragments which contain reactivities against <<Abbreviated_Name_of_HGS_Clone>> to which the donor may or may not have been exposed (see e.g., U.S. Pat. No. 5,885,793 incorporated herein by reference in its entirety).

[0953] Rescue of the Library.

[0954] A library of scFvs is constructed from the RNA of human PBLs as described in International Publication No. WO 92/01047. To rescue phage displaying antibody fragments, approximately 109 E. coli harboring the phagemid are used to inoculate 50 ml of 2× TY containing 1% glucose and 100 μg/ml of ampicillin (2× TY-AMP-GLU) and grown to an O.D. of 0.8 with shaking. Five ml of this culture is used to inoculate 50 ml of 2× TY-AMP-GLU, 2×108 TU of delta gene 3 helper (M13 delta gene III, see International Publication No. WO 92/01047) are added and the culture incubated at 37° C. for 45 minutes without shaking and then at 37° C. for 45 minutes with shaking. The culture is centrifuged at 4000 r.p.m. for 10 min. and the pellet resuspended in 2 liters of 2× TY containing 100 μg/ml ampicillin and 50 ug/ml kanamycin and grown overnight. Phage are prepared as described in International Application No. WO 92/01047.

[0955] M13 delta gene III is prepared as follows: M13 delta gene III helper phage does not encode gene III protein, hence the phage(mid) displaying antibody fragments have a greater avidity of binding to antigen. Infectious M13 delta gene III particles are made by growing the helper phage in cells harboring a pUC19 derivative supplying the wild type gene III protein during phage morphogenesis. The culture is incubated for 1 hour at 37° C. without shaking and then for a further hour at 37° C. with shaking. Cells are spun down (IEC-Centra 8,400 r.p.m. for 10 min), resuspended in 300 ml 2× TY broth containing 100 μg ampicillin/ml and 25 μg kanamycin/ml (2× TY-AMP-KAN) and grown overnight, shaking at 37° C. Phage particles are purified and concentrated from the culture medium by two PEG-precipitations (Sambrook et al., 1990), resuspended in 2 ml PBS and passed through a 0.45 μm filter (Minisart NML; Sartorius) to give a final concentration of approximately 10¹³ transducing units/ml (ampicillin-resistant clones).

[0956] Panning of the Library.

[0957] Immunotubes (Nunc) are coated overnight in PBS with 4 ml of either 100 μg/ml or 10 μg/ml of a polypeptide of the present invention. Tubes are blocked with 2% Marvel-PBS for 2 hours at 37° C. and then washed 3 times in PBS. Approximately 10¹³ TU of phage is applied to the tube and incubated for 30 minutes at room temperature tumbling on an over and under turntable and then left to stand for another 1.5 hours. Tubes are washed 10 times with PBS 0.1% Tween-20 and 10 times with PBS. Phage are eluted by adding 1 ml of 100 mM triethylamine and rotating 15 minutes on an under and over turntable after which the solution is immediately neutralized with 0.5 ml of 1.0M Tris-HCl, pH 7.4. Phage are then used to infect 10 ml of mid-log E. coli TG1 by incubating eluted phage with bacteria for 30 minutes at 37° C. The E. coli are then plated on TYE plates containing 1% glucose and 100 μg/ml ampicillin. The resulting bacterial library is then rescued with delta gene 3 helper phage as described above to prepare phage for a subsequent round of selection. This process is then repeated for a total of 4 rounds of affinity purification with tube-washing increased to 20 times with PBS, 0. 1% Tween-20 and 20 times with PBS for rounds 3 and 4.

[0958] Characterization of Binders.

[0959] Eluted phage from the 3rd and 4th rounds of selection are used to infect E. coli HB 2151 and soluble scFv is produced (Marks, et al., 1991) from single colonies for assay. ELISAs are performed with microtitre plates coated with 10 pg/ml of the polypeptide of the present invention in 50 mM bicarbonate pH 9.6. Clones positive in ELISA are further characterized by PCR fingerprinting (see, e.g., International Application No. WO 92/01047) and then by sequencing. These ELISA positive clones may also be further characterized by techniques known in the art, such as, for example, epitope mapping, binding affinity, receptor signal transduction, ability to block or competitively inhibit antibody/antigen binding, and competitive agonistic or antagonistic activity.

### Example 11

### Method of Determining Alterations in a Gene Corresponding to a Polynucleotide

[0960] RNA isolated from entire families or individual patients presenting with a phenotype of interest (such as a disease) is isolated. cDNA is then generated from these RNA samples using protocols known in the art. (See, Sambrook.) The cDNA is then used as a template for PCR, employing primers surrounding regions of interest in SEQ ID NO:X; and/or the nucleotide sequence of the cDNA contained in Clone ID NO:Z. Suggested PCR conditions consist of 35 cycles at 95 degrees C. for 30 seconds; 60-120 seconds at 52-58 degrees C.; and 60-120 seconds at 70 degrees C., using buffer solutions described in Sidransky et al., Science 252:706 (1991).

[0961] PCR products are then sequenced using primers labeled at their 5′ end with T4 polynucleotide kinase, employing SequiTherm Polymerase (Epicentre Technologies). The intron-exon boundaries of selected exons is also determined and genomic PCR products analyzed to confirm the results. PCR products harboring suspected mutations are then cloned and sequenced to validate the results of the direct sequencing.

[0962] PCR products are cloned into T-tailed vectors as described in Holton et al., Nucleic Acids Research, 19:1156 (1991) and sequenced with T7 polymerase (United States Biochemical). Affected individuals are identified by mutations not present in unaffected individuals.

[0963] Genomic rearrangements are also observed as a method of determining alterations in a gene corresponding to a polynucleotide. Genomic clones isolated according to Example 2 are nick-translated with digoxigenindeoxy-uridine 5′-triphosphate (Boehringer Manheim), and FISH performed as described in Johnson et al., Methods Cell Biol. 35:73-99 (1991). Hybridization with the labeled probe is carried out using a vast excess of human cot-1 DNA for specific hybridization to the corresponding genomic locus.

[0964] Chromosomes are counterstained with 4,6-diamino-2-phenylidole and propidium iodide, producing a combination of C- and R-bands. Aligned images for precise mapping are obtained using a triple-band filter set (Chroma Technology, Brattleboro, Vt.) in combination with a cooled charge-coupled device camera (Photometrics, Tucson, Ariz.) and variable excitation wavelength filters. (Johnson et al., Genet. Anal. Tech. Appl., 8:75 (1991).) Image collection, analysis and chromosomal fractional length measurements are performed using the ISee Graphical Program System. (Inovision Corporation, Durham, N.C.) Chromosome alterations of the genomic region hybridized by the probe are identified as insertions, deletions, and translocations. These alterations are used as a diagnostic marker for an associated disease.

### Example 12

### Method of Detecting Abnormal Levels of a Polypeptide in a Biological Sample

[0965] A polypeptide of the present invention can be detected in a biological sample, and if an increased or decreased level of the polypeptide is detected, this polypeptide is a marker for a particular phenotype. Methods of detection are numerous, and thus, it is understood that one skilled in the art can modify the following assay to fit their particular needs.

[0966] For example, antibody-sandwich ELISAs are used to detect polypeptides in a sample, preferably a biological sample. Wells of a microtiter plate are coated with specific antibodies, at a final concentration of 0.2 to 10 ug/ml. The antibodies are either monoclonal or polyclonal and are produced by the method described in Example 10. The wells are blocked so that non-specific binding of the polypeptide to the well is reduced.

[0967] The coated wells are then incubated for >2 hours at RT with a sample containing the polypeptide. Preferably, serial dilutions of the sample should be used to validate results. The plates are then washed three times with deionized or distilled water to remove unbound polypeptide.

[0968] Next, 50 ul of specific antibody-alkaline phosphatase conjugate, at a concentration of 25-400 ng, is added and incubated for 2 hours at room temperature. The plates are again washed three times with deionized or distilled water to remove unbound conjugate.

[0969] Add 75 ul of 4-methylumbelliferyl phosphate (MUP) or p-nitrophenyl phosphate (NPP) substrate solution to each well and incubate 1 hour at room temperature. Measure the reaction by a microtiter plate reader. Prepare a standard curve, using serial dilutions of a control sample, and plot polypeptide concentration on the X-axis (log scale) and fluorescence or absorbance of the Y-axis (linear scale). Interpolate the concentration of the polypeptide in the sample using the standard curve.

### Example 13

### Formulation

[0970] The invention also provides methods of treatment and/or prevention of diseases or disorders (such as, for example, any one or more of the diseases or disorders disclosed herein) by administration to a subject of an effective amount of a Therapeutic. By therapeutic is meant polynucleotides or polypeptides of the invention (including fragments and variants), agonists or antagonists thereof, and/or antibodies thereto, in combination with a pharmaceutically acceptable carrier type (e.g., a sterile carrier).

[0971] The Therapeutic will be formulated and dosed in a fashion consistent with good medical practice, taking into account the clinical condition of the individual patient (especially the side effects of treatment with the Therapeutic alone), the site of delivery, the method of administration, the scheduling of administration, and other factors known to practitioners. The “effective amount” for purposes herein is thus determined by such considerations.

[0972] As a general proposition, the total pharmaceutically effective amount of the Therapeutic administered parenterally per dose will be in the range of about lug/kg/day to 10 mg/kg/day of patient body weight, although, as noted above, this will be subject to therapeutic discretion. More preferably, this dose is at least 0.01 mg/kg/day, and most preferably for humans between about 0.01 and 1 mg/kg/day for the hormone. If given continuously, the Therapeutic is typically administered at a dose rate of about 1 ug/kg/hour to about 50 ug/kg/hour, either by 1-4 injections per day or by continuous subcutaneous infusions, for example, using a mini-pump. An intravenous bag solution may also be employed. The length of treatment needed to observe changes and the interval following treatment for responses to occur appears to vary depending on the desired effect.

[0973] Therapeutics can be are administered orally, rectally, parenterally, intracistemally, intravaginally, intraperitoneally, topically (as by powders, ointments, gels, drops or transdermal patch), bucally, or as an oral or nasal spray. “Pharmaceutically acceptable carrier” refers to a non-toxic solid, semisolid or liquid filler, diluent, encapsulating material or formulation auxiliary of any. The term “parenteral” as used herein refers to modes of administration which include intravenous, intramuscular, intraperitoneal, intrastemal, subcutaneous and intraarticular injection and infusion.

[0974] Therapeutics of the invention are also suitably administered by sustained-release systems. Suitable examples of sustained-release Therapeutics are administered orally, rectally, parenterally, intracistemally, intravaginally, intraperitoneally, topically (as by powders, ointments, gels, drops or transdermal patch), bucally, or as an oral or nasal spray. “Pharmaceutically acceptable carrier” refers to a non-toxic solid, semisolid or liquid filler, diluent, encapsulating material or formulation auxiliary of any type. The term “parenteral” as used herein refers to modes of administration which include intravenous, intramuscular, intraperitoneal, intrastemal, subcutaneous and intraarticular injection and infusion.

[0975] Therapeutics of the invention are also suitably administered by sustained-release systems. Suitable examples of sustained-release Therapeutics include suitable polymeric materials (such as, for example, semi-permeable polymer matrices in the form of shaped articles, e.g., films, or mirocapsules), suitable hydrophobic materials (for example as an emulsion in an acceptable oil) or ion exchange resins, and sparingly soluble derivatives (such as, for example, a sparingly soluble salt).

[0976] Sustained-release matrices include polylactides (U.S. Pat. No. 3,773,919, EP 58,481), copolymers of L-glutamic acid and gamma-ethyl-L-glutamate (Sidman et al., Biopolymers 22:547-556 (1983)), poly (2-hydroxyethyl methacrylate) (Langer et al., J. Biomed. Mater. Res. 15:167-277 (1981), and Langer, Chem. Tech. 12:98-105 (1982)), ethylene vinyl acetate (Langer et al., Id.) or poly-D-(−)-3-hydroxybutyric acid (EP 133,988).

[0977] Sustained-release Therapeutics also include liposomally entrapped Therapeutics of the invention (see generally, Langer, Science 249:1527-1533 (1990); Treat et al., in Liposomes in the Therapy of Infectious Disease and Cancer, Lopez-Berestein and Fidler (eds.), Liss, New York, pp. 317-327 and 353-365 (1989)). Liposomes containing the Therapeutic are prepared by methods known per se: DE 3,218,121; Epstein et al., Proc. Natl. Acad. Sci. (USA) 82:3688-3692 (1985); Hwang et al., Proc. Natl. Acad. Sci.(JSA) 77:4030-4034 (1980); EP 52,322; EP 36,676; EP 88,046; EP 143,949; EP 142,641; Japanese Pat. Appl. 83-118008; U.S. Pat. Nos. 4,485,045 and 4,544,545; and EP 102,324. Ordinarily, the liposomes are of the small (about 200-800 Angstroms) unilamellar type in which the lipid content is greater than about 30 mol. percent cholesterol, the selected proportion being adjusted for the optimal Therapeutic.

[0978] In yet an additional embodiment, the Therapeutics of the invention are delivered by way of a pump (see Langer, supra; Sefton, CRC Crit. Ref. Biomed. Eng. 14:201 (1987); Buchwald et al., Surgery 88:507 (1980); Saudek et al., N. Engl. J. Med. 321:574 (1989)).

[0979] Other controlled release systems are discussed in the review by Langer (Science 249:1527-1533 (1990)).

[0980] For parenteral administration, in one embodiment, the Therapeutic is formulated generally by mixing it at the desired degree of purity, in a unit dosage injectable form (solution, suspension, or emulsion), with a pharmaceutically acceptable carrier, i.e., one that is non-toxic to recipients at the dosages and concentrations employed and is compatible with other ingredients of the formulation. For example, the formulation preferably does not include oxidizing agents and other compounds that are known to be deleterious to the Therapeutic.

[0981] Generally, the formulations are prepared by contacting the Therapeutic uniformly and intimately with liquid carriers or finely divided solid carriers or both. Then, if necessary, the product is shaped into the desired formulation. Preferably the carrier is a parenteral carrier, more preferably a solution that is isotonic with the blood of the recipient. Examples of such carrier vehicles include water, saline, Ringer's solution, and dextrose solution. Non-aqueous vehicles such as fixed oils and ethyl oleate are also useful herein, as well as liposomes.

[0982] The carrier suitably contains minor amounts of additives such as substances that enhance isotonicity and chemical stability. Such materials are non-toxic to recipients at the dosages and concentrations employed, and include buffers such as phosphate, citrate, succinate, acetic acid, and other organic acids or their salts; antioxidants such as ascorbic acid; low molecular weight (less than about ten residues) polypeptides, e.g., polyarginine or tripeptides; proteins, such as serum albumin, gelatin, or immunoglobulins; hydrophilic polymers such as polyvinylpyrrolidone; amino acids, such as glycine, glutamic acid, aspartic acid, or arginine; monosaccharides, disaccharides, and other carbohydrates including cellulose or its derivatives, glucose, manose, or dextrins; chelating agents such as EDTA; sugar alcohols such as mannitol or sorbitol; counterions such as sodium; and/or nonionic surfactants such as polysorbates, poloxamers, or PEG.

[0983] The Therapeutic is typically formulated in such vehicles at a concentration of about 0.1 mg/ml to 100 mg/ml, preferably 1-10 mg/ml, at a pH of about 3 to 8. It will be understood that the use of certain of the foregoing excipients, carriers, or stabilizers will result in the formation of polypeptide salts.

[0984] Any pharmaceutical used for therapeutic administration can be sterile. Sterility is readily accomplished by filtration through sterile filtration membranes (e.g., 0.2 micron membranes). Therapeutics generally are placed into a container having a sterile access port, for example, an intravenous solution bag or vial having a stopper pierceable by a hypodermic injection needle.

[0985] Therapeutics ordinarily will be stored in unit or multi-dose containers, for example, sealed ampoules or vials, as an aqueous solution or as a lyophilized formulation for reconstitution. As an example of a lyophilized formulation, 10-ml vials are filled with 5 ml of sterile-filtered 1% (w/v) aqueous Therapeutic solution, and the resulting mixture is lyophilized. The infusion solution is prepared by reconstituting the lyophilized Therapeutic using bacteriostatic Water-for-Injection.

[0986] The invention also provides a pharmaceutical pack or kit comprising one or more containers filled with one or more of the ingredients of the Therapeutics of the invention. Associated with such container(s) can be a notice in the form prescribed by a governmental agency regulating the manufacture, use or sale of pharmaceuticals or biological products, which notice reflects approval by the agency of manufacture, use or sale for human administration. In addition, the Therapeutics may be employed in conjunction with other therapeutic compounds.

[0987] The Therapeutics of the invention may be administered alone or in combination with adjuvants. Adjuvants that may be administered with the Therapeutics of the invention include, but are not limited to, alum, alum plus deoxycholate (ImmunoAg), MTP-PE (Biocine Corp.), QS21 (Genentech, Inc.), BCG (e.g., THERACYS®), MPL and nonviable prepartions of Corynebacterium parvum. In a specific embodiment, Therapeutics of the invention are administered in combination with alum. In another specific embodiment, Therapeutics of the invention are administered in combination with QS-21. Further adjuvants that may be administered with the Therapeutics of the invention include, but are not limited to, Monophosphoryl lipid immunomodulator, AdjuVax 100a, QS-21, QS-18, CRL1005, Aluminum salts, MF-59, and Virosomal adjuvant technology. Vaccines that may be administered with the Therapeutics of the invention include, but are not limited to, vaccines directed toward protection against MMR (measles, mumps, rubella), polio, varicella, tetanus/diptheria, hepatitis A, hepatitis B, haemophilus influenzae B, whooping cough, pneumonia, influenza, Lyme's Disease, rotavirus, cholera, yellow fever, Japanese encephalitis, poliomyelitis, rabies, typhoid fever, and pertussis. Combinations may be administered either concomitantly, e.g., as an admixture, separately but simultaneously or concurrently; or sequentially. This includes presentations in which the combined agents are administered together as a therapeutic mixture, and also procedures in which the combined agents are administered separately but simultaneously, e.g., as through separate intravenous lines into the same individual. Administration “in combination” further includes the separate administration of one of the compounds or agents given first, followed by the second.

[0988] The Therapeutics of the invention may be administered alone or in combination with other therapeutic agents. Therapeutic agents that may be administered in combination with the Therapeutics of the invention, include but not limited to, chemotherapeutic agents, antibiotics, steroidal and non-steroidal anti-inflammatories, conventional immunotherapeutic agents, and/or therapeutic treatments described below. Combinations may be administered either concomitantly, e.g., as an admixture, separately but simultaneously or concurrently; or sequentially. This includes presentations in which the combined agents are administered together as a therapeutic mixture, and also procedures in which the combined agents are administered separately but simultaneously, e.g., as through separate intravenous lines into the same individual. Administration “in combination” further includes the separate administration of one of the compounds or agents given first, followed by the second.

[0989] In certain embodiments, Therapeutics of the invention are administered in combination with antiretroviral agents, nucleoside/nucleotide reverse transcriptase inhibitors (NRTIs), non-nucleoside reverse transcriptase inhibitors (NNRTIs), and/or protease inhibitors (PIs). NRTIs that may be administered in combination with the Therapeutics of the invention, include, but are not limited to, RETROVIR™ (zidovudine/AZT), VIDEX™ (didanosine/ddI), HIVID™ (zalcitabine/ddC), ZERIT™ (stavudine/d4T), EPIVIR™ (lamivudine/3TC), and COMBIVIR™ (zidovudine/lamivudine). NNRTIs that may be administered in combination with the Therapeutics of the invention, include, but are not limited to, VIRAMUNE™ (nevirapine), RESCRIPTOR™ (delavirdine), and SUSTIVA™ (efavirenz). Protease inhibitors that may be administered in combination with the Therapeutics of the invention, include, but are not limited to, CRIXIVAN™ (indinavir), NORVIR™ (ritonavir), INVIRASE™ (saquinavir), and VIRACEPT™ (nelfinavir). In a specific embodiment, antiretroviral agents, nucleoside reverse transcriptase inhibitors, non-nucleoside reverse transcriptase inhibitors, and/or protease inhibitors may be used in any combination with Therapeutics of the invention to treat AIDS and/or to prevent or treat HIV infection.

[0990] Additional NRTIs include LODENOSINE™ (F-ddA; an acid-stable adenosine NRTI; Triangle/Abbott; COVIRACIL™ (emtricitabine/FTC; structurally related to lamivudine (3TC) but with 3- to 10-fold greater activity in vitro; Triangle/Abbott); dOTC (BCH-10652, also structurally related to lamivudine but retains activity against a substantial proportion of lamivudine-resistant isolates; Biochem Pharma); Adefovir (refused approval for anti-HIV therapy by FDA; Gilead Sciences); PREVEON® (Adefovir Dipivoxil, the active prodrug of adefovir; its active form is PMEA-pp); TENOFOVIR™ (bis-POC PMPA, a PMPA prodrug; Gilead); DAPD/DXG (active metabolite of DAPD; Triangle/Abbott); D-D4FC (related to 3TC, with activity against AZT/3TC-resistant virus); GW420867X (Glaxo Wellcome); ZIAGEN™ (abacavir/159U89; Glaxo Wellcome Inc.); CS-87 (3 ′azido-2′,3′-dideoxyuridine; WO 99/66936); and S-acyl-2-thioethyl (SATE)-bearing prodrug forms of β-L-FD4C and β-L-FddC (WO 98/17281).

[0991] Additional NNRTIs include COACTINON™ (Emivirine/MKC-442, potent NNRTI of the HEPT class; Triangle/Abbott); CAPRAVIRINE™ (AG-1549/S-1153, a next generation NNRTI with activity against viruses containing the K103N mutation; Agouron); PNU-142721 (has 20- to 50-fold greater activity than its predecessor delavirdine and is active against K103N mutants; Pharmacia & Upjohn); DPC-961 and DPC-963 (second-generation derivatives of efavirenz, designed to be active against viruses with the K103N mutation; DuPont); GW-420867X (has 25-fold greater activity than HBY097 and is active against K103N mutants; Glaxo Wellcome); CALANOLIDE A (naturally occurring agent from the latex tree; active against viruses containing either or both the Y181C and K103N mutations); and Propolis (WO 99/49830).

[0992] Additional protease inhibitors include LOPINAVIR™ (ABT378/r; Abbott Laboratories); BMS-232632 (an azapeptide; Bristol-Myres Squibb); TIPRANAVIR™ (PNU-140690, a non-peptic dihydropyrone; Pharmacia & Upjohn); PD-178390 (a nonpeptidic dihydropyrone; Parke-Davis); BMS 232632 (an azapeptide; Bristol-Myers Squibb); L-756,423 (an indinavir analog; Merck); DMP-450 (a cyclic urea compound; Avid & DuPont); AG-1776 (a peptidomimetic with in vitro activity against protease inhibitor-resistant viruses; Agouron); VX-175/GW-433908 (phosphate prodrug of amprenavir; Vertex & Glaxo Welcome); CGP61755 (Ciba); and AGENERASE™ (amprenavir; Glaxo Wellcome Inc.).

[0993] Additional antiretroviral agents include fusion inhibitors/gp41 binders. Fusion inhibitors/gp41 binders include T-20 (a peptide from residues 643-678 of the HIV gp41 transmembrane protein ectodomain which binds to gp41 in its resting state and prevents transformation to the fusogenic state; Trimeris) and T-1249 (a second-generation fusion inhibitor; Trimeris).

[0994] Additional antiretroviral agents include fusion inhibitors/chemokine receptor antagonists. Fusion inhibitors/chemokine receptor antagonists include CXCR4 antagonists such as AMD 3100 (a bicyclam), SDF-1 and its analogs, and ALX40-4C (a cationic peptide), T22 (an 18 amino acid peptide; Trimeris) and the T22 analogs T134 and T140; CCR5 antagonists such as RANTES (9-68), AOP-RANTES, NNY-RANTES, and TAK-779; and CCR5/CXCR4 antagonists such as NSC 651016 (a distamycin analog). Also included are CCR2B, CCR3, and CCR6 antagonists. Chemokine recpetor agonists such as RANTES, SDF-1, MIP-1α, MIP-1β, etc., may also inhibit fusion.

[0995] Additional antiretroviral agents include integrase inhibitors. Integrase inhibitors include dicaffeoylquinic (DFQA) acids; L-chicoric acid (a dicaffeoyltartaric (DCTA) acid); quinalizarin (QLC) and related anthraquinones; ZINTEVIR™ (AR 177, an oligonucleotide that probably acts at cell surface rather than being a true integrase inhibitor; Arondex); and naphthols such as those disclosed in WO 98/50347.

[0996] Additional antiretroviral agents include hydroxyurea-like compunds such as BCX-34 (a purine nucleoside phosphorylase inhibitor; Biocryst); ribonucleotide reductase inhibitors such as DIDOX™ (Molecules for Health); inosine monophosphate dehydrogenase (IMPDH) inhibitors sucha as VX-497 (Vertex); and myvopholic acids such as CellCept (mycophenolate mofetil; Roche).

[0997] Additional antiretroviral agents include inhibitors of viral integrase, inhibitors of viral genome nuclear translocation such as arylene bis(methylketone) compounds; inhibitors of HIV entry such as AOP-RANTES, NNY-RANTES, RANTES-IgG fusion protein, soluble complexes of RANTES and glycosaminoglycans (GAG), and AMD-3100; nucleocapsid zinc finger inhibitors such as dithiane compounds; targets of HIV Tat and Rev; and pharmacoenhancers such as ABT-378.

[0998] Other antiretroviral therapies and adjunct therapies include cytokines and lymphokines such as MIP-1α, MIP-1β, SDF-1α, IL-2, PROLEUKIN™ (aldesleukin/L2-7001; Chiron), IL-4, IL-10, IL-12, and IL-13; interferons such as IFN-α2a; antagonists of TNFs, NFKB, GM-CSF, M-CSF, and IL-10; agents that modulate immune activation such as cyclosporin and prednisone; vaccines such as Remune™ (HIV Immunogen), APL 400-003 (Apollon), recombinant gp120 and fragments, bivalent (B/E) recombinant envelope glycoprotein, rgp120CM235, MN rgp120, SF-2 rgp120, gp120/soluble CD4 complex, Delta JR-FL protein, branched synthetic peptide derived from discontinuous gp120 C3/C4 domain, fusion-competent immunogens, and Gag, Pol, Nef, and Tat vaccines; gene-based therapies such as genetic suppressor elements (GSEs; WO 98/54366), and intrakines (genetically modified CC chemokines targetted to the ER to block surface expression of newly synthesized CCR5 (Yang et al., PNAS 94:11567-72 (1997); Chen et al., Nat. Med. 3:1110-16 (1997)); antibodies such as the anti-CXCR4 antibody 12G5, the anti-CCR5 antibodies 2D7, 5C7, PA8, PA9, PA10, PA11, PA12, and PA14, the anti-CD4 antibodies Q4120 and RPA-T4, the anti-CCR3 antibody 7B11, the anti-gp120 antibodies 17b, 48d, 447-52D, 257-D, 268-D and 50.1, anti-Tat antibodies, anti-TNF-α antibodies, and monoclonal antibody 33A; aryl hydrocarbon (AH) receptor agonists and antagonists such as TCDD, 3,3′,4,4′,5-pentachlorobiphenyl, 3,3′,4,4′-tetrachlorobiphenyl, and α-naphthoflavone (WO 98/30213); and antioxidants such as γ-L-glutamyl-L-cysteine ethyl ester (γ-GCE; WO 99/56764).

[0999] In a further embodiment, the Therapeutics of the invention are administered in combination with an antiviral agent. Antiviral agents that may be administered with the Therapeutics of the invention include, but are not limited to, acyclovir, ribavirin, amantadine, and remantidine.

[1000] In other embodiments, Therapeutics of the invention may be administered in combination with anti-opportunistic infection agents. Anti-opportunistic agents that may be administered in combination with the Therapeutics of the invention, include, but are not limited to, TRIMETHOPRIM-SULFAMETHOXAZOLE™, DAPSONE™, PENTAMIDINE™, ATOVAQUONE™, ISONJAZID™, RIFAMPIN™, PYRAZINAMIDE™, ETHAMBUTOL™, RIFABUTIN™, CLARITHROMYCIN™, AZITHROMYCIN™, GANCICLOVIR™, FOSCARNET™, CIDOFOVIR™, FLUCONAZOLE™, ITRACONAZOLE™, KETOCONAZOLE™, ACYCLOVIR™, FAMCICOLVIR™, PYRIMETHAMINE™, LEUCOVORIN™, NEUPOGEN™ (filgrastim/G-CSF), and LEUKINE™ (sargramostim/GM-CSF). In a specific embodiment, Therapeutics of the invention are used in any combination with TRIMETHOPRIM-SULFAMETHOXAZOLE™, DAPSONE™, PENTAMIDINE™, and/or ATOVAQUONE™ to prophylactically treat or prevent an opportunistic Pneumocystis carinii pneumonia infection. In another specific embodiment, Therapeutics of the invention are used in any combination with ISONIAZID™, RIFAMPIN™, PYRAZINAMIDE™, and/or ETHAMBUTOL™ to prophylactically treat or prevent an opportunistic Mycobacterium avium complex infection. In another specific embodiment, Therapeutics of the invention are used in any combination with RFABUTIN™, CLARITHROMYCIN™, and/or AZITHROMYCIN™ to prophylactically treat or prevent an opportunistic Mycobacterium tuberculosis infection. In another specific embodiment, Therapeutics of the invention are used in any combination with GANCICLOVIR™, FOSCARNET™, and/or CIDOFOVIR™ to prophylactically treat or prevent an opportunistic cytomegalovirus infection. In another specific embodiment, Therapeutics of the invention are used in any combination with FLUCONAZOLE™, ITRACONAZOLE™, and/or KETOCONAZOLE™ to prophylactically treat or prevent an opportunistic fungal infection. In another specific embodiment, Therapeutics of the invention are used in any combination with ACYCLOVIR™ and/or FAMCICOLVR™ to prophylactically treat or prevent an opportunistic herpes simplex virus type I and/or type II infection. In another specific embodiment, Therapeutics of the invention are used in any combination with PYRIMETHAMINE™ and/or LEUCOVORIN™ to prophylactically treat or prevent an opportunistic Toxoplasma gondii infection. In another specific embodiment, Therapeutics of the invention are used in any combination with LEUCOVORIM™ and/or NEUPOGEN™ to prophylactically treat or prevent an opportunistic bacterial infection.

[1001] In a further embodiment, the Therapeutics of the invention are administered in combination with an antibiotic agent. Antibiotic agents that may be administered with the Therapeutics of the invention include, but are not limited to, amoxicillin, beta-lactamases, aminoglycosides, beta-lactam (glycopeptide), beta-lactamases, Clindamycin, chloramphenicol, cephalosporins, ciprofloxacin, ciprofloxacin, erythromycin, fluoroquinolones, macrolides, metronidazole, penicillins, quinolones, rapamycin, rifampin, streptomycin, sulfonamide, tetracyclines, trimethoprim, trimethoprim-sulfamthoxazole, and vancomycin.

[1002] In other embodiments, Therapeutics of the invention are administered in combination with immunosuppressive agents. Immunosuppressive agents that may be administered in combination with the Therapeutics of the invention include, but are not limited to, steroids, cyclosporine, cyclosporine analogs, cyclophosphamide methylprednisone, prednisone, azathioprine, FK-506, 15-deoxyspergualin, and other immunosuppressive agents that act by suppressing the function of responding T cells. Other immunosuppressive agents that may be administered in combination with the Therapeutics of the invention include, but are not limited to, prednisolone, methotrexate, thalidomide, methoxsalen, rapamycin, leflunomide, mizoribine (BREDIN™), brequinar, deoxyspergualin, and azaspirane (SKF 105685), ORTHOCLONE OKT® 3 (muromonab-CD3), SANDIMMUNE™, NEORAL™, SANGDYA™, (cyclosporine), PROGRAF® (FK506, tacrolimus), CELLCEPT® (mycophenolate motefil, of which the active metabolite is mycophenolic acid), IMURAN™ (azathioprine), glucocorticosteroids, adrenocortical steroids such as DELTASONE™ (prednisone) and HYDELTRASOL™ (prednisolone), FOLEX™ and MEXATE™ (methotrxate), OXSORALEN-ULTRA™ (methoxsalen) and RAPAMUNE™ (sirolimus). In a specific embodiment, immunosuppressants may be used to prevent rejection of organ or bone marrow transplantation.

[1003] In an additional embodiment, Therapeutics of the invention are administered alone or in combination with one or more intravenous immune globulin preparations. Intravenous immune globulin preparations that may be administered with the Therapeutics of the invention include, but not limited to, GAMMAR™, IVEEGAM™, SANDOGLOBULIN™, GAMMAGARD S/D™, ATGAM™ (antithymocyte glubulin), and GAMIMUNE™. In a specific embodiment, Therapeutics of the invention are administered in combination with intravenous immune globulin preparations in transplantation therapy (e.g., bone marrow transplant).

[1004] In certain embodiments, the Therapeutics of the invention are administered alone or in combination with an anti-inflammatory agent. Anti-inflammatory agents that may be administered with the Therapeutics of the invention include, but are not limited to, corticosteroids (e.g. betamethasone, budesonide, cortisone, dexamethasone, hydrocortisone, methylprednisolone, prednisolone, prednisone, and triamcinolone), nonsteroidal anti-inflammatory drugs (e.g., diclofenac, diflunisal, etodolac, fenoprofen, floctafenine, flurbiprofen, ibuprofen, indomethacin, ketoprofen, meclofenamate, mefenamic acid, meloxicam, nabumetone, naproxen, oxaprozin, phenylbutazone, piroxicam, sulindac, tenoxicam, tiaprofenic acid, and tolmetin.), as well as antihistamines, aminoarylcarboxylic acid derivatives, arylacetic acid derivatives, arylbutyric acid derivatives, arylcarboxylic acids, arylpropionic acid derivatives, pyrazoles, pyrazolones, salicylic acid derivatives, thiazinecarboxamides, e-acetamidocaproic acid, S-adenosylmethionine, 3-amino-4-hydroxybutyric acid, amixetrine, bendazac, benzydamine, bucolome, difenpiramide, ditazol, emorfazone, guaiazulene, nabumetone, nimesulide, orgotein, oxaceprol, paranyline, perisoxal, pifoxime, proquazone, proxazole, and tenidap.

[1005] In an additional embodiment, the compositions of the invention are administered alone or in combination with an anti-angiogenic agent. Anti-angiogenic agents that may be administered with the compositions of the invention include, but are not limited to, Angiostatin (Entremed, Rockville, Md.), Troponin-1 (Boston Life Sciences, Boston, Mass.), anti-Invasive Factor, retinoic acid and derivatives thereof, paclitaxel (Taxol), Suramin, Tissue Inhibitor of Metalloproteinase-1, Tissue Inhibitor of Metalloproteinase-2, VEGI, Plasminogen Activator Inhibitor-1, Plasminogen Activator Inhibitor-2, and various forms of the lighter “d group” transition metals.

[1006] Lighter “d group” transition metals include, for example, vanadium, molybdenum, tungsten, titanium, niobium, and tantalum species. Such transition metal species may form transition metal complexes. Suitable complexes of the above-mentioned transition metal species include oxo transition metal complexes.

[1007] Representative examples of vanadium complexes include oxo vanadium complexes such as vanadate and vanadyl complexes. Suitable vanadate complexes include metavanadate and orthovanadate complexes such as, for example, ammonium metavanadate, sodium metavanadate, and sodium orthovanadate. Suitable vanadyl complexes include, for example, vanadyl acetylacetonate and vanadyl sulfate including vanadyl sulfate hydrates such as vanadyl sulfate mono- and trihydrates.

[1008] Representative examples of tungsten and molybdenum complexes also include oxo complexes. Suitable oxo tungsten complexes include tungstate and tungsten oxide complexes. Suitable tungstate complexes include ammonium tungstate, calcium tungstate, sodium tungstate dihydrate, and tungstic acid. Suitable tungsten oxides include tungsten (IV) oxide and tungsten (VI) oxide. Suitable oxo molybdenum complexes include molybdate, molybdenum oxide, and molybdenyl complexes. Suitable molybdate complexes include ammonium molybdate and its hydrates, sodium molybdate and its hydrates, and potassium molybdate and its hydrates. Suitable molybdenum oxides include molybdenum (VI) oxide, molybdenum (VI) oxide, and molybdic acid. Suitable molybdenyl complexes include, for example, molybdenyl acetylacetonate. Other suitable tungsten and molybdenum complexes include hydroxo derivatives derived from, for example, glycerol, tartaric acid, and sugars.

[1009] A wide variety of other anti-angiogenic factors may also be utilized within the context of the present invention. Representative examples include, but are not limited to, platelet factor 4; protamine sulphate; sulphated chitin derivatives (prepared from queen crab shells), (Murata et al., Cancer Res. 51:22-26, (1991)); Sulphated Polysaccharide Peptidoglycan Complex (SP-PG) (the function of this compound may be enhanced by the presence of steroids such as estrogen, and tamoxifen citrate); Staurosporine; modulators of matrix metabolism, including for example, proline analogs, cishydroxyproline, d,L-3,4-dehydroproline, Thiaproline, alpha,alpha-dipyridyl, aminopropionitrile fumarate; 4-propyl-5-(4-pyridinyl)-2 (3H)-oxazolone; Methotrexate; Mitoxantrone; Heparin; Interferons; 2 Macroglobulin-serum; ChIMP-3 (Pavloff et al., J. Bio. Chem. 267:17321-17326, (1992)); Chymostatin (Tomkinson et al., Biochem J. 286:475-480, (1992)); Cyclodextrin Tetradecasulfate; Eponemycin; Camptothecin; Fumagillin (Ingber et al., Nature 348:555-557, (1990)); Gold Sodium Thiomalate (“GST”; Matsubara and Ziff, J. Clin. Invest. 79:1440-1446, (1987)); anticollagenase-serum; alpha2-antiplasmin (Holmes et al., J. Biol. Chem. 262(4):1659-1664, (1987)); Bisantrene (National Cancer Institute); Lobenzarit disodium (N-(2)-carboxyphenyl-4-chloroanthronilic acid disodium or “CCA”; (Takeuchi et al., Agents Actions 36:312-316, (1992)); and metalloproteinase inhibitors such as BB94.

[1010] Additional anti-angiogenic factors that may also be utilized within the context of the present invention include Thalidomide, (Celgene, Warren, N.J.); Angiostatic steroid; AGM-1470 (H. Brem and J. Folkman J Pediatr. Surg. 28:445-51 (1993)); an integrin alpha v beta 3 antagonist (C. Storgard et al., J. Clin. Invest. 103:47-54 (1999)); carboxynaminolmidazole; Carboxyamidotriazole (CAI) (National Cancer Institute, Bethesda, Md.); Conbretastatin A-4 (CA4P) (OXiGENE, Boston, Mass.); Squalamine (Magainin Pharmaceuticals, Plymouth Meeting, Pa.); TNP-470, (Tap Pharmaceuticals, Deerfield, Ill.); ZD-0101 AstraZeneca (London, UK); APRA (CT2584); Benefin, Byrostatin-1 (SC339555); CGP-41251 (PKC 412); CM11; Dexrazoxane (ICRF187); DMXAA; Endostatin; Flavopridiol; Genestein; GTE; ImmTher; Iressa (ZD1839); Octreotide (Somatostatin); Panretin; Penacillamine; Photopoint; PI-88; Prinomastat (AG-3340) Purlytin; Suradista (FCE26644); Tamoxifen (Nolvadex); Tazarotene; Tetrathiomolybdate; Xeloda (Capecitabine); and 5-Fluorouracil.

[1011] Anti-angiogenic agents that may be administed in combination with the compounds of the invention may work through a variety of mechanisms including, but not limited to, inhibiting proteolysis of the extracellular matrix, blocking the function of endothelial cell-extracellular matrix adhesion molecules, by antagonizing the function of angiogenesis inducers such as growth factors, and inhibiting integrin receptors expressed on proliferating endothelial cells. Examples of anti-angiogenic inhibitors that interfere with extracellular matrix proteolysis and which may be administered in combination with the compositons of the invention include, but are not limited to, AG-3340 (Agouron, La Jolla, Calif.), BAY-12-9566 (Bayer, West Haven, Conn.), BMS-275291 (Bristol Myers Squibb, Princeton, N.J.), CGS-27032A (Novartis, East Hanover, N.J.), Marimastat (British Biotech, Oxford, UK), and Metastat (Aeterna, St-Foy, Quebec). Examples of anti-angiogenic inhibitors that act by blocking the function of endothelial cell-extracellular matrix adhesion molecules and which may be administered in combination with the compositons of the invention include, but are not limited to, EMD-121974 (Merck KcgaA Darmstadt, Germany) and Vitaxin (Ixsys, La Jolla, Calif./Medimmune, Gaithersburg, Md.). Examples of anti-angiogenic agents that act by directly antagonizing or inhibiting angiogenesis inducers and which may be administered in combination with the compositons of the invention include, but are not limited to, Angiozyme (Ribozyme, Boulder, Colo.), Anti-VEGF antibody (Genentech, S. San Francisco, Calif.), PTK-787/ZK-225846 (Novartis, Basel, Switzerland), SU-101 (Sugen, S. San Francisco, Calif.), SU-5416 (Sugen/ Pharmacia Upjohn, Bridgewater, N.J.), and SU-6668 (Sugen). Other anti-angiogenic agents act to indirectly inhibit angiogenesis. Examples of indirect inhibitors of angiogenesis which may be administered in combination with the compositons of the invention include, but are not limited to, IM-862 (Cytran, Kirkland, Wash.), Interferon-alpha, IL-12 (Roche, Nutley, N.J.), and Pentosan polysulfate (Georgetown University, Washington, D.C.).

[1012] In particular embodiments, the use of compositions of the invention in combination with anti-angiogenic agents is contemplated for the treatment, prevention, and/or amelioration of an autoimmune disease, such as for example, an autoimmune disease described herein.

[1013] In a particular embodiment, the use of compositions of the invention in combination with anti-angiogenic agents is contemplated for the treatment, prevention, and/or amelioration of arthritis. In a more particular embodiment, the use of compositions of the invention in combination with anti-angiogenic agents is contemplated for the treatment, prevention, and/or amelioration of rheumatoid arthritis.

[1014] In another embodiment, the polynucleotides encoding a polypeptide of the present invention are administered in combination with an angiogenic protein, or polynucleotides encoding an angiogenic protein. Examples of angiogenic proteins that may be administered with the compositions of the invention include, but are not limited to, acidic and basic fibroblast growth factors, VEGF-1, VEGF-2, VEGF-3, epidermal growth factor alpha and beta, platelet-derived endothelial cell growth factor, platelet-derived growth factor, tumor necrosis factor alpha, hepatocyte growth factor, insulin-like growth-factor, colony stimulating factor, macrophage colony stimulating factor, granulocyte/macrophage colony stimulating factor, and nitric oxide synthase.

[1015] In additional embodiments, compostions of the invention are administered in combination with a chemotherapeutic agent. Chemotherapeutic agents that may be administered with the Therapeutics of the invention include, but are not limited to alkylating agents such as nitrogen mustards (for example, Mechlorethamine, cyclophosphamide, Cyclophosphamide Ifosfamide, Melphalan (L-sarcolysin), and Chlorambucil), ethylenimines and methylmelamines (for example, Hexamethylmelamine and Thiotepa), alkyl sulfonates (for example, Busulfan), nitrosoureas (for example, Carmustine (BCNU), Lomustine (CCNU), Semustine (methyl-CCNU), and Streptozocin (streptozotocin)), triazenes (for example, Dacarbazine (DTIC; dimethyltriazenoimidazolecarboxamide)), folic acid analogs (for example, Methotrexate (amethopterin)), pyrimidine analogs (for example, Fluorouacil (5-fluorouracil; 5-FU), Floxuridine (fluorodeoxyuridine; FudR), and Cytarabine (cytosine arabinoside)), purine analogs and related inhibitors (for example, Mercaptopurine (6-mercaptopurine; 6-MP), Thioguanine (6-thioguanine; TG), and Pentostatin (2′-deoxycoformycin)), vinca alkaloids (for example, Vinblastine (VLB, vinblastine sulfate) and Vincristine (vincristine sulfate)), epipodophyllotoxins (for example, Etoposide and Teniposide), antibiotics (for example, Dactinomycin (actinomycin D), Daunorubicin (daunomycin; rubidomycin), Doxorubicin, Bleomycin, Plicamycin (mithramycin), and Mitomycin (mitomycin C), enzymes (for example, L-Asparaginase), biological response modifiers (for example, Interferon-alpha and interferon-alpha-2b), platinum coordination compounds (for example, Cisplatin (cis-DDP) and Carboplatin), anthracenedione (Mitoxantrone), substituted ureas (for example, Hydroxyurea), methylhydrazine derivatives (for example, Procarbazine (N-methylhydrazine; M1H), adrenocorticosteroids (for example, Prednisone), progestins (for example, Hydroxyprogesterone caproate, Medroxyprogesterone, Medroxyprogesterone acetate, and Megestrol acetate), estrogens (for example, Diethylstilbestrol (DES), Diethylstilbestrol diphosphate, Estradiol, and Ethinyl estradiol), antiestrogens (for example, Tamoxifen), androgens (Testosterone proprionate, and Fluoxymesterone), antiandrogens (for example, Flutamide), gonadotropin-releasing horomone analogs (for example, Leuprolide), other hormones and hormone analogs (for example, methyltestosterone, estramustine, estramustine phosphate sodium, chlorotrianisene, and testolactone), and others (for example, dicarbazine, glutamic acid, and mitotane).

[1016] In one embodiment, the compositions of the invention are administered in combination with one or more of the following drugs: infliximab (also known as Remicade™ Centocor, Inc.), Trocade (Roche, RO-32-3555), Leflunomide (also known as Arava™ from Hoechst Marion Roussel), Kineret™ (an IL-1 Receptor antagonist also known as Anakinra from Amgen, Inc.).

[1017] In a specific embodiment, compositions of the invention are administered in combination with CHOP (cyclophosphamide, doxorubicin, vincristine, and prednisone) or combination of one or more of the components of CHOP. In one embodiment, the compositions of the invention are administered in combination with anti-CD20 antibodies, human monoclonal anti-CD20 antibodies. In another embodiment, the compositions of the invention are administered in combination with anti-CD20 antibodies and CHOP, or anti-CD20 antibodies and any combination of one or more of the components of CHOP, particularly cyclophosphamide and/or prednisone. In a specific embodiment, compositions of the invention are administered in combination with Rituximab. In a further embodiment, compositions of the invention are administered with Rituximab and CHOP, or Rituximab and any combination of one or more of the components of CHOP, particularly cyclophosphamide and/or prednisone. In a specific embodiment, compositions of the invention are administered in combination with tositumomab. In a further embodiment, compositions of the invention are administered with tositumomab and CHOP, or tositumomab and any combination of one or more of the components of CHOP, particularly cyclophosphamide and/or prednisone. The anti-CD20 antibodies may optionally be associated with radioisotopes, toxins or cytotoxic prodrugs.

[1018] In another specific embodiment, the compositions of the invention are administered in combination Zevalin™. In a further embodiment, compositions of the invention are administered with Zevalin™ and CHOP, or Zevalin™ and any combination of one or more of the components of CHOP, particularly cyclophosphamide and/or prednisone. Zevalin™ may be associated with one or more radisotopes. Particularly preferred isotopes are ⁹⁰Y and ¹¹¹In.

[1019] In an additional embodiment, the Therapeutics of the invention are administered in combination with cytokines. Cytokines that may be administered with the Therapeutics of the invention include, but are not limited to, IL2, IL3, IL4, IL5, IL6, IL7, IL10, IL12, IL13, IL15, anti-CD40, CD40L, IFN-gamma and TNF-alpha. In another embodiment, Therapeutics of the invention may be administered with any interleukin, including, but not limited to, IL-1alpha, IL-1beta, IL-2, IL-3, IL-4, IL-5, IL-6, IL-7, IL-8, IL-9, IL-10, IL-11, IL-12, IL-13, IL-14, IL-15, IL-16, IL-17, IL-18, IL-19, IL-20, and IL-21.

[1020] In one embodiment, the Therapeutics of the invention are administered in combination with members of the TNF family. TNF, TNF-related or TNF-like molecules that may be administered with the Therapeutics of the invention include, but are not limited to, soluble forms of TNF-alpha, lymphotoxin-alpha (LT-alpha, also known as TNF-beta), LT-beta (found in complex heterotrimer LT-alpha2-beta), OPGL, FasL, CD27L, CD30L, CD40L, 4-1BBL, DcR3, OX40L, TNF-gamma (International Publication No. WO 96/14328), AIM-I (International Publication No. WO 97/33899), endokine-alpha (International Publication No. WO 98/07880), OPG, and neutrokine-alpha (International Publication No. WO 98/18921, OX40, and nerve growth factor (NGF), and soluble forms of Fas, CD30, CD27, CD40 and 4-IBB, TR2 (International Publication No. WO 96/34095), DR3 (International Publication No. WO 97/33904), DR4 (International Publication No. WO 98/32856), TR5 (International Publication No. WO 98/30693), TRANK, TR9 (International Publication No. WO 98/56892),TR10 (International Publication No. WO 98/54202), 312C2 (International Publication No. WO 98/06842), and TR12, and soluble forms CD154, CD70, and CD153.

[1021] In an additional embodiment, the Therapeutics of the invention are administered in combination with angiogenic proteins. Angiogenic proteins that may be administered with the Therapeutics of the invention include, but are not limited to, Glioma Derived Growth Factor (GDGF), as disclosed in European Patent Number EP-399816; Platelet Derived Growth Factor-A (PDGF-A), as disclosed in European Patent Number EP-682110; Platelet Derived Growth Factor-B (PDGF-B), as disclosed in European Patent Number EP-282317; Placental Growth Factor (PlGF), as disclosed in International Publication Number WO 92/06194; Placental Growth Factor-2 (PlGF-2), as disclosed in Hauser et al., Growth Factors, 4:259-268 (1993); Vascular Endothelial Growth Factor (VEGF), as disclosed in International Publication Number WO 90/13649; Vascular Endothelial Growth Factor-A (VEGF-A), as disclosed in European Patent Number EP-506477; Vascular Endothelial Growth Factor-2 (VEGF-2), as disclosed in International Publication Number WO 96/39515; Vascular Endothelial Growth Factor B (VEGF-3); Vascular Endothelial Growth Factor B-186 (VEGF-B186), as disclosed in International Publication Number WO 96/26736; Vascular Endothelial Growth Factor-D (VEGF-D), as disclosed in International Publication Number WO 98/02543; Vascular Endothelial Growth Factor-D (VEGF-D), as disclosed in International Publication Number WO 98/07832; and Vascular Endothelial Growth Factor-E (VEGF-E), as disclosed in German Patent Number DE19639601. The above mentioned references are herein incorporated by reference in their entireties.

[1022] In an additional embodiment, the Therapeutics of the invention are administered in combination with Fibroblast Growth Factors. Fibroblast Growth Factors that may be administered with the Therapeutics of the invention include, but are not limited to, FGF-1, FGF-2, FGF-3, FGF-4, FGF-5, FGF-6, FGF-7, FGF-8, FGF-9, FGF-10, FGF-1 1, FGF-12, FGF-13, FGF-14, and FGF-15.

[1023] In an additional embodiment, the Therapeutics of the invention are administered in combination with hematopoietic growth factors. Hematopoietic growth factors that may be administered with the Therapeutics of the invention include, but are not limited to, granulocyte macrophage colony stimulating factor (GM-CSF) (sargramostim, LEUKINE™, PROKINE™), granulocyte colony stimulating factor (G-CSF) (filgrastim, NEUPOGEN™), macrophage colony stimulating factor (M-CSF, CSF-1) erythropoietin (epoetin alfa, EPOGEN™, PROCRIT™), stem cell factor (SCF, c-kit ligand, steel factor), megakaryocyte colony stimulating factor, PIXY321 (a GMCSF/IL-3 fusion protein), interleukins, especially any one or more of IL-1 through IL-12, interferon-gamma, or thrombopoietin.

[1024] In certain embodiments, Therapeutics of the present invention are administered in combination with adrenergic blockers, such as, for example, acebutolol, atenolol, betaxolol, bisoprolol, carteolol, labetalol, metoprolol, nadolol, oxprenolol, penbutolol, pindolol, propranolol, sotalol, and timolol.

[1025] In another embodiment, the Therapeutics of the invention are administered in combination with an antiarrhythmic drug (e.g., adenosine, amidoarone, bretylium, digitalis, digoxin, digitoxin, diliazem, disopyramide, esmolol, flecainide, lidocaine, mexiletine, moricizine, phenytoin, procainamide, N-acetyl procainamide, propafenone, propranolol, quinidine, sotalol, tocainide, and verapamil).

[1026] In another embodiment, the Therapeutics of the invention are administered in combination with diuretic agents, such as carbonic anhydrase-inhibiting agents (e.g., acetazolamide, dichlorphenamide, and methazolamide), osmotic diuretics (e.g., glycerin, isosorbide, mannitol, and urea), diuretics that inhibit Na⁺-K⁺-2Cl⁻ symport (e.g., furosemide, bumetamide, azosemide, piretamide, tripamide, ethacrynic acid, muzolimine, and torsemide), thiazide and thiazide-like diuretics (e.g., bendroflumethiazide, benzthiazide, chlorothiazide, hydrochlorothiazide, hydroflumethiazide, methyclothiazide, polythiazide, trichormethiazide, chlorthalidone, indapamide, metolazone, and quinethazone), potassium sparing diuretics (e.g., amiloride and triamterene), and mineralcorticoid receptor antagonists (e.g., spironolactone, canrenone, and potassium canrenoate).

[1027] In one embodiment, the Therapeutics of the invention are administered in combination with treatments for endocrine and/or hormone imbalance disorders. Treatments for endocrine and/or hormone imbalance disorders include, but are not limited to, ¹²⁷I, radioactive isotopes of iodine such as ¹³¹I and ¹²³I; recombinant growth hormone, such as HUMATROPE™ (recombinant somatropin); growth hormone analogs such as PROTROPIN™ (somatrem); dopamine agonists such as PARLODEL™ (bromocriptine); somatostatin analogs such as SANDOSTATIN™ (octreotide); gonadotropin preparations such as PREGNYL™, A.P.L.™ and PROFASI™ (chorionic gonadotropin (CG)), PERGONAL™ (menotropins), and METRODN™ (urofollitropin (uFSH)); synthetic human gonadotropin releasing hormone preparations such as FACTREL™ and LUTREPULSE™ (gonadorelin hydrochloride); synthetic gonadotropin agonists such as LUPRON™ (leuprolide acetate), SUPPRELIN™ (histrelin acetate), SYNAREL™ (nafarelin acetate), and ZOLADEX™ (goserelin acetate); synthetic preparations of thyrotropin-releasing hormone such as RELEFACT TRH™ and THYPINONE™ (protirelin); recombinant human TSH such as THYROGEN™; synthetic preparations of the sodium salts of the natural isomers of thyroid hormones such as L-T₄™, SYNTHROID™ and LEVOTHROID™ (levothyroxine sodium), L-T₃™, CYTOMEL™ and TRIOSTAT™ (liothyroine sodium), and THYROLAR™ (liotrix); antithyroid compounds such as 6-n-propylthiouracil (propylthiouracil), 1-methyl-2-mercaptoimidazole and TAPAZOLE™ (methimazole), NEO-MERCAZOLE™ (carbimazole); beta-adrenergic receptor antagonists such as propranolol and esmolol; Ca²⁺ channel blockers; dexamethasone and iodinated radiological contrast agents such as TELEPAQUE™ (iopanoic acid) and ORAGRAFIN™ (sodium ipodate); estrogens or congugated estrogens such as ESTRACE™ (estradiol), ESTINYL™ (ethinyl estradiol), PREMARIN™, ESTRATAB™, ORTHO-EST™, OGEN™ and estropipate (estrone), ESTROVIS™ (quinestrol), ESTRADERM™ (estradiol), DELESTROGEN™ and VALERGEN™ (estradiol valerate), DEPO-ESTRADIOL CYPIONATE™ and ESTROJECT LA™ (estradiol cypionate); antiestrogens such as NOLVADEX™ (tamoxifen), SEROPHENE™ and CLOMID™ (clomiphene); progestins such as DURALUTIN™ (hydroxyprogesterone caproate), MPA™ and DEPO-PROVERA™ (medroxyprogesterone acetate), PROVERA™ and CYCRIN™ (MPA), MEGACE™ (megestrol acetate), NORLUTIN™ (norethindrone), and NORLUTATE™ and AYGESTIN™ (norethindrone acetate); progesterone implants such as NORPLANT SYSTEM™ (subdermal implants of norgestrel); antiprogestins such as RU 486™ (mifepristone); hormonal contraceptives such as ENOVID™ (norethynodrel plus mestranol), PROGESTASERT™ (intrauterine device that releases progesterone), LOESTRIN™, BREVICON™, MODICON™, GENORA™, NELONA™, NORINYL™, OVACON-35™ and OVACON-50™ (ethinyl estradiol/norethindrone), LEVLEN™, NORDETTE™, TRI-LEVLEN™ and TRIPHASIL-21™ (ethinyl estradiol/levonorgestrel) LO/OVRAL™ and OVRAL™ (ethinyl estradiol/norgestrel), DEMULEN™ (ethinyl estradiol/ethynodiol diacetate), NORINYL™, ORTHO-NOVUM™, NORETHIN™, GENORA™, and NELOVA™ (norethindrone/mestranol), DESOGEN™ and ORTHO-CEPT™ (ethinyl estradiol/desogestrel), ORTlHO-CYCLEN™ and ORTHO-TRICYCLEN™ (ethinyl estradiol/norgestimate), MICRONOR™ and NOR-QD™ (norethindrone), and OVRETTE™ (norgestrel); testosterone esters such as methenolone acetate and testosterone undecanoate; parenteral and oral androgens such as TESTOJECT-50™ (testosterone), TESTEX™ (testosterone propionate), DELATESTRYL™ (testosterone enanthate), DEPO-TESTOSTERONE™ (testosterone cypionate), DANOCRINE™ (danazol), HALOTESTIN™ (fluoxymesterone), ORETON METHYL™, TESTRED™ and VIRILON™ (methyltestosterone), and OXANDRN™ (oxandrolone); testosterone transdermal systems such as TESTODERM™; androgen receptor antagonist and 5-alpha-reductase inhibitors such as ANDROCUR™ (cyproterone acetate), EULEXIN™ (flutamide), and PROSCAR™ (finasteride); adrenocorticotropic hormone preparations such as CORTROSYN™ (cosyntropin); adrenocortical steroids and their synthetic analogs such as ACLOVATE™ (alclometasone dipropionate), CYCLOCORT™ (amcinonide), BECLOVENT™ and VANCERIL™ (beclomethasone dipropionate), CELESTONE™ (betamethasone), BENISONE™ and UTICORT™ (betamethasone benzoate), DIPROSONE™ (betamethasone dipropionate), CELESTONE PHOSPHATE™ (betamethasone sodium phosphate), CELESTONE SOLUSPAN™ (betamethasone sodium phosphate and acetate), BETA-VAL™ and VALISONE™ (betamethasone valerate), TEMOVATE™ (clobetasol propionate), CLODERM™ (clocortolone pivalate), CORTEF™ and HYDROCORTONE™ (cortisol (hydrocortisone)), HYDROCORTONE ACETATE™ (cortisol (hydrocortisone) acetate), LOCOID™ (cortisol (hydrocortisone) butyrate), HYDROCORTONE PHOSPHATE™ (cortisol (hydrocortisone) sodium phosphate), A-HYDROCORT™ and SOLU CORTEF™ (cortisol (hydrocortisone) sodium succinate), WESTCORT™ (cortisol (hydrocortisone) valerate), CORTISONE ACETATE™ (cortisone acetate), DESOWEN™ and TRIDESILON™ (desonide), TOPICORT™ (desoximetasone), DECADRON™ (dexamethasone), DECADRON LA™ (dexamethasone acetate), DECADRON PHOSPHATE™ and HEXADROL PHOSPHATE™ (dexamethasone sodium phosphate), FLORONE™ and MAXIFLOR™ (diflorasone diacetate), FLORINEF ACETATE™ (fludrocortisone acetate), AEROBID™ and NASALIDE™ (flunisolide), FLUONID™ and SYNALAR™ (fluocinolone acetonide), LIDEX™ (fluocinonide), FLUOR-OP™ and FML™ (fluorometholone), CORDRAN™ (flurandrenolide), HALOG™ (halcinonide), HMS LIZUIFILM™ (medrysone), MEDROL™ (methylprednisolone), DEPO-MEDROL™ and MEDROL ACETATE™ (methylprednisone acetate), A-METHAPRED™ and SOLUMEDROL™ (methylprednisolone sodium succinate), ELOCON™ (mometasone furoate), HALDRONE™ (paramethasone acetate), DELTA-CORTEF™ (prednisolone), ECONOPRED™ (prednisolone acetate), HYDELTRASOL™ (prednisolone sodium phosphate), HYDELTRA-T.B.A™ (prednisolone tebutate), DELTASONE™ (prednisone), ARISTOCORT™ and KENACORT™ (triamcinolone), KENALOG™ (triamcinolone acetonide), ARISTOCORT™ and KENACORT DIACETATE™ (triamcinolone diacetate), and ARISTOSPAN™ (triamcinolone hexacetonide); inhibitors of biosynthesis and action of adrenocortical steroids such as CYTADREN™ (aminoglutethimide), NIZORAL™ (ketoconazole), MODRASTANE™ (trilostane), and METOPIRONE™ (metyrapone); bovine, porcine or human insulin or mixtures thereof; insulin analogs; recombinant human insulin such as HUMULIN™ and NOVOLIN™; oral hypoglycemic agents such as ORAMIDE™ and ORINASE™ (tolbutamide), DLABINESE™ (chlorpropamide), TOLAMIDE™ and TOLINASE™ (tolazamide), DYMELOR™ (acetohexamide), glibenclamide, MICRONASE™, DIBETA™ and GLYNASE™ (glyburide), GLUCOTROL™ (glipizide), and DLAMICRON™ (gliclazide), GLUCOPHAGE™ (metformin), ciglitazone, pioglitazone, and alpha-glucosidase inhibitors; bovine or porcine glucagon; somatostatins such as SANDOSTATIN™ (octreotide); and diazoxides such as PROGLYCEM™ (diazoxide).

[1028] In one embodiment, the Therapeutics of the invention are administered in combination with treatments for uterine motility disorders. Treatments for uterine motility disorders include, but are not limited to, estrogen drugs such as conjugated estrogens (e.g., PREMARIN® and ESTRATAB®), estradiols (e.g., CLIMARA® and ALORA®), estropipate, and chlorotrianisene; progestin drugs (e.g., AMEN® (medroxyprogesterone), MICRONOR® (norethidrone acetate), PROMETRIUM® progesterone, and megestrol acetate); and estrogen/progesterone combination therapies such as, for example, conjugated estrogens/medroxyprogesterone (e.g., PREMPRO™ and PREMPHASE®) and norethindrone acetate/ethinyl estsradiol (e.g., FEMHRT™).

[1029] In an additional embodiment, the Therapeutics of the invention are administered in combination with drugs effective in treating iron deficiency and hypochromic anemias, including but not limited to, ferrous sulfate (iron sulfate, FEOSOL™), ferrous fumarate (e.g., FEOSTAT™), ferrous gluconate (e.g., FERGON™), polysaccharide-iron complex (e.g., NIFEREX™), iron dextran injection (e.g., INFED™), cupric sulfate, pyroxidine, riboflavin, Vitamin B12, cyancobalamin injection (e.g., REDISOL™, RUBRAMIN PC™), hydroxocobalamin, folic acid (e.g., FOLVITE™), leucovorin (folinic acid, 5-CHOH4PteGlu, citrovorum factor) or WELLCOVORIN (Calcium salt of leucovorin), transferrin or ferritin.

[1030] In certain embodiments, the Therapeutics of the invention are administered in combination with agents used to treat psychiatric disorders. Psychiatric drugs that may be administered with the Therapeutics of the invention include, but are not limited to, antipsychotic agents (e.g., chlorpromazine, chlorprothixene, clozapine, fluphenazine, haloperidol, loxapine, mesoridazine, molindone, olanzapine, perphenazine, pimozide, quetiapine, risperidone, thioridazine, thiothixene, trifluoperazine, and triflupromazine), antimanic agents (e.g., carbamazepine, divalproex sodium, lithium carbonate, and lithium citrate), antidepressants (e.g., amitriptyline, amoxapine, bupropion, citalopram, clomipramine, desipramine, doxepin, fluvoxamine, fluoxetine, imipramine, isocarboxazid, maprotiline, mirtazapine, nefazodone, nortriptyline, paroxetine, phenelzine, protriptyline, sertraline, tranylcypromine, trazodone, trimipramine, and venlafaxine), antianxiety agents (e.g., alprazolam, buspirone, chlordiazepoxide, clorazepate, diazepam, halazepam, lorazepam, oxazepam, and prazepam), and stimulants (e.g., d-amphetamine, methylphenidate, and pemoline).

[1031] In other embodiments, the Therapeutics of the invention are administered in combination with agents used to treat neurological disorders. Neurological agents that may be administered with the Therapeutics of the invention include, but are not limited to, antiepileptic agents (e.g., carbamazepine, clonazepam, ethosuximide, phenobarbital, phenytoin, primidone, valproic acid, divalproex sodium, felbamate, gabapentin, lamotrigine, levetiracetam, oxcarbazepine, tiagabine, topiramate, zonisamide, diazepam, lorazepam, and clonazepam), antiparkinsonian agents (e.g., levodopa/carbidopa, selegiline, amantidine, bromocriptine, pergolide, ropinirole, pramipexole, benztropine; biperiden; ethopropazine; procyclidine; trihexyphenidyl, tolcapone), and ALS therapeutics (e.g. riluzole).

[1032] In another embodiment, Therapeutics of the invention are administered in combination with vasodilating agents and/or calcium channel blocking agents. Vasodilating agents that may be administered with the Therapeutics of the invention include, but are not limited to, Angiotensin Converting Enzyme (ACE) inhibitors (e.g., papaverine, isoxsuprine, benazepril, captopril, cilazapril, enalapril, enalaprilat, fosinopril, lisinopril, moexipril, perindopril, quinapril, ramipril, spirapril, trandolapril, and nylidrin), and nitrates (e.g., isosorbide dinitrate, isosorbide mononitrate, and nitroglycerin). Examples of calcium channel blocking agents that may be administered in combination with the Therapeutics of the invention include, but are not limited to amlodipine, bepridil, diltiazem, felodipine, flunarizine, isradipine, nicardipine, nifedipine, nimodipine, and verapamil.

[1033] In additional embodiments, the Therapeutics of the invention are administered in combination with other therapeutic or prophylactic regimens, such as, for example, radiation therapy.

### Example 14

### Method of Treating Decreased Levels of the Polypeptide

[1034] The present invention relates to a method for treating an individual in need of an increased level of a polypeptide of the invention in the body comprising administering to such an individual a composition comprising a therapeutically effective amount of an agonist of the invention (including polypeptides of the invention). Moreover, it will be appreciated that conditions caused by a decrease in the standard or normal expression level of a polypeptide of the present invention in an individual can be treated by administering the agonist or antagonist of the present invention. Thus, the invention also provides a method of treatment of an individual in need of an increased level of the polypeptide comprising administering to such an individual a Therapeutic comprising an amount of the agonist or antagonist to increase the activity level of the polypeptide in such an individual.

[1035] For example, a patient with decreased levels of a polypeptide receives a daily dose 0.1-100 ug/kg of the agonist or antagonist for six consecutive days. The exact details of the dosing scheme, based on administration and formulation, are provided in Example 13.

### Example 15

### Method of Treating Increased Levels of the Polypeptide

[1036] The present invention also relates to a method of treating an individual in need of a decreased level of a polypeptide of the invention in the body comprising administering to such an individual a composition comprising a therapeutically effective amount of an antagonist of the invention (including polypeptides and antibodies of the invention).

[1037] In one example, antisense technology is used to inhibit production of a polypeptide of the present invention. This technology is one example of a method of decreasing levels of a polypeptide, due to a variety of etiologies, such as cancer.

[1038] For example, a patient diagnosed with abnormally increased levels of a polypeptide is administered intravenously antisense polynucleotides at 0.5, 1.0, 1.5, 2.0 and 3.0 mg/kg day for 21 days. This treatment is repeated after a 7-day rest period if the treatment was well tolerated. The formulation of the antisense polynucleotide is provided in Example 13.

### Example 16

### Method of Treatment Using Gene Therapy-Ex Vivo

[1039] One method of gene therapy transplants fibroblasts, which are capable of expressing a polypeptide, onto a patient. Generally, fibroblasts are obtained from a subject by skin biopsy. The resulting tissue is placed in tissue-culture medium and separated into small pieces. Small chunks of the tissue are placed on a wet surface of a tissue culture flask, approximately ten pieces are placed in each flask. The flask is turned upside down, closed tight and left at room temperature over night. After 24 hours at room temperature, the flask is inverted and the chunks of tissue remain fixed to the bottom of the flask and fresh media (e.g., Ham's F12 media, with 10% FBS, penicillin and streptomycin) is added. The flasks are then incubated at 37 degree C. for approximately one week.

[1040] At this time, fresh media is added and subsequently changed every several days. After an additional two weeks in culture, a monolayer of fibroblasts emerge. The monolayer is trypsinized and scaled into larger flasks.

[1041] pMV-7 (Kirschmeier, P. T. et al., DNA, 7:219-25 (1988)), flanked by the long terminal repeats of the Moloney murine sarcoma virus, is digested with EcoRI and HindIII and subsequently treated with calf intestinal phosphatase. The linear vector is fractionated on agarose gel and purified, using glass beads.

[1042] The cDNA encoding a polypeptide of the present invention can be amplified using PCR primers which correspond to the 5′ and 3′ end sequences respectively as set forth in Example 1 using primers and having appropriate restriction sites and initiation/stop codons, if necessary. Preferably, the 5′ primer contains an EcoRI site and the 3′ primer includes a HindIII site. Equal quantities of the Moloney murine sarcoma virus linear backbone and the amplified EcoRI and HindIII fragment are added together, in the presence of T4 DNA ligase. The resulting mixture is maintained under conditions appropriate for ligation of the two fragments. The ligation mixture is then used to transform bacteria HB101, which are then plated onto agar containing kanamycin for the purpose of confirming that the vector has the gene of interest properly inserted.

[1043] The amphotropic pA317 or GP+am12 packaging cells are grown in tissue culture to confluent density in Dulbecco's Modified Eagles Medium (DMEM) with 10% calf serum (CS), penicillin and streptomycin. The MSV vector containing the gene is then added to the media and the packaging cells transduced with the vector. The packaging cells now produce infectious viral particles containing the gene (the packaging cells are now referred to as producer cells).

[1044] Fresh media is added to the transduced producer cells, and subsequently, the media is harvested from a 10 cm plate of confluent producer cells. The spent media, containing the infectious viral particles, is filtered through a millipore filter to remove detached producer cells and this media is then used to infect fibroblast cells. Media is removed from a sub-confluent plate of fibroblasts and quickly replaced with the media from the producer cells. This media is removed and replaced with fresh media. If the titer of virus is high, then virtually all fibroblasts will be infected and no selection is required. If the titer is very low, then it is necessary to use a retroviral vector that has a selectable marker, such as neo or his. Once the fibroblasts have been efficiently infected, the fibroblasts are analyzed to determine whether protein is produced.

[1045] The engineered fibroblasts are then transplanted onto the host, either alone or after having been grown to confluence on cytodex 3 microcarrier beads.

### Example 17

### Gene Therapy Using Endogenous Genes Corresponding To Polynucleotides of the Invention

[1046] Another method of gene therapy according to the present invention involves operably associating the endogenous polynucleotide sequence of the invention with a promoter via homologous recombination as described, for example, in U.S. Pat. No. 5,641,670, issued Jun. 24, 1997; International Publication NO: WO 96/29411, published Sep. 26, 1996; International Publication NO: WO 94/12650, published Aug. 4, 1994; Koller et al., Proc. Natl. Acad. Sci. USA, 86:8932-8935 (1989); and Zijlstra et al., Nature, 342:435-438 (1989). This method involves the activation of a gene which is present in the target cells, but which is not expressed in the cells, or is expressed at a lower level than desired.

[1047] Polynucleotide constructs are made which contain a promoter and targeting sequences, which are homologous to the 5′ non-coding sequence of endogenous polynucleotide sequence, flanking the promoter. The targeting sequence will be sufficiently near the 5′ end of the polynucleotide sequence so the promoter will be operably linked to the endogenous sequence upon homologous recombination. The promoter and the targeting sequences can be amplified using PCR. Preferably, the amplified promoter contains distinct restriction enzyme sites on the 5′ and 3′ ends. Preferably, the 3′ end of the first targeting sequence contains the same restriction enzyme site as the 5′ end of the amplified promoter and the 5′ end of the second targeting sequence contains the same restriction site as the 3′ end of the amplified promoter.

[1048] The amplified promoter and the amplified targeting sequences are digested with the appropriate restriction enzymes and subsequently treated with calf intestinal phosphatase. The digested promoter and digested targeting sequences are added together in the presence of T4 DNA ligase. The resulting mixture is maintained under conditions appropriate for ligation of the two fragments. The construct is size fractionated on an agarose gel, then purified by phenol extraction and ethanol precipitation.

[1049] In this Example, the polynucleotide constructs are administered as naked polynucleotides via electroporation. However, the polynucleotide constructs may also be administered with transfection-facilitating agents, such as liposomes, viral sequences, viral particles, precipitating agents, etc. Such methods of delivery are known in the art.

[1050] Once the cells are transfected, homologous recombination will take place which results in the promoter being operably linked to the endogenous polynucleotide sequence. This results in the expression of polynucleotide corresponding to the polynucleotide in the cell. Expression may be detected by immunological staining, or any other method known in the art.

[1051] Fibroblasts are obtained from a subject by skin biopsy. The resulting tissue is placed in DMEM+10% fetal calf serum. Exponentially growing or early stationary phase fibroblasts are trypsinized and rinsed from the plastic surface with nutrient medium. An aliquot of the cell suspension is removed for counting, and the remaining cells are subjected to centrifugation. The supernatant is aspirated and the pellet is resuspended in 5 ml of electroporation buffer (20 mM HEPES pH 7.3, 137 mM NaCl, 5 mM KCl, 0.7 mM Na₂ HPO₄, 6 mM dextrose). The cells are recentrifuged, the supernatant aspirated, and the cells resuspended in electroporation buffer containing 1 mg/ml acetylated bovine serum albumin. The final cell suspension contains approximately 3×10⁶ cells/ml. Electroporation should be performed immediately following resuspension.

[1052] Plasmid DNA is prepared according to standard techniques. For example, to construct a plasmid for targeting to the locus corresponding to the polynucleotide of the invention, plasmid pUC18 (MBI Fermentas, Amherst, N.Y.) is digested with HindIII. The CMV promoter is amplified by PCR with an XbaI site on the 5′ end and a BamHI site on the 3′ end. Two non-coding sequences are amplified via PCR: one non-coding sequence (fragment 1) is amplified with a HindIII site at the 5′ end and an Xba site at the 3′end; the other non-coding sequence (fragment 2) is amplified with a BamHI site at the 5′end and a HindIII site at the 3′end. The CMV promoter and the fragments (1 and 2) are digested with the appropriate enzymes (CMV promoter—XbaI and BamHI; fragment 1—XbaI; fragment 2—BamHI) and ligated together. The resulting ligation product is digested with HindIII, and ligated with the HindIII-digested pUC18 plasmid.

[1053] Plasmid DNA is added to a sterile cuvette with a 0.4 cm electrode gap (Bio-Rad). The final DNA concentration is generally at least 120 μg/ml. 0.5 ml of the cell suspension (containing approximately 1.5.×10⁶ cells) is then added to the cuvette, and the cell suspension and DNA solutions are gently mixed. Electroporation is performed with a Gene-Pulser apparatus (Bio-Rad). Capacitance and voltage are set at 960 μF and 250-300 V, respectively. As voltage increases, cell survival decreases, but the percentage of surviving cells that stably incorporate the introduced DNA into their genome increases dramatically. Given these parameters, a pulse time of approximately 14-20 mSec should be observed.

[1054] Electroporated cells are maintained at room temperature for approximately 5 min, and the contents of the cuvette are then gently removed with a sterile transfer pipette. The cells are added directly to 10 ml of prewarmed nutrient media (DMEM with 15% calf serum) in a 10 cm dish and incubated at 37 degree C. The following day, the media is aspirated and replaced with 10 ml of fresh media and incubated for a further 16-24 hours. 110011 The engineered fibroblasts are then injected into the host, either alone or after having been grown to confluence on cytodex 3 microcarrier beads. The fibroblasts now produce the protein product. The fibroblasts can then be introduced into a patient as described above.

### Example 18

### Method of Treatment Using Gene Therapy—In vivo

[1055] Another aspect of the present invention is using in vivo gene therapy methods to treat disorders, diseases and conditions. The gene therapy method relates to the introduction of naked nucleic acid (DNA, RNA, and antisense DNA or RNA) sequences into an animal to increase or decrease the expression of the polypeptide. The polynucleotide of the present invention may be operatively linked to (i.e., associated with) a promoter or any other genetic elements necessary for the expression of the polypeptide by the target tissue. Such gene therapy and delivery techniques and methods are known in the art, see, for example, WO90/11092, WO98/11779; U.S. Pat. No. 5,693,622, 5705151, 5580859; Tabata et al., Cardiovasc. Res. 35(3):470-479 (1997); Chao et al., Pharmacol. Res. 35(6):517-522 (1997); Wolff, Neuromuscul. Disord. 7(5):314-318 (1997); Schwartz et al., Gene Ther. 3(5):405-411 (1996); Tsurumi et al., Circulation 94(12):3281-3290 (1996) (incorporated herein by reference).

[1056] The polynucleotide constructs may be delivered by any method that delivers injectable materials to the cells of an animal, such as, injection into the interstitial space of tissues (heart, muscle, skin, lung, liver, intestine and the like). The polynucleotide constructs can be delivered in a pharmaceutically acceptable liquid or aqueous carrier.

[1057] The term “naked” polynucleotide, DNA or RNA, refers to sequences that are free from any delivery vehicle that acts to assist, promote, or facilitate entry into the cell, including viral sequences, viral particles, liposome formulations, lipofectin or precipitating agents and the like. However, the polynucleotides of the present invention may also be delivered in liposome formulations (such as those taught in Felgner P. L. et al. (1995) Ann. NY Acad. Sci. 772:126-139 and Abdallah B. et al. (1995) Biol. Cell 85(1):l-7) which can be prepared by methods well known to those skilled in the art.

[1058] The polynucleotide vector constructs used in the gene therapy method are preferably constructs that will not integrate into the host genome nor will they contain sequences that allow for replication. Any strong promoter known to those skilled in the art can be used for driving the expression of DNA. Unlike other gene therapy techniques, one major advantage of introducing naked nucleic acid sequences into target cells is the transitory nature of the polynucleotide synthesis in the cells. Studies have shown that non-replicating DNA sequences can be introduced into cells to provide production of the desired polypeptide for periods of up to six months.

[1059] The polynucleotide construct can be delivered to the interstitial space of tissues within an animal, including muscle, skin, brain, lung, liver, spleen, bone marrow, thymus, heart, lymph, blood, bone, cartilage, pancreas, kidney, gall bladder, stomach, intestine, testis, ovary, uterus, rectum, nervous system, eye, gland, and connective tissue. Interstitial space of the tissues comprises the intercellular fluid, mucopolysaccharide matrix among the reticular fibers of organ tissues, elastic fibers in the walls of vessels or chambers, collagen fibers of fibrous tissues, or that same matrix within connective tissue ensheathing muscle cells or in the lacunae of bone. It is similarly the space occupied by the plasma of the circulation and the lymph fluid of the lymphatic channels. Delivery to the interstitial space of muscle tissue is preferred for the reasons discussed below. They may be conveniently delivered by injection into the tissues comprising these cells. They are preferably delivered to and expressed in persistent, non-dividing cells which are differentiated, although delivery and expression may be achieved in non-differentiated or less completely differentiated cells, such as, for example, stem cells of blood or skin fibroblasts. In vivo muscle cells are particularly competent in their ability to take up and express polynucleotides.

[1060] For the naked polynucleotide injection, an effective dosage amount of DNA or RNA will be in the range of from about 0.05 g/kg body weight to about 50 mg/kg body weight. Preferably the dosage will be from about 0.005 mg/kg to about 20 mg/kg and more preferably from about 0.05 mg/kg to about 5 mg/kg. Of course, as the artisan of ordinary skill will appreciate, this dosage will vary according to the tissue site of injection. The appropriate and effective dosage of nucleic acid sequence can readily be determined by those of ordinary skill in the art and may depend on the condition being treated and the route of administration. The preferred route of administration is by the parenteral route of injection into the interstitial space of tissues. However, other parenteral routes may also be used, such as, inhalation of an aerosol formulation particularly for delivery to lungs or bronchial tissues, throat or mucous membranes of the nose. In addition, naked polynucleotide constructs can be delivered to arteries during angioplasty by the catheter used in the procedure.

[1061] The dose response effects of injected polynucleotide in muscle in vivo is determined as follows. Suitable template DNA for production of mRNA coding for polypeptide of the present invention is prepared in accordance with a standard recombinant DNA methodology. The template DNA, which may be either circular or linear, is either used as naked DNA or complexed with liposomes. The quadriceps muscles of mice are then injected with various amounts of the template DNA.

[1062] Five to six week old female and male Balb/C mice are anesthetized by intraperitoneal injection with 0.3 ml of 2.5% Avertin. A 1.5 cm incision is made on the anterior thigh, and the quadriceps muscle is directly visualized. The template DNA is injected in 0.1 ml of carrier in a 1 cc syringe through a 27 gauge needle over one minute, approximately 0.5 cm from the distal insertion site of the muscle into the knee and about 0.2 cm deep. A suture is placed over the injection site for future localization, and the skin is closed with stainless steel clips.

[1063] After an appropriate incubation time (e.g., 7 days) muscle extracts are prepared by excising the entire quadriceps. Every fifth 15 urn cross-section of the individual quadriceps muscles is histochemically stained for protein expression. A time course for protein expression may be done in a similar fashion except that quadriceps from different mice are harvested at different times. Persistence of DNA in muscle following injection may be determined by Southern blot analysis after preparing total cellular DNA and HIRT supernatants from injected and control mice. The results of the above experimentation in mice can be used to extrapolate proper dosages and other treatment parameters in humans and other animals using naked DNA.

### Example 19

### Transgenic Animals

[1064] The polypeptides of the invention can also be expressed in transgenic animals. Animals of any species, including, but not limited to, mice, rats, rabbits, hamsters, guinea pigs, pigs, micro-pigs, goats, sheep, cows and non-human primates, e.g., baboons, monkeys, and chimpanzees may be used to generate transgenic animals. In a specific embodiment, techniques described herein or otherwise known in the art, are used to express polypeptides of the invention in humans, as part of a gene therapy protocol.

[1065] Any technique known in the art may be used to introduce the transgene (i.e., polynucleotides of the invention) into animals to produce the founder lines of transgenic animals. Such techniques include, but are not limited to, pronuclear microinjection (Paterson et al., Appl. Microbiol. Biotechnol. 40:691-698 (1994); Carver et al., Biotechnology (NY) 11:1263-1270 (1993); Wright et al., Biotechnology (NY) 9:830-834 (1991); and Hoppe et al., U.S. Pat. No. 4,873,191 (1989)); retrovirus mediated gene transfer into germ lines (Van der Putten et al., Proc. Natl. Acad. Sci., USA 82:6148-6152 (1985)), blastocysts or embryos; gene targeting in embryonic stem cells (Thompson et al., Cell 56:313-321 (1989)); electroporation of cells or embryos (Lo, 1983, Mol Cell. Biol. 3:1803-1814 (1983)); introduction of the polynucleotides of the invention using a gene gun (see, e.g., Ulmer et al., Science 259:1745 (1993); introducing nucleic acid constructs into embryonic pleuripotent stem cells and transferring the stem cells back into the blastocyst; and sperm-mediated gene transfer (Lavitrano et al., Cell 57:717-723 (1989); etc. For a review of such techniques, see Gordon, “Transgenic Animals,” Intl. Rev. Cytol. 115:171-229 (1989), which is incorporated by reference herein in its entirety.

[1066] Any technique known in the art may be used to produce transgenic clones containing polynucleotides of the invention, for example, nuclear transfer into enucleated oocytes of nuclei from cultured embryonic, fetal, or adult cells induced to quiescence (Campell et al., Nature 380:64-66 (1996); Wilmut et al., Nature 385:810-813 (1997)).

[1067] The present invention provides for transgenic animals that carry the transgene in all their cells, as well as animals which carry the transgene in some, but not all their cells, i.e., mosaic animals or chimeric. The transgene may be integrated as a single transgene or as multiple copies such as in concatamers, e.g., head-to-head tandems or head-to-tail tandems. The transgene may also be selectively introduced into and activated in a particular cell type by following, for example, the teaching of Lasko et al. (Lasko et al., Proc. Natl. Acad. Sci. USA 89:6232-6236 (1992)). The regulatory sequences required for such a cell-type specific activation will depend upon the particular cell type of interest, and will be apparent to those of skill in the art. When it is desired that the polynucleotide transgene be integrated into the chromosomal site of the endogenous gene, gene targeting is preferred. Briefly, when such a technique is to be utilized, vectors containing some nucleotide sequences homologous to the endogenous gene are designed for the purpose of integrating, via homologous recombination with chromosomal sequences, into and disrupting the function of the nucleotide sequence of the endogenous gene. The transgene may also be selectively introduced into a particular cell type, thus inactivating the endogenous gene in only that cell type, by following, for example, the teaching of Gu et al. (Gu et al., Science 265:103-106 (1994)). The regulatory sequences required for such a cell-type specific inactivation will depend upon the particular cell type of interest, and will be apparent to those of skill in the art.

[1068] Once transgenic animals have been generated, the expression of the recombinant gene may be assayed utilizing standard techniques. Initial screening may be accomplished by Southern blot analysis or PCR techniques to analyze animal tissues to verify that integration of the transgene has taken place. The level of mRNA expression of the transgene in the tissues of the transgenic animals may also be assessed using techniques which include, but are not limited to, Northern blot analysis of tissue samples obtained from the animal, in situ hybridization analysis, and reverse transcriptase-PCR (rt-PCR). Samples of transgenic gene-expressing tissue may also be evaluated immunocytochemically or immunohistochemically using antibodies specific for the transgene product.

[1069] Once the founder animals are produced, they may be bred, inbred, outbred, or crossbred to produce colonies of the particular animal. Examples of such breeding strategies include, but are not limited to: outbreeding of founder animals with more than one integration site in order to establish separate lines; inbreeding of separate lines in order to produce compound transgenics that express the transgene at higher levels because of the effects of additive expression of each transgene; crossing of heterozygous transgenic animals to produce animals homozygous for a given integration site in order to both augment expression and eliminate the need for screening of animals by DNA analysis; crossing of separate homozygous lines to produce compound heterozygous or homozygous lines; and breeding to place the transgene on a distinct background that is appropriate for an experimental model of interest.

[1070] Transgenic animals of the invention have uses which include, but are not limited to, animal model systems useful in elaborating the biological function of polypeptides of the present invention, studying conditions and/or disorders associated with aberrant expression, and in screening for compounds effective in ameliorating such conditions and/or disorders.

### Example 20

### Knock-Out Animals

[1071] Endogenous gene expression can also be reduced by inactivating or “knocking out” the gene and/or its promoter using targeted homologous recombination. (See e.g., Smithies et al., Nature 317:230-234 (1985); Thomas & Capecchi, Cell 51:503-512 (1987); Thompson et al., Cell 5:313-321 (1989); each of which is incorporated by reference herein in its entirety.) For example, a mutant, non-functional polynucleotide of the invention (or a completely unrelated DNA sequence) flanked by DNA homologous to the endogenous polynucleotide sequence (either the coding regions or regulatory regions of the gene) can be used, with or without a selectable marker and/or a negative selectable marker, to transfect cells that express polypeptides of the invention in vivo. In another embodiment, techniques known in the art are used to generate knockouts in cells that contain, but do not express the gene of interest. Insertion of the DNA construct, via targeted homologous recombination, results in inactivation of the targeted gene. Such approaches are particularly suited in research and agricultural fields where modifications to embryonic stem cells can be used to generate animal offspring with an inactive targeted gene (e.g., see Thomas & Capecchi 1987 and Thompson 1989, supra). However this approach can be routinely adapted for use in humans provided the recombinant DNA constructs are directly administered or targeted to the required site in vivo using appropriate viral vectors that will be apparent to those of skill in the art.

[1072] In further embodiments of the invention, cells that are genetically engineered to express the polypeptides of the invention, or alternatively, that are genetically engineered not to express the polypeptides of the invention (e.g., knockouts) are administered to a patient in vivo. Such cells may be obtained from the patient (i.e., animal, including human) or an MHC compatible donor and can include, but are not limited to fibroblasts, bone marrow cells, blood cells (e.g., lymphocytes), adipocytes, muscle cells, endothelial cells etc. The cells are genetically engineered in vitro using recombinant DNA techniques to introduce the coding sequence of polypeptides of the invention into the cells, or alternatively, to disrupt the coding sequence and/or endogenous regulatory sequence associated with the polypeptides of the invention, e.g., by transduction (using viral vectors, and preferably vectors that integrate the transgene into the cell genome) or transfection procedures, including, but not limited to, the use of plasmids, cosmids, YACs, naked DNA, electroporation, liposomes, etc. The coding sequence of the polypeptides of the invention can be placed under the control of a strong constitutive or inducible promoter or promoter/enhancer to achieve expression, and preferably secretion, of the polypeptides of the invention. The engineered cells which express and preferably secrete the polypeptides of the invention can be introduced into the patient systemically, e.g., in the circulation, or intraperitoneally.

[1073] Alternatively, the cells can be incorporated into a matrix and implanted in the body, e.g., genetically engineered fibroblasts can be implanted as part of a skin graft; genetically engineered endothelial cells can be implanted as part of a lymphatic or vascular graft. (See, for example, Anderson et al. U.S. Pat. No. 5,399,349; and Mulligan & Wilson, U.S. Pat. No. 5,460,959 each of which is incorporated by reference herein in its entirety).

[1074] When the cells to be administered are non-autologous or non-MHC compatible cells, they can be administered using well known techniques which prevent the development of a host immune response against the introduced cells. For example, the cells may be introduced in an encapsulated form which, while allowing for an exchange of components with the immediate extracellular environment, does not allow the introduced cells to be recognized by the host immune system.

[1075] Transgenic and “knock-out” animals of the invention have uses which include, but are not limited to, animal model systems useful in elaborating the biological function of polypeptides of the present invention, studying conditions and/or disorders associated with aberrant expression, and in screening for compounds effective in ameliorating such conditions and/or disorders.

### Example 21

### Assays Detecting Stimulation or Inhibition of B cell Proliferation and Differentiation

[1076] Generation of functional humoral immune responses requires both soluble and cognate signaling between B-lineage cells and their microenvironment. Signals may impart a positive stimulus that allows a B-lineage cell to continue its programmed development, or a negative stimulus that instructs the cell to arrest its current developmental pathway. To date, numerous stimulatory and inhibitory signals have been found to influence B cell responsiveness including IL-2, IL-4, IL-5, IL-6, IL-7, IL10, IL-13, IL-14 and IL-15. Interestingly, these signals are by themselves weak effectors but can, in combination with various co-stimulatory proteins, induce activation, proliferation, differentiation, homing, tolerance and death among B cell populations.

[1077] One of the best studied classes of B-cell co-stimulatory proteins is the TNF-superfamily. Within this family CD40, CD27, and CD30 along with their respective ligands CD154, CD70, and CD153 have been found to regulate a variety of immune responses. Assays which allow for the detection and/or observation of the proliferation and differentiation of these B-cell populations and their precursors are valuable tools in determining the effects various proteins may have on these B-cell populations in terms of proliferation and differentiation. Listed below are two assays designed to allow for the detection of the differentiation, proliferation, or inhibition of B-cell populations and their precursors.

[1078] In vitro Assay-Agonists or antagonists of the invention can be assessed for its ability to induce activation, proliferation, differentiation or inhibition and/or death in B-cell populations and their precursors. The activity of the agonists or antagonists of the invention on purified human tonsillar B cells, measured qualitatively over the dose range from 0.1 to 10,000 ng/mL, is assessed in a standard B-lymphocyte co-stimulation assay in which purified tonsillar B cells are cultured in the presence of either formalin-fixed Staphylococcus aureus Cowan I (SAC) or immobilized anti-human IgM antibody as the priming agent. Second signals such as IL-2 and IL-15 synergize with SAC and IgM crosslinking to elicit B cell proliferation as measured by tritiated-thymidine incorporation. Novel synergizing agents can be readily identified using this assay. The assay involves isolating human tonsillar B cells by magnetic bead (MACS) depletion of CD3-positive cells. The resulting cell population is greater than 95% B cells as assessed by expression of CD45R(B220).

[1079] Various dilutions of each sample are placed into individual wells of a 96-well plate to which are added 10⁵ B-cells suspended in culture medium (RPMI 1640 containing 10% FBS, 5×10⁻⁵M 2ME, 100U/ml penicillin, 10 ug/ml streptomycin, and 10⁻⁵ dilution of SAC) in a total volume of 150 ul. Proliferation or inhibition is quantitated by a 20 h pulse (1 uCi/well) with 3H-thymidine (6.7 Ci/mM) beginning 72 h post factor addition. The positive and negative controls are IL2 and medium respectively.

[1080] In vivo Assay-BALB/c mice are injected (i.p.) twice per day with buffer only, or 2 mg/Kg of agonists or antagonists of the invention, or truncated forms thereof. Mice receive this treatment for 4 consecutive days, at which time they are sacrificed and various tissues and serum collected for analyses. Comparison of H&E sections from normal spleens and spleens treated with agonists or antagonists of the invention identify the results of the activity of the agonists or antagonists on spleen cells, such as the diffusion of peri-arterial lymphatic sheaths, and/or significant increases in the nucleated cellularity of the red pulp regions, which may indicate the activation of the differentiation and proliferation of B-cell populations. Immunohistochemical studies using a B cell marker, anti-CD45R(B220), are used to determine whether any physiological changes to splenic cells, such as splenic disorganization, are due to increased B-cell representation within loosely defined B-cell zones that infiltrate established T-cell regions.

[1081] Flow cytometric analyses of the spleens from mice treated with agonist or antagonist is used to indicate whether the agonists or antagonists specifically increases the proportion of ThB+, CD45R(B220)dull B cells over that which is observed in control mice.

[1082] Likewise, a predicted consequence of increased mature B-cell representation in vivo is a relative increase in serum Ig titers. Accordingly, serum IgM and IgA levels are compared between buffer and agonists or antagonists-treated mice.

[1083] The studies described in this example tested activity of agonists or antagonists of the invention. However, one skilled in the art could easily modify the exemplified studies to test the activity of polynucleotides or polypeptides of the invention (e.g., gene therapy).

### Example 22

### T Cell Proliferation Assay

[1084] A CD3-induced proliferation assay is performed on PBMCs and is measured by the uptake of ³H-thymidine. The assay is performed as follows. Ninety-six well plates are coated with 100 μl/well of mAb to CD3 (HIT3a, Pharmingen) or isotype-matched control mAb (B33.1) overnight at 4 degrees C. (1 μg/ml in 0.05M bicarbonate buffer, pH 9.5), then washed three times with PBS. PBMC are isolated by F/H gradient centrifugation from human peripheral blood and added to quadruplicate wells (5×10⁴/well) of mAb coated plates in RPMI containing 10% FCS and P/S in the presence of varying concentrations of agonists or antagonists of the invention (total volume 200 ul). Relevant protein buffer and medium alone are controls. After 48 hr. culture at 37 degrees C., plates are spun for 2 min. at 1000 rpm and 100 μl of supernatant is removed and stored −20 degrees C. for measurement of IL-2 (or other cytokines) if effect on proliferation is observed. Wells are supplemented with 100 ul of medium containing 0.5 uCi of ³H-thymidine and cultured at 37 degrees C. for 18-24 hr. Wells are harvested and incorporation of ³H-thymidine used as a measure of proliferation. Anti-CD3 alone is the positive control for proliferation. IL-2 (100 U/ml) is also used as a control which enhances proliferation. Control antibody which does not induce proliferation of T cells is used as the negative control for the effects of agonists or antagonists of the invention.

[1085] The studies described in this example tested activity of agonists or antagonists of the invention. However, one skilled in the art could easily modify the exemplified studies to test the activity of polynucleotides or polypeptides of the invention (e.g., gene therapy).

### Example 23

### Effect of Agonists or Antagonists of the Invention on the Expression of MHC Class II, Costimulatory and Adhesion Molecules and Cell Differentiation of Monocytes and Monocyte-Derived Human Dendritic Cells

[1086] Dendritic cells are generated by the expansion of proliferating precursors found in the peripheral blood: adherent PBMC or elutriated monocytic fractions are cultured for 7-10 days with GM-CSF (50 ng/ml) and IL-4 (20 ng/ml). These dendritic cells have the characteristic phenotype of immature cells (expression of CD1, CD80, CD86, CD40 and MHC class II antigens). Treatment with activating factors, such as TNF-α, causes a rapid change in surface phenotype (increased expression of MHC class I and II, costimulatory and adhesion molecules, downregulation of FCγRII, upregulation of CD83). These changes correlate with increased antigen-presenting capacity and with functional maturation of the dendritic cells.

[1087] FACS analysis of surface antigens is performed as follows. Cells are treated 1-3 days with increasing concentrations of agonist or antagonist of the invention or LPS (positive control), washed with PBS containing 1% BSA and 0.02 mM sodium azide, and then incubated with 1:20 dilution of appropriate FITC- or PE-labeled monoclonal antibodies for 30 minutes at 4 degrees C. After an additional wash, the labeled cells are analyzed by flow cytometry on a FACScan (Becton Dickinson).

[1088] Effect on the Production of Cytokines.

[1089] Cytokines generated by dendritic cells, in particular IL-12, are important in the initiation of T-cell dependent immune responses. IL-12 strongly influences the development of Th1 helper T-cell immune response, and induces cytotoxic T and NK cell function. An ELISA is used to measure the IL-12 release as follows. Dendritic cells (10⁶/ml) are treated with increasing concentrations of agonists or antagonists of the invention for 24 hours. LPS (100 ng/ml) is added to the cell culture as positive control. Supernatants from the cell cultures are then collected and analyzed for IL-12 content using commercial ELISA kit (e.g., R & D Systems (Minneapolis, Minn.)). The standard protocols provided with the kits are used.

[1090] Effect on the Expression of MHC Class II, Costimulatory and Adhesion Molecules.

[1091] Three major families of cell surface antigens can be identified on monocytes: adhesion molecules, molecules involved in antigen presentation, and Fc receptor. Modulation of the expression of MHC class II antigens and other costimulatory molecules, such as B7 and ICAM-1, may result in changes in the antigen presenting capacity of monocytes and ability to induce T cell activation. Increased expression of Fc receptors may correlate with improved monocyte cytotoxic activity, cytokine release and phagocytosis.

[1092] FACS analysis is used to examine the surface antigens as follows. Monocytes are treated 1-5 days with increasing concentrations of agonists or antagonists of the invention or LPS (positive control), washed with PBS containing 1% BSA and 0.02 mM sodium azide, and then incubated with 1:20 dilution of appropriate FITC- or PE-labeled monoclonal antibodies for 30 minutes at 4 degrees C. After an additional wash, the labeled cells are analyzed by flow cytometry on a FACScan (Becton Dickinson).

[1093] Monocyte Activation and/or Increased Survival.

[1094] Assays for molecules that activate (or alternatively, inactivate) monocytes and/or increase monocyte survival (or alternatively, decrease monocyte survival) are known in the art and may routinely be applied to determine whether a molecule of the invention functions as an inhibitor or activator of monocytes. Agonists or antagonists of the invention can be screened using the three assays described below. For each of these assays, Peripheral blood mononuclear cells (PBMC) are purified from single donor leukopacks (American Red Cross, Baltimore, Md.) by centrifugation through a Histopaque gradient (Sigma). Monocytes are isolated from PBMC by counterflow centrifugal elutriation.

[1095] Monocyte Survival Assay.

[1096] Human peripheral blood monocytes progressively lose viability when cultured in absence of serum or other stimuli. Their death results from internally regulated processes (apoptosis). Addition to the culture of activating factors, such as TNF-alpha dramatically improves cell survival and prevents DNA fragmentation. Propidium iodide (PI) staining is used to measure apoptosis as follows. Monocytes are cultured for 48 hours in polypropylene tubes in serum-free medium (positive control), in the presence of 100 ng/ml TNF-alpha (negative control), and in the presence of varying concentrations of the compound to be tested. Cells are suspended at a concentration of 2×10⁶/ml in PBS containing PI at a final concentration of 5 μg/ml, and then incubated at room temperature for 5 minutes before FACScan analysis. PI uptake has been demonstrated to correlate with DNA fragmentation in this experimental paradigm.

[1097] Effect on Cytokine Release.

[1098] An important function of monocytes/macrophages is their regulatory activity on other cellular populations of the immune system through the release of cytokines after stimulation. An ELISA to measure cytokine release is performed as follows. Human monocytes are incubated at a density of 5×10⁵ cells/ml with increasing concentrations of agonists or antagonists of the invention and under the same conditions, but in the absence of agonists or antagonists. For IL-12 production, the cells are primed overnight with IFN (100 U/ml) in the presence of agonist or antagonist of the invention. LPS (10 ng/ml) is then added. Conditioned media are collected after 24 h and kept frozen until use. Measurement of TNF-alpha, IL-10, MCP-1 and IL-8 is then performed using a commercially available ELISA kit (e.g., R & D Systems (Minneapolis, Minn.)) and applying the standard protocols provided with the kit.

[1099] Oxidative Burst.

[1100] Purified monocytes are plated in 96-w plate at 2-1×10⁵ cell/well. Increasing concentrations of agonists or antagonists of the invention are added to the wells in a total volume of 0.2 ml culture medium (RPMI 1640+10% FCS, glutamine and antibiotics). After 3 days incubation, the plates are centrifuged and the medium is removed from the wells. To the macrophage monolayers, 0.2 ml per well of phenol red solution (140 mM NaCl, 10 mM potassium phosphate buffer pH 7.0, 5.5 mM dextrose, 0.56 mM phenol red and 19 U/ml of HRPO) is added, together with the stimulant (200 nM PMA). The plates are incubated at 37° C. for 2 hours and the reaction is stopped by adding 20 μl 1N NaOH per well. The absorbance is read at 610 nm. To calculate the amount of H₂O₂ produced by the macrophages, a standard curve of a H₂O₂ solution of known molarity is performed for each experiment.

[1101] The studies described in this example tested activity of agonists or antagonists of the invention. However, one skilled in the art could easily modify the exemplified studies to test the activity of polynucleotides or polypeptides of the invention (e.g., gene therapy).

### Example 24

### Biological Effects of Agonists or Antagonists of the Invention

[1102] Astrocyte and Neuronal Assays•

[1103] Agonists or antagonists of the invention, expressed in Escherichia coli and purified as described above, can be tested for activity in promoting the survival, neurite outgrowth, or phenotypic differentiation of cortical neuronal cells and for inducing the proliferation of glial fibrillary acidic protein immunopositive cells, astrocytes. The selection of cortical cells for the bioassay is based on the prevalent expression of FGF-1 and FGF-2 in cortical structures and on the previously reported enhancement of cortical neuronal survival resulting from FGF-2 treatment. A thymidine incorporation assay, for example, can be used to elucidate an agonist or antagonist of the invention's activity on these cells.

[1104] Moreover, previous reports describing the biological effects of FGF-2 (basic FGF) on cortical or hippocampal neurons in vitro have demonstrated increases in both neuron survival and neurite outgrowth (Walicke et al., “Fibroblast growth factor promotes survival of dissociated hippocampal neurons and enhances neurite extension.” Proc. Natl. Acad. Sci. USA 83:3012-3016. (1986), assay herein incorporated by reference in its entirety). However, reports from experiments done on PC-12 cells suggest that these two responses are not necessarily synonymous and may depend on not only which FGF is being tested but also on which receptor(s) are expressed on the target cells. Using the primary cortical neuronal culture paradigm, the ability of an agonist or antagonist of the invention to induce neurite outgrowth can be compared to the response achieved with FGF-2 using, for example, a thymidine incorporation assay.

[1105] Fibroblast and Endothelial Cell Assays•

[1106] Human lung fibroblasts are obtained from Clonetics (San Diego, Calif.) and maintained in growth media from Clonetics. Dermal microvascular endothelial cells are obtained from Cell Applications (San Diego, Calif.). For proliferation assays, the human lung fibroblasts and dermal microvascular endothelial cells can be cultured at 5,000 cells/well in a 96-well plate for one day in growth medium. The cells are then incubated for one day in 0.1% BSA basal medium. After replacing the medium with fresh 0.1% BSA medium, the cells are incubated with the test proteins for 3 days. Alamar Blue (Alamar Biosciences, Sacramento, Calif.) is added to each well to a final concentration of 10%. The cells are incubated for 4 hr. Cell viability is measured by reading in a CytoFluor fluorescence reader. For the PGE₂ assays, the human lung fibroblasts are cultured at 5,000 cells/well in a 96-well plate for one day. After a medium change to 0.1% BSA basal medium, the cells are incubated with FGF-2 or agonists or antagonists of the invention with or without IL-1α for 24 hours. The supernatants are collected and assayed for PGE₂ by EIA kit (Cayman, Ann Arbor, Mich.). For the IL-6 assays, the human lung fibroblasts are cultured at 5,000 cells/well in a 96-well plate for one day. After a medium change to 0.1% BSA basal medium, the cells are incubated with FGF-2 or with or without agonists or antagonists of the invention IL-1α for 24 hours. The supernatants are collected and assayed for IL-6 by ELISA kit (Endogen, Cambridge, Mass.).

[1107] Human lung fibroblasts are cultured with FGF-2 or agonists or antagonists of the invention for 3 days in basal medium before the addition of Alamar Blue to assess effects on growth of the fibroblasts. FGF-2 should show a stimulation at 10-2500 ng/ml which can be used to compare stimulation with agonists or antagonists of the invention.

[1108] Parkinson Models.

[1109] The loss of motor function in Parkinson's disease is attributed to a deficiency of striatal dopamine resulting from the degeneration of the nigrostriatal dopaminergic projection neurons. An animal model for Parkinson's that has been extensively characterized involves the systemic administration of 1-methyl-4 phenyl 1,2,3,6-tetrahydropyridine (MPTP). In the CNS, MPTP is taken-up by astrocytes and catabolized by monoamine oxidase B to 1-methyl-4-phenyl pyridine (MPP⁺) and released. Subsequently, MPP⁺ is actively accumulated in dopaminergic neurons by the high-affinity reuptake transporter for dopamine. MPP⁺ is then concentrated in mitochondria by the electrochemical gradient and selectively inhibits nicotidamide adenine disphosphate: ubiquinone oxidoreductionase (complex I), thereby interfering with electron transport and eventually generating oxygen radicals.

[1110] It has been demonstrated in tissue culture paradigms that FGF-2 (basic FGF) has trophic activity towards nigral dopaminergic neurons (Ferrari et al., Dev. Biol. 1989). Recently, Dr. Unsicker's group has demonstrated that administering FGF-2 in gel foam implants in the striatum results in the near complete protection of nigral dopaminergic neurons from the toxicity associated with MPTP exposure (Otto and Unsicker, J. Neuroscience, 1990).

[1111] Based on the data with FGF-2, agonists or antagonists of the invention can be evaluated to determine whether it has an action similar to that of FGF-2 in enhancing dopaminergic neuronal survival in vitro and it can also be tested in vivo for protection of dopaminergic neurons in the striatum from the damage associated with MPTP treatment. The potential effect of an agonist or antagonist of the invention is first examined in vitro in a dopaminergic neuronal cell culture paradigm. The cultures are prepared by dissecting the midbrain floor plate from gestation day 14 Wistar rat embryos. The tissue is dissociated with trypsin and seeded at a density of 200,000 cells/cm² on polyorthinine-laminin coated glass coverslips. The cells are maintained in Dulbecco's Modified Eagle's medium and F12 medium containing hormonal supplements (N1). The cultures are fixed with paraformaldehyde after 8 days in vitro and are processed for tyrosine hydroxylase, a specific marker for dopaminergic neurons, immunohistochemical staining. Dissociated cell cultures are prepared from embryonic rats. The culture medium is changed every third day and the factors are also added at that time.

[1112] Since the dopaminergic neurons are isolated from animals at gestation day 14, a developmental time which is past the stage when the dopaminergic precursor cells are proliferating, an increase in the number of tyrosine hydroxylase immunopositive neurons would represent an increase in the number of dopaminergic neurons surviving in vitro. Therefore, if an agonist or antagonist of the invention acts to prolong the survival of dopaminergic neurons, it would suggest that the agonist or antagonist may be involved in Parkinson's Disease.

[1113] The studies described in this example tested activity of agonists or antagonists of the invention. However, one skilled in the art could easily modify the exemplified studies to test the activity of polynucleotides or polypeptides of the invention (e.g., gene therapy).

### Example 25

### The Effect of Agonists or Antagonists of the Invention on the Growth of Vascular Endothelial Cells

[1114] On day 1, human umbilical vein endothelial cells (HUVEC) are seeded at 2-5×10⁴ cells/35 mm dish density in M199 medium containing 4% fetal bovine serum (FBS), 16 units/ml heparin, and 50 units/ml endothelial cell growth supplements (ECGS, Biotechnique, Inc.). On day 2, the medium is replaced with M199 containing 10% FBS, 8 units/ml heparin. An agonist or antagonist of the invention, and positive controls, such as VEGF and basic FGF (bFGF) are added, at varying concentrations. On days 4 and 6, the medium is replaced. On day 8, cell number is determined with a Coulter Counter.

[1115] An increase in the number of HUVEC cells indicates that the compound of the invention may proliferate vascular endothelial cells, while a decrease in the number of HUVEC cells indicates that the compound of the invention inhibits vascular endothelial cells.

[1116] The studies described in this example tested activity of a polypeptide of the invention. However, one skilled in the art could easily modify the exemplified studies to test the activity of polynucleotides (e.g., gene therapy), agonists, and/or antagonists of the invention.

### Example 26

### Rat Corneal Wound Healing Model

[1117] This animal model shows the effect of an agonist or antagonist of the invention on neovascularization. The experimental protocol includes:

[1118] Making a 1-1.5 mm long incision from the center of cornea into the stromal layer.

[1119] Inserting a spatula below the lip of the incision facing the outer corner of the eye.

[1120] Making a pocket (its base is 1-1.5 mm form the edge of the eye).

[1121] Positioning a pellet, containing 50 ng-5 ug of an agonist or antagonist of the invention, within the pocket.

[1122] Treatment with an agonist or antagonist of the invention can also be applied topically to the corneal wounds in a dosage range of 20 mg-500 mg (daily treatment for five days).

[1123] The studies described in this example tested activity of agonists or antagonists of the invention. However, one skilled in the art could easily modify the exemplified studies to test the activity of polynucleotides or polypeptides of the invention (e.g., gene therapy).

### Example 27

### Diabetic Mouse and Glucocorticoid-Impaired Wound Healing Models

[1124] Diabetic db+/db+ Mouse Model.

[1125] To demonstrate that an agonist or antagonist of the invention accelerates the healing process, the genetically diabetic mouse model of wound healing is used. The fill thickness wound healing model in the db+/db+ mouse is a well characterized, clinically relevant and reproducible model of impaired wound healing. Healing of the diabetic wound is dependent on formation of granulation tissue and re-epithelialization rather than contraction (Gartner, M. H. et al, J. Surg. Res. 52:389 (1992); Greenhalgh, D. G. et al., Am. J. Pathol. 136:1235 (1990)).

[1126] The diabetic animals have many of the characteristic features observed in Type II diabetes mellitus. Homozygous (db+/db+) mice are obese in comparison to their normal heterozygous (db+/+m) littermates. Mutant diabetic (db+/db+) mice have a single autosomal recessive mutation on chromosome 4 (db+) (Coleman et al. Proc. Natl. Acad. Sci. USA 77:283-293 (1982)). Animals show polyphagia, polydipsia and polyuria. Mutant diabetic mice (db+/db+) have elevated blood glucose, increased or normal insulin levels, and suppressed cell-mediated immunity (Mandel et al., J. Immunol. 120:1375 (1978); Debray-Sachs, M. et al., Clin. Exp. Immunol. 51(1):1-7 (1983); Leiter et al., Am. J. of Pathol. 114:46-55 (1985)). Peripheral neuropathy, myocardial complications, and microvascular lesions, basement membrane thickening and glomerular filtration abnormalities have been described in these animals (Norido, F. et al., Exp. Neurol. 83(2):221-232 (1984); Robertson et al., Diabetes 29(1):60-67 (1980); Giacomelli et al., Lab Invest. 40(4):460-473 (1979); Coleman, D. L., Diabetes 31 (Suppl):1-6 (1982)). These homozygous diabetic mice develop hyperglycemia that is resistant to insulin analogous to human type II diabetes (Mandel et al., J. Immunol. 120:1375-1377 (1978)).

[1127] The characteristics observed in these animals suggests that healing in this model may be similar to the healing observed in human diabetes (Greenhalgh, et al., Am. J. of Pathol. 136:1235-1246 (1990)).

[1128] Genetically diabetic female C57BL/KsJ (db+/db+) mice and their non-diabetic (db+/+m) heterozygous littermates are used in this study (Jackson Laboratories). The animals are purchased at 6 weeks of age and are 8 weeks old at the beginning of the study. Animals are individually housed and received food and water ad libitum. All manipulations are performed using aseptic techniques. The experiments are conducted according to the rules and guidelines of Human Genome Sciences, Inc. Institutional Animal Care and Use Committee and the Guidelines for the Care and Use of Laboratory Animals.

[1129] Wounding protocol is performed according to previously reported methods (Tsuboi, R. and Rifkin, D. B., J. Exp. Med. 172:245-251 (1990)). Briefly, on the day of wounding, animals are anesthetized with an intraperitoneal injection of Avertin (0.01 mg/mL), 2,2,2-tribromoethanol and 2-methyl-2-butanol dissolved in deionized water. The dorsal region of the animal is shaved and the skin washed with 70% ethanol solution and iodine. The surgical area is dried with sterile gauze prior to wounding. An 8 mm full-thickness wound is then created using a Keyes tissue punch. Immediately following wounding, the surrounding skin is gently stretched to eliminate wound expansion. The wounds are left open for the duration of the experiment. Application of the treatment is given topically for 5 consecutive days commencing on the day of wounding. Prior to treatment, wounds are gently cleansed with sterile saline and gauze sponges.

[1130] Wounds are visually examined and photographed at a fixed distance at the day of surgery and at two day intervals thereafter. Wound closure is determined by daily measurement on days 1-5 and on day 8. Wounds are measured horizontally and vertically using a calibrated Jameson caliper. Wounds are considered healed if granulation tissue is no longer visible and the wound is covered by a continuous epithelium.

[1131] An agonist or antagonist of the invention is administered using at a range different doses, from 4 mg to 500 mg per wound per day for 8 days in vehicle. Vehicle control groups received 50 mL of vehicle solution.

[1132] Animals are euthanized on day 8 with an intraperitoneal injection of sodium pentobarbital (300 mg/kg). The wounds and surrounding skin are then harvested for histology and immunohistochemistry. Tissue specimens are placed in 10% neutral buffered formalin in tissue cassettes between biopsy sponges for further processing.

[1133] Three groups of 10 animals each (5 diabetic and 5 non-diabetic controls) are evaluated: 1) Vehicle placebo control, 2) untreated group, and 3) treated group.

[1134] Wound closure is analyzed by measuring the area in the vertical and horizontal axis and obtaining the total square area of the wound. Contraction is then estimated by establishing the differences between the initial wound area (day 0) and that of post treatment (day 8). The wound area on day 1 is 64 mm², the corresponding size of the dermal punch. Calculations are made using the following formula:

[Open area on day 8]−[Open area on day 1]/[Open area on day 1]

[1135] Specimens are fixed in 10% buffered formalin and paraffin embedded blocks are sectioned perpendicular to the wound surface (5 mm) and cut using a Reichert-Jung microtome. Routine hematoxylin-eosin (H&E) staining is performed on cross-sections of bisected wounds. Histologic examination of the wounds are used to assess whether the healing process and the morphologic appearance of the repaired skin is altered by treatment with an agonist or antagonist of the invention. This assessment included verification of the presence of cell accumulation, inflammatory cells, capillaries, fibroblasts, re-epithelialization and epidermal maturity (Greenhalgh, D. G. et al., Am. J. Pathol. 136:1235 (1990)). A calibrated lens micrometer is used by a blinded observer.

[1136] Tissue sections are also stained immunohistochemically with a polyclonal rabbit anti-human keratin antibody using ABC Elite detection system. Human skin is used as a positive tissue control while non-immune IgG is used as a negative control. Keratinocyte growth is determined by evaluating the extent of reepithelialization of the wound using a calibrated lens micrometer.

[1137] Proliferating cell nuclear antigen/cyclin (PCNA) in skin specimens is demonstrated by using anti-PCNA antibody (1:50) with an ABC Elite detection system. Human colon cancer served as a positive tissue control and human brain tissue is used as a negative tissue control. Each specimen included a section with omission of the primary antibody and substitution with non-immune mouse IgG. Ranking of these sections is based on the extent of proliferation on a scale of 0-8, the lower side of the scale reflecting slight proliferation to the higher side reflecting intense proliferation.

[1138] Experimental data are analyzed using an unpaired t test. A p value of <0.05 is considered significant.

[1139] Steroid Impaired Rat Model

[1140] The inhibition of wound healing by steroids has been well documented in various in vitro and in vivo systems (Wahl, Glucocorticoids and Wound healing. In: Anti-Inflammatory Steroid Action: Basic and Clinical Aspects. 280-302 (1989); Wahlet al., J. Immunol. 115: 476-481 (1975); Werb et al., J. Exp. Med. 147:1684-1694 (1978)). Glucocorticoids retard wound healing by inhibiting angiogenesis, decreasing vascular permeability (Ebert et al., An. Intern. Med. 37:701-705 (1952)), fibroblast proliferation, and collagen synthesis (Beck et al., Growth Factors. 5: 295-304 (1991); Haynes et al., J. Clin. Invest. 61: 703-797 (1978)) and producing a transient reduction of circulating monocytes (Haynes et al., J. Clin. Invest. 61: 703-797 (1978); Wahl, “Glucocorticoids and wound healing”, In: Antiinflammatory Steroid Action: Basic and Clinical Aspects, Academic Press, New York, pp. 280-302 (1989)). The systemic administration of steroids to impaired wound healing is a well establish phenomenon in rats (Beck et al., Growth Factors. 5: 295-304 (1991); Haynes et al., J. Clin. Invest. 61: 703-797 (1978); Wahl, “Glucocorticoids and wound healing”, In: Antiinflammatory Steroid Action: Basic and Clinical Aspects, Academic Press, New York, pp. 280-302 (1989); Pierce et al., Proc. Natl. Acad. Sci. USA 86: 2229-2233 (1989)).

[1141] To demonstrate that an agonist or antagonist of the invention can accelerate the healing process, the effects of multiple topical applications of the agonist or antagonist on full thickness excisional skin wounds in rats in which healing has been impaired by the systemic administration of methylprednisolone is assessed.

[1142] Young adult male Sprague Dawley rats weighing 250-300 g (Charles River Laboratories) are used in this example. The animals are purchased at 8 weeks of age and are 9 weeks old at the beginning of the study. The healing response of rats is impaired by the systemic administration of methylprednisolone (17 mg/kg/rat intramuscularly) at the time of wounding. Animals are individually housed and received food and water ad libitum. All manipulations are performed using aseptic techniques. This study is conducted according to the rules and guidelines of Human Genome Sciences, Inc. Institutional Animal Care and Use Committee and the Guidelines for the Care and Use of Laboratory Animals.

[1143] The wounding protocol is followed according to section A, above. On the day of wounding, animals are anesthetized with an intramuscular injection of ketamine (50 mg/kg) and xylazine (5 mg/kg). The dorsal region of the animal is shaved and the skin washed with 70% ethanol and iodine solutions. The surgical area is dried with sterile gauze prior to wounding. An 8 mm full-thickness wound is created using a Keyes tissue punch. The wounds are left open for the duration of the experiment. Applications of the testing materials are given topically once a day for 7 consecutive days commencing on the day of wounding and subsequent to methylprednisolone administration. Prior to treatment, wounds are gently cleansed with sterile saline and gauze sponges.

[1144] Wounds are visually examined and photographed at a fixed distance at the day of wounding and at the end of treatment. Wound closure is determined by daily measurement on days 1-5 and on day 8. Wounds are measured horizontally and vertically using a calibrated Jameson caliper. Wounds are considered healed if granulation tissue is no longer visible and the wound is covered by a continuous epithelium.

[1145] The agonist or antagonist of the invention is administered using at a range different doses, from 4 mg to 500 mg per wound per day for 8 days in vehicle. Vehicle control groups received 50 mL of vehicle solution.

[1146] Animals are euthanized on day 8 with an intraperitoneal injection of sodium pentobarbital (300 mg/kg). The wounds and surrounding skin are then harvested for histology. Tissue specimens are placed in 10% neutral buffered formalin in tissue cassettes between biopsy sponges for further processing.

[1147] Three groups of 10 animals each (5 with methylprednisolone and 5 without glucocorticoid) are evaluated: 1) Untreated group 2) Vehicle placebo control 3) treated groups.

[1148] Wound closure is analyzed by measuring the area in the vertical and horizontal axis and obtaining the total area of the wound. Closure is then estimated by establishing the differences between the initial wound area (day 0) and that of post treatment (day 8). The wound area on day 1 is 64 mm², the corresponding size of the dermal punch. Calculations are made using the following formula:

[Open area on day 8]−[Open area on day 1]/[Open area on day 1]

[1149] Specimens are fixed in 10% buffered formalin and paraffin embedded blocks are sectioned perpendicular to the wound surface (5 mm) and cut using an Olympus microtome. Routine hematoxylin-eosin (H&E) staining is performed on cross-sections of bisected wounds. Histologic examination of the wounds allows assessment of whether the healing process and the morphologic appearance of the repaired skin is improved by treatment with an agonist or antagonist of the invention. A calibrated lens micrometer is used by a blinded observer to determine the distance of the wound gap.

[1150] Experimental data are analyzed using an unpaired t test. A p value of <0.05 is considered significant.

[1151] The studies described in this example tested activity of agonists or antagonists of the invention. However, one skilled in the art could easily modify the exemplified studies to test the activity of polynucleotides or polypeptides of the invention (e.g., gene therapy).

### Example 28

### Lymphadema Animal Model

[1152] The purpose of this experimental approach is to create an appropriate and consistent lymphedema model for testing the therapeutic effects of an agonist or antagonist of the invention in lymphangiogenesis and re-establishment of the lymphatic circulatory system in the rat hind limb. Effectiveness is measured by swelling volume of the affected limb, quantification of the amount of lymphatic vasculature, total blood plasma protein, and histopathology. Acute lymphedema is observed for 7-10 days. Perhaps more importantly, the chronic progress of the edema is followed for up to 3-4 weeks.

[1153] Prior to beginning surgery, blood sample is drawn for protein concentration analysis. Male rats weighing approximately 350 g are dosed with Pentobarbital. Subsequently, the right legs are shaved from knee to hip. The shaved area is swabbed with gauze soaked in 70% EtOH. Blood is drawn for serum total protein testing. Circumference and volumetric measurements are made prior to injecting dye into paws after marking 2 measurement levels (0.5 cm above heel, at mid-pt of dorsal paw). The intradermal dorsum of both right and left paws are injected with 0.05 ml of 1% Evan's Blue. Circumference and volumetric measurements are then made following injection of dye into paws.

[1154] Using the knee joint as a landmark, a mid-leg inguinal incision is made circumferentially allowing the femoral vessels to be located. Forceps and hemostats are used to dissect and separate the skin flaps. After locating the femoral vessels, the lymphatic vessel that runs along side and underneath the vessel(s) is located. The main lymphatic vessels in this area are then electrically coagulated or suture ligated.

[1155] Using a microscope, muscles in back of the leg (near the semitendinosis and adductors) are bluntly dissected. The popliteal lymph node is then located. The 2 proximal and 2 distal lymphatic vessels and distal blood supply of the popliteal node are then ligated by suturing. The popliteal lymph node, and any accompanying adipose tissue, is then removed by cutting connective tissues.

[1156] Care is taken to control any mild bleeding resulting from this procedure. After lymphatics are occluded, the skin flaps are sealed by using liquid skin (Vetbond) (A J Buck). The separated skin edges are sealed to the underlying muscle tissue while leaving a gap of 0.5 cm around the leg. Skin also may be anchored by suturing to underlying muscle when necessary.

[1157] To avoid infection, animals are housed individually with mesh (no bedding). Recovering animals are checked daily through the optimal edematous peak, which typically occurred by day 5-7. The plateau edematous peak are then observed. To evaluate the intensity of the lymphedema, the circumference and volumes of 2 designated places on each paw before operation and daily for 7 days are measured. The effect of plasma proteins on lymphedema is determined and whether protein analysis is a useful testing perimeter is also investigated. The weights of both control and edematous limbs are evaluated at 2 places. Analysis is performed in a blind manner.

[1158] Circumference Measurements:

[1159] Under brief gas anesthetic to prevent limb movement, a cloth tape is used to measure limb circumference. Measurements are done at the ankle bone and dorsal paw by 2 different people and those 2 readings are averaged. Readings are taken from both control and edematous limbs.

[1160] Volumetric Measurements:

[1161] On the day of surgery, animals are anesthetized with Pentobarbital and are tested prior to surgery. For daily volumetrics animals are under brief halothane anesthetic (rapid immobilization and quick recovery), and both legs are shaved and equally marked using waterproof marker on legs. Legs are first dipped in water, then dipped into instrument to each marked level, then measured by Buxco edema software(Chen/Victor). Data is recorded by one person, while the other is dipping the limb to marked area.

[1162] Blood-Plasma Protein Measurements:

[1163] Blood is drawn, spun, and serum separated prior to surgery and then at conclusion for total protein and Ca2⁺ comparison.

[1164] Limb Weight Comparison:

[1165] After drawing blood, the animal is prepared for tissue collection. The limbs are amputated using a quillitine, then both experimental and control legs are cut at the ligature and weighed. A second weighing is done as the tibio-cacaneal joint is disarticulated and the foot is weighed.

[1166] Histological Preparations:

[1167] The transverse muscle located behind the knee (popliteal) area is dissected and arranged in a metal mold, filled with freezeGel, dipped into cold methylbutane, placed into labeled sample bags at −80EC until sectioning. Upon sectioning, the muscle is observed under fluorescent microscopy for lymphatics.

[1168] The studies described in this example tested activity of agonists or antagonists of the invention. However, one skilled in the art could easily modify the exemplified studies to test the activity of polynucleotides or polypeptides of the invention (e.g., gene therapy).

### Example 29

### Suppression of TNF Alpha-Induced Adhesion Molecule Expression by a Agonist or Antagonist of the Invention

[1169] The recruitment of lymphocytes to areas of inflammation and angiogenesis involves specific receptor-ligand interactions between cell surface adhesion molecules (CAMs) on lymphocytes and the vascular endothelium. The adhesion process, in both normal and pathological settings, follows a multi-step cascade that involves intercellular adhesion molecule-1 (ICAM-1), vascular cell adhesion molecule-1 (VCAM-1), and endothelial leukocyte adhesion molecule-1 (E-selectin) expression on endothelial cells (EC). The expression of these molecules and others on the vascular endothelium determines the efficiency with which leukocytes may adhere to the local vasculature and extravasate into the local tissue during the development of an inflammatory response. The local concentration of cytokines and growth factor participate in the modulation of the expression of these CAMs.

[1170] Tumor necrosis factor alpha (TNF-a), a potent proinflammatory cytokine, is a stimulator of all three CAMs on endothelial cells and may be involved in a wide variety of inflammatory responses, often resulting in a pathological outcome.

[1171] The potential of an agonist or antagonist of the invention to mediate a suppression of TNF-a induced CAM expression can be examined. A modified ELISA assay which uses ECs as a solid phase absorbent is employed to measure the amount of CAM expression on TNF-a treated ECs when co-stimulated with a member of the FGF family of proteins.

[1172] To perform the experiment, human umbilical vein endothelial cell (HUVEC) cultures are obtained from pooled cord harvests and maintained in growth medium (EGM-2; Clonetics, San Diego, Calif.) supplemented with 10% FCS and 1% penicillin/streptomycin in a 37 degree C. humidified incubator containing 5% CO₂. HUVECs are seeded in 96-well plates at concentrations of 1×10⁴ cells/well in EGM medium at 37 degree C. for 18-24 hrs or until confluent. The monolayers are subsequently washed 3 times with a serum-free solution of RPMI-1640 supplemented with 100 U/ml penicillin and 100 mg/ml streptomycin, and treated with a given cytokine and/or growth factor(s) for 24 h at 37 degree C. Following incubation, the cells are then evaluated for CAM expression.

[1173] Human Umbilical Vein Endothelial cells (HUVECs) are grown in a standard 96 well plate to confluence. Growth medium is removed from the cells and replaced with 90 ul of 199 Medium (10% FBS). Samples for testing and positive or negative controls are added to the plate in triplicate (in 10 ul volumes). Plates are incubated at 37 degree C. for either 5 h (selectin and integrin expression) or 24 h (integrin expression only). Plates are aspirated to remove medium and 100 μl of 0.1% paraformaldehyde-PBS(with Ca++ and Mg++) is added to each well. Plates are held at 4° C. for 30 min.

[1174] Fixative is then removed from the wells and wells are washed 1× with PBS(+Ca,Mg)+0.5% BSA and drained. Do not allow the wells to dry. Add 10 μl of diluted primary antibody to the test and control wells. Anti-ICAM-1-Biotin, Anti-VCAM-1-Biotin and Anti-E-selectin-Biotin are used at a concentration of 10 μg/ml (1:10 dilution of 0.1 mg/ml stock antibody). Cells are incubated at 37° C. for 30 min. in a humidified environment. Wells are washed X3 with PBS(+Ca,Mg)+0.5% BSA.

[1175] Then add 20 μl of diluted ExtrAvidin-Alkaline Phosphotase (1:5,000 dilution) to each well and incubated at 37° C. for 30 min. Wells are washed X3 with PBS(+Ca,Mg)+0.5% BSA. 1 tablet of p-Nitrophenol Phosphate pNPP is dissolved in 5 ml of glycine buffer (pH 10.4). 100 μl of pNPP substrate in glycine buffer is added to each test well. Standard wells in triplicate are prepared from the working dilution of the ExtrAvidin-Alkaline Phosphotase in glycine buffer: 1:5,000 (10⁰)>₁₀^{-0.5}>10⁻¹>10^{-1.5}. 5 μl of each dilution is added to triplicate wells and the resulting AP content in each well is 5.50 ng, 1.74 ng, 0.55 ng, 0.18 ng. 100 μl of pNNP reagent must then be added to each of the standard wells. The plate must be incubated at 37° C. for 4 h. A volume of 50 μl of 3M NaOH is added to all wells. The results are quantified on a plate reader at 405 nm. The background subtraction option is used on blank wells filled with glycine buffer only. The template is set up to indicate the concentration of AP-conjugate in each standard well [5.50 ng; 1.74 ng; 0.55 ng; 0.18 ng]. Results are indicated as amount of bound AP-conjugate in each sample.

[1176] The studies described in this example tested activity of agonists or antagonists of the invention. However, one skilled in the art could easily modify the exemplified studies to test the activity of polynucleotides or polypeptides of the invention (e.g., gene therapy).

### Example 30

### Production of Polypeptide of the Invention for High-Throughput Screening Assays

[1177] The following protocol produces a supernatant containing polypeptide of the present invention to be tested. This supernatant can then be used in the Screening Assays described in Examples 32-41.

[1178] First, dilute Poly-D-Lysine (644 587 Boehringer-Mannheim) stock solution (1 mg/ml in PBS) 1:20 in PBS (w/o calcium or magnesium 17-516F Biowhittaker) for a working solution of 50 ug/ml. Add 200 ul of this solution to each well (24 well plates) and incubate at RT for 20 minutes. Be sure to distribute the solution over each well (note: a 12-channel pipetter may be used with tips on every other channel). Aspirate off the Poly-D-Lysine solution and rinse with 1 ml PBS (Phosphate Buffered Saline). The PBS should remain in the well until just prior to plating the cells and plates may be poly-lysine coated in advance for up to two weeks.

[1179] Plate 293T cells (do not carry cells past P+20) at 2×10⁵ cells/well in 0.5 ml DMEM(Dulbecco's Modified Eagle Medium)(with 4.5 G/L glucose and L-glutamine (12-604F Biowhittaker))/10% heat inactivated FBS(14-503F Biowhittaker)/1× Penstrep(17-602E Biowhittaker). Let the cells grow overnight.

[1180] The next day, mix together in a sterile solution basin: 300 ul Lipofectamine (18324-012 Gibco/BRL) and 5 ml Optimem I (31985070 Gibco/BRL)/96-well plate. With a small volume multi-channel pipetter, aliquot approximately 2 ug of an expression vector containing a polynucleotide insert, produced by the methods described in Examples 8-10, into an appropriately labeled 96-well round bottom plate. With a multi-channel pipetter, add 50 ul of the Lipofectamine/Optimem I mixture to each well. Pipette up and down gently to mix. Incubate at RT 15-45 minutes. After about 20 minutes, use a multi-channel pipetter to add 150 ul Optimem I to each well. As a control, one plate of vector DNA lacking an insert should be transfected with each set of transfections.

[1181] Preferably, the transfection should be performed by tag-teaming the following tasks. By tag-teaming, hands on time is cut in half, and the cells do not spend too much time on PBS. First, person A aspirates off the media from four 24-well plates of cells, and then person B rinses each well with 0.5-1 ml PBS. Person A then aspirates off PBS rinse, and person B, using a12-channel pipetter with tips on every other channel, adds the 200 ul of DNA/Lipofectamine/Optimem I complex to the odd wells first, then to the even wells, to each row on the 24-well plates. Incubate at 37 degree C. for 6 hours.

[1182] While cells are incubating, prepare appropriate media, either 1% BSA in DMEM with 1× penstrep, or HGS CHO-5 media (116.6 mg/L of CaCl₂ (anhyd); 0.00130 mg/L CuSO₄-5H₂O; 0.050 mg/L of Fe(NO₃)₃-9H₂O; 0.417 mg/L of FeSO₄-7H₂O; 311.80 mg/L of Kcl; 28.64 mg/L of MgCl₂; 48.84 mg/L of MgSO₄; 6995.50 mg/L of NaCl; 2400.0 mg/L of NaHCO₃; 62.50 mg/L of NaH₂PO₄-H₂O; 71.02 mg/L of Na₂HPO4; .4320 mg/L of ZnSO₄-7H₂O; 0.002 mg/L of Arachidonic Acid; 1.022 mg/L of Cholesterol; 0.070 mg/L of DL-alpha-Tocopherol-Acetate; 0.0520 mg/L of Linoleic Acid; 0.010 mg/L of Linolenic Acid; 0.010 mg/L of Myristic Acid; 0.010 mg/L of Oleic Acid; 0.010 mg/L of Palmitric Acid; 0.010 mg/L of Palmitic Acid; 100 mg/L of Pluronic F-68; 0.010 mg/L of Stearic Acid; 2.20 mg/L of Tween 80; 4551 mg/L of D-Glucose; 130.85 mg/ml of L-Alanine; 147.50 mg/ml of L-Arginine-HCL; 7.50 mg/ml of L-Asparagine-H₂O; 6.65 mg/ml of L-Aspartic Acid; 29.56 mg/ml of L-Cystine-2HCL-H₂O; 31.29 mg/ml of L-Cystine-2HCL; 7.35 mg/ml of L-Glutamic Acid; 365.0 mg/ml of L-Glutamine; 18.75 mg/ml of Glycine; 52.48 mg/ml of L-Histidine-HCL-H₂O; 106.97 mg/ml of L-Isoleucine; 111.45 mg/ml of L-Leucine; 163.75 mg/ml of L-Lysine HCL; 32.34 mg/ml of L-Methionine; 68.48 mg/ml of L-Phenylalainine; 40.0 mg/ml of L-Proline; 26.25 mg/ml of L-Serine; 101.05 mg/ml of L-Threonine; 19.22 mg/ml of L-Tryptophan; 91.79 mg/ml of L-Tryrosine-2Na-2H₂O; and 99.65 mg/ml of L-Valine; 0.0035 mg/L of Biotin; 3.24 mg/L of D-Ca Pantothenate; 11.78 mg/L of Choline Chloride; 4.65 mg/L of Folic Acid; 15.60 mg/L of i-Inositol; 3.02 mg/L of Niacinamide; 3.00 mg/L of Pyridoxal HCL; 0.031 mg/L of Pyridoxine HCL; 0.319 mg/L of Riboflavin; 3.17 mg/L of Thiamine HCL; 0.365 mg/L of Thymidine; 0.680 mg/L of Vitamin B₁₂; 25 mM of HEPES Buffer; 2.39 mg/L of Na Hypoxanthine; 0.105 mg/L of Lipoic Acid; 0.081 mg/L of Sodium Putrescine-2HCL; 55.0 mg/L of Sodium Pyruvate; 0.0067 mg/L of Sodium Selenite; 20 uM of Ethanolamine; 0.122 mg/L of Ferric Citrate; 41.70 mg/L of Methyl-B-Cyclodextrin complexed with Linoleic Acid; 33.33 mg/L of Methyl-B-Cyclodextrin complexed with Oleic Acid; 10 mg/L of Methyl-B-Cyclodextrin complexed with Retinal Acetate. Adjust osmolarity to 327 mOsm) with 2 mm glutamine and 1× penstrep. (BSA (81-068-3 Bayer) 100 gm dissolved in 1L DMEM for a 10% BSA stock solution). Filter the media and collect 50 ul for endotoxin assay in 15 ml polystyrene conical.

[1183] The transfection reaction is terminated, preferably by tag-teaming, at the end of the incubation period. Person A aspirates off the transfection media, while person B adds 1.5 ml appropriate media to each well. Incubate at 37 degree C. for 45 or 72 hours depending on the media used: 1% BSA for 45 hours or CHO-5 for 72 hours.

[1184] On day four, using a 300 ul multichannel pipetter, aliquot 600 ul in one 1 ml deep well plate and the remaining supernatant into a 2 ml deep well. The supernatants from each well can then be used in the assays described in Examples 32-39.

[1185] It is specifically understood that when activity is obtained in any of the assays described below using a supernatant, the activity originates from either the polypeptide of the present invention directly (e.g., as a secreted protein) or by polypeptide of the present invention inducing expression of other proteins, which are then secreted into the supernatant. Thus, the invention further provides a method of identifying the protein in the supernatant characterized by an activity in a particular assay.

### Example 31

### Construction of GAS Reporter Construct

[1186] One signal transduction pathway involved in the differentiation and proliferation of cells is called the Jaks-STATs pathway. Activated proteins in the Jaks-STATs pathway bind to gamma activation site “GAS” elements or interferon-sensitive responsive element (“ISRE”), located in the promoter of many genes. The binding of a protein to these elements alter the expression of the associated gene.

[1187] GAS and ISRE elements are recognized by a class of transcription factors called Signal Transducers and Activators of Transcription, or “STATs.” There are six members of the STATs family. Stat1 and Stat3 are present in many cell types, as is Stat2 (as response to IFN-alpha is widespread). Stat4 is more restricted and is not in many cell types though it has been found in T helper class I, cells after treatment with IL-12. Stat5 was originally called mammary growth factor, but has been found at higher concentrations in other cells including myeloid cells. It can be activated in tissue culture cells by many cytokines.

[1188] The STATs are activated to translocate from the cytoplasm to the nucleus upon tyrosine phosphorylation by a set of kinases known as the Janus Kinase (“Jaks”) family. Jaks represent a distinct family of soluble tyrosine kinases and include Tyk2, Jak1, Jak2, and Jak3. These kinases display significant sequence similarity and are generally catalytically inactive in resting cells.

[1189] The Jaks are activated by a wide range of receptors summarized in the Table below. (Adapted from review by Schidler and Damell, Ann. Rev. Biochem. 64:621-51 (1995).) A cytokine receptor family, capable of activating Jaks, is divided into two groups: (a) Class 1 includes receptors for IL-2, IL-3, IL-4, IL-6, IL-7, IL-9, IL-11, IL-12, IL-15, Epo, PRL, GH, G-CSF, GM-CSF, LIF, CNTF, and thrombopoietin; and (b) Class 2 includes IFN-a, IFN-g, and IL-10. The Class 1 receptors share a conserved cysteine motif (a set of four conserved cysteines and one tryptophan) and a WSXWS motif (a membrane proximal region encoding Trp-Ser-Xaa-Trp-Ser (SEQ ID NO:2)).

[1190] Thus, on binding of a ligand to a receptor, Jaks are activated, which in turn activate STATs, which then translocate and bind to GAS elements. This entire process is encompassed in the Jaks-STATs signal transduction pathway.

[1191] Therefore, activation of the Jaks-STATs pathway, reflected by the binding of the GAS or the ISRE element, can be used to indicate proteins involved in the proliferation and differentiation of cells. For example, growth factors and cytokines are known to activate the Jaks-STATs pathway. (See Table below.) Thus, by using GAS elements linked to reporter molecules, activators of the Jaks-STATs pathway can be identified.

| JAKs | | STATS | GAS(elements) or ISRE | | | | |
|---|---|---|---|---|---|---|---|
| Ligand | | tyk2 | Jak1 | Jak2 | Jak3 | | |
| IFN family | | | | | | | |
| IFN-a/B | + | + | − | − | 1,2,3 | | ISRE |
| IFN-g | | | + | + | − | 1 | GAS (IRF1 > Lys6 > IFP) |
| Il-10 | | + | ? | ? | − | 1,3 | |
| gp130 family | | | | | | | |
| IL-6(Pleiotrohic) | + | + | + | ? | 1,3 | | GAS (IRF1 > Lys6 > IFP) |
| Il-11(Pleiotrohic) | ? | + | ? | ? | 1,3 | | |
| OnM(Pleiotrohic) | ? | + | + | ? | 1,3 | | |
| LIF(Pleiotrohic) | ? | + | + | ? | 1,3 | | |
| CNTF(Pleiotrohic) | | −/+ | + | + | ? | 1,3 | |
| G-CSF(Pleiotrohic) | | ? | + | ? | ? | 1,3 | |
| IL-12(Pleiotrohic) | | + | − | + | + | 1,3 | |
| g-C family | | | | | | | |
| IL-2 (lymphocytes) | | − | + | − | + | 1,3,5 | GAS |
| IL-4 (lymph/myeloid) | | − | + | − | + | 6 | GAS (IRF1 = IFP >> Ly6)(IgH) |
| IL-7 (lymphocytes) | | − | + | − | + | 5 | GAS |
| IL-9 (lymphocytes) | | − | + | − | + | 5 | GAS |
| IL-13 (lymphocyte) | | − | + | ? | ? | 6 | GAS |
| IL-15 | | ? | + | ? | + | 5 | GAS |
| gp140 family | | | | | | | |
| IL-3 (myeloid) | | − | − | + | − | 5 | GAS (IRF1 > IFP >> Ly6) |
| IL-5 (myeloid) | | − | − | + | − | 5 | GAS |
| GM-CSF (myeloid) | | − | − | + | − | 5 | GAS |
| Growth hormone family | | | | | | | |
| GH | | ? | − | + | − | 5 | |
| PRL | | ? | +/− | + | − | 1,3,5 | |
| EPO | | ? | − | + | − | 5 | GAS(B − CAS > IRF1 = IFP >> Ly6) |
| Receptor Tyrosine Kinases | | | | | | | |
| EGF | | ? | + | + | − | 1,3 | GAS (IRF1) |
| PDGF | | ? | + | + | − | 1,3 | |
| CSF-1 | | ? | + | + | − | 1,3 | GAS (not IRF1) |

[1192] To construct a synthetic GAS containing promoter element, which is used in the Biological Assays described in Examples 32-33, a PCR based strategy is employed to generate a GAS-SV40 promoter sequence. The 5′ primer contains four tandem copies of the GAS binding site found in the IRFI promoter and previously demonstrated to bind STATs upon induction with a range of cytokines (Rothman et al., Immunity 1:457-468 (1994).), although other GAS or ISRE elements can be used instead. The 5′ primer also contains 18 bp of sequence complementary to the SV40 early promoter sequence and is flanked with an XhoI site. The sequence of the 5′ primer is:

(SEQ ID NO:3)

5′:GCGCCTCGAGATTTCCCCGAAATCTAGATTTCCCCGAAATGATTTCC
CCGAAATGATTTCCCCGAAATATCTGCCATCTCAATTAG:3′

[1193] The downstream primer is complementary to the SV40 promoter and is flanked with a Hind III site: 5′:GCGGCAAGCTTTTTGCAAAGCCTAGGC:3′ (SEQ ID NO: 4)

[1194] PCR amplification is performed using the SV40 promoter template present in the B-gal:promoter plasmid obtained from Clontech. The resulting PCR fragment is digested with XhoI/Hind III and subcloned into BLSK2-. (Stratagene.) Sequencing with forward and reverse primers confirms that the insert contains the following sequence:

(SEQ ID NO:5)

5′:CTCGAGATTTCCCCGAAATCTAGATTTCCCCGAAATGATTTCCCCGA
AATGATTTCCCCGAAATATCTGCCATCTCAATTAGTCAGCAACCATAGTC
CCGCCCCTAACTCCGCCCATCCCGCCCCTAACTCCGCCCAGTTCCGCCCA
TTCTCCGCCCCATGGCTGACTAATTTTTTTTATTTATGCAGAGGCCGAGG
CCGCCTCGGCCTCTGAGCTATTCCAGAAGTAGTGAGGAGGCTTTTTTGGA
GGCCTAGGCTTTTGCAAAAAGCTT:3′

[1195] With this GAS promoter element linked to the SV40 promoter, a GAS:SEAP2 reporter construct is next engineered. Here, the reporter molecule is a secreted alkaline phosphatase, or “SEAP.” Clearly, however, any reporter molecule can be used instead of SEAP, in this or in any of the other Examples. Well known reporter molecules that can be used instead of SEAP include chloramphenicol acetyltransferase (CAT), luciferase, alkaline phosphatase, B-galactosidase, green fluorescent protein (GFP), or any protein detectable by an antibody.

[1196] The above sequence confirmed synthetic GAS-SV40 promoter element is subcloned into the pSEAP-Promoter vector obtained from Clontech using HindIII and XhoI, effectively replacing the SV40 promoter with the amplified GAS:SV40 promoter element, to create the GAS-SEAP vector. However, this vector does not contain a neomycin resistance gene, and therefore, is not preferred for mammalian expression systems.

[1197] Thus, in order to generate mammalian stable cell lines expressing the GAS-SEAP reporter, the GAS-SEAP cassette is removed from the GAS-SEAP vector using SalI and NotI, and inserted into a backbone vector containing the neomycin resistance gene, such as pGFP-1 (Clontech), using these restriction sites in the multiple cloning site, to create the GAS-SEAP/Neo vector. Once this vector is transfected into mammalian cells, this vector can then be used as a reporter molecule for GAS binding as described in Examples 32-33.

[1198] Other constructs can be made using the above description and replacing GAS with a different promoter sequence. For example, construction of reporter molecules containing NFK-B and EGR promoter sequences are described in Examples 34 and 35. However, many other promoters can be substituted using the protocols described in these Examples. For instance, SRE, IL-2, NFAT, or Osteocalcin promoters can be substituted, alone or in combination (e.g., GASINF-KB/EGR, GAS/NF-KB, Il-2/NFAT, or NF-KB/GAS). Similarly, other cell lines can be used to test reporter construct activity, such as HELA (epithelial), HUVEC (endothelial), Reh (B-cell), Saos-2 (osteoblast), HUVAC (aortic), or Cardiomyocyte.

### Example 32

### High-Throughput Screening Assay for T-Cell Activity

[1199] The following protocol is used to assess T-cell activity by identifying factors, and determining whether supemate containing a polypeptide of the invention proliferates and/or differentiates T-cells. T-cell activity is assessed using the GAS/SEAP/Neo construct produced in Example 31. Thus, factors that increase SEAP activity indicate the ability to activate the Jaks-STATS signal transduction pathway. The T-cell used in this assay is Jurkat T-cells (ATCC Accession No. TIB-152), although Molt-3 cells (ATCC Accession No. CRL-1552) and Molt-4 cells (ATCC Accession No. CRL-1582) cells can also be used.

[1200] Jurkat T-cells are lymphoblastic CD4⁺ Th1 helper cells. In order to generate stable cell lines, approximately 2 million Jurkat cells are transfected with the GAS-SEAP/neo vector using DMRIE-C (Life Technologies)(transfection procedure described below). The transfected cells are seeded to a density of approximately 20,000 cells per well and transfectants resistant to 1 mg/ml genticin selected. Resistant colonies are expanded and then tested for their response to increasing concentrations of interferon gamma. The dose response of a selected clone is demonstrated.

[1201] Specifically, the following protocol will yield sufficient cells for 75 wells containing 200 ul of cells. Thus, it is either scaled up, or performed in multiple to generate sufficient cells for multiple 96 well plates. Jurkat cells are maintained in RPMI+10% serum with 1% Pen-Strep. Combine 2.5 mls of OPTI-MEM (Life Technologies) with 10 ug of plasmid DNA in a T25 flask. Add 2.5 ml OPTI-MEM containing 50 ul of DMRIE-C and incubate at room temperature for 15-45 mins.

[1202] During the incubation period, count cell concentration, spin down the required number of cells (10⁷ per transfection), and resuspend in OPTI-MEM to a final concentration of 10⁷ cells/ml. Then add 1 ml of 1×10⁷ cells in OPTI-MEM to T25 flask and incubate at 37 degree C. for 6 hrs. After the incubation, add 10 ml of RPMI+15% serum.

[1203] The Jurkat:GAS-SEAP stable reporter lines are maintained in RPMI+10% serum, 1 mg/ml Genticin, and 1% Pen-Strep. These cells are treated with supernatants containing polypeptide of the present invention or polypeptide of the present invention induced polypeptides as produced by the protocol described in Example 30.

[1204] On the day of treatment with the supernatant, the cells should be washed and resuspended in fresh RPMI+10% serum to a density of 500,000 cells per ml. The exact number of cells required will depend on the number of supernatants being screened. For one 96 well plate, approximately 10 million cells (for 10 plates, 100 million cells) are required.

[1205] Transfer the cells to a triangular reservoir boat, in order to dispense the cells into a 96 well dish, using a 12 channel pipette. Using a 12 channel pipette, transfer 200 ul of cells into each well (therefore adding 100, 000 cells per well).

[1206] After all the plates have been seeded, 50 ul of the supernatants are transferred directly from the 96 well plate containing the supernatants into each well using a 12 channel pipette. In addition, a dose of exogenous interferon gamma (0.1, 1.0, 10 ng) is added to wells H9, H10, and H11 to serve as additional positive controls for the assay.

[1207] The 96 well dishes containing Jurkat cells treated with supernatants are placed in an incubator for 48 hrs (note: this time is variable between 48-72 hrs). 35 ul samples from each well are then transferred to an opaque 96 well plate using a 12 channel pipette. The opaque plates should be covered (using sellophene covers) and stored at −20 degree C. until SEAP assays are performed according to Example 36. The plates containing the remaining treated cells are placed at 4 degree C. and serve as a source of material for repeating the assay on a specific well if desired.

[1208] As a positive control, 100 Unit/ml interferon gamma can be used which is known to activate Jurkat T cells. Over 30 fold induction is typically observed in the positive control wells.

[1209] The above protocol may be used in the generation of both transient, as well as stable, transfected cells, which would be apparent to those of skill in the art.

### Example 33

### High-Throughput Screening Assay Identifying Myeloid Activity

[1210] The following protocol is used to assess myeloid activity of polypeptide of the present invention by determining whether polypeptide of the present invention proliferates and/or differentiates myeloid cells. Myeloid cell activity is assessed using the GAS/SEAP/Neo construct produced in Example 31. Thus, factors that increase SEAP activity indicate the ability to activate the Jaks-STATS signal transduction pathway. The myeloid cell used in this assay is U937, a pre-monocyte cell line, although TF-1, HL60, or KG1 can be used.

[1211] To transiently transfect U937 cells with the GAS/SEAP/Neo construct produced in Example 31, a DEAE-Dextran method (Kharbanda et. al., 1994, Cell Growth 7 & Differentiation, 5:259-265) is used. First, harvest 2×10 U937 cells and wash with PBS. The U937 cells are usually grown in RPMI 1640 medium containing 10% heat-inactivated fetal bovine serum (FBS) supplemented with 100 units/ml penicillin and 100 mg/ml streptomycin.

[1212] Next, suspend the cells in 1 ml of 20 mM Tris-HCl (pH 7.4) buffer containing 0.5 mg/ml DEAE-Dextran, 8 ug GAS-SEAP2 plasmid DNA, 140 mM NaCl, 5 mM KCl, 375 uM Na₂HPO₄₀-7H₂O, 1 mM MgCl₂, and 675 uM CaCl₂. Incubate at 37 degrees C. for 45 min.

[1213] Wash the cells with RPMI 1640 medium containing 10% FBS and then resuspend in 10 ml complete medium and incubate at 37 degree C. for 36 hr.

[1214] The GAS-SEAP/U937 stable cells are obtained by growing the cells in 400 ug/ml G418. The G418-free medium is used for routine growth but every one to two months, the cells should be re-grown in 400 ug/ml G418 for couple of passages.

[1215] These cells are tested by harvesting 1×10⁸ cells (this is enough for ten 96-well plates assay) and wash with PBS. Suspend the cells in 200 ml above described growth medium, with a final density of 5×10⁵ cells/ml. Plate 200 ul cells per well in the 96-well plate (or 1×10⁵cells/well).

[1216] Add 50 ul of the supernatant prepared by the protocol described in Example 30. Incubate at 37 degee C. for 48 to 72 hr. As a positive control, 100 Unit/ml interferon gamma can be used which is known to activate U937 cells. Over 30 fold induction is typically observed in the positive control wells. SEAP assay the supernatant according to the protocol described in Example 36.

### Example 34

### High-Throughput Screening Assay Identifying Neuronal Activity

[1217] When cells undergo differentiation and proliferation, a group of genes are activated through many different signal transduction pathways. One of these genes, EGR1 (early growth response gene 1), is induced in various tissues and cell types upon activation. The promoter of EGR1 is responsible for such induction. Using the EGR1 promoter linked to reporter molecules, activation of cells can be assessed by polypeptide of the present invention.

[1218] Particularly, the following protocol is used to assess neuronal activity in PC12 cell lines. PC12 cells (rat phenochromocytoma cells) are known to proliferate and/or differentiate by activation with a number of mitogens, such as TPA (tetradecanoyl phorbol acetate), NGF (nerve growth factor), and EGF (epidermal growth factor). The EGR1 gene expression is activated during this treatment. Thus, by stably transfecting PC₁₂ cells with a construct containing an EGR promoter linked to SEAP reporter, activation of PC12 cells by polypeptide of the present invention can be assessed.

[1219] The EGR/SEAP reporter construct can be assembled by the following protocol. The EGR-1 promoter sequence (−633 to +1)(Sakamoto K et al., Oncogene 6:867-871 (1991)) can be PCR amplified from human genomic DNA using the following primers:

(SEQ ID NO:6)

5′ GCGCTCGAGGGATGACAGCGATAGAACCCCGG-3′

(SEQ ID NO:7)

5′ GCGAAGCTTCGCGACTCCCCGGATCCGCCTC-3′

[1220] Using the GAS:SEAP/Neo vector produced in Example 31, EGR1 amplified product can then be inserted into this vector. Linearize the GAS:SEAP/Neo vector using restriction enzymes XhoI/HindIII, removing the GAS/SV40 stuffer. Restrict the EGR1 amplified product with these same enzymes. Ligate the vector and the EGR1 promoter.

[1221] To prepare 96 well-plates for cell culture, two mls of a coating solution (1:30 dilution of collagen type I (Upstate Biotech Inc. Cat#08-115) in 30% ethanol (filter sterilized)) is added per one 10 cm plate or 50 ml per well of the 96-well plate, and allowed to air dry for 2 hr.

[1222] PC12 cells are routinely grown in RPMI-1640 medium (Bio Whittaker) containing 10% horse serum (JRH BIOSCIENCES, Cat. #12449-78P), 5% heat-inactivated fetal bovine serum (FBS) supplemented with 100 units/ml penicillin and 100 ug/ml streptomycin on a precoated 10 cm tissue culture dish. One to four split is done every three to four days. Cells are removed from the plates by scraping and resuspended with pipetting up and down for more than 15 times.

[1223] Transfect the EGR/SEAP/Neo construct into PC12 using the Lipofectamine protocol described in Example 30. EGR-SEAP/PC12 stable cells are obtained by growing the cells in 300 ug/ml G418. The G418-free medium is used for routine growth but every one to two months, the cells should be re-grown in 300 ug/ml G418 for couple of passages.

[1224] To assay for neuronal activity, a 10 cm plate with cells around 70 to 80% confluent is screened by removing the old medium. Wash the cells once with PBS (Phosphate buffered saline). Then starve the cells in low serum medium (RPMI-1640 containing 1% horse serum and 0.5% FBS with antibiotics) overnight.

[1225] The next morning, remove the medium and wash the cells with PBS. Scrape off the cells from the plate, suspend the cells well in 2 ml low serum medium. Count the cell number and add more low serum medium to reach final cell density as 5×10⁵ cells/ml.

[1226] Add 200 ul of the cell suspension to each well of 96-well plate (equivalent to 1×10⁵ cells/well). Add 50 ul supernatant produced by Example 30, 37 degree C. for 48 to 72 hr. As a positive control, a growth factor known to activate PC12 cells through EGR can be used, such as 50 ng/ul of Neuronal Growth Factor (NGF). Over fifty-fold induction of SEAP is typically seen in the positive control wells. SEAP assay the supernatant according to Example 36.

### Example 35

### High-Throughput Screening Assay for T-Cell Activity

[1227] NF-KB (Nuclear Factor KB) is a transcription factor activated by a wide variety of agents including the inflammatory cytokines IL-1 and TNF, CD30 and CD40, lymphotoxin-alpha and lymphotoxin-beta, by exposure to LPS or thrombin, and by expression of certain viral gene products. As a transcription factor, NF-KB regulates the expression of genes involved in immune cell activation, control of apoptosis (NF-KB appears to shield cells from apoptosis), B and T-cell development, anti-viral and antimicrobial responses, and multiple stress responses.

[1228] In non-stimulated conditions, NF-KB is retained in the cytoplasm with I-KB (Inhibitor KB). However, upon stimulation, I-KB is phosphorylated and degraded, causing NF-KB to shuttle to the nucleus, thereby activating transcription of target genes. Target genes activated by NF-KB include IL-2, IL-6, GM-CSF, ICAM-1 and class 1 MHC.

[1229] Due to its central role and ability to respond to a range of stimuli, reporter constructs utilizing the NF-KB promoter element are used to screen the supernatants produced in Example 30. Activators or inhibitors of NF-KB would be useful in treating, preventing, and/or diagnosing diseases. For example, inhibitors of NF-KB could be used to treat those diseases related to the acute or chronic activation of NF-KB, such as rheumatoid arthritis.

[1230] To construct a vector containing the NF-KB promoter element, a PCR based strategy is employed. The upstream primer contains four tandem copies of the NF-KB binding site (GGGGACTTTCCC) (SEQ ID NO: 8), 18 bp of sequence complementary to the 5′ end of the SV40 early promoter sequence, and is flanked with an XhoI site:

(SEQ ID NO:9)

5′:GCGGCCTCGAGGGGACTTTCCCGGGGACTTTCCGGGGACTTTCCGGG
ACTTTCCATCCTGCCATCTCAATTAG:3′

[1231] The downstream primer is complementary to the 3′ end of the SV40 promoter and is flanked with a Hind III site:

[1232] 5′:GCGGCAAGCTTTTTGCAAAGCCTAGGC:3′ (SEQ ID NO: 4)

[1233] PCR amplification is performed using the SV40 promoter template present in the pB-gal:promoter plasmid obtained from Clontech. The resulting PCR fragment is digested with XhoI and Hind III and subcloned into BLSK2-. (Stratagene) Sequencing with the T7 and T3 primers confirms the insert contains the following sequence:

(SEQ ID NO:10)

5′:CTCGAGGGGACTTTCCCGGGGACTTTCCGGGGACTTTCCGGGACTTT
CCATCTGCCATCTCAATTAGTCAGCAACCATAGTCCCGCCCCTAACTCCG
CCCATCCCGCCCCTAACTCCGCCCAGTTCCGCCCATTCTCCGCCCCATGG
CTGACTAATTTTTTTTATTTATGCAGAGGCCGAGGCCGCCTCGGCCTCTG
AGCTATTCCAGAAGTAGTGAGGAGGCTTTTTTGGAGGCCTAGGCTTTTGC
AAAAAGCTT:3′

[1234] Next, replace the SV40 minimal promoter element present in the pSEAP2-promoter plasmid (Clontech) with this NF-KB/SV40 fragment using XhoI and HindIII. However, this vector does not contain a neomycin resistance gene, and therefore, is not preferred for mammalian expression systems.

[1235] In order to generate stable mammalian cell lines, the NF-KB/SV40/SEAP cassette is removed from the above NF-KB/SEAP vector using restriction enzymes SalI and NotI, and inserted into a vector containing neomycin resistance. Particularly, the NF-KB/SV40/SEAP cassette was inserted into pGFP-1 (Clontech), replacing the GFP gene, after restricting pGFP-1 with SalI and NotI.

[1236] Once NF-KB/SV40/SEAP/Neo vector is created, stable Jurkat T-cells are created and maintained according to the protocol described in Example 32. Similarly, the method for assaying supernatants with these stable Jurkat T-cells is also described in Example 32. As a positive control, exogenous TNF alpha (0.1,1, 10 ng) is added to wells H9, H10, and H11, with a 5-10 fold activation typically observed.

### Example 36

### Assay for SEAP Activity

[1237] As a reporter molecule for the assays described in Examples 32-35, SEAP activity is assayed using the Tropix Phospho-light Kit (Cat. BP-400) according to the following general procedure. The Tropix Phospho-light Kit supplies the Dilution, Assay, and Reaction Buffers used below.

[1238] Prime a dispenser with the 2.5× Dilution Buffer and dispense 15 ul of 2.5×dilution buffer into Optiplates containing 35 ul of a supernatant. Seal the plates with a plastic sealer and incubate at 65 degree C. for 30 min. Separate the Optiplates to avoid uneven heating.

[1239] Cool the samples to room temperature for 15 minutes. Empty the dispenser and prime with the Assay Buffer. Add 50 ml Assay Buffer and incubate at room temperature 5 min. Empty the dispenser and prime with the Reaction Buffer (see the Table below). Add 50 ul Reaction Buffer and incubate at room temperature for 20 minutes. Since the intensity of the chemiluminescent signal is time dependent, and it takes about 10 minutes to read 5 plates on a luminometer, thus one should treat 5 plates at each time and start the second set 10 minutes later.

[1240] Read the relative light unit in the luminometer. Set H12 as blank, and print the results. An increase in chemiluminescence indicates reporter activity.

Reaction Buffer Formulation:

| # of plates | Rxn buffer diluent (ml) | CSPD (ml) |
|---|---|---|
| 10 | 60 | 3 |
| 11 | 65 | 3.25 |
| 12 | 70 | 3.5 |
| 13 | 75 | 3.75 |
| 14 | 80 | 4 |
| 15 | 85 | 4.25 |
| 16 | 90 | 4.5 |
| 17 | 95 | 4.75 |
| 18 | 100 | 5 |
| 19 | 105 | 5.25 |
| 20 | 110 | 5.5 |
| 21 | 115 | 5.75 |
| 22 | 120 | 6 |
| 23 | 125 | 6.25 |
| 24 | 130 | 6.5 |
| 25 | 135 | 6.75 |
| 26 | 140 | 7 |
| 27 | 145 | 7.25 |
| 28 | 150 | 7.5 |
| 29 | 155 | 7.75 |
| 30 | 160 | 8 |
| 31 | 165 | 8.25 |
| 32 | 170 | 8.5 |
| 33 | 175 | 8.75 |
| 34 | 180 | 9 |
| 35 | 185 | 9.25 |
| 36 | 190 | 9.5 |
| 37 | 195 | 9.75 |
| 38 | 200 | 10 |
| 39 | 205 | 10.25 |
| 40 | 210 | 10.5 |
| 41 | 215 | 10.75 |
| 42 | 220 | 11 |
| 43 | 225 | 11.25 |
| 44 | 230 | 11.5 |
| 45 | 235 | 11.75 |
| 46 | 240 | 12 |
| 47 | 245 | 12.25 |
| 48 | 250 | 12.5 |
| 49 | 255 | 12.75 |
| 50 | 260 | 13 |

### Example 37

### High-Throughput Screening Assay Identifying Changes in Small Molecule Concentration and Membrane Permeability

[1241] Binding of a ligand to a receptor is known to alter intracellular levels of small molecules, such as calcium, potassium, sodium, and pH, as well as alter membrane potential. These alterations can be measured in an assay to identify supernatants which bind to receptors of a particular cell. Although the following protocol describes an assay for calcium, this protocol can easily be modified to detect changes in potassium, sodium, pH, membrane potential, or any other small molecule which is detectable by a fluorescent probe.

[1242] The following assay uses Fluorometric Imaging Plate Reader (“FLIPR”) to measure changes in fluorescent molecules (Molecular Probes) that bind small molecules. Clearly, any fluorescent molecule detecting a small molecule can be used instead of the calcium fluorescent molecule, fluo-4 (Molecular Probes, Inc.; catalog no. F-14202), used here.

[1243] For adherent cells, seed the cells at 10,000-20,000 cells/well in a Co-star black 96-well plate with clear bottom. The plate is incubated in a CO₂ incubator for 20 hours. The adherent cells are washed two times in Biotek washer with 200 ul of HBSS (Hank's Balanced Salt Solution) leaving 100 ul of buffer after the final wash.

[1244] A stock solution of 1 mg/ml fluo-4 is made in 10% pluronic acid DMSO. To load the cells with fluo-4, 50 ul of 12 ug/ml fluo-4 is added to each well. The plate is incubated at 37 degrees C. in a CO₂ incubator for 60 min. The plate is washed four times in the Biotek washer with HBSS leaving 100 ul of buffer.

[1245] For non-adherent cells, the cells are spun down from culture media. Cells are re-suspended to 2-5×10⁶ cells/ml with HBSS in a 50-ml conical tube. 4 ul of 1 mg/ml fluo-4 solution in 10% pluronic acid DMSO is added to each ml of cell suspension. The tube is then placed in a 37 degrees C. water bath for 30-60 min. The cells are washed twice with HBSS, resuspended to 1×10⁶ cells/ml, and dispensed into a microplate, 100 ul/well. The plate is centrifuged at 1000 rpm for 5 min. The plate is then washed once in Denley Cell Wash with 200 ul, followed by an aspiration step to 100 ul final volume.

[1246] For a non-cell based assay, each well contains a fluorescent molecule, such as fluo-4. The supernatant is added to the well, and a change in fluorescence is detected.

[1247] To measure the fluorescence of intracellular calcium, the FLIPR is set for the following parameters: (1) System gain is 300-800 mW; (2) Exposure time is 0.4 second; (3) Camera F/stop is F/2; (4) Excitation is 488 nm; (5) Emission is 530 nm; and (6) Sample addition is 50 ul. Increased emission at 530 μm indicates an extracellular signaling event caused by the a molecule, either polypeptide of the present invention or a molecule induced by polypeptide of the present invention, which has resulted in an increase in the intracellular Ca++concentration.

### Example 38

### High-Throughput Screening Assay Identifying Tyrosine Kinase Activity

[1248] The Protein Tyrosine Kinases (PTK) represent a diverse group of transmembrane and cytoplasmic kinases. Within the Receptor Protein Tyrosine Kinase RPTK) group are receptors for a range of mitogenic and metabolic growth factors including the PDGF, FGF, EGF, NGF, HGF and Insulin receptor subfamilies. In addition there are a large family of RPTKs for which the corresponding ligand is unknown. Ligands for RPTKs include mainly secreted small proteins, but also membrane-bound and extracellular matrix proteins.

[1249] Activation of RPTK by ligands involves ligand-mediated receptor dimerization, resulting in transphosphorylation of the receptor subunits and activation of the cytoplasmic tyrosine kinases. The cytoplasmic tyrosine kinases include receptor associated tyrosine kinases of the src-family (e.g., src, yes, Ick, lyn, fyn) and non-receptor linked and cytosolic protein tyrosine kinases, such as the Jak family, members of which mediate signal transduction triggered by the cytokine superfamily of receptors (e.g., the Interleukins, Interferons, GM-CSF, and Leptin).

[1250] Because of the wide range of known factors capable of stimulating tyrosine kinase activity, identifying whether polypeptide of the present invention or a molecule induced by polypeptide of the present invention is capable of activating tyrosine kinase signal transduction pathways is of interest. Therefore, the following protocol is designed to identify such molecules capable of activating the tyrosine kinase signal transduction pathways.

[1251] Seed target cells (e.g., primary keratinocytes) at a density of approximately 25,000 cells per well in a 96 well Loprodyne Silent Screen Plates purchased from Nalge Nunc (Naperville, Ill.). The plates are sterilized with two 30 minute rinses with 100% ethanol, rinsed with water and dried overnight. Some plates are coated for 2 hr with 100 ml of cell culture grade type I collagen (50 mg/ml), gelatin (2%) or polylysine (50 mg/ml), all of which can be purchased from Sigma Chemicals (St. Louis, Mo.) or 10% Matrigel purchased from Becton Dickinson (Bedford, Mass.), or calf serum, rinsed with PBS and stored at 4 degree C. Cell growth on these plates is assayed by seeding 5,000 cells/well in growth medium and indirect quantitation of cell number through use of alamarBlue as described by the manufacturer Alamar Biosciences, Inc. (Sacramento, Calif.) after 48 hr. Falcon plate covers #3071 from Becton Dickinson (Bedford, Mass.) are used to cover the Loprodyne Silent Screen Plates. Falcon Microtest III cell culture plates can also be used in some proliferation experiments.

[1252] To prepare extracts, A431 cells are seeded onto the nylon membranes of Loprodyne plates (20,000/200 ml/well) and cultured overnight in complete medium. Cells are quiesced by incubation in serum-free basal medium for 24 hr. After 5-20 minutes treatment with EGF (60 ng/ml) or 50 ul of the supernatant produced in Example 30, the medium was removed and 100 ml of extraction buffer ((20 mM HEPES pH 7.5, 0.15 M NaCl, 1% Triton X-100, 0.1% SDS, 2 mM Na3VO4, 2 mM Na4P2O7 and a cocktail of protease inhibitors (#1836170) obtained from Boeheringer Mannheim (Indianapolis, Ind.)) is added to each well and the plate is shaken on a rotating shaker for 5 minutes at 4° C. The plate is then placed in a vacuum transfer manifold and the extract filtered through the 0.45 mm membrane bottoms of each well using house vacuum. Extracts are collected in a 96-well catch/assay plate in the bottom of the vacuum manifold and immediately placed on ice. To obtain extracts clarified by centrifugation, the content of each well, after detergent solubilization for 5 minutes, is removed and centrifuged for 15 minutes at 4 degree C. at 16,000× g.

[1253] Test the filtered extracts for levels of tyrosine kinase activity. Although many methods of detecting tyrosine kinase activity are known, one method is described here.

[1254] Generally, the tyrosine kinase activity of a supernatant is evaluated by determining its ability to phosphorylate a tyrosine residue on a specific substrate (a biotinylated peptide). Biotinylated peptides that can be used for this purpose include PSK1 (corresponding to amino acids 6-20 of the cell division kinase cdc2-p34) and PSK2 (corresponding to amino acids 1-17 of gastrin). Both peptides are substrates for a range of tyrosine kinases and are available from Boehringer Mannheim.

[1255] The tyrosine kinase reaction is set up by adding the following components in order. First, add 10 ul of 5 uM Biotinylated Peptide, then 10 ul ATP/Mg₂+(5 mM ATP/50 mM MgCl₂), then 10 ul of 5× Assay Buffer (40 mM imidazole hydrochloride, pH 7.3, 40 mM beta-glycerophosphate, 1 mM EGTA, 100 mM MgCl₂, 5 mM MnCl₂, 0.5 mg/ml BSA), then 5 ul of Sodium Vanadate (1 mM), and then 5 ul of water. Mix the components gently and preincubate the reaction mix at 30 degree C. for 2 min. Initial the reaction by adding 10 ul of the control enzyme or the filtered supernatant.

[1256] The tyrosine kinase assay reaction is then terminated by adding 10 ul of 120 mm EDTA and place the reactions on ice.

[1257] Tyrosine kinase activity is determined by transferring 50 ul aliquot of reaction mixture to a microtiter plate (MTP) module and incubating at 37 degree C. for 20 min. This allows the streptavidin coated 96 well plate to associate with the biotinylated peptide. Wash the MTP module with 300 ul/well of PBS four times. Next add 75 ul of anti-phospotyrosine antibody conjugated to horse radish peroxidase (anti-P-Tyr-POD(0.5 u/ml)) to each well and incubate at 37 degree C. for one hour. Wash the well as above.

[1258] Next add 100 ul of peroxidase substrate solution (Boehringer Mannheim) and incubate at room temperature for at least 5 mins (up to 30 min). Measure the absorbance of the sample at 405 nm by using ELISA reader. The level of bound peroxidase activity is quantitated using an ELISA reader and reflects the level of tyrosine kinase activity.

### Example 39

### High-Throughput Screening Assay Identifying Phosphorylation Activity

[1259] As a potential alternative and/or complement to the assay of protein tyrosine kinase activity described in Example 38, an assay which detects activation (phosphorylation) of major intracellular signal transduction intermediates can also be used. For example, as described below one particular assay can detect tyrosine phosphorylation of the Erk-1 and Erk-2 kinases. However, phosphorylation of other molecules, such as Raf, JNK, p38 MAP, Map kinase kinase (MEK), MEK kinase, Src, Muscle specific kinase (MuSK), IRAK, Tec, and Janus, as well as any other phosphoserine, phosphotyrosine, or phosphothreonine molecule, can be detected by substituting these molecules for Erk-1 or Erk-2 in the following assay.

[1260] Specifically, assay plates are made by coating the wells of a 96-well ELISA plate with 0.1 ml of protein G (lug/ml) for 2 hr at room temp, (RT). The plates are then rinsed with PBS and blocked with 3% BSA/PBS for 1 hr at RT. The protein G plates are then treated with 2 commercial monoclonal antibodies (100 ng/well) against Erk-1 and Erk-2 (1 hr at RT) (Santa Cruz Biotechnology). (To detect other molecules, this step can easily be modified by substituting a monoclonal antibody detecting any of the above described molecules.) After 3-5 rinses with PBS, the plates are stored at 4 degree C. until use.

[1261] A431 cells are seeded at 20,000/well in a 96-well Loprodyne filterplate and cultured overnight in growth medium. The cells are then starved for 48 hr in basal medium (DMEM) and then treated with EGF (6 ng/well) or 50 ul of the supernatants obtained in Example 30 for 5-20 minutes. The cells are then solubilized and extracts filtered directly into the assay plate.

[1262] After incubation with the extract for 1 hr at RT, the wells are again rinsed. As a positive control, a commercial preparation of MAP kinase (10 ng/well) is used in place of A431 extract. Plates are then treated with a commercial polyclonal (rabbit) antibody (lug/ml) which specifically recognizes the phosphorylated epitope of the Erk-1 and Erk-2 kinases (1 hr at RT). This antibody is biotinylated by standard procedures. The bound polyclonal antibody is then quantitated by successive incubations with Europium-streptavidin and Europium fluorescence enhancing reagent in the Wallac DELFIA instrument (time-resolved fluorescence). An increased fluorescent signal over background indicates a phosphorylation by polypeptide of the present invention or a molecule induced by polypeptide of the present invention.

### Example 40

### Assay for the Stimulation of Bone Marrow CD34+ Cell Proliferation

[1263] This assay is based on the ability of human CD34+ to proliferate in the presence of hematopoietic growth factors and evaluates the ability of isolated polypeptides expressed in mammalian cells to stimulate proliferation of CD34+ cells.

[1264] It has been previously shown that most mature precursors will respond to only a single signal. More immature precursors require at least two signals to respond. Therefore, to test the effect of polypeptides on hematopoietic activity of a wide range of progenitor cells, the assay contains a given polypeptide in the presence or absence of other hematopoietic growth factors. Isolated cells are cultured for 5 days in the presence of Stem Cell Factor (SCF) in combination with tested sample. SCF alone has a very limited effect on the proliferation of bone marrow (BM) cells, acting in such conditions only as a “survival” factor. However, combined with any factor exhibiting stimulatory effect on these cells (e.g., IL-3), SCF will cause a synergistic effect. Therefore, if the tested polypeptide has a stimulatory effect on hematopoietic progenitors, such activity can be easily detected. Since normal BM cells have a low level of cycling cells, it is likely that any inhibitory effect of a given polypeptide, or agonists or antagonists thereof, might not be detected. Accordingly, assays for an inhibitory effect on progenitors is preferably tested in cells that are first subjected to in vitro stimulation with SCF+IL+3, and then contacted with the compound that is being evaluated for inhibition of such induced proliferation.

[1265] Briefly, CD34+ cells are isolated using methods known in the art. The cells are thawed and resuspended in medium (QBSF 60 serum-free medium with 1% L-glutamine (500 ml) Quality Biological, Inc., Gaithersburg, Md. Cat# 160-204-101). After several gentle centrifugation steps at 200× g, cells are allowed to rest for one hour. The cell count is adjusted to 2.5×10⁵ cells/ml. During this time, 100 μl of sterile water is added to the peripheral wells of a 96-well plate. The cytokines that can be tested with a given polypeptide in this assay is rhSCF (R&D Systems, Minneapolis, Minn., Cat#255-SC) at 50 ng/ml alone and in combination with rhSCF and rhIL-3 (R&D Systems, Minneapolis, Minn., Cat#203-ML) at 30 ng/ml. After one hour, 10 μl of prepared cytokines, 50 μl of the supernatants prepared in Example 30 (supernatants at 1:2 dilution 50 μl) and 20 μl of diluted cells are added to the media which is already present in the wells to allow for a final total volume of 100 μl. The plates are then placed in a 37° C./5% CO₂ incubator for five days.

[1266] Eighteen hours before the assay is harvested, 0.5 μCi/well of [3H] Thymidine is added in a 10 μl volume to each well to determine the proliferation rate. The experiment is terminated by harvesting the cells from each 96-well plate to a filtermat using the Tomtec Harvester 96. After harvesting, the filtermats are dried, trimmed and placed into OmniFilter assemblies consisting of one OmniFilter plate and one OmniFilter Tray. 60 μl Microscint is added to each well and the plate sealed with TopSeal-A press-on sealing film A bar code 15 sticker is affixed to the first plate for counting. The sealed plates are then loaded and the level of radioactivity determined via the Packard Top Count and the printed data collected for analysis. The level of radioactivity reflects the amount of cell proliferation.

[1267] The studies described in this example test the activity of a given polypeptide to stimulate bone marrow CD34+ cell proliferation. One skilled in the art could easily modify the exemplified studies to test the activity of polynucleotides (e.g., gene therapy), antibodies, agonists, and/or antagonists and fragments and variants thereof. As a nonlimiting example, potential antagonists tested in this assay would be expected to inhibit cell proliferation in the presence of cytokines and/or to increase the inhibition of cell proliferation in the presence of cytokines and a given polypeptide. In contrast, potential agonists tested in this assay would be expected to enhance cell proliferation and/or to decrease the inhibition of cell proliferation in the presence of cytokines and a given polypeptide.

[1268] The ability of a gene to stimulate the proliferation of bone marrow CD34+ cells indicates that polynucleotides and polypeptides corresponding to the gene are useful for the diagnosis and treatment of disorders affecting the immune system and hematopoiesis. Representative uses are described in the “Immune Activity” and “Infectious Disease” sections above, and elsewhere herein.

### Example 41

### Assay for Extracellular Matrix Enhanced Cell Response (EMECR)

[1269] The objective of the Extracellular Matrix Enhanced Cell Response (EMECR) assay is to identify gene products (e.g., isolated polypeptides) that act on the hematopoietic stem cells in the context of the extracellular matrix (ECM) induced signal.

[1270] Cells respond to the regulatory factors in the context of signal(s) received from the surrounding microenvironment. For example, fibroblasts, and endothelial and epithelial stem cells fail to replicate in the absence of signals from the ECM. Hematopoietic stem cells can undergo self-renewal in the bone marrow, but not in in vitro suspension culture. The ability of stem cells to undergo self-renewal in vitro is dependent upon their interaction with the stromal cells and the ECM protein fibronectin (fin). Adhesion of cells to fn is mediated by the α₅.β₁ and α₄.β₁ integrin receptors, which are expressed by human and mouse hematopoietic stem cells. The factor(s) which integrate with the ECM environment and are responsible for stimulating stem cell self-renewal have not yet been identified. Discovery of such factors should be of great interest in gene therapy and bone marrow transplant applications

[1271] Briefly, polystyrene, non tissue culture treated, 96-well plates are coated with fn fragment at a coating concentration of 0.2 μg/cm². Mouse bone marrow cells are plated (1,000 cells/well ) in 0.2 ml of serum-free medium. Cells cultured in the presence of IL-3 (5 ng/ml)+SCF (50 ng/ml ) would serve as the positive control, conditions under which little self-renewal but pronounced differentiation of the stem cells is to be expected. Gene products of the invention (e.g., including, but not limited to, polynucleotides and polypeptides of the present invention, and supernatants produced in Example 30), are tested with appropriate negative controls in the presence and absence of SCF(5.0 ng/ml), where test factor supernatants represent 10% of the total assay volume. The plated cells are then allowed to grow by incubating in a low oxygen environment (5% CO₂, 7% O₂, and 88% N₂) tissue culture incubator for 7 days. The number of proliferating cells within the wells is then quantitated by measuring thymidine incorporation into cellular DNA. Verification of the positive hits in the assay will require phenotypic characterization of the cells, which can be accomplished by scaling up of the culture system and using appropriate antibody reagents against cell surface antigens and FACScan.

[1272] One skilled in the art could easily modify the exemplified studies to test the activity of polynucleotides (e.g., gene therapy), antibodies, agonists, and/or antagonists and fragments and variants thereof.

[1273] If a particular polypeptide of the present invention is found to be a stimulator of hematopoietic progenitors, polynucleotides and polypeptides corresponding to the gene encoding said polypeptide may be useful for the diagnosis and treatment of disorders affecting the immune system and hematopoiesis. Representative uses are described in the “Immune Activity” and “Infectious Disease” sections above, and elsewhere herein. The gene product may also be useful in the expansion of stem cells and committed progenitors of various blood lineages, and in the differentiation and/or proliferation of various cell types.

[1274] Additionally, the polynucleotides and/or polypeptides of the gene of interest and/or agonists and/or antagonists thereof, may also be employed to inhibit the proliferation and differentiation of hematopoietic cells and therefore may be employed to protect bone marrow stem cells from chemotherapeutic agents during chemotherapy. This antiproliferative effect may allow administration of higher doses of chemotherapeutic agents and, therefore, more effective chemotherapeutic treatment.

[1275] Moreover, polynucleotides and polypeptides corresponding to the gene of interest may also be useful for the treatment and diagnosis of hematopoietic related disorders such as, for example, anemia, pancytopenia, leukopenia, thrombocytopenia or leukemia since stromal cells are important in the production of cells of hematopoietic lineages. The uses include bone marrow cell ex-vivo culture, bone marrow transplantation, bone marrow reconstitution, radiotherapy or chemotherapy of neoplasia.

### Example 42

### Human Dermal Fibroblast and Aortic Smooth Muscle Cell Proliferation

[1276] The polypeptide of interest is added to cultures of normal human dermal fibroblasts (NHDF) and human aortic smooth muscle cells (AoSMC) and two co-assays are performed with each sample. The first assay examines the effect of the polypeptide of interest on the proliferation of normal human dermal fibroblasts (NHDF) or aortic smooth muscle cells (AoSMC). Aberrant growth of fibroblasts or smooth muscle cells is a part of several pathological processes, including fibrosis, and restenosis. The second assay examines IL6 production by both NHDF and SMC. IL6 production is an indication of functional activation. Activated cells will have increased production of a number of cytokines and other factors, which can result in a proinflammatory or immunomodulatory outcome. Assays are run with and without co-TNFa stimulation, in order to check for costimulatory or inhibitory activity.

[1277] Briefly, on day 1, 96-well black plates are set up with 1000 cells/well (NHDF) or 2000 cells/well (AoSMC) in 100 μl culture media. NHDF culture media contains: Clonetics FB basal media, 1 mg/ml hFGF, 5 mg/ml insulin, 50 mg/ml gentamycin, 2% FBS, while AoSMC culture media contains Clonetics SM basal media, 0.5 μg/ml hEGF, 5 mg/ml insulin, 1 μg/ml hFGF, 50 mg/ml gentamycin, 50 μg/ml Amphotericin B, 5% FBS. After incubation at 37° C. for at least 4-5 hours culture media is aspirated and replaced with growth arrest media. Growth arrest media for NHDF contains fibroblast basal media, 50 mg/ml gentamycin, 2% FBS, while growth arrest media for AoSMC contains SM basal media, 50 mg/ml gentamycin, 50 μg/ml Amphotericin B, 0.4% FBS. Incubate at 37° C. until day 2.

[1278] On day 2, serial dilutions and templates of the polypeptide of interest are designed such that they always include media controls and known-protein controls. For both stimulation and inhibition experiments, proteins are diluted in growth arrest media. For inhibition experiments, TNFa is added to a final concentration of 2 ng/ml (NHDF) or Sng/ml (AoSMC). Add 1/3 vol media containing controls or polypeptides of the present invention and incubate at 37 degrees Cl/5% CO₂ until day 5.

[1279] Transfer 60 μl from each well to another labeled 96-well plate, cover with a plate-sealer, and store at 4 degrees C. until Day 6 (for IL6 ELISA). To the remaining 100 μl in the cell culture plate, aseptically add Alamar Blue in an amount equal to 10% of the culture volume (10 μl). Return plates to incubator for 3 to 4 hours. Then measure fluorescence with excitation at 530 nm and emission at 590 nm using the CytoFluor. This yields the growth stimulation/inhibition data.

[1280] On day 5, the IL6 ELISA is performed by coating a 96 well plate with 50-100 ul/well of Anti-Human IL6 Monoclonal antibody diluted in PBS, pH 7.4, incubate ON at room temperature.

[1281] On day 6, empty the plates into the sink and blot on paper towels. Prepare Assay Buffer containing PBS with 4% BSA. Block the plates with 200 μl/well of Pierce Super Block blocking buffer in PBS for 1-2 hr and then wash plates with wash buffer (PBS, 0.05% Tween-20). Blot plates on paper towels. Then add 50 μl/well of diluted Anti-Human IL-6 Monoclonal, Biotin-labeled antibody at 0.50 mg/ml. Make dilutions of IL-6 stock in media (30, 10, 3, 1, 0.3, 0 ng/ml). Add duplicate samples to top row of plate. Cover the plates and incubate for 2 hours at RT on shaker.

[1282] Plates are washed with wash buffer and blotted on paper towels. Dilute EU-labeled Streptavidin 1:1000 in Assay buffer, and add 100 μl/well. Cover the plate and incubate 1 h at RT. Plates are again washed with wash buffer and blotted on paper towels.

[1283] Add 100 μl/well of Enhancement Solution. Shake for 5 minutes. Read the plate on the Wallac DELFIA Fluorometer. Readings from triplicate samples in each assay were tabulated and averaged.

[1284] A positive result in this assay suggests AoSMC cell proliferation and that the polypeptide of the present invention may be involved in dermal fibroblast proliferation and/or smooth muscle cell proliferation. A positive result also suggests many potential uses of polypeptides, polynucleotides, agonists and/or antagonists of the polynucleotide/polypeptide of the present invention which gives a positive result. For example, inflammation and immune responses, wound healing, and angiogenesis, as detailed throughout this specification. Particularly, polypeptides of the present invention and polynucleotides of the present invention may be used in wound healing and dermal regeneration, as well as the promotion of vasculogenesis, both of the blood vessels and lymphatics. The growth of vessels can be used in the treatment of, for example, cardiovascular diseases. Additionally, antagonists of polypeptides and polynucleotides of the invention may be useful in treating diseases, disorders, and/or conditions which involve angiogenesis by acting as an anti-vascular agent (e.g., anti-angiogenesis). These diseases, disorders, and/or conditions are known in the art and/or are described herein, such as, for example, malignancies, solid tumors, benign tumors, for example hemangiomas, acoustic neuromas, neurofibromas, trachomas, and pyogenic granulomas; artheroscleric plaques; ocular angiogenic diseases, for example, diabetic retinopathy, retinopathy of prematurity, macular degeneration, corneal graft rejection, neovascular glaucoma, retrolental fibroplasia, rubeosis, retinoblastoma, uvietis and Pterygia (abnormal blood vessel growth) of the eye; rheumatoid arthritis; psoriasis; delayed wound healing; endometriosis; vasculogenesis; granulations; hypertrophic scars (keloids); nonunion fractures; scleroderma; trachoma; vascular adhesions; myocardial angiogenesis; coronary collaterals; cerebral collaterals; arteriovenous malformations; ischemic limb angiogenesis; Osler-Webber Syndrome; plaque neovascularization; telangiectasia; hemophiliac joints; angiofibroma; fibromuscular dysplasia; wound granulation; Crohn's disease; and atherosclerosis. Moreover, antagonists of polypeptides and polynucleotides of the invention may be useful in treating anti-hyperproliferative diseases and/or anti-inflammatory known in the art and/or described herein.

[1285] One skilled in the art could easily modify the exemplified studies to test the activity of polynucleotides (e.g., gene therapy), antibodies, agonists, and/or antagonists and fragments and variants thereof.

### Example 43

### Cellular Adhesion Molecule (CAM) Expression on Endothelial Cells

[1286] The recruitment of lymphocytes to areas of inflammation and angiogenesis involves specific receptor-ligand interactions between cell surface adhesion molecules (CAMs) on lymphocytes and the vascular endothelium. The adhesion process, in both normal and pathological settings, follows a multi-step cascade that involves intercellular adhesion molecule-1 (ICAM-1), vascular cell adhesion molecule-1 (VCAM-1), and endothelial leukocyte adhesion molecule-1 (E-selectin) expression on endothelial cells (EC). The expression of these molecules and others on the vascular endothelium determines the efficiency with which leukocytes may adhere to the local vasculature and extravasate into the local tissue during the development of an inflammatory response. The local concentration of cytokines and growth factor participate in the modulation of the expression of these CAMs.

[1287] Briefly, endothelial cells (e.g., Human Umbilical Vein Endothelial cells (HUVECs)) are grown in a standard 96 well plate to confluence, growth medium is removed from the cells and replaced with 100 μl of 199 Medium (10% fetal bovine serum (FBS)). Samples for testing and positive or negative controls are added to the plate in triplicate (in 10 μl volumes). Plates are then incubated at 37° C. for either 5 h (selectin and integrin expression) or 24 h (integrin expression only). Plates are aspirated to remove medium and 100 μl of 0.1% parafortnaldehyde-PBS(with Ca++ and Mg++) is added to each well. Plates are held at 4° C. for 30 min. Fixative is removed from the wells and wells are washed IX with PBS(+Ca,Mg)+0.5% BSA and drained. 10 μl of diluted primary antibody is added to the test and control wells. Anti-ICAM-1-Biotin, Anti-VCAM-1-Biotin and Anti-E-selectin-Biotin are used at a concentration of 10 μg/ml (1:10 dilution of 0.1 mg/ml stock antibody). Cells are incubated at 37° C. for 30 min. in a humidified environment. Wells are washed three times with PBS(+Ca,Mg)+0.5% BSA. 20 μl of diluted ExtrAvidin-Alkaline Phosphatase (1:5,000 dilution, referred to herein as the working dilution) are added to each well and incubated at 37° C. for 30 min. Wells are washed three times with PBS(+Ca,Mg)+0.5% BSA. Dissolve 1 tablet of p-Nitrophenol Phosphate pNPP per 5 ml of glycine buffer (pH 10.4). 100 μl of pNPP substrate in glycine buffer is added to each test well. Standard wells in triplicate are prepared from the working dilution of the ExtrAvidin-Alkaline Phosphotase in glycine buffer: 1:5,000 (10⁰)>10^{-0.5}>10⁻¹>10^{-1.5}. 5 μl of each dilution is added to triplicate wells and the resulting AP content in each well is 5.50 ng, 1.74 ng, 0.55 ng, 0.18 ng. 100 μl of pNNP reagent is then added to each of the standard wells. The plate is incubated at 37° C. for 4 h. A volume of 50 μl of 3M NaOH is added to all wells. The plate is read on a plate reader at 405 nm using the background subtraction option on blank wells filled with glycine buffer only. Additionally, the template is set up to indicate the concentration of AP-conjugate in each standard well [5.50 ng; 1.74 ng; 0.55 ng; 0.18 ng]. Results are indicated as amount of bound AP-conjugate in each sample.

### Example 44

### Alamar Blue Endothelial Cells Proliferation Assay

[1288] This assay may be used to quantitatively determine protein mediated inhibition of bFGF-induced proliferation of Bovine Lymphatic Endothelial Cells (LECs), Bovine Aortic Endothelial Cells (BAECs) or Human Microvascular Uterine Myometrial Cells (UTMECs). This assay incorporates a fluorometric growth indicator based on detection of metabolic activity. A standard Alamar Blue Proliferation Assay is prepared in EGM-2MV with 10 ng /ml of bFGF added as a source of endothelial cell stimulation. This assay may be used with a variety of endothelial cells with slight changes in growth medium and cell concentration. Dilutions of the protein batches to be tested are diluted as appropriate. Serum-free medium (GIBCO SFM) without bFGF is used as a non-stimulated control and Angiostatin or TSP-1 are included as a known inhibitory controls.

[1289] Briefly, LEC, BAECs or UTMECs are seeded in growth media at a density of 5000 to 2000 cells/well in a 96 well plate and placed at 37degrees C. overnight. After the overnight incubation of the cells, the growth media is removed and replaced with GIBCO EC-SFM. The cells are treated with the appropriate dilutions of the protein of interest or control protein sample(s) (prepared in SFM) in triplicate wells with additional bFGF to a concentration of 10 ng/ ml. Once the cells have been treated with the samples, the plate(s) is/are placed back in the 37° C. incubator for three days. After three days 10 ml of stock alamar blue (Biosource Cat#DAL1100) is added to each well and the plate(s) is/are placed back in the 37° C. incubator for four hours. The plate(s) are then read at 530 nm excitation and 590 nm emission using the CytoFluor fluorescence reader. Direct output is recorded in relative fluorescence units.

[1290] Alamar blue is an oxidation-reduction indicator that both fluoresces and changes color in response to chemical reduction of growth medium resulting from cell growth. As cells grow in culture, innate metabolic activity results in a chemical reduction of the immediate surrounding environment. Reduction related to growth causes the indicator to change from oxidized (non-fluorescent blue) form to reduced (fluorescent red) form (i.e., stimulated proliferation will produce a stronger signal and inhibited proliferation will produce a weaker signal and the total signal is proportional to the total number of cells as well as their metabolic activity). The background level of activity is observed with the starvation medium alone. This is compared to the output observed from the positive control samples (bFGF in growth medium) and protein dilutions.

### Example 45

### Detection of Inhibition of a Mixed Lymphocyte Reaction

[1291] This assay can be used to detect and evaluate inhibition of a Mixed Lymphocyte Reaction (MLR) by gene products (e.g., isolated polypeptides). Inhibition of a MLR may be due to a direct effect on cell proliferation and viability, modulation of costimulatory molecules on interacting cells, modulation of adhesiveness between lymphocytes and accessory cells, or modulation of cytokine production by accessory cells. Multiple cells may be targeted by these polypeptides since the peripheral blood mononuclear fraction used in this assay includes T, B and natural killer lymphocytes, as well as monocytes and dendritic cells.

[1292] Polypeptides of interest found to inhibit the MLR may find application in diseases associated with lymphocyte and monocyte activation or proliferation. These include, but are not limited to, diseases such as asthma, arthritis, diabetes, inflammatory skin conditions, psoriasis, eczema, systemic lupus erythematosus, multiple sclerosis, glomeralonephritis, inflammatory bowel disease, crohn's disease, ulcerative colitis, arteriosclerosis, cirrhosis, graft vs. host disease, host vs. graft disease, hepatitis, leukemia and lymphoma.

[1293] Briefly, PBMCs from human donors are purified by density gradient centrifugation using Lymphocyte Separation Medium (LSM®, density 1.0770 g/ml, Organon Teknika Corporation, West Chester, Pa.). PBMCs from two donors are adjusted to 2×10⁶ cells/ml in RPMI-1640 (Life Technologies, Grand Island, N.Y.) supplemented with 10% FCS and 2 mM glutamine. PBMCs from a third donor is adjusted to 2×10⁵ cells/ml. Fifty microliters of PBMCs from each donor is added to wells of a 96-well round bottom microtiter plate. Dilutions of test materials (50 μl) is added in triplicate to microtiter wells. Test samples (of the protein of interest) are added for final dilution of 1:4; rhuIL-2 (R&D Systems, Minneapolis, Minn., catalog number 202-IL) is added to a final concentration of 1 μg/ml; anti-CD4 mAb (R&D Systems, clone 34930.11, catalog number MAB379) is added to a final concentration of 10 μg/ml. Cells are cultured for 7-8 days at 37° C. in 5% CO₂, and 1 μC of [³H] thymidine is added to wells for the last 16 hrs of culture. Cells are harvested and thymidine incorporation determined using a Packard TopCount. Data is expressed as the mean and standard deviation of triplicate determinations.

[1294] Samples of the protein of interest are screened in separate experiments and compared to the negative control treatment, anti-CD4 mAb, which inhibits proliferation of lymphocytes and the positive control treatment, IL-2 (either as recombinant material or supernatant), which enhances proliferation of lymphocytes.

[1295] One skilled in the art could easily modify the exemplified studies to test the activity of polynucleotides (e.g., gene therapy), antibodies, agonists, and/or antagonists and fragments and variants thereof.

### Example 46

### Assays for Protease Activity

[1296] The following assay may be used to assess protease activity of the polypeptides of the invention.

[1297] Gelatin and casein zymography are performed essentially as described (Heusen et al., Anal. Biochem., 102:196-202 (1980); Wilson et al., Journal of Urology, 149:653-658 (1993)). Samples are run on 10% polyacryamide/0.1% SDS gels containing 1% gelain orcasein, soaked in 2.5% triton at room temperature for 1 hour, and in 0.1M glycine, pH 8.3 at 37° C. 5 to 16 hours. After staining in amido black areas of proteolysis apear as clear areas agains the blue-black background. Trypsin (Sigma T8642) is used as a positive control.

[1298] Protease activity is also determined by monitoring the cleavage of n-a-benzoyl-L-arginine ethyl ester (BAEE) (Sigma B-4500. Reactions are set up in (25 mMNaPO₄, 1 mM EDTA, and 1 mM BAEE), pH 7.5. Samples are added and the change in adsorbance at 260 nm is monitored on the Beckman DU-6 spectrophotometer in the time-drive mode. Trypsin is used as a positive control.

[1299] Additional assays based upon the release of acid-soluble peptides from casein or hemoglobin measured as adsorbance at 280 nm or colorimetrically using the Folin method are performed as described in Bergmeyer, et al., Methods of Enzymatic Analysis, 5 (1984). Other assays involve the solubilization of chromogenic substrates (Ward, Applied Science, 251-317 (1983).

### Example 47

### Identifying Serine Protease Substrate Specificity

[1300] Methods known in the art or described herein may be used to determine the substrate specificity of the polypeptides of the present invention having serine protease activity. A preferred method of determining substrate specificity is by the use of positional scanning synthetic combinatorial libraries as described in GB 2 324 529 (incorporated herein in its entirety).

### Example 48

### Ligand Binding Assays

[1301] The following assay may be used to assess ligand binding activity of the polypeptides of the invention.

[1302] Ligand binding assays provide a direct method for ascertaining receptor pharmacology and are adaptable to a high throughput format. The purified ligand for a polypeptide is radiolabeled to high specific activity (50-2000 Ci/mmol) for binding studies. A determination is then made that the process of radiolabeling does not diminish the activity of the ligand towards its polypeptide. Assay conditions for buffers, ions, pH and other modulators such as nucleotides are optimized to establish a workable signal to noise ratio for both membrane and whole cell polypeptide sources. For these assays, specific polypeptide binding is defined as total associated radioactivity minus the radioactivity measured in the presence of an excess of unlabeled competing ligand. Where possible, more than one competing ligand is used to define residual nonspecific binding.

### Example 49

### Functional Assay in Xenopus Oocytes

[1303] Capped RNA transcripts from linearized plasmid templates encoding the polypeptides of the invention are synthesized in vitro with RNA polymerases in accordance with standard procedures. In vitro transcripts are suspended in water at a final concentration of 0.2 mg/ml. Ovarian lobes are removed from adult female toads, Stage V defolliculated oocytes are obtained, and RNA transcripts (10 ng/oocytc) are injected in a 50 nl bolus using a microinjection apparatus. Two electrode voltage clamps are used to measure the currents from individual Xenopus oocytes in response polypeptides and polypeptide agonist exposure. Recordings are made in Ca2+ free Barth's medium at room temperature. The Xenopus system can be used to screen known ligands and tissue/cell extracts for activating ligands.

### Example 50

### Microphysiometric Assays

[1304] Activation of a wide variety of secondary messenger systems results in extrusion of small amounts of acid from a cell. The acid formed is largely as a result of the increased metabolic activity required to fuel the intracellular signaling process. The pH changes in the media surrounding the cell are very small but are detectable by the CYTOSENSOR microphysiometer (Molecular Devices Ltd., Menlo Park, Calif.). The CYTOSENSOR is thus capable of detecting the activation of polypeptide which is coupled to an energy utilizing intracellular signaling pathway.

### Example 51

### Extract/Cell Supernatant Screening

[1305] A large number of mammalian receptors exist for which there remains, as yet, no cognate activating ligand (agonist). Thus, active ligands for these receptors may not be included within the ligands banks as identified to date. Accordingly, the polypeptides of the invention can also be functionally screened (using calcium, cAMP, microphysiometer, oocyte electrophysiology, etc., functional screens) against tissue extracts to identify its natural ligands. Extracts that produce positive functional responses can be sequentially subfractionated until an activating ligand is isolated and identified.

### Example 52

### Calcium and cAMP Functional Assays

[1306] Seven transmembrane receptors which are expressed in HEK 293 cells have been shown to be coupled functionally to activation of PLC and calcium mobilization and/or cAMP stimulation or inhibition. Basal calcium levels in the HEK 293 cells in receptor-transfected or vector control cells were observed to be in the normal, 100 nM to 200 nM, range. HEK 293 cells expressing recombinant receptors are loaded with fura 2 and in a single day >150 selected ligands or tissue/cell extracts are evaluated for agonist induced calcium mobilization. Similarly, HEK 293 cells expressing recombinant receptors are evaluated for the stimulation or inhibition of cAMP production using standard cAMP quantitation assays. Agonists presenting a calcium transient or cAMP fluctuation are tested in vector control cells to determine if the response is unique to the transfected cells expressing receptor.

### Example 53

### A TP-Binding assay

[1307] The following assay may be used to assess ATP-binding activity of polypeptides of the invention.

[1308] ATP-binding activity of the polypeptides of the invention may be detected using the ATP-binding assay described in U.S. Pat. No. 5,858,719, which is herein incorporated by reference in its entirety. Briefly, ATP-binding to polypeptides of the invention is measured via photoaffinity labeling with 8-azido-ATP in a competition assay. Reaction mixtures containing 1 mg/ml of the ABC transport protein of the present invention are incubated with varying concentrations of ATP, or the non-hydrolyzable ATP analog adenyl-5′-imidodiphosphate for 10 minutes at 4° C. A mixture of 8-azido-ATP (Sigma Chem. Corp., St. Louis, Mo.) plus 8-azido-ATP (32P-ATP) (5 mCi/μmol, ICN, Irvine Calif.) is added to a final concentration of 100 μM and 0.5 ml aliquots are placed in the wells of a porcelain spot plate on ice. The plate is irradiated using a short wave 254 nm UV lamp at a distance of 2.5 cm from the plate for two one-minute intervals with a one-minute cooling interval in between. The reaction is stopped by addition of dithiothreitol to a final concentration of 2 mM. The incubations are subjected to SDS-PAGE electrophoresis, dried, and autoradiographed. Protein bands corresponding to the particular polypeptides of the invention are excised, and the radioactivity quantified. A decrease in radioactivity with increasing ATP or adenly-5′-imidodiphosphate provides a measure of ATP affinity to the polypeptides.

### Example 54

### Small Molecule Screening

[1309] This invention is particularly useful for screening therapeutic compounds by using the polypeptides of the invention, or binding fragments thereof, in any of a variety of drug screening techniques. The polypeptide or fragment employed in such a test may be affixed to a solid support, expressed on a cell surface, free in solution, or located intracellularly. One method of drug screening utilizes eukaryotic or prokaryotic host cells which are stably transformed with recombinant nucleic acids expressing the polypeptide or fragment. Drugs are screened against such transformed cells in competitive binding assays. One may measure, for example, the formulation of complexes between the agent being tested and polypeptide of the invention.

[1310] Thus, the present invention provides methods of screening for drugs or any other agents which affect activities mediated by the polypeptides of the invention. These methods comprise contacting such an agent with a polypeptide of the invention or fragment thereof and assaying for the presence of a complex between the agent and the polypeptide or fragment thereof, by methods well known in the art. In such a competitive binding assay, the agents to screen are typically labeled. Following incubation, free agent is separated from that present in bound form, and the amount of free or uncomplexed label is a measure of the ability of a particular agent to bind to the polypeptides of the invention.

[1311] Another technique for drug screening provides high throughput screening for compounds having suitable binding affinity to the polypeptides of the invention, and is described in great detail in European Patent Application 84/03564, published on Sep. 13, 1984, which is herein incorporated by reference in its entirety. Briefly stated, large numbers of different small molecule test compounds are synthesized on a solid substrate, such as plastic pins or some other surface. The test compounds are reacted with polypeptides of the invention and washed. Bound polypeptides are then detected by methods well known in the art. Purified polypeptides are coated directly onto plates for use in the aforementioned drug screening techniques. In addition, non-neutralizing antibodies may be used to capture the peptide and immobilize it on the solid support.

[1312] This invention also contemplates the use of competitive drug screening assays in which neutralizing antibodies capable of binding polypeptides of the invention specifically compete with a test compound for binding to the polypeptides or fragments thereof. In this manner, the antibodies are used to detect the presence of any peptide which shares one or more antigenic epitopes with a polypeptide of the invention.

### Example 55

### Phosphorylation Assay

[1313] In order to assay for phosphorylation activity of the polypeptides of the invention, a phosphorylation assay as described in U.S. Pat. No. 5,958,405 (which is herein incorporated by reference) is utilized. Briefly, phosphorylation activity may be measured by phosphorylation of a protein substrate using gamma-labeled ³²P-ATP and quantitation of the incorporated radioactivity using a gamma radioisotope counter. The polypeptides of the invention are incubated with the protein substrate, ³²P-ATP, and a kinase buffer. The ³²P incorporated into the substrate is then separated from free ³²P-ATP by electrophoresis, and the incorporated ³²P is counted and compared to a negative control. Radioactivity counts above the negative control are indicative of phosphorylation activity of the polypeptides of the invention.

### Example 56

### Detection of Phosphorylation Activity (Activation) of the Polypeptides of the Invention in the Presence of Polypeptide Ligands

[1314] Methods known in the art or described herein may be used to determine the phosphorylation activity of the polypeptides of the invention. A preferred method of determining phosphorylation activity is by the use of the tyrosine phosphorylation assay as described in U.S. Pat. No. 5,817,471 (incorporated herein by reference).

### Example 57

### Identification of Signal Transduction Proteins that Interact with Polypeptides of the Present Invention

[1315] The purified polypeptides of the invention are research tools for the identification, characterization and purification of additional signal transduction pathway proteins or receptor proteins. Briefly, labeled receptor PTK polypeptide is useful as a reagent for the purification of molecules with which it interacts. In one embodiment of affinity purification, receptor PTK polypeptide is covalently coupled to a chromatography column. Cell-free extract derived from putative target cells, such as carcinoma tissues, is passed over the column, and molecules with appropriate affinity bind to the receptor PTK polypeptides, or specific phosphotyrosine-recognition domains thereof. The receptor PTK polypeptide interacting protein-complex is recovered from the column, dissociated, and the recovered molecule subjected to N-terminal protein sequencing. This amino acid sequence is then used to identify the captured molecule or to design degenerate oligonucleotide probes for cloning the relevant gene from an appropriate cDNA library.

### Example 58

### IL-6 Bioassay

[1316] To test the proliferative effects of the polypeptides of the invention, the IL-6 Bioassay as described by Marz et al. is utilized (Proc. Natl. Acad. Sci., U.S.A., 95:3251-56 (1998), which is herein incorporated by reference). Briefly, IL-6 dependent B9 murine cells are washed three times in IL-6 free medium and plated at a concentration of 5,000 cells per well in 50 μl, and 50 μl of the IL-6-like polypeptide is added. After 68 hrs. at 37° C., the number of viable cells is measured by adding the tetrazolium salt thiazolyl blue (MTT) and incubating for a further 4 hrs. at 37° C. B9 cells are lysed by SDS and optical density is measured at 570 nm. Controls containing IL-6 (positive) and no cytokine (negative) are utilized. Enhanced proliferation in the test sample(s) relative to the negative control is indicative of proliferative effects mediated by polypeptides of the invention.

### Example 59

### Support of Chicken Embryo Neuron Survival

[1317] To test whether sympathetic neuronal cell viability is supported by polypeptides of the invention, the chicken embryo neuronal survival assay of Senaldi et al is utilized (Proc. Natl. Acad. Sci., U.S.A., 96:11458-63 (1998), which is herein incorporated by reference). Briefly, motor and sympathetic neurons are isolated from chicken embryos, resuspended in L15 medium (with 10% FCS, glucose, sodium selenite, progesterone, conalbumin, putrescine, and insulin; Life Technologies, Rockville, Md.) and Dulbecco's modified Eagles medium [with 10% FCS, glutamine, penicillin, and 25 mM Hepes buffer (pH 7.2); Life Technologies, Rockville, Md.], respectively, and incubated at 37° C. in 5% CO₂ in the presence of different concentrations of the purified IL-6-like polypeptide, as well as a negative control lacking any cytokine. After 3 days, neuron survival is determined by evaluation of cellular morphology, and through the use of the calorimetric assay of Mosmann (Mossman, T., J. Immunol. Methods, 65:55-63 (1983)). Enhanced neuronal cell viability as compared to the controls lacking cytokine is indicative of the ability of the inventive purified IL-6-like polypeptide(s) to enhance the survival of neuronal cells.

### Example 60

### Assay for Phosphatase Activity

[1318] The following assay may be used to assess serine/threonine phosphatase (PTPase) activity of the polypeptides of the invention.

[1319] In order to assay for serine/threonine phosphatase (PTPase) activity, assays can be utilized which are widely known to those skilled in the art. For example, the serine/threonine phosphatase (PSPase) activity is measured using a PSPase assay kit from New England Biolabs, Inc. Myelin basic protein (MyBP), a substrate for PSPase, is phosphorylated on serine and threonine residues with cAMP-dependent Protein Kinase in the presence of [³²P]ATP. Protein serine/threonine phosphatase activity is then determined by measuring the release of inorganic phosphate from ³²P-labeled MyBP.

### Example 61

### Interaction of Serine/Threonine Phosphatases with Other Proteins

[1320] The polypeptides of the invention with serine/threonine phosphatase activity as determined in Example 60 are research tools for the identification, characterization and purification of additional interacting proteins or receptor proteins, or other signal transduction pathway proteins. Briefly, labeled polypeptide(s) of the invention is useful as a reagent for the purification of molecules with which it interacts. In one embodiment of affinity purification, polypeptide of the invention is covalently coupled to a chromatography column. Cell-free extract derived from putative target cells, such as neural or liver cells, is passed over the column, and molecules with appropriate affinity bind to the polypeptides of the invention. The polypeptides of the invention-complex is recovered from the column, dissociated, and the recovered molecule subjected to N-terminal protein sequencing. This amino acid sequence is then used to identify the captured molecule or to design degenerate oligonucleotide probes for cloning the relevant gene from an appropriate cDNA library.

### Example 62

### Assaying for Heparanase Activity

[1321] In order to assay for heparanase activity of the polypeptides of the invention, the heparanase assay described by Vlodavsky et al is utilized (Vlodavsky, I., et al., Nat. Med., 5:793-802 (1999)). Briefly, cell lysates, conditioned media or intact cells (1×10⁶ cells per 35-mm dish) are incubated for 18 hrs at 37° C., pH 6.2-6.6, with ³⁵S-labeled ECM or soluble ECM derived peak I proteoglycans. The incubation medium is centrifuged and the supernatant is analyzed by gel filtration on a Sepharose CL-6B column (0.9×30 cm). Fractions are eluted with PBS and their radioactivity is measured. Degradation fragments of heparan sulfate side chains are eluted from Sepharose 6B at 0.5<Kₐᵥ<0.8 (peak II). Each experiment is done at least three times. Degradation fragments corresponding to “peak II,” as described by Vlodavsky et al., is indicative of the activity of the polypeptides of the invention in cleaving heparan sulfate.

### Example 63

### Immobilization of biomolecules

[1322] This example provides a method for the stabilization of polypeptides of the invention in non-host cell lipid bilayer constucts (see, e.g., Bieri et al., Nature Biotech 17:1105-1108 (1999), hereby incorporated by reference in its entirety herein) which can be adapted for the study of polypeptides of the invention in the various functional assays described above. Briefly, carbohydrate-specific chemistry for biotinylation is used to confine a biotin tag to the extracellular domain of the polypeptides of the invention, thus allowing uniform orientation upon immobilization. A 50 uM solution of polypeptides of the invention in washed membranes is incubated with 20 mM NaIO4 and 1.5 mg/ml (4 mM) BACH or 2 mg/ml (7.5 mM) biotin-hydrazide for 1 hr at room temperature (reaction volume, 150 ul). Then the sample is dialyzed (Pierce Slidealizer Cassett, 10 kDa cutoff; Pierce Chemical Co., Rockford Ill.) at 4C first for 5 h, exchanging the buffer after each hour, and finally for 12 h against 500 ml buffer R (0.15 M NaCl, 1 mM MgCl2, 10 mM sodium phosphate, pH 7). Just before addition into a cuvette, the sample is diluted 1:5 in buffer ROG50 (Buffer R supplemented with 50 mM octylglucoside).

### Example 64

### TAQMAN

[1323] Quantitative PCR (QPCR). Total RNA from cells in culture are extracted by Trizol separation as recommended by the supplier (LifeTechnologies). (Total RNA is treated with DNase I (Life Technologies) to remove any contaminating genomic DNA before reverse transcription.) Total RNA (50 ng) is used in a one-step, 50 ul, RT-QPCR, consisting of Taqman Buffer A (Perkin-Elmer; 50 mM KCl/10 mM Tris, pH 8.3), 5.5 mM MgCl₂, 240 μM each dNTP, 0.4 units RNase inhibitor(Promega), 8% glycerol, 0.012% Tween-20, 0.05% gelatin, 0.3 uM primers, 0.1 uM probe, 0.025 units Amplitaq Gold (Perkin-Elmer) and 2.5 units Superscript II reverse transcriptase (Life Technologies). As a control for genomic contamination, parallel reactions are setup without reverse transcriptase. The relative abundance of (unknown) and 18S RNAs are assessed by using the Applied Biosystems Prism 7700 Sequence Detection System (Livak, K. J., Flood, S. J., Marmaro, J., Giusti, W. & Deetz, K. (1995) PCR Methods Appl. 4, 357-362). Reactions are carried out at 48° C. for 30 min, 95° C. for 10 min, followed by 40 cycles of 95° C. for 15 s, 60° C. for 1 min. Reactions are performed in triplicate.

[1324] Primers (f & r) and FRET probes sets are designed using Primer Express Software (Perkin-Ehner). Probes are labeled at the 5′-end with the reporter dye 6-FAM and on the 3′-end with the quencher dye TAMRA (Biosource International, Camarillo, Calif. or Perkin-Elmer).

### Example 65

### Assays for Metalloproteinase Activity

[1325] Metalloproteinases (EC 3.4.24.-) are peptide hydrolases which use metal ions, such as Zn²⁺, as the catalytic mechanism. Metalloproteinase activity of polypeptides of the present invention can be assayed according to the following methods.

[1326] Proteolysis of Alpha-2-macroglobulin

[1327] To confirm protease activity, purified polypeptides of the invention are mixed with the substrate alpha-2-macroglobulin (0.2 unit/ml; Boehringer Mannheim, Germany) in lx assay buffer (50 mM HEPES, pH 7.5, 0.2 M NaCl, 10 mM CaCl₂, 25 μM ZnCl₂ and 0.05% Brij-35) and incubated at 37° C. for 1-5 days. Trypsin is used as positive control. Negative controls contain only alpha-2-macroglobulin in assay buffer. The samples are collected and boiled in SDS-PAGE sample buffer containing 5% 2-mercaptoethanol for 5-min, then loaded onto 8% SDS-polyacrylamide gel. After electrophoresis the proteins are visualized by silver staining. Proteolysis is evident by the appearance of lower molecular weight bands as compared to the negative control.

[1328] Inhibition of Alpha-2-macroglobulin Proteolysis by Inhibitors of Metalloproteinases

[1329] Known metalloproteinase inhibitors (metal chelators (EDTA, EGTA, AND HgCl₂), peptide metalloproteinase inhibitors (TIMP-1 and TIMP-2), and commercial small molecule MMP inhibitors) are used to characterize the proteolytic activity of polypeptides of the invention. The three synthetic MMP inhibitors used are: MMP inhibitor I, [IC₅₀=1.0 μM against MMP-1 and MMP-8; IC₅₀=30 μM against MMP-9; IC₅₀=150 μM against MMP-3]; MMP-3 (stromelysin-1) inhibitor I [IC₅₀=5 μM against MMP-3], and MMP-3 inhibitor II [Kᵢ=130 nM against MMP-3]; inhibitors available through Calbiochem, catalog #444250, 444218, and 444225, respectively). Briefly, different concentrations of the small molecule MMP inhibitors are mixed with purified polypeptides of the invention (50 μg/ml) in 22.9 μl of 1× HEPES buffer (50 mM HEPES, pH 7.5, 0.2 M NaCl, 10 mM CaCl₂, 25 μM ZnCl₂ and 0.05% Brij-35) and incubated at room temperature (24° C.) for 2-hr, then 7.1 μl of substrate alpha-2-macroglobulin (0.2 unit/ml) is added and incubated at 37° C. for 20-hr. The reactions are stopped by adding 4×sample buffer and boiled immediately for 5 minutes. After SDS-PAGE, the protein bands are visualized by silver stain.

[1330] Synthetic Fluorogenic Peptide Substrates Cleavage Assay

[1331] The substrate specificity for polypeptides of the invention with demonstrated metalloproteinase activity can be determined using synthetic fluorogenic peptide substrates (purchased from BACHEM Bioscience Inc). Test substrates include, M-1985, M-2225, M-2105, M-2110, and M-2255. The first four are MMP substrates and the last one is a substrate of tumor necrosis factor-α (TNF-α) converting enzyme (TACE). All the substrates are prepared in 1:1 dimethyl sulfoxide (DMSO) and water. The stock solutions are 50-500 μM. Fluorescent assays are performed by using a Perkin Elmer LS 50B luminescence spectrometer equipped with a constant temperature water bath. The excitation λ is 328 nm and the emission λ is 393 nm. Briefly, the assay is carried out by incubating 176 μl 1× HEPES buffer (0.2 M NaCl, 10 mM CaCl₂, 0.05% Brij-35 and 50 mM HEPES, pH 7.5) with 4 μl of substrate solution (50 μM) at 25° C. for 15 minutes, and then adding 20 μl of a purified polypeptide of the invention into the assay cuvett. The final concentration of substrate is 1 μM. Initial hydrolysis rates are monitored for 30-min.

### Example 66

### Characterization of the cDNA Contained in a Deposited Plasmid

[1332] The size of the cDNA insert contained in a deposited plasmid may be routinely determined using techniques known in the art, such as PCR amplification using synthetic primers hybridizable to the 3′ and 5′ ends of the cDNA sequence. For example, two primers of 17-30 nucleotides derived from each end of the cDNA (i.e., hybridizable to the absolute 5′ nucleotide or the 3′ nucleotide end of the sequence of SEQ ID NO:X, respectively) are synthesized and used to amplify the cDNA using the deposited cDNA plasmid as a template. The polymerase chain reaction is carried out under routine conditions, for instance, in 25 ul of reaction mixture with 0.5 ug of the above cDNA template. A convenient reaction mixture is 1.5-5 MM MgCl₂, 0.01% (w/v) gelatin, 20 uM each of dATP, dCTP, dGTP, dTTP, 25 pmol of each primer and 0.25 Unit of Taq polymerase. Thirty five cycles of PCR (denaturation at 94 degree C. for 1 min; annealing at 55 degree C. for 1 min; elongation at 72 degree C. for 1 min) are performed with a Perkin-Elmer Cetus automated thermal cycler. The amplified product is analyzed by agarose gel electrophoresis. The PCR product is verified to be the selected sequence by subcloning and sequencing the DNA product.

[1333] It will be clear that the invention may be practiced otherwise than as particularly described in the foregoing description and examples. Numerous modifications and variations of the present invention are possible in light of the above teachings and, therefore, are within the scope of the appended claims.

[1334] The entire disclosure of each document cited (including patents, patent applications, journal articles, abstracts, laboratory manuals, books, or other disclosures) in the Background of the Invention, Detailed Description, and Examples is hereby incorporated herein by reference. In addition, the CD-R copy of the sequence listing submitted herewith and the corresponding computer readable form are both incorporated herein by reference in their entireties. The specification and Sequence Listing of International Application No. PCT/US00/26524, filed on Sep. 28, 2000, is herein incorporated by reference in its entirety. Additionally, the specification and Sequence Listing of each of the following U.S. applications are herein incorporated by reference in their entirety: Application No. 60/157,137, filed on Sep. 29, 1999 and Application No. 60/163,280, filed on Nov. 3, 1999.

[1335] Moreover, the microfiche copy and the corresponding computer readable form of the Sequence Listing of U.S. Application Serial Nos. 60/157,137 and 60/163,280 are also incorporated herein by reference in their entireties.

What is claimed is:

1. An isolated nucleic acid molecule comprising a polynucleotide having a nucleotide sequence at least 95% identical to a sequence selected from the group consisting of:
(a) a polynucleotide fragment of SEQ ID NO:X or a polynucleotide fragment of the cDNA sequence contained in Clone ID NO:Z, which is hybridizable to SEQ ID NO:X;
(b) a polynucleotide encoding a polypeptide fragment of SEQ ID NO:Y or a polypeptide fragment encoded by the cDNA sequence contained in cDNA Clone ID NO:Z, which is hybridizable to SEQ ID NO:X;
(c) a polynucleotide encoding a polypeptide fragment of a polypeptide encoded by SEQ ID NO:X or a polypeptide fragment encoded by the cDNA sequence contained in cDNA Clone ID NO:Z, which is hybridizable to SEQ ID NO:X;
(d) a polynucleotide encoding a polypeptide domain of SEQ ID NO:Y or a polypeptide domain encoded by the cDNA sequence contained in cDNA Clone ID NO:Z, which is hybridizable to SEQ ID NO:X;
(e) a polynucleotide encoding a polypeptide epitope of SEQ ID NO:Y or a polypeptide epitope encoded by the cDNA sequence contained in cDNA Clone ID NO:Z, which is hybridizable to SEQ ID NO:X;
(f) a polynucleotide encoding a polypeptide of SEQ ID NO:Y or the cDNA sequence contained in cDNA Clone ID NO:Z, which is hybridizable to SEQ ID NO:X, having biological activity;
(g) a polynucleotide which is a variant of SEQ ID NO:X;
(h) a polynucleotide which is an allelic variant of SEQ ID NO:X;
(i) a polynucleotide which encodes a species homologue of the SEQ ID NO:Y;
(j) a polynucleotide capable of hybridizing under stringent conditions to any one of the polynucleotides specified in (a)-(i), wherein said polynucleotide does not hybridize under stringent conditions to a nucleic acid molecule having a nucleotide sequence of only A residues or of only T residues.

2. The isolated nucleic acid molecule of claim 1, wherein the polynucleotide fragment comprises a nucleotide sequence encoding a protein.

3. The isolated nucleic acid molecule of claim 1, wherein the polynucleotide fragment comprises a nucleotide sequence encoding the sequence identified as SEQ ID NO:Y or the polypeptide encoded by the cDNA sequence contained in cDNA Clone ID NO:Z, which is hybridizable to SEQ ID NO:X.

4. The isolated nucleic acid molecule of claim 1, wherein the polynucleotide fragment comprises the entire nucleotide sequence of SEQ ID NO:X or the cDNA sequence contained in cDNA Clone ID NO:Z, which is hybridizable to SEQ ID NO:X.

5. The isolated nucleic acid molecule of claim 2, wherein the nucleotide sequence comprises sequential nucleotide deletions from either the C-terminus or the N-terminus.

6. The isolated nucleic acid molecule of claim 3, wherein the nucleotide sequence comprises sequential nucleotide deletions from either the C-terminus or the N-terminus.

7. A recombinant vector comprising the isolated nucleic acid molecule of claim 1.

8. A method of making a recombinant host cell comprising the isolated nucleic acid molecule of claim 1.

9. A recombinant host cell produced by the method of claim 8.

10. The recombinant host cell of claim 9 comprising vector sequences.

11. An isolated polypeptide comprising an amino acid sequence at least 90% identical to a sequence selected from the group consisting of:
(a) a polypeptide fragment of SEQ ID NO:Y or the encoded sequence contained in cDNA Clone ID NO:Z;
(b) a polypeptide fragment of SEQ ID NO:Y or the encoded sequence contained in cDNA Clone ID NO:Z, having biological activity;
(c) a polypeptide domain of SEQ ID NO:Y or the encoded sequence contained in cDNA Clone ID NO:Z;
(d) a polypeptide epitope of SEQ ID NO:Y or the encoded sequence contained in cDNA Clone ID NO:Z;
(e) a full length protein of SEQ ID NO:Y or the encoded sequence contained in cDNA Clone ID NO:Z;
(f) a variant of SEQ ID NO:Y;
(g) an allelic variant of SEQ ID NO:Y; or
(h) a species homologue of the SEQ ID NO:Y.

12. The isolated polypeptide of claim 11, wherein the full length protein comprises sequential amino acid deletions from either the C-terminus or the N-terminus.

13. An isolated antibody that binds specifically to the isolated polypeptide of claim 11.

14. A recombinant host cell that expresses the isolated polypeptide of claim 11.

15. A method of making an isolated polypeptide comprising:
(a) culturing the recombinant host cell of claim 14 under conditions such that said polypeptide is expressed; and
(b) recovering said polypeptide.

16. The polypeptide produced by claim 15.

17. A method for preventing, treating, or ameliorating a medical condition, comprising administering to a mammalian subject a therapeutically effective amount of the polynucleotide of claim 1.

18. A method of diagnosing a pathological condition or a susceptibility to a pathological condition in a subject comprising:
(a) determining the presence or absence of a mutation in the polynucleotide of claim 1; and
(b) diagnosing a pathological condition or a susceptibility to a pathological condition based on the presence or absence of said mutation.

19. A method of diagnosing a pathological condition or a susceptibility to a pathological condition in a subject comprising:
(a) determining the presence or amount of expression of the polypeptide of claim 11 in a biological sample; and
(b) diagnosing a pathological condition or a susceptibility to a pathological condition based on the presence or amount of expression of the polypeptide.

20. A method for identifying a binding partner to the polypeptide of claim 11 comprising:
(a) contacting the polypeptide of claim 11 with a binding partner; and
(b) determining whether the binding partner effects an activity of the polypeptide.

21. The gene corresponding to the cDNA sequence of SEQ ID NO:Y.

22. A method of identifying an activity in a biological assay, wherein the method comprises:
(a) expressing SEQ ID NO:X in a cell;
(b) isolating the supernatant;
(c) detecting an activity in a biological assay; and
(d) identifying the protein in the supernatant having the activity.

23. The product produced by the method of claim 20.

24. A method for preventing, treating, or ameliorating a medical condition, comprising administering to a mammalian subject a therapeutically effective amount of the polypeptide of claim 11.

The application's sequence listing, which the Patent Office published only in electronic form, follows.

SEQUENCE LISTING (8564 sequences)

SEQ ID NO: 1 - DNA, 733 bp, Homo sapiens
gggatccggagcccaaatcttctgacaaaactcacacatgcccaccgtgcccagcacctgaattcgagggtgcaccgtcagtcttcctcttccccccaaaacccaaggacaccctcatgatctcccggactcctgaggtcacatgcgtggtggtggacgtaagccacgaagaccctgaggtcaagttcaactggtacgtggacggcgtggaggtgcataatgccaagacaaagccgcgggaggagcagtacaacagcacgtaccgtgtggtcagcgtcctcaccgtcctgcaccaggactggctgaatggcaaggagtacaagtgcaaggtctccaacaaagccctcccaacccccatcgagaaaaccatctccaaagccaaagggcagccccgagaaccacaggtgtacaccctgcccccatcccgggatgagctgaccaagaaccaggtcagcctgacctgcctggtcaaaggcttctatccaagcgacatcgccgtggagtgggagagcaatgggcagccggagaacaactacaagaccacgcctcccgtgctggactccgacggctccttcttcctctacagcaagctcaccgtggacaagagcaggtggcagcaggggaacgtcttctcatgctccgtgatgcatgaggctctgcacaaccactacacgcagaagagcctctccctgtctccgggtaaatgagtgcgacggccgcgactctagaggat

SEQ ID NO: 2 - protein, 5 aa, Homo sapiens
  MISC_FEATURE (3)..(3): Xaa equals any of the twenty naturally occurring L-amino acids
WSXWS

SEQ ID NO: 3 - DNA, 86 bp, Artificial Sequence
  Synthetic sequence with 4 tandem copies of the GAS binding site found in the IRF1 promoter (Rothman et al., Immunity 1:457-468 (1994)), 18 nucleotides complementary to the SV40 early promoter, and a Xho I restriction site.
gcgcctcgagatttccccgaaatctagatttccccgaaatgatttccccgaaatgatttccccgaaatatctgccatctcaattag

SEQ ID NO: 4 - DNA, 27 bp, Artificial Sequence
  Synthetic sequence complementary to the SV40 promoter; includes a Hind III restriction site.
gcggcaagctttttgcaaagcctaggc

SEQ ID NO: 5 - DNA, 271 bp, Artificial Sequence
  Protein_Bind: Synthetic promoter for use in biological assays; includes GAS binding sites found in the IRF1 promoter (Rothman et al., Immunity 1:457-468 (1994)).
ctcgagatttccccgaaatctagatttccccgaaatgatttccccgaaatgatttccccgaaatatctgccatctcaattagtcagcaaccatagtcccgcccctaactccgcccatcccgcccctaactccgcccagttccgcccattctccgccccatggctgactaattttttttatttatgcagaggccgaggccgcctcggcctctgagctattccagaagtagtgaggaggcttttttggaggcctaggcttttgcaaaaagctt

SEQ ID NO: 6 - DNA, 32 bp, Artificial Sequence
  Synthetic primer complementary to human genomic EGR-1 promoter sequence (Sakamoto et al., Oncogene 6:867-871 (1991)); includes a Xho I restriction site.
gcgctcgagggatgacagcgatagaaccccgg

SEQ ID NO: 7 - DNA, 31 bp, Artificial Sequence
  Synthetic primer complementary to human genomic EGR-1 promoter sequence (Sakamoto et al., Oncogene 6:867-871 (1991)); includes a Hind III restriction site.
gcgaagcttcgcgactccccggatccgcctc

SEQ ID NO: 8 - DNA, 12 bp, Homo sapiens
ggggactttccc

SEQ ID NO: 9 - DNA, 73 bp, Artificial Sequence
  Synthetic primer with 4 tandem copies of the NF-KB binding site (GGGGACTTTCCC), 18 nucleotides complementary to the 5' end of the SV40 early promoter sequence, and a XhoI restriction site.
gcggcctcgaggggactttcccggggactttccggggactttccgggactttccatcctgccatctcaattag

SEQ ID NO: 10 - DNA, 256 bp, Artificial Sequence
  Protein_Bind: Synthetic promoter for use in biological assays; includes NF-KB binding sites.
ctcgaggggactttcccggggactttccggggactttccgggactttccatctgccatctcaattagtcagcaaccatagtcccgcccctaactccgcccatcccgcccctaactccgcccagttccgcccattctccgccccatggctgactaattttttttatttatgcagaggccgaggccgcctcggcctctgagctattccagaagtagtgaggaggcttttttggaggcctaggcttttgcaaaaagctt

SEQ ID NO: 11 - DNA, 407 bp, Homo sapiens
  misc_feature (30)..(30): n equals a,t,g, or c
  misc_feature (275)..(275): n equals a,t,g, or c
  misc_feature (386)..(386): n equals a,t,g, or c
  misc_feature (399)..(399): n equals a,t,g, or c
ggaacaagaagaaagacaaccatctcctgnaacctgtgcaagaaaatgctaacagtggttactatgaagctcaccctgtgactaatggcatagaggagcctttggaagaatcctctcatgaacctgaacctgagccagaatctgaaacaaagactgaagagctgaaaccacaagtggaggagaagaacttagaagaactagaggagaaatctactactcctcctccggcagaacctgtttctctgccacaagaaccaccaaagccaagagtcgangctaaaccagaagttcaatctcagccacctcgtgtgcgtggaacaacgacctagagaacgacctggttttcctcctagaggaccaagaccaggcagaggagatatggaacngaatggactctgnacaaccgt

SEQ ID NO: 12 - DNA, 413 bp, Homo sapiens
  misc_feature (373)..(373): n equals a,t,g, or c
  misc_feature (380)..(380): n equals a,t,g, or c
  misc_feature (396)..(396): n equals a,t,g, or c
  misc_feature (407)..(407): n equals a,t,g, or c
gaattcggcacgaggtttttatgggcaacagccatatacagtctacttcctatctattgtgaagttgttgttgaggatttcctgtattatttcactctgcattcatgtctcagttacctttgatccctagcaaactgtcccaagtggaatggcctaacccaggaatgatgtattatttcttacagtcctgtgactgtctgggcggtccttttgctaacttccccagggctcacgtgtgccttgtggtcaagtgatagcagcgttggctggctggtccmaggtgggcctcacgtgtcctatagtatttgctagctattgtctgggggctcctcaactcttccacatgccccagtaagcatagaccagttccctnacaccanggtgggtctcaggggnagcattccaanagggga

SEQ ID NO: 13 - DNA, 474 bp, Homo sapiens
  misc_feature (332)..(332): n equals a,t,g, or c
gacgggaatttgatggaaaaccaggacttgctgggctcgcaacacctccacctccccctccacaccagaggcatctgcacctccactgcccagcaaaactccgcctcctccccctccaaagacaactcgcaagcagacatcggtggactccgggatcgtkcagtgacgtcgcaaggctctctggaaagagtgtgctgcccctccccatctccatgccctctccttctgtgtcccctgagtctgctgtttacctcattgggcctgtgatgttaacatttmgtgcgactgctttttcttcaaaggagttcagttctcaccatggagtgagtggncctttagcgtcatggagcaaggtgggtctgggaggtagatatgggtccgggatgtgctatcgtagttatcagarttgggggcctctgagtgtgtctggctctgagagagtctgagtcttgcccaaacattctttctttttgg

SEQ ID NO: 14 - DNA, 1843 bp, Homo sapiens
  misc_feature (27)..(27): n equals a,t,g, or c
  misc_feature (877)..(877): n equals a,t,g, or c
  misc_feature (1431)..(1431): n equals a,t,g, or c
  misc_feature (1458)..(1458): n equals a,t,g, or c
  misc_feature (1463)..(1463): n equals a,t,g, or c
agaccttaacagacacctcaccaaagnaggtatacagatggatacgcatatgaagagatgytcgacwtcatatgtcwtcaagaaaatgcaaattaaaataatgagataccgctacatatccattagaatgsccaaaatccaaagcactgacaacaccgtatgctagtgaggatgtggagcaacagaaactactttcattgatggtgggactgagaaacggtatagccgctttggaaaacagtttacaaaactaaacatactgttttcaactccattgggagcataattatagtttattacaggtagtwtaattcagcagttgcacaccttgttatttacccaatggagttgaaagcttatgtccacacgtaatgtgcacataaatgtttacagagctttattcctaatcaccaaattttagaatcaaacaagatgttcttcagcaggtaaatggataaactgtgtacatccagacaatggaatattatgcagtgctaaaagaaatgagctgtcaagccataaaaggacaagaaggaaaattaaatgcatgttactaaatgaaaaaaggccatctgaaaagtctatatactgtatgattgcaactatatgacattctgaaaaaggcaaaactatggagacagtaaaagattagtggttgtcaggaattggggaaggggagggacaaagagagcacaaaatatttttagtacagtaaaacccacgcgtccgcggacgcgtgggttttactgtactaaaaatattttgtgctctctttgtccctccccttccccaattcctgacaaccactaatcttttactgtctccatagttttgcctttttcagaatgtcatatagttgcaatcatacagtatatanacttttcagatggcctttttcatttagtaacatgcatttaattttccttcttgtccttttatggcttgacagctcatttcttttagcactgcataatattccattgtctggatgtacacagtttatccatttacctgctgaagaacatcttgtttgattctaaaatttggtgattaggaataaagcttctgtaaacatttatgtgcacattacgtgtggacataagctttcaactccattgggtaaataacaaggtgtgcaactgctgaattatactacctgtaataaactataattatgctcccaatggagttgaaaacagtatgtttagttttgtaaactgttttccaaagcggctataccgtttctcagtcccaccatcaatgaagtagtttctgttgctccacatcctcactagcatacggtgttgtcagtgctttggattttggccattctaatggatatgtagcggtatctcattattttaatttgcattttcttgatgacatatgatgtcgagcatctcttcatatgcgtatccatctgtatacctnctttggtgaggtgtctgttaaggtctntgatncattttaatgcttctttgttaggggtagatacatgtaaaggatatgtcttcttggagaattgactcctttatccttatataataatcctctttgttccttgtaacttgcattgctgtgcaatttgctctttctgaaattagcacaattgacccttgaatgacatggaggttaggggcacaaatgaaaatctgtgtataactttttattcatctataacttaacttttaaacccatttaacctccccccaaaattcaggaataataacacacccgaccacaccgcttacaaaaaaaaaaaaaaaaaaaaaaaaaaaaaaaaaaaaaaaaaaaaaaaaaaaaaaaaaaaaaaaaaaaaaaaaaaaaaaaaaaaaaaaaaaaa

SEQ ID NO: 15 - DNA, 471 bp, Homo sapiens
  misc_feature (161)..(161): n equals a,t,g, or c
  misc_feature (428)..(428): n equals a,t,g, or c
  misc_feature (471)..(471): n equals a,t,g, or c
ggaagaagcccagaggttgtgcccaggggcagaaatcattgcctagtgttcaccggctgactctcaactgaccattcccatgtggacaggccttaatactgtgagaggatccttgctctgctggcagtttcccactcctatgcactttcacaggaactagnaaaactattcttaaaccaaaaataccatccgtgttgacccatgttgcagagcccttacttaaatccttcactggtgtatgaatactttgtcataatgctgctttgctgggtagtgagctcttatttttcactgggggtcagctataactaaaaactcaagtgacatatttcagttaccaaagtggccaggaactttttgcttttatgaaaatagattcatattgtatttcccagtgtgtcttytatgtctttgaatgttttagaganaagtctatgcctgtctaaaaatgaatccagtgttgcctttctn

SEQ ID NO: 16 - DNA, 905 bp, Homo sapiens
  misc_feature (836)..(836): n equals a,t,g, or c
gttctagatcgcgagcggccgcccttttttttttttgatttatatgaacttgcaaatcatatatattaaccttttgttatgtggagattttggacaggaggattgcttgaggccaggaattcaagaccagcctgggaaacaaagtgagaccctgtctttacaaaaaataaaaacaaaaatttaaaactgtataatctgcactttatgctaaactagctgtgctcttaaactcaattttttcagctctaataaagggcttaatttgatagaattattctacgattaaattttgaagactgttttcactctcctctgccgcccatagcaagactgcttccatagatttctcagaaccgtagccagttctggctatttggtcaagtctgggatccctcttacctgctattctgcagctgctttctctgtcttacattttttgggccacgtctaatcttaaagagtaaactctacccttggtttgcatagtgtgcatgacaaaaataacaagaataatggtaatgatgaaaatgataagagcaaaatttgtggagtgctttccacattccaggtaatgtgtaacatacaatttaattcttacagcagtcttatggagtgaaaatactattatgaattcccgttttacagatgaaagaatggaggcacagaaaagttacttgtctaagtaacagtctatccttaaagtccacagtcttaaccacttggatttttcatagtgagggaaaatatcccagaaagttgcagtttcaattaatcactgaattgtagggtaatttaactataccagtgaagtgcctactgagcagaaatatttgggncaacatgaagcccactggactgggagcttttgttttagcataatgaacctgtttccagcaagattttga

SEQ ID NO: 17 - DNA, 412 bp, Homo sapiens
  misc_feature (108)..(108): n equals a,t,g, or c
  misc_feature (372)..(372): n equals a,t,g, or c
  misc_feature (377)..(377): n equals a,t,g, or c
aattcggcacgaggaaacttgctattccacccacaccaagttaaaaaggaaaaaaaaaagactttcgcacaattgtttcctaactgataacattgtacattcttaggngattagtaattgtgtgaaatttactcatactgtttctaagtttttcagcatagtcattgcacttcagcagggaatctgagtatactttacagacagagtgaacttaaaagtttaatgtcaagagattatggcttaaataaattagtgtgtcctatagggggaaaaaaaccaagaaaccaccttttaaaaagaatgatatgccatatacccttggattttcattttgcattatattgacgtgtttttttgaagggaaaaaaagtnataanaatctggatagtctaagactccactattttaaaag

SEQ ID NO: 18 - DNA, 752 bp, Homo sapiens
tcgagtttttttttttttttttatatatataaatattcataaaaactttattttcaatagcaaaaatcttggtaacaacgtaaatgttcatcaacaggtaaatttgttcatcaacaaatcatggtatacctatacaaaaaaatgttacttaccaataaaagggatgaactattgatacatacawtaacataaatgaatctcaaaataattgtactgagtgacaggagtcatactacaaagcatagatgatgtatggttccatgtatgtaaatttctttaaaaatgcaaattaatctatagtgacagaaagaagattggtagttgcctgagcagatcagtggttgggatgggacggggagagggagaaggaagagtgagaaattacaaagatgcmagaaggaatttgggagtatgatagataggttcattatcttgaatatagcgatggtttgtttcatggaaaatgtgtcagaacttattgtagaggttaaatatgtgaaatgtattctgtgtcaattaaagtgttcttcaaattagaggtggaagtgagaacaaaactcacagatgtatacctttcagtcctgtggattaattttgcccaaacctgctttggaaaacatgatccctaaatgaatgtggcctaacagatatatcctggcttggtcaaatttaagtaagagctgtaatatgaatggttcatgtaactgttaactgtcagtcaaaaacagagtcaggattaaccactgttcagt

SEQ ID NO: 19 - DNA, 642 bp, Homo sapiens
  misc_feature (613)..(613): n equals a,t,g, or c
  misc_feature (622)..(622): n equals a,t,g, or c
  misc_feature (635)..(635): n equals a,t,g, or c
ggcagaggtgctactggaagcaatacgaaaaggtattcagctacgcaaagtagaagagcagcgtgaacaggaagctaagcatgaacgcattgaaaacgatgttgccaccatcctgtctcgccgtattgctgttgaatatagtgattcggaagatgattcagaatttgatgaagtagattggttggagtaagaaaaatgcattgataaatattacaaaactgaatgcaaatgtcctttgtggtgcttgttccttgaaaatgtttggtcattctagtgttttgctttcttttccttataataaatgacccttttcctccataacttttgatttctaaggaaaatattagcatacatttcaaactaaatgttttacagtggcttatcttttttttccccctgaaaagactaatttggtcaaataaaccactaagtattaagcatgggacagctgttgttaggagtagccagattcagttttttggatatatcttaattgtgtactttgtggaattttaaatttaaaggaaaggcaactggaaattggaaatcytgaggggcagctgtatctactaatgaggccttattccctttcccggatgttttaaaggagggnacactgccntggattatacggntacaccc

SEQ ID NO: 20 - DNA, 211 bp, Homo sapiens
  misc_feature (2)..(2): n equals a,t,g, or c
anttttttttttttgaattctggaaaacttcttaacataaagatttggtctaagggtcagaactttgttctagcctgcaagggatccctaagtyctgtcattctaccactaaagccaagcttctkggttctcctcagaagcctacatcatagacagaaacggaaaggcaaaaatgaaaaagaggaatatgaaaaagtgggagagaaaaaga

SEQ ID NO: 21 - DNA, 532 bp, Homo sapiens
  misc_feature (515)..(515): n equals a,t,g, or c
  misc_feature (517)..(517): n equals a,t,g, or c
taagagatcaaagcttataattttcttttttaatttttgaaggagggatcaactccagtttccaatgtctatgtgtctatgtgtgtatgtgccatacatatgtattcacatgaagaccggcatggccaagttctgctggaggagcactcaagtgtgacgagcagggccactggaccctgcagggctgtggtgtatatagtgcagctttggaggtggaactctattttcacacttttctatggagccttccgagtcccaggttttcacttgaggctgtctgtctggatggcggttttcagacctccattaacatccctacccagcattctgtacttcgggggccttctctcttgttataaaactttttaccaagtgaaacatcgataccacctttgtttccattctcactggtgtaaatactgagtactaactgagaattttgactttgcattctgtcggaatacttgtgttcaataaaaattgaaagaaaaaagctaaaaaaaaaaaaaaaaaancncgagggggggcccgg

SEQ ID NO: 22 - DNA, 1120 bp, Homo sapiens
  misc_feature (711)..(711): n equals a,t,g, or c
  misc_feature (946)..(946): n equals a,t,g, or c
  misc_feature (987)..(987): n equals a,t,g, or c
cataaacattgatgttgggtcaatcatgttctcaatgtatttaaccatgtgtttttaaattttttaatttagttatcaaattgagaatctgatggtatggcattaatcaccttgaggaagaacctttatcgtttatctgattttcagatgcatagagctctggctgctttaaaaaataaacctctaaatcatgttcacaaggtagtcaaggagcgtctgtgcccttggttgtgttcacgacaacctgagcctttcggggtcagattccatcatgcccattgtaaaaagtttcattcgaaaaatggaaatgaccttcatccactcggtggaccagtgttctctcaagtatctgactgcgacaggcttgaacaaaatgttaaaaatgaggagagtcagatgttttacaggagactgagcaacttgacttcatcagaagaagtgctaagttttataagcacgatggaaaccctgcctgacactatggcagcaggagctttacaacggatttgtgaagtggaaaaaaaggatggtgatcaagggctgccaaaagraatactggagaatagcatctttcaagctttatgctttcagtttgaaaaggagccctcacagctgtcaaacactagtttagtgactgctttkcaagctctgattctgttgcatgtggatcctcaaagtagcctgttgctgaacctggtggcagaatgcaanaatcgtctcagaaaaggtggcatggaagttcgcaatctttgtattcttggggaaagtctgattacactgcacagttcaggttgtgtgacactagaactcattataaatcaacttcaaggtgaaaaattggaaacatttaccccggaggatattgtggccctttatagaatcttgcaggcatgtactgaaaaagtggatgaacaccaaacatttttaaataagataaacaactttnccctatcaatagtttccaacctgagtcctaaattgattagncaaatgctcactgccctggtggttcttgatcaaagtcaagcatttcctctgattataaaattgggcaaaatatgtcgtgaggcatgtcccacatttcacttaacgaggagcttaggagagtcttttgaggcgt

SEQ ID NO: 23 - DNA, 600 bp, Homo sapiens
  misc_feature (50)..(50): n equals a,t,g, or c
  misc_feature (571)..(571): n equals a,t,g, or c
ctagatcgtcagggaggaagggtcagttgggtgcctgtttttctgttttnagtcctttaaaatgagtagaagcaacctgttaccctggaaagagcactggacatagacctagtgctgcgtgatgttgagcacgtttcttcttccctttgagtcccagtttcccttttggttacagggggatagtagcccccagggatcatgtgaaagtgagaaagcccttttcacactgtggagcggtgcagatgtgggaaacctcaaagatggttgcccattttaaatcctttcatctctcatctctctttcttctctcccttctgccctgacgtagccatggttgggtgggtgaggccagaagaaactgcctccgmaagaggtagcagccgctcaggtggctctgctggcatcggagcccacagaagtgaggagtggccgatggamctgccctccaaatgtgcctgactctgggtcttgctgtcactgggatttcctgggcatggcagacagaaagaaagatagtttgaccaagtcgtaggaagcttgattccagcgggtaaaaaagggggcagggaantcgtcccttttattttttgccttcaggag

SEQ ID NO: 24 - DNA, 807 bp, Homo sapiens
  misc_feature (773)..(773): n equals a,t,g, or c
  misc_feature (786)..(786): n equals a,t,g, or c
caattaagggtgtacaaattataataatgcatctctatcttcatactttgaatggcaaacgctatttatgcataaatattttcattttaagtaatatatgaagtgtaaatactcgatatataagtatagattttaaagatatgggactttattttcacataagtcaatagatgtttctctagaacaaaatatttagtaaagctttataaattatattaaaaggaagcggggaacatgtattttttaacatagaacagaagtgacttcattctttttagacatcagaaatgttaaagttgattcccaatatttgttgtacttttttgtagcaaatgttaaaaatcacgagttaccatgtatagaatgtggactgtcatgttgatatcattgtacagtgataagccattttwatctgtatacatttcaccaatttattaacaggttgaatatttgtttctttttagaacattttatttatactgtgaagactttgttataccttatttgctacaacatagatcatatcattgctactttgacttagcatttgcatcataaacataattatgatgtttttttcatgctccttccaggggctcagtcacttgaagaaactgttgctaaccaagctcttgactctgtttcccttaatgatacaagtctctgtaccagcgctttatgttaattaccaaaactctcctgcatcagagcatgatatctataataggagatactgsaataaaatgrttwggctgtaaaaatttggaggcacnaattttccaattncaatggcaaattggcatggtg

SEQ ID NO: 25 - DNA, 416 bp, Homo sapiens
  misc_feature (1)..(1): n equals a,t,g, or c
ngttttgggattattataagttcttgtgtcttaaggccatctgcttttatatccagtgatgtgggattttaatcagccattaattaggtaagcattcactttgaggacaatattctgttttatcttgggtagcatggacagtttgtcacagaaataagttccctattcaaacttggaattagctgattcagagtaacatattaataatataaaaatggccatacccttttatggcgtaacattatttctaggtattgtttctaaggaaataattttaaatattgggaaaaaatatttttacaatttacagtctgtctgacatttggtaaatagctaattgtgatatattcatattaggagatagggtgcagccactaaaatgattttgaagtattgtccattagtaatggtaattt

SEQ ID NO: 26 - DNA, 752 bp, Homo sapiens
  misc_feature (40)..(40): n equals a,t,g, or c
ggcctgggctccttccgaatggtggcgcctctgagccagntttcgaggaggagtcggaggaggagcctgaatgtttggagatagacttcaagtcccggaccttatccgtgcgccgcttcggtttgcaggtgacctttgcgtgcgggcgccccttctgattgaccctgatgagctgtagctctgatggcccctccttcgggaatgattagggtgacggctgkccggggctcgttcgagtggcgcccggccggtggtgacccgaacaggagagcgggacggcgaccattctctcgggagggscccatytggagaaagtcctctcgcttggtcaaactaggagggcgatagcaccggccttactgcgacgatgacaaagtacaacacaccgtctggcgcgaaggagatgctcgagaaccctttgctgttgttatttttcgcgtgtcctccgaaaccaagggaaatgcggctctgtgggttctgttaacgtcagcatttaataagtgaactctaaatgcattgccccttatgggtgcgctggcctcctgagttgactcagctcttgcaacgtagctagttgataaccctcgaaatatagcgaattgagatgtgctatattgtaaaatacgggacttagtacgaaaaaactgatgtaaaaattatctcaatactttttaatactgattacatgttggaatataatgttttgcatatattgggtcaaataaaaatgttattaatttcaaaaaaaaaaa

SEQ ID NO: 27 - DNA, 481 bp, Homo sapiens
  misc_feature (442)..(442): n equals a,t,g, or c
  misc_feature (447)..(448): n equals a,t,g, or c
ggcacgagtttcaaaccaacactgaaattctgtggcatcacatatattgggccttgatgtcatgacagakcaaaatcatttgatatccctttctccattctaggtttttctttttttcagtaactgatttaccttgatcacttttcaacttccatattcttcatatagtaaaaggcaaagtgttgaagatactacggtgtggtagtagttgaaaattattgccgtcattatttacatacttaagacatattagcaagttgatccaaaatgggaggccttatagatgtgcttgggggaaaatgaaggggagaaagtagccatacaggagttcaaagaattccatgcccttcagattagcccattaccagaaacatcatgaaagtattttaaaaactaattatttactacagtgtatttcacttgtcttgtgtgtctgaacacnagganngctaaattagcaagttttttaaggaggtatttt

SEQ ID NO: 28 - DNA, 912 bp, Homo sapiens
  misc_feature (875)..(875): n equals a,t,g, or c
  misc_feature (881)..(881): n equals a,t,g, or c
aattcggcacaggatcagacttcctttcaactgtcctcccctccaagcagaccacctgtccccttctatcccagctcagagcagctgacccaactcagaatctctttcctacaggatgaagtgccttttgaatgttattttaagccgagagttaatttttctacacaacatatttccagacatcttttagtcttttattgtcttagatactataagaagatgaacatgacaattttctagaacctggtagcgtgtgtgtgtgtggcggggggtgctgagggaggggagtgagtcacaggagcctgtcccccaacaggtgtgactgctctgacaacctgtggcatgctgcagggtcaggctcctgataggaggatttcatgactatgtcattgtctccactcatttttgacccagtttggaatgtatctgcaattgtgtggctcaacactttaggaaacaatagattattttatattattatttctgatggtgacaagtttgtcttgaggtcacattttctccttgaaaagtgacatcctgtcacttctgctctcacactactgccatacatttgtgttttttgttgttattgtttgggtagagcagttacaagaaaccctaaaacccttggatataaaagaaatctgtttattgatttttaaatctttcctttccaaaagctgggatacacatgggagctgtttggggaattttccttgctgctaccgcgctgccaccaaatgggaattgaccaggcgggctgtttacactgtttctttggccactgtggccyatggctcaggaatatggctcactggctaaggcttaccaaactcggggacagggggtcagggaaacaggaggggtgttccccntccccnttggcaggccttcccacccacctggttaacc

SEQ ID NO: 29 - DNA, 507 bp, Homo sapiens
  misc_feature (489)..(489): n equals a,t,g, or c
  misc_feature (492)..(492): n equals a,t,g, or c
ggatacataggaagttgacctcggggtatcatggagagtgtccctcctagtggctggaggtagggacagttggttgtggggctggagagaggttgtggggaggaagcgaggatgcgtgcctgccactaggatctgcatccccgagcccaagccaggagggatttcccttaggcaacaccatcccagggagatctgccacaatttgcgtttcacagctraagacgccgaggcttagagagctcgacctcctcaaggtcacaccactgggtaaatagagggatgcagactcaggttttgctatgtgctcacatttcaactttatgcttaacatgaatggaaaaatatgaaagtaaatagtgaaaaggtgagttatgagcttagattacctagattattccagtatcccatggaagctgaggacttattccgctttccacaccgaacactaaatgtggaccagtatcaagaaccctcctgtccccacgcagntanaacccagtggcttct

SEQ ID NO: 30 - DNA, 410 bp, Homo sapiens
ggcagagccaaaagagggttcttggatctcacgcaacaaagagttcggggcgagtccatagagtaaagtgaaagcaagttcatcaagaaagcaaaggaataaagaatgcctactccataggcagagcagtggctttggctgctcagctgcttgtacttgttacttcttgagtatatgctaaacaagggattgattactccttgtttagcagttttctgggaaaggagtgggcaattcccagaactgagggttcctcccctttttaagaccatattagggtgacttcctgatgttgccatggcatttgtaaactgtcatggcgctrtgggwgtgtcttttagcatgctaatgctttataattagcgtataatgagcagtgaggacaaccagaggtcactcttgtctgtgcc

SEQ ID NO: 31 - DNA, 496 bp, Homo sapiens
  misc_feature (36)..(36): n equals a,t,g, or c
  misc_feature (356)..(356): n equals a,t,g, or c
  misc_feature (443)..(443): n equals a,t,g, or c
  misc_feature (454)..(454): n equals a,t,g, or c
ggcacgagggcacsmkcaaaccttgtcttccctctnctgttgcatcctttccctacccttccctcccaggtgctcggtactttaccwagtttctatatatcagtgttttatgttggaatttttccttgtttttattttactagttggtaaaccctgtttatgctgaaacaaataaggaaatggtatatttgaccatatgtgttattcatagaagacagtatgatcaaatgtgccaaaaacaagcaaacaaaacttaattcctgrgaagtatgccttatttttattgatctgctttgtcttacaattaaggtccaagagcttggttaaactgtattatttgcctaagtataaaaganaacttgaactgcattgcaatattgacgttctttaaaatgagagacactgtcaagtaatttaatccagagatcagccaccagatttgnaatgcctatgnatgtgtgtgtgttgggagtggttttttcctttaaaccaccca

SEQ ID NO: 32 - DNA, 363 bp, Homo sapiens
  misc_feature (313)..(313): n equals a,t,g, or c
  misc_feature (333)..(333): n equals a,t,g, or c
ggcacgagtataaatgatggtgtggatgtcagggtgagggaggagacaaaaccacgatgacccctagctttgtggcctgaactgtgggtggctgaggggatcgttaattgaatggggcagactgaggcttgtraggaagatcagagtctggttcttgacatgagatgcccttcaaacatctcttcactcaggtgcaactagggatacagaaacactgkatatttcaacagcagaaattgaatggggggattgatagcsctggcgagggaagcagctggtaaagaagacagatggcaccctgagacagcccagnggtggaataggacccccagngtgcagggattaaagttccatgggttggtg

SEQ ID NO: 33 - DNA, 239 bp, Homo sapiens
  misc_feature (238)..(238): n equals a,t,g, or c
ctcaggctgctgcacgtggscatccgcatccggcctttyttcgacagtttgaccgtggagagcgcggacctgcagggctgctgctttgctgggcctggcagcccccacccgagaagatggagttccggacggcatctatccgcctctttgggcacttaacaaggtctgccacggagactgtaaggacgtcttcctggaccaagtggtgggcgggctggcgccctgctgctgcacctgna

SEQ ID NO: 34 - DNA, 461 bp, Homo sapiens
  misc_feature (426)..(426): n equals a,t,g, or c
  misc_feature (428)..(428): n equals a,t,g, or c
aacaattaagtctttaggaatgtgtaaccagaactatgttagtattgcttataaaactttagttaggttcaatatatacatatatacatctctatataggtatatagatttgcattttgtcttgtaaaattttatttgaataaattcttcctgtaggtaatgggaaacaaaattaatagttcatatgtcactcatagcatttctatatttgaaagtagcccaatataaaacttttgattctaaaattaaaccagcagcctattacaagcacattctttgattgagtcattggttataaacttactaaatgcagrgraagcagccaatttagggaaacttctgagttggtggggacactgttggattaataatgtacggtatgaattaagtgatgccttaacttggattttacattttaaggttaangngggggcatatggtcagccaacttagggggcatt

SEQ ID NO: 35 - DNA, 453 bp, Homo sapiens
  misc_feature (442)..(442): n equals a,t,g, or c
accagaccaaccctatgaatggctttcatataaacaggttgcagaattgtcggagtgcataggctcagcactgatccagaagggcttcaagactgccccagatcagttcattggcatctttgctcaaaatagacctgagtgggtgattattgaacaaggatgctttgcttattcgatggtgatcgttccactttatgatacccttggaaatgaagccatcacgtacatagtcaacaaagctgaactctctctggtttttgttgacaagccagagaaggccaaactcttattagagggtgtagaaaataagttaataccaggccttaaaatcatagttgtcatggatgcctacggmagtaactggtggaacgaggccagaggtgtggggtggaagtcaccagcatgaaggcgatggaggacctgggaagagccaacagacggnagcccaagcct

SEQ ID NO: 36 - DNA, 1940 bp, Homo sapiens
  misc_feature (576)..(576): n equals a,t,g, or c
ggcagaggtcctcagtgcagggcaacaggactttaggttcaagatggtgactgcagccatgctgctacagtgctgcccagtgcttgcccggggccccacaagcctcctaggcaaggtggttaagactcaccagttcctgtttggtattggacgctgtcccatcctggctacccaaggaccaaactgttctcaaatccaccttaaggcaacaaaggctggaggagattctccatcttgggcgaagggccactgtcccttcatgctgtcggaactccaggatgggaagagcaagattgtgcagaaggcagccccagaagtccaggaagatgtgaaggctttcaagacagatctgcctagctccctggtctcagtcagcctaaggaagccattttccggtccccaggagcaggagcagatctctgggaaggtcacacacctgattcagaacaatatgcctggaaactatgtcttcagttatgaccagtttttcagggacaagatcatggagaagaaacaggatcacacctaccgtgtgttcaagactgtgaaccgctgggctgatgcatatccctttgncccaacatttctctgaggcatctgtggcctcaaaggatgtgtccgtctggtgtagtaatgattacctggggcatgagccgacaccctcaggtcttgcaagccacacaggagaccctgcagcgtcatggtgctggagctggtggcacccgcaacatctcaggcaccagtaagtttcatgtggagcttgagcaggagctggctgagctgcaccagaaggactcagccctgctcttctcctcctgctttgttgccaatgactctactctcttcaccttggccaagatcctgccagggtgcgagatttactcagacgcaggcaaccatgcttccatgatccaaggtatccgtaacagtggagcagccaagtttgtcttcaggcacaatgaccctgaccacctaaagaaacttctagagaagtctaaccctaagatacccaaaattgtggcctttgagactgtccactccatggatggtgccatctgtcccctcgaggagttgtgtgatgtgtcccaccagtatggggccctgaccttcgtggatgaggtccatgctgtaggactgtatgggtcccggggcgctgggattggggagcgtgatggaattatgcataagattgacatcatctctggaactcttggcaaggcctttggctgtgtgggcggctacattgccagcacccgtgacttggtggacatggtgcgctcctatgctgcaggcttcatctttaccacttctctgccccccatggtgctctctggagctctagaatctgtgcggctgctcaagggagaggagggccaagccctgaggcgagcccaccagcgcaatgtcaagcacatgcgccactactcatggacaggggccttcctgtcatcccctgccccagccacatcatccccatccgggtgggcaatgcagcactcaacagcaagctctgtgatctcctgctctccaagcatggcatctatgtgcaggccatcaactacccaactgtcccccggggtgaagagctcctgcgcttggmaccctccccccaccacagccctcagatgatggaagattttgtggagaagctgctgctggcttggactgcggtggggctgcccctccaggatgtgtctgtggctgcctgcaatttctgtcgccgtcctgtacactttgagctcatgagtgagtgggaacgttcctacttcgggaacatggggccccagtatgtcaccacctatgcctgagaagccagctgcctaggattcacaccccacctgcgcttcacttgggtccaggcctactcctgtcttctgctttgttgtgtgcctctagctgaattgagcctaaaaataaagcacaaaccacagcaaaaaaaa

SEQ ID NO: 37 - DNA, 864 bp, Homo sapiens
  misc_feature (552)..(552): n equals a,t,g, or c
  misc_feature (773)..(773): n equals a,t,g, or c
  misc_feature (856)..(856): n equals a,t,g, or c
  misc_feature (863)..(863): n equals a,t,g, or c
tctaaatccattacaaatctgcttagcttctaaatatttcatcaatgaggaaatcccagccctacaacttcggaacagtgaaatattagtccagggatccagtgagagacacagaagtgctagaagccagtgctcgtgaactaaggagaaaaagaacagacaagggaacagcctggacatggcatcagagatccacatgacaggcccaatgtgcctcattgagaacactaatgggcgactgatggcgaatccagaagctctgaagatcctttctgccattacacagcctatggtggtggtggcaattgtgggcctctaccgcacaggcaaatcctacctgatgaacaagctggctggaaagaaaaagggcttctctctgggctccacggtgcagtctcacactaaaggartctggatgtggtgtgtgccccaccccaagaagccaggccacatcctagttctgctggacaccgagggtctgggagatgtagagaagggtgacaaccagaatgactcctggatcttcgccctggccgtcctcctgarcagcancttcrtgtacaatagcataggaaccattaaccagcaggccatggaccaactgcactatcaatctcggtcctgaacctcacctccaaaaagaaagcgacttcagtagaaagtggggtcagaaggaagagtgtggtcctggcccagctagacaaaaagcgggatgacttttgtaaacagaatcaggaagcatcatcagatcgttgctcagctttacttcaggncattttcagtcctctagaagaagaagtgaagggcggggaattttatttcgaaaaccaaggggggtaaccgtctctgttattcnagaaagnt

SEQ ID NO: 38 - DNA, 703 bp, Homo sapiens
  misc_feature (92)..(92): n equals a,t,g, or c
  misc_feature (155)..(155): n equals a,t,g, or c
cccaccctgatccccaaaagtggggccttggctcttttccttcctggaattgggagctcctgcagaagtcaggctacacaatgtgcccccanaatctgagaaggcctcccctaccttaggccagagggaagtagccaccaaactcaggataagcntggtcagaggggagggccaagcagcctctgagttgtggtcctaaaccccagtgttccctcccctcccaggttccgggtgacacacattgagaagcgctatggactgcacgaacaccgtgatggctcccccacagacaggagctggggctctggtgggggacaggacccagggggtggtcaggggtctgggggagggcagcccaaggcagggatgcctgccatggagaggctgccccctgagaggccacagccccaggtcctagccagccccccagtacagaatggaggactcagggacagcagcctaacccctcgtgcacttgaagggaaccccagagcttctgcagagccaacactgagggccggagggaggggcccaagcccagggctgcccactcaagaggcaaatgggcagccaagcaaaccagacacttctgatcaccaggtaggaaaacacagccgggactgcactgggctgggctcttattgctctctactctgggggggcactgataggacctactcctggcggacgcgtgggtcgaccc

SEQ ID NO: 39 - DNA, 337 bp, Homo sapiens
  misc_feature (71)..(71): n equals a,t,g, or c
  misc_feature (331)..(332): n equals a,t,g, or c
aggtgacactatagaaggtacgcctgcaggtaccggatccggaattcccgggtcgacccacgcgtccgcanttacatttatgtttgtagttctaagtaagaccctgagagattttcaaaaaggaattaatgattatttttgtcttccccaggattggaacgagttactatgctgtttctgggattgcataatgttcgtcagacctccatgttccctcgtgatcccaaacgactcactccttaaattcacactttgccacttaactccagtgtggatgacagagcgagaccctgcctcaaaaaaaaaaaaaaaaaaaaaaaaaaaaaaaaannccccc

SEQ ID NO: 40 - DNA, 631 bp, Homo sapiens
  misc_feature (524)..(524): n equals a,t,g, or c
  misc_feature (608)..(608): n equals a,t,g, or c
  misc_feature (615)..(615): n equals a,t,g, or c
  misc_feature (630)..(630): n equals a,t,g, or c
agggaactcactgtggttttratttgtatttycttttttaagtgaaagcargkttattaagaaagcaaaggaataaagaatggctattccataggcagagcccattgccactcagctgcttatacttattgttacttcttgattgtatgctaaacaaggggtggattattcatgagttttatgggaaaggggtgggcagtatctggaactgagggtttctcccctttgtagaccatacagggcaacttcctgacgttgccatggtatctggaaactgtcatggtgctggtggaagtgtcttttagcatgctgatgcattataattagagtataatgaatagtaaggacaaccagaggtcactttcatcgccatcttggttttggtcagcttctttactgcagcctgtttcatcattaaggtctttattacctgtatcttgtgccgacctcctgtctcatcctgtgacttagaatgcctaacctcctgggaatgtagcccagtgggtctcagccttattttactncaccccctaattcaagatgggagtttctctgggtttcagacaacccctggacatgttttcccccctccctttttacagcagaanccttaantcccaacagtcgtana

SEQ ID NO: 41 - DNA, 571 bp, Homo sapiens
ttttttttttttttttttttttttttttgggtattatacattttatttaagacttcaaagtaaaaaaaaaaaaaaaaggtacagaaatagattacattatgatgaccacagtagtattctacatgacaaaaataaaaacagatttaagtaaatgtaccggcactgaacaagcatttacttaacatccaatccaggctgcatatgcacaaaatgatctgaccacatgcttatgcaaaataaagtttttcttagaaagccaaaattccaaccattctgactgtccgctgcctattcccctgttgagtattttgagcgaacttctatagaatataagaacaattggcatggcacttaaagactgcaaaaaacagaacacaattaaaaacatttataatgcatttctgtataaaatacacaccgtaaatcttattagttaaaaaaagatttaaaaacaaaagaccaccctgaataatggttaaaacctcatcatagaaaaatgctcatcattttgtacactgaaagaaactactgagaggttttttggggggctggtgggactcgtgccgaattc

SEQ ID NO: 42 - DNA, 424 bp, Homo sapiens
  misc_feature (413)..(414): n equals a,t,g, or c
tttctaaaaatcaggaaaattagttactaaaaattgctgatcatttttgtttcattatttttgttatttcaaatgtataagctctgggattctttttggagcaatacctacaaagtcaggcaccagaatgtgcctcagagctgtgacatttcaacatgatggttttggtttggtttggttttgtgtcctttttatttgcagttttttctgttgcaacagaaagtggcttggaagtcttaggtggtatgtaacaaattctttttaaaaattttaaagcagtatttaagtattcttaaatgtgtaaattcatttaatgttttacttctaatttcttgtatcttggctgtctggttttattgcatttttaaaaaaactgaaccattaagkaattggaaatgaatgaaggtgaaatnnctgaacctga

SEQ ID NO: 43 - DNA, 1626 bp, Homo sapiens
  misc_feature (525)..(525): n equals a,t,g, or c
  misc_feature (542)..(542): n equals a,t,g, or c
  misc_feature (562)..(562): n equals a,t,g, or c
  misc_feature (607)..(607): n equals a,t,g, or c
ccacgcgtccgacgcggcgcacgcggcagtcctgatggcccggcatgggttaccgctgctgcccctgctgtcgctcctggtcggcgcgtggctcaagctaggaaatggacaggctactagcatggtccaactgcagggtgggagattcctgatgggaacaaattctccagacagcagagatggtgaagggcctgtgcgggaggcgacagtgaaaccctttgccatcgacatatttcctgtcaccaacaaagatttcagggattttgtcagggagaaaaagtatcggacagaagctgagatgtttggatggagctttgtctttgaggactttgtctctgatgagctgagaaacaaagccacccagccaatgaagtctgtactctggtggcttccagtggaaaaggcattttggaggcagcctgcaggtcctggctctggcatccgagagagactggagcacccagtgttacacgtgagctggratgacgcccgtgcctaatgtgcytkgsgggggraaacgactgncccacsggagggaagantggggagtttttccgcccgnaggggggcttgaarggtccaagtttaccccatggggggaactggnttccagccaaaccgcaccaacctgtggcagggaaagttccccaagggagacaaagctgaggatggcttccatggagtctccccagtgaatgctttccccgcccagaacaactacgggctctatgacctcctggggaacgtgtgggagtggacagcatcaccgtaccaggctgctgagcaggacatgcgcgtcctccggggggcatcctggatcgacacagctgatggctctgccaatcaccgggcccgggtcaccaccaggatgggcaacactccagattcagcctcagacaacctcggtttccgctgtgctgcagacgcaggccggccgccaggggagctgtaagcagccgggtggtgacaaggagaaaagccttctagggtcactgtcattccctggccatgttgcaaacagcgcaattccaagctcgagagcttcagcctcaggaaagaacttccccttccctgtctcccatccctctgtggcaggcgcctctcaccagggcaggagaggactcagcctcctgtgttttggagaaggggcccaatgtgtgttgacgatggctgggggccaggtgtttctgttagaggccaagtattattgacacaggattgcaaacacacaaacaattggaacagagcactctgaaaggccattttttaagcattttaaaatctattctctccccctttctccctggatgattcaggaagctgmacattgtttcctcaaggcagaattttcctggttctgttttctcagccagttgctgtggaaggagaatgctttctttgtggcctcatctgtggtttcgtgtccctctgaaggaaactagtttccactgtgtaacaggcagacatgtaactatttaaagcacagttcagtcctaaaagggtctgggagaaccagatgatgtactaggtgaagcattgcattgtgggaatcacaaagcaaatagtactccagaaagaccctgtctcaaaaaaaaaaaaaaaaaaaaaaaaaaaaaaaaaaaaaaa

SEQ ID NO: 44 - DNA, 450 bp, Homo sapiens
  misc_feature (291)..(291): n equals a,t,g, or c
  misc_feature (382)..(382): n equals a,t,g, or c
  misc_feature (404)..(404): n equals a,t,g, or c
  misc_feature (439)..(439): n equals a,t,g, or c
acccacgcgtccgccggcgcggtctatggctgcgacttctctaatgtctgctttggctgcccggctgctgcagcccgcgcacagctgctcccttcgccttcgccctttccacctcgcggcagttcgrggaakctctccctaggtcaggttggagtgcagtgctgcaatcacggcttactgcagccttgacctcctgggctcaagtgatcctcccacctcagcttaaatgaagctgttgtcatttctggaaggaaactggcccagcagatcaagcaagaagtgcggcaagangtagaagatggggtgggctccaggcaacaaacggccacacctgaatgttgatcccgggttggcgaaaaatccctgcaagtcactcctaatntcctccaacaaaaacaaagggnaagttgcaatttgttgggaaatccaccagttgaanaacaatttttt

SEQ ID NO: 45 - DNA, 960 bp, Homo sapiens
attttttttttttttttttttttttttaaaacaacttctcaaatttatttaactcatgtggttaacatggtattgtataaaaagaaaaaaaaaacaccactcaatacttactaagccttgcagacagctcagagttgaggcagcatattgggcatagagatcataggatttgtattatcccttgcaagatggaactccaaccaacaccagaattttccaattcaaattcagttttagtcgagaccccagcataatttttagaaaaaagattggattgttgcttttcttttaattttccattcctatttagacaaatgaccagaggcaatgacaaaagtaactgtttaaaagggatttctctccagaagttttttctaaaggtttaagtccaggctttccatccttctctccatcctttttcattttaaaaagaagggttttggratwtgtcaacctttactcagcttgctatacaaagccactgctttagtcctagacataatgccaggactcatctcccaaacttctggtcttaatcaagttcatgcttggttgctaaagaagctcatgttaatcccaaagtcagcacaatcccaaccttaaaaagcagacagcctgattgcatcacttacgacatacaccatcttgaggcaaaagaagccagtcagacaccccttgtctgctacgtgtgagacacatcagcagttgagcctgaccccttccgcagagctcactgtgcaaaatcaccagcacaccactgcaatccactgagctcaccgcctgtccagccataatggaagtcacttgaaggttatcattgtaatagatgattttccataagtaactaataaaaatgttttctttgatgtttagacctactaacaattcagtctctccctctccatcctctcttagggagcctgtacttttaagcaaatagggaagctaaaacctcgtgcc

SEQ ID NO: 46 - DNA, 530 bp, Homo sapiens
  misc_feature (78)..(78): n equals a,t,g, or c
  misc_feature (362)..(362): n equals a,t,g, or c
taacaattcaatatataattacacaaataatttttaaatataatcaatagtaaagactgttctgtggatggtagtgtntaatacattttctattttgtacagtgattttaggccaaacagctgctgattttaagaaaacaaaaggcctgaaacccgtcttcgtgtctcctccctccctcgccttcctccttcctagctcctctcctccagggccagactgagcccaggttgatttcaggcggacaccaatagactccacagcagctccaggagcccagacaccggcggccagaagcaaggctaggagctgctgcagccatgtcggccctcagcctcctcattctgggcctgctcacggcaknccacctgccagctgtcagcaaggcctggggaacttcagccctggatgcagggccttatcgcggtggccgtgttcctggtcctcgttgcaatcgcctttgcagtcaaccacttctggtgccaggaggagccggagmtgggagtcctggtggggaacagattggaaggta

SEQ ID NO: 47 - DNA, 538 bp, Homo sapiens
  misc_feature (41)..(41): n equals a,t,g, or c
  misc_feature (502)..(502): n equals a,t,g, or c
gccgcggccacggggcgcaggggccatggtgcgcggcaggntcttccggctctcggtccgggacgtgcgcttccccacgtcgcttgggggccacggcgcggacgccatgcacacggaccctgactactcagctgcctatgtcgtcatagaaactgatgcagaagatggaatcaaggggtgtggaattaccttcactctgggraaaggcactrwagttgttgtctgtsctgtgaatgccctcgcccaccatgtgctcaacaaggacctcaaggacattgttggtgacttcagaggcttctataggcagctcacaagtgatgggcagctcagatggattggtccagaaaagggcgtggtgcacctggcgacasggccgtcctaaacgcggtgtgggacttgtgggccaagcaggagggaaagcctgtctggaattacttgtggacatggatcccaggacgctggtatcctgcatagatttcaggtacatcactgatgtcctgantgaggaggatgccctagaaatactgcagaaagtcaa

SEQ ID NO: 48 - DNA, 1256 bp, Homo sapiens
ggcacgagcattaaccaaaaaatgtgcaaacacactactatgatttaccaaaagactctctgcaagtggtaaatcattagctctagtgttgctctttgtaacctcaggtctttggggaatggtgcagaattagtattgcttccttctttctgtgtgtgataatggtgggggaaggctagtaccatctctgtcatacatcaaattcccatatgtgaataaatttatgtatttttactgcactctttttataggtttatcattcctgcaccaacaacgaatgccattattaaaactttatagaaagtctcaatatatggcacagtgcttcatttctttttttcatctagagtgccttagccattcttggctttctgccgttccacaaatagcaatgtaaatttgtcagtataatagagaatccacttatatttcttcaacagctattgggaatatggttgggattacttcaactctatgtatcaatttgaggagaattgatatctttataagattaatccaaatcacagcatgtcaaaatttccttattagggtagttttaatgtccttcaaaaacactgtattttcttcatatagatctaagaaaactttggtgtttattcctaagaaatttatagttcttgttttgtaaatgatatctattcttaagttacacttaaacttatttgttgctgtatatagaaatggaattgacttctatgtacagcagttgcaaactgatattcatatgcagaaagtgaaactagacccctaatggataaaagacttaaatgtaagacctgaaagtatgaaactactagaagaaaacatatgggaaacacttcagtatcctggcctgggtgaagattttatggagaaaacctcaaaagcataggcaacaaaagcaaaaatggacaaataggattatatcaaactaaaaagattcagcacagtaaaataaataatcwatagagtgaagagacaaccttcagaagatatttgcaaactattcatctgacaagggattaatatttagaacatacaaggacctcaaacaactgagcaacaacaacaaaaatatccaattttaaaaatgggcgaaagagccaaataaacatctctgaaaaccagacgcaagtggccaacaggtatatgaaaaaaaaaaatgctgaacaccgctaatcatcagggaaatgcaaaccaataccacaatgagatattatctcattwtggctattatcaaaaaaaaaaaaaaaaaa

SEQ ID NO: 49 - DNA, 666 bp, Homo sapiens
tggcacctgcaggactgcgaagatctccttggcgctgcggggccattggcggggatgggcgggggaggggggcctcgacggtttcccatccccctctggcaaccctaatcttccttctccatctgggccctggggcgtcttccaccacccaggccggatgctttaaaaaaaattgctttttaaagtgtctgtcgttgaaagaaattagtcttacccttgaagtcargggcgcgtcctcgcaatacacatcttgttagggaaagtgttcggctccagctakggttctacaaggcgtttcttgttcaccgccggagggaagcaggctccggagtgactgccttctgaaagtcggtcttgtaacaattggatgratgcctttgaagagcccctgtccctattctatgcttgaaaacagcgtgcagtcctaatgttcaagaaccacgaccacataaaaacattgctccccttctgctgctttgaaaacgacccctaaattccgtgtagaagttgccaggtcgtcttgacgtacacttcgtttgtatgatgtttgtctgtcaaatactgtgatggaagagtgtatgcgggggaggagcagggaatttttaaaarcattttccggkcacctcagactgggagatcatgttctttcctgaaaaaaaaaaaaaa

SEQ ID NO: 50 - DNA, 1016 bp, Homo sapiens
  misc_feature (6)..(6): n equals a,t,g, or c
ctggcnctgcatcctcaacatcctcaaagggtacaacttctcccgggagagcgtggagagccccgagcagaagggcctgacgtaccaccgcatcgtagaggctttccggtttgcctacgccaagaggaccctgcttggggaccccaagtttgtggatgtgactgaggtggtccgcaacatgacctccgagttcttcgctgcccagctccgggcccagatctctgacgacaccactcacccgatctcctactacaagcccgagttctacacgccggatgacgggggcactgytcacctgtctgtcgtcgcaraggacggcagtgctgtgtccgccaccagcaccatcaacctctactttggctccaaggtccgctccccggtcagcgggatcctgttcaataatgaaatggacgacttcagctctcccagcatcaccaacgagtttggggtaccccctcacctgccaatttcatccagccagggaagcagccgctctcgtccatgtgcccgacgatcatggtgggccaggacggccaggtccggatggtggtgggagctgctgggggcacacagatcaccacggccactgcactggccatcatctacaacctctggttcggctatgacgtgaagcgggccgtggaggagccccggctgcacaaccagcttctgcccaacgtcacgacagtggagagaaacattgaccaggcagtgactgcagccctggagacccggcaccatcacacccagatcgcgtccaccttcatcgctgtggtgcaagccatcgtccgcacggctggtggctggcagctgcctcggactccaggaaaggcggggagctgccggctactgagtgctccaggaggacaaggctgacaagcaatccagggacaagatactcaccaggaccaggaaggggactctgggggaccggcttcccctgtraagcagcagagcagcacaataaatgaggccactgtgccaggctccaggtgcctccctggcytgtctcccca

SEQ ID NO: 51 - DNA, 423 bp, Homo sapiens
agtgagctgtgattgcaacactgcacttcagcgtgggcaacagagtgagatcttgtctcaaaaaaaagaaataatactagtttttgtttktagattttgtatcctgaaactttactgaatgttttttagttcgaacagtttttttggtggagtctttaggattttctctacttatgatcgtgtcatctgtaaacagagacagttaacttcctcctttccratttagatgccttttctttctcttgcctaattgcctaattacagcatgttcctattctgtaaatgttcaatgaactagaraatgattcttgggtagttaatattgtcaatgttgatgaactcttttccttcgctgaaagcagctactttgttggaggtttcaattctgcgtggcaatttgcagcatttctagtggtactgctc

SEQ ID NO: 52 - DNA, 961 bp, Homo sapiens
gcctctaccacctcagttacagacaccaccaaggtcaaacagtgtatttgctgtcaaccaagctgtgtcaccaaacttttcacaaggatctgccataataattgcctctccagtccagcctgtactccaaggaatggtagggatgatcccagtatctgtggttggacagaatggaaataacttttctactcctcctcggcaggttcttcatatgcctttgacagcacctgtatgcaatagaagtatccctcaattccccgtccctccaaaatctcagaaggctcagggactaagaaacaagccttgtataggaraacaagtaaataatttggtggattcgtcaggtcattcagttggatgtcatgcacaaaaaactgaagtttctgacaaaagtattgccacagatcttgggaaaaaatcagaagaaaccacagttcccttcccagaagagagtatagttccagctgctaaaccatgccacagacgtgtactctgtttcgacagcactactgctcctgtggcaaatacgcaggggccaaaccataagrtggtgtcccaaaacaaagaaaggaatgcagtctcttttcctaatcttgactcacccaatgtgtcctccaccttaaaacccccttctaataatgctatcaaaagagagaaagagaagcctcctctgcctaagattttatctaaatcggaaagtgccattagccggcataccaccataagagaaactcaatcagaaaagaaagtttcaccaacagaaattgtgcttgaatctttccataaagcaacagctaataaggagaatgaattatgcagcgatgtaggaaagacagaaaaatccagaaaattcaaaactatctattgggcagcaaaatgggggtttgcgaagtgagaaatctatagcttcactgcaagaaatgaccaaaaaacaaggcacatcttcaaacaataaaaatgt

SEQ ID NO: 53 - DNA, 545 bp, Homo sapiens
  misc_feature (12)..(12): n equals a,t,g, or c
  misc_feature (34)..(34): n equals a,t,g, or c
  misc_feature (142)..(142): n equals a,t,g, or c
ccaccgcggtgncgaccgctctagaactagtggntcccccgggctgcaggaattcggcacgagttggagtcctttgctgttcccaatttgtggaagagtgaagacatcacccaaatcgtggccaactatgggctcatatgtnttactcgggctggaaatgatgctcagaagtttatctatgaatcggatgtgctgtggaaacaccggagcaacattcacgtggtgaatgaatggwtcgctaatgacatctcatccacaaaaatccggagagccctcagaaggggccagagcattcgctacttggtaccagatcttgtccaagaatacattgaaaagcataatttgtacagctctgagagtgaagacaggaatgctggggtcatcctggcccctttgcagagaaacactgcagaagctaagacataggaattctacagcatgatatttcagacttcccatttggggatctgaaacaatctgggagttaataactggggaaagaagttgtgatctgttgcctaaactaaagcttaaaagtttagtaa

SEQ ID NO: 54 - DNA, 377 bp, Homo sapiens
  misc_feature (301)..(301): n equals a,t,g, or c
  misc_feature (347)..(347): n equals a,t,g, or c
  misc_feature (359)..(359): n equals a,t,g, or c
cgatcacccccgaaccatttcatcacgtattcttcagtggctggacgaggagctgcccgacctgtccgtgtctcgcagaagtagccacttgcactggggcattccggtgcccggggatgattcgcagaccatctatgtatggctggatgccctggtcaactacctcactgtaattggctacccaaatgctgagttcaaatcttggtggccggccactctcatatcataggtaaggacattctcaaattccatgccatctattggcctgccttcctgttargggccggcatgagcccgccanagcgcatctgtgttccattcccaatggaacagtctgtgggccaaanatgtccaagagnttgggcaagtggtggatc

SEQ ID NO: 55 - DNA, 440 bp, Homo sapiens
  misc_feature (387)..(387): n equals a,t,g, or c
  misc_feature (416)..(416): n equals a,t,g, or c
  misc_feature (436)..(436): n equals a,t,g, or c
ttggacatcgtggccaactctatcaagaccacaaataccacttacaattaattttaaattattcatctgtacatagttttctaaaatgtatataattcaaacagagcatcttgtaactgaagacacaccatatctatgatatcgcattagtccatgtggggaaaagaaagatcagattgttactgtgtctgtgtagaaaaggaagacataagaaactccattttgatctgtactaagaaaaattgtttctgctttgagatgttgttagcctataactttagccccaactctgtgctcacagaaacatgcgctgtaatggatcaaagtttaatggatttagggctgtgcaggatgtgccttgttaacaatatgtttggcaggcggtangccttgggtagaagtcatcggccattccnccattccccggtttaacccngggg

SEQ ID NO: 56 - DNA, 525 bp, Homo sapiens
  misc_feature (345)..(345): n equals a,t,g, or c
gtccggctgggccgggacaaaagccggatcccgggaagctaccggctgctggggtgctccggattttscggggttcgtcgggcctgtggaagaagcgccgcgcaacggacttcggcagaggtagagcaggtctctctgcagccatgtcggccaaggcaatttcagagcagacgggcaaagaactcctttacaagttcatctgtaccacctcagccatccagaatcggttcaagtatgctcgggtcactcctgacacagactgggcccgcttgctgcaggaccacccctggctgctcagccaraacttggtagtcaagccagaccagcttgatcaaacgtcgtggnaaaacttggtcttcgttggggttcaacctcactctggatggggtcaagtcctgggttgaagccacggttggggacaggaagccacagttggcaaggccacaggcttcctcaagaactttctgatygagccyttcgtcccccacagtcaggytkaggagttctatgtctgcatctatgcca

SEQ ID NO: 57 - DNA, 414 bp, Homo sapiens
  misc_feature (403)..(403): n equals a,t,g, or c
ttagaaagaragggggctgggggccgagacttctgggtccctgtatgttgcagagggttgcatgtcatctccatggagaaggctgtgtacgctgtcacgcaatcccttgtaagaggccaggcccctgggggaggagggagcagctgtggctcacacagccccaggaaaccacctcttccttcagtgagtcagatagatagagaatcccgtgacagtgacaggcaagtgactagccagatagaaagcatttttgtgtaataactaatttttgtttgcttctctctctctcttccccgccctccccatccggattcccgtggctgtgtgcatctcctgsctgtgtccccatgtctgcccgcagtgcgcttctccgagaaggtcactgtccattcctgggtgtctnggcaaggccgg

SEQ ID NO: 58 - DNA, 323 bp, Homo sapiens
  misc_feature (11)..(11): n equals a,t,g, or c
  misc_feature (274)..(274): n equals a,t,g, or c
  misc_feature (321)..(321): n equals a,t,g, or c
tcgggtccggnattcgccggtgccggggacagaaacctcctgccttcttagttcataacccccccttacattagattctaaccctgtggtgattttaggttgggatttgggcgcctgcagatggctccgaagccagcctcttgtgatccgagccacttctctggcactcggagcgctggcacccgcggagcccttggttcaccggaccgcctgggaacctggccggggtctctggcagcctcccagggctgaggttcagactctgttccgcctnacccaggtccacacctggatagggctgggagttgaggcttggttttnaa

SEQ ID NO: 59 - DNA, 841 bp, Homo sapiens
tcgacccacgcgtccgsagatttcagcctcacatactaagtaaatactgataaataaggaaattagaaatttagtattcataattaaatatgctctaaaatttcckrtacttttatttcctgtttattcttaggtagattggaagggggaaacagtctgttctccctaattaaattttttctaataacgattagtagaatatggacattctatatgacagtgacattaaaagaggctctttggaagtatatacattattaacataatgtgtacaagtccttttgaaatgacaactttaatgggtttcagctcttttatctagagcttgagataattcaagctgagtttttcagggcatatcacaacggcaaagtgttcagcagtgggatatcaatgcttatttacattttcctactgctatttatataaaatgttattccattcagaggatgccttttatccccacattaaagcacagatcattaagcaataaaaaccaaattgtctgtcattcaaattataactgcagttatttttgcatggtaagagtgaggtgctaattttgtgtgagatgaactttgtaaactactttgggaaatgttctttggaagtaaggttttttctcctttagtcttatgcttccacttttgtctcagattcacaatccattaaaamawggggaaaaaagaaaargtaaaattgagagacttttgttagaggagctatttggaatgaaccaacattycasatttcccaaaatgtaagttaggaagtctccatkgycyckgccattaccaaaatacactgktactatcttaatctcaagagtgtcattacagtg

SEQ ID NO: 60 - DNA, 534 bp, Homo sapiens
  misc_feature (423)..(423): n equals a,t,g, or c
  misc_feature (430)..(430): n equals a,t,g, or c
  misc_feature (524)..(524): n equals a,t,g, or c
aggaaatttagaaaatgatgaattcttgtccatttttgtaatcaagattttaggaaaaacagaagtacatctatctttatgaaattttgggcaggtttttgtgtatcaatattttgtacttttagggaatattttattttttagttatttgtgtcaaattataattataaaaggtacagcagaaaatataccatgtttttatataggttcacacctgtacttaggagggaccctgtccatctatatactttttgtataaaattttaaaatgttaaagatccacaaggtcttaataaaatgattctatagctagaaaaaccattaccttcccagtggcttgcactaaaatatacctgggaaaaggaacctagaaagactggtaactaatgcctggaaatgttctatattgaatgtaccatgccnctggttngggaaaaatgtactaataatgggaatgggaaataaacccagaaatccgaagttaattccagcctaaaaaaaaaaaaaaaaaaaagggggggccncccctagggg

SEQ ID NO: 61 - DNA, 317 bp, Homo sapiens
  misc_feature (222)..(222): n equals a,t,g, or c
  misc_feature (250)..(250): n equals a,t,g, or c
  misc_feature (265)..(265): n equals a,t,g, or c
ggcacaggaaaaagcactttcttaagcctacagtatcagatcaatggggaaaacaacagaaaactaagaggagaattttcccgttaattttcttgcagaaaagtataagtctaattgcccattgccataaattttgtcttgtactcagagaagcaacatgcactggctcattttatgtgcaaagaaaagatttcaccattaaaaaaattaacttggctaggnatggtgtctcacactggtgaatcccagncactttgggtggctnaaggcagatagactgcttgaaacccaggaattcaagaccagcctgggacaac

SEQ ID NO: 62 - DNA, 1789 bp, Homo sapiens
ggcacgaggaaacggacaacaatgttgttgccaaaactggatcaggctaccataatcttttttcttacattccacttttctatcttttccaaatattccacagtgatcatgtattaatttttctcttattttgatgttgcaaatatttattttattatggaaaacggcaagctacatatggggaaaaagaaaaattgaaattatgcaatggcctaccactcaagagataattattaagattgtggtgtacttttttctatatacttttttttaaaggaaaggatcttactctgtcgaccagcccctcacctcctttgactagctgggatgacagcacatgccaccatatccaagtatttttgtattttttgtagagaaggggtttcattatgttcaaactcctcagctggcctgcttgatccgatgcttgttagccttgacatttacaatgaacacaagtgtgttgccatcttctgtcttcttcacagacaacttagtagtcaggggaacttgatgatggccaagtggtcaagctcctcagggctgtcttccgtggatacttgagctgccccaggagccacagcgtctcaggcagctgaaaagtgagtgacatgtagggtgtgtgtgtgtgtgtgtgtgtgtgtgtatgtgtgtgtgtgtgtagctgtaacacctcagccttgcctccttggccttcacagcccttgctttagctttggctttgagagaggcagaggctccctcttttgccctcactgttatcttggtgaaaagccagtttggcagtttctttttttaaaaaaatgcaagtatcataattcagcaatcacatttgggggcaatttatcccagagaaagggaaatttatgttcacataaaaacctgaattaacttcaagggaatgttatttaacaaacaggttttctcacttaactgattatattcttgatggatacacaaattaaatcttaatacaatatctccagtggatcctccaaagttgtatctgttttcatgggccagaatgagggaaagtcattctggccattctcttttgcagagaaggtcattctcttttctatatgaggagcatctctcaactgcaaggtgcagctcaaatatctgtctatgtatagatacgactttcaaagtctagataggaatggcttgaacataccatccacattttatggaaaatcgcttgtttctcttttcccctgtcttaatctgtttgtgctgtaaacaaaacaaaataccagagactggataatttataaacagcaggagtttatttctcacagtttcagaggctgggaagtccaagatcaaggtgccggcaggcttggtgtctagggaaggatcattccttatagatggtaccatctaggtgtcttcacatggtaaagggaaggaagggcaaacagggacctagttggtccccgccagacctttcataaggtcactagtcccactcatggaggctctacccccatgacttgattttttcctaaaggccccacctcttgacactgttgcattgaagattaaatttcaacatgaattttggagggaatgcaaacattcaaacaacagcactccctcatctatagatttctacaactttcagattattgcagcaagtggttccatctgtaaatcacttggctagcttatgtgtgttgtctctcttccataacacatcaacccaagatttccaacaaaagaataataacttaaaacaacaacaaaaaaactcactcacacaaagtatgtgtataagcaggttgta

SEQ ID NO: 63 - DNA, 654 bp, Homo sapiens
tcaagatctttatccttaaccaccatgttatacggggactaaagagtgccggtgagtttgtgaacccagacccttccccagccacacctggcaacaccccctgatctctgggaccacagctgggttgtagggaaagaatggagtctcctaaatggtgatttttctttatttccccgcaccttcaatctcatggcatggtctgcaggaaacctcagagtcctgccaactcgcaggcttcgctgatcgcatggcacctgggcaccccgccaaagagctgaaactcccaaggctcagccaggactctccagctgtggtgtttctaaaagccgttctgggtgagatgtagagccgagttttcccagtcgctcagtcctcctcccgtgaggacaacactgcttgctctcctggcttgcctcacccatccaggaaaaggtggggaggggctctaggcagcggcctctcctggttgaaagaaactgagacctgggccttccgtccagtttaacctggagcaggcctggccmctgggcaggctcagagcaggtcccccattcagcaaatgagggtatcctcctattttgccaacatccatyttyaccgacttggsctgaacccattctgagtacagagggacacccatgcctgtgccgaatt

SEQ ID NO: 64 - DNA, 334 bp, Homo sapiens
  misc_feature (154)..(154): n equals a,t,g, or c
ggcacgtaggggatgcccaccgccagtcaaagggttgggggtggtctctgcaccttaagtactaacctgccgcccacgcgcctcctgaccacagcaccccgtcggctttctaattctgtgagctgccctcgtgggcgtggcctccctgtggagntccccatgtgcctccccttggtccagcctgcagctaggaagtgggtcacagcgacggggctgggctgggccaggccaggctccgggagatgtggaattggcgaaacaactgccccagtagtatcctccgcctaggrctccaagaggtgggaattggggcactacggccgggtaaggcagt

SEQ ID NO: 65 - DNA, 474 bp, Homo sapiens
tgcaaacatgatggatggggaaagcatagtaactgtactcaccaacaagatgctggagtgacctgctcagatggatccaatttggaaatgaggctgacgcgtggagggaatatgtgttctggaagaatagagatcaaattccaaggacggtggggaacagtgtgtgatgataacttcaacatagatcatgcatctgtcatttgtagacaacttgaatgtggaagtgctgtcagtttctctggttcatctaattttggaraargctctggaccaatctggtttgatgatcttatatgcaacggaaatgagtcagctctctggaactgcaaacatcaaggatggggaaagcataactgtgatcatgctgargatgctggaktgatttgctcaaagggascagatctgacctgaractggtaatggagtcactgaatgttcaggaagattagaagtgagattccaaggagaatgggg

SEQ ID NO: 66 - DNA, 367 bp, Homo sapiens
  misc_feature (250)..(250): n equals a,t,g, or c
  misc_feature (252)..(252): n equals a,t,g, or c
ccggcctcaagcaatcctcccactggcctcacaatgttgggattacaggtataagccactgcacacggccttactatgctatcaattccatatatggaaaggtgttttccctttcagagctctttaaagctctgcagaagatttacatgtgtttatagagctaagagaaatcagggcatggaaattgagtgtgtaataaaaattaaactcttcatgttatataatcatgcataacttctatcttcattcncnggaagttgcctagagcaccatcacagctaggaagcttccatcatggattaccttatttcccaaagcaagtactccaataattgtctcaagagaggaaggacaactggttaccagc

SEQ ID NO: 67 - DNA, 564 bp, Homo sapiens
  misc_feature (542)..(542): n equals a,t,g, or c
caaccccctacagatatcaagggaccactatacacattaggatgatctatattgaaatctacatggaacagagtgggacttctaattgtatgacttcaagattttgctttgtttaaattaataactgttttcagaattaagtgcttaaaaacaaatttgattgaaaagttcaagacaagaattttgctctctatggctgttccatataaatttgatggttgattctgaatgtaaatgactgaagaattaaaaaataagaaattcctttttaaaaggcatgcctcttgcactgtgaacaagacagtagtcccttaaaccatgaatatgtcagtgttctatggattacgaaattagtaatgttgcttagcccaaacgtgttttttaaaaagtatagttttgtacatctcyaagttatcaaacttcaaaattgagaacaaatttaaaagtccatatatgcaactctagtaagcacttaataggttacatagcactggttaagaacaattaattttgtttctatattattactaattattattacnaatcaaaaaacactgtgataag

SEQ ID NO: 68 - DNA, 444 bp, Homo sapiens
  misc_feature (358)..(358): n equals a,t,g, or c
  misc_feature (382)..(382): n equals a,t,g, or c
ggcacgagggaaaaccataactgcctcttaatttaacatagaataatacatagttctgtattttttttaaagtgagcttaatgggtaagtattttttatatgctttagctatagctaaagaaaactgatacttaacaaagttgaatagtattattcactggtgctcctaaaatattgtttttcagtgtaaaatatgcatatcttctatatttaatatgaaagtcttgaaatgtatcagacagaagggkatttcagtttgcaaataatgagcaatgtagcaattttaacacatttcataaatatatattttgtcattggtggagagcaccatttgttgttttgaatatactttaaaggnaagaggtacaagggacataaatgntgagattacctacaggatggaaatagcagtacagttccattggtagatattttgaaatgttt

SEQ ID NO: 69 - DNA, 347 bp, Homo sapiens
  misc_feature (327)..(328): n equals a,t,g, or c
  misc_feature (340)..(340): n equals a,t,g, or c
ttgagctctaaatgcaaaactcttttatactgaaaaaacacttaaagyagttttgtgtggcatcacagtgatttgtcatgaaaagccatatatgggggacatgctaaaatggcttctgaatgaaatacgacagcagagaaagatgccactgaaatgctgaaattatctttgctgagcagcttttgaatgctaagggttccagtatgtgacccaaagaaggagttgtctcaactccttggtacagggttcattcaaacccccaagctgtgagagtgtgtttatttttaattttttaaaaggtatttaatttccaaccacacttcttanntttttggaaaangacaatt

SEQ ID NO: 70 - DNA, 322 bp, Homo sapiens
  misc_feature (245)..(245): n equals a,t,g, or c
  misc_feature (321)..(321): n equals a,t,g, or c
agctggggccaaaaatagaccagaattatctgctacttgaatgtttggcaaaactctcctagaaaactgagtctgatgtttgatttgtgtaaagacttctttaacttttctaactcaatttttactaagttataggactactcagattttgtttcttttttgctcaattttggtcaattttgtttttgtctatgtcacctaagtttycaaatgtattggcatgaatatttycataatattccctnattatcttttacatttctggggtatcttagcggtgtttccctttttatccctaaaatgtttatccatgctttcttnt

SEQ ID NO: 71 - DNA, 834 bp, Homo sapiens
  misc_feature (793)..(793): n equals a,t,g, or c
  misc_feature (810)..(810): n equals a,t,g, or c
  misc_feature (814)..(814): n equals a,t,g, or c
  misc_feature (834)..(834): n equals a,t,g, or c
gatatgatgcccctccttcataattatgtaacagttgatacagacacacttctgtctgacaccaagtatcttgaaatgatatacagtatgtgcaaaaaggttcttacaggagttgcaggagaagatgcagagtgtcatgcagcaaaattgttagaggtcatcattctgcagtgcaaagggcgtggcattgaccagtgcattcccttattcgtggaagcagccttagaaagactgacaagagaggttaagacaagtgaacttcgaactatgtgtctgcaagttgcaattgcagctttgtattataatccacacctactactcmataccttagaaaatcttcgcttccctaataatgttgaaccagttacmaatcattttattacacagtggcttaatgatgttggactgtttcttggggcttcatgacagaaagatgtgtgttctcggactctgtgctcttattgatatggaacagataccccaagttttaaatcaggtttcyggacagattttgccggcytttatccttttatttaacggattgaaaagagcatatgcctgccatgcagaacatgagaatgacagtgatgatgatgatgaagctgaagatgatgatgaaaccgaggaactggggagtgatgaaagatgatattgatgaaagatgggcaagaatatttggagattctggctaagcaggctggttgaaagatgggagattgatgaaagattgggaagaaagatgatgctgaaagaaactgctctggaaaggctattcccacaatcattgatgatnaaaaaataaccctgttngatnaatttccaaatattttaaan

SEQ ID NO: 72 - DNA, 1796 bp, Homo sapiens
aggggcaaacctaacctgggatctgacgggatgcgttttgccagctcagatctcctctgctactggaaacttgcattatttacagccattaggagctccctggcttccattccactcatgactagctttacctctttgaccccactgtattattgtctagcccagttcagctgaatctttcaacacaaaatatacagggaaccccttcctggggaacttcctttgttattgaggtcttcgctgatggcttcttccatttgatactcagtctcagtcacagtaggattacggaatcttttgccagagtatcaatctacatgggtgctacacattactgaaaaaaattaggaacatggtgctagttaattcaagtcttcatgtaaaacttcttctatcatagtggacattaaaaaaaatctctctgcaaagtgcattgaccctacctctagtagatgaatgttgaacaagtagcctatctaggaagcaagtgactagcatccatgggcatcccacaggttgtagtccagccccgatcttggtggttgggattgatgttgctgccaagtccctccgtttcatgttcaggctctgcctatgttcctggtgtctggtacctgatttttcaggatgctgacatttacttcttgcccacaacaccatataccctaagtcttgccaacatctttgaatgtcttctgctggtctgtctctcctccgttgttcttttactatgtcccaagtgcatgctttgttcagtatctgcctaagtctcaggatamtgattttagctttttactaggtcctgacattcccgtagtttcctcttacctttctggacatgccagacaaactctgaccttaggttctgtgaaaactggtacctgcagaattcctcagtgtttgtttatatgaaagttcattgtgcctcttgattgtgggtgagttgaggaaaagaggtaaagcagtgggcagaggttgcaacatttatttggttataggacacctttgctactggagcatcttgtagggtaatgtagttcagaacatgcatggagaaatgctgccatagagtagtagtgacatttgggacttgaaaaaaatcttaagagcaggtataattccctcaacaacagaagaacatcagtgctttagaatgtttgattttgaactttcttgatgttttctctgccgttctgtagtgttattctaattaaaatctttcctctaaactctgctcttttttttccaattgagcaaattcggcatttattgaggccctactacatgtcatatgctgttctatttgctggaaacacaaatgtgaatatggtaggcctgcccttaaacaatgaattacagtgtaaaatgaaccttttataaagctggtcctatatcaatctaattattttgtttttcttcatttcaggcctaagacagctttattttctttccactccaaataatgaagaatccccttagggcaaagaaggaatttctgagcatgttataaaaaaatagaaaataggataagttgcgtgaagatttaatatttctatacatcaaaacctaccataaacaaaattaaaaggcaaatagtaaacttggaagaacatttgtaacataaaagacaaaagtttaatatcataataaaataagcacatagtagcttttagtaaatcattgctgaatgaatgaatacatatatgaattcaaagcaatgaaaaaatcaccccaggaaaagatgtaaacatttgacataggacaagtcaccaaaaaaaaaaaaaaaaaaactcgta

SEQ ID NO: 73 - DNA, 1376 bp, Homo sapiens
ggcacgagttttggactaggtcgcacagttattaaaacaacttttaaccctcccccttcacacacatacatatcaggttgttttctagttaaaaacccaagtagctcagattctactttaatgtcagtgcagatttgcattgaatcatgccattatgttttttctcatttttatgctgttgggtcttagtttttaaattgatataaagaactcagcaatggttttattttctactcatacttagggtttaggaaacactaccactagttatcatttaatcaacttcaatggtctactgaaacaaaaatggtaacttttcattagtggattatttagagttatagtagttgtttccagaaaacacttcctcacaattgtacttcccaatcaaatcatgtgatcatacagttattcccatgaaaggcagaatgtttgtttcaaaattaatctagttttctgtacatttaaatttgagaaggtgacaactggctcttttccagtcttccttcatgtcagttttctgatagaccactattggcaaacagtatctgtcaactaccaaatgtgtaaaattttctgtatttcactttgtcttatttgtaaatagtgaactaaaacttttggcagatcagcaacatttgctgagcctgttttttaagctaatgtgtattcttactaatgttcctatcaagaatggatttgtaatatatgctgtctatttctaatgttcacattcatattttgaggttctatcttattttaatagagaacagacttctcaaaaaatcttcagaagcagcttattattgaaatatcgaaatattgaaataaacccggtggggttagattactcatctgtccaccaagtgggacatttgcatggactgggggcttaaaggacttagaagagacctgtaagtaaatcctgaaaatgagccaatccccacttgaatggttactggagtaaacccacctttaccaccccaattacagcacccgaggccgataaaccaacttggctctggttcatttttcttttcttcatttgtgatgctcagattcaaaatgtgtgttctacactgttacaggcttctcttttgtttgattaaagattttagtcctacttttgtatggacacattagaatattcagagaccaaaatagaagaatttgctgttagatatttttcagaagtcagcagatttgtggcaaatcatttatttgcctttttaaaaattcatttaagcagttcagagagtagactactcagaaaattatttcacgtaattgtctaagaggtcaatattttttaatgcatattgaatcaaataaagtgctctaaagaaattattctccaaataaatttttaaaaaaaa

SEQ ID NO: 74 - DNA, 574 bp, Homo sapiens
ggcacgagctgaaaggtgggggaagggaacgtagacctagagaggggaattcttacagaaatcctctttttttggtcccttctatttttcagtctccggcagcctcttggtcatgaaagccctcagattgtcggcttccgccctcttctgccttctgctgatcaacgggttaggggcagcaccccctggtcgccctgaggcgcagctcctcctctcagctctgagcataaagagccggtagccggggacgcagtgcccgggccaaaggatggcagcgccccagaggtccgaggcgctcggaattccgagccgcaggacgagggagagcttttccagggcgtggatccccgggcgctggccgcggtgctgctgcaggcactcgaccgtcccgcctcacccccggcaccaagcggctcccagcaggggccggaggaagaagcagctgaagctctgctgaccgagaccgtgcgcagccagacccacagcctcccggcgccggagagcccggagcccgcgtccgcctcgccctcagactccggagaatgggcccgaggcgagcgatccctccgaggag

SEQ ID NO: 75 - DNA, 603 bp, Homo sapiens
cccacgcgtccggctggactgttttgatctcttttaattgttctgacagatagttggggatgagagccgaataaggtttgcctgaaataactgacactatataatttctgctttggcaaatactaagttctaacttgtcattcctggtagaacaagctttatttttcgagcctagcaatgatctagaagcagatgttatctcagtgccttttgcaatttgttgtgtgggtttttttttttttaaagccacacaataattttggaaaacaatgtatgggtagaacatgtgtctgttaattgcacacaaaaccacttttaatgggtacagagttaaatttgaaggaataagttcataatactgaagctagaaccaagcagaatctgtttttttctgaggagtatcggtagcataaatgtgattataaacatagtacacttgatatatggaggcagtgacagctatttttacaaaatttaaatctgcaaatggattcaacatgtttatgggttattaaaattgtctgatttcttaggttctttatagtacacgtgttgaaaataaatgattaagaattgtttcaagaaaaaaaaaaaaaaaaaaaa

SEQ ID NO: 76 - DNA, 1772 bp, Homo sapiens
tcgacccacgcgtccgggaggatccccagccgggtcccaagcctgtgcctgagcctgagcctgagcctgagccgagccgggagccggtcgcgggggctccgggctgtgggaccgctgggcccccagcgatggcgaccctgtggggaggccttcttcggcttggctccttgctcagcctgtcgtgcctggcgctttccgtgctgctgctggcgcactgtcagacgccgccaagaatttcgaggatgtcagatgtaaatgtatctgccctccctataaagaaaaattctgggcatatttataataagaacatatctcagaaagattgtgattgccttcatgttgtggagcccatgcctgtgcgggggcctgatgtagaagcatactgtctacgctgtgaatgcaaatatgaagaaagaagctctgtcacaatcaaggttaccattataatttatctctccattttgggccttctacttctgtacatggtatatcttactctggttgagcccatactgaagaggcgcctctttggacatgcacagttgatacagagtgatgatgatattggggatcaccagccttttgcaaatgcacacgatgtgctagcccgctcccgcagtcgagccaacgtgctgaacaaggtagaatatggcacagcagcgctggaagcttcaagtccaagagcagcgaaaagtctgtctttgaccggcatgttgtcctcagctaattggggaattgaattcaaggtgactagaaagaaacaggcagacaactggaaaggaactgactgggttttgctgggtttcattttaataccttgttgatttcaccaactgttgctggaagattcaaaactggaagkaaaaacttgcttgatttttttttcttgttaacgtaataatagagacatttttaaaagcacacagctcaaagtcagccaataagtcttttcctatttgtgacttttactaataaaaataaatctgcctgtaaaataaattaaaaaatcctttacctggaacaagcactctctttttcaccacatagttttaacttgactttccaagataattttcagggtttttgttgttgttgttttttgtttgtttgttttggtgggagaggggagggatgcctgggaagtggttaacaacttttttcaagtcactttactaaacaaacttttgtaaatagaccttaccttctattttcgagtttcatttatattttgcagtgtagccagcctcatcaaagagctgacttactcatttgacttttgcactgactgtattatctgggtatctgctgtgtctgcacttcatggtaaacgggatctaaaatgcctggtggcttttcacaaaaagcagattttcttcatgtactgtgatgtctgatgcaatgcatcctagaacaaactggccatttgctagtttactctaaagactaaacatagtcttggtgtgtgtggtcttactcatcttctagtacctttaaggacaaatcctaaggacttggacacttgcaataaagaaattttattttaaacccaagcctccctggattgataatatatacacatttgtcagcatttccggtcgtggtgagaggcagctgtttgagctccaatgtgtgcagctttgaactagggctggggttgtgggtgcctcttctgaaaggtctaaccattattggataactggctttttttcttcctctttggaatgtaacaataaaaataatttttgaaacatcaaaaaaaaaaaaaaaaaaaa

SEQ ID NO: 77 - DNA, 1829 bp, Homo sapiens
cggcacgagattggagcctatttagtggattttatgcagccaaagatgtttcttgttgttgttgttgttcttgcttttaactaatttgcctcccaggagacagttgaaatgtctagagacattttgattattatgcctggcaggacgccactagtggcatctagtggatggagggtaagggtgctgctaagcgtcctcccatacacaggacagcaccccccacaaagaattatccaaccccaaatgtcagtagtgctgaggctgagaaaccccactctgctctctaaccaaaattagacacagaaagtggagacattctaccaccctgacaacatcaatggcttttgcccatttaaaacaagaaagaggaatatgtatccaacccaaaacaacatcttaacattctttctaataggcttttgcaaaaatagttcatattttataactgtcttgcagcatggggtataagtgtaatcattgtaaaaatgaaacctaatcattgtaaaaatgaaacctaatcatggtaaaaatgaaaagagtgcctcaaaacatctgaagttcttagcaaaaggcagcctgtcttcagtgggcacttttggatggaggcaggactagggtatcagtaggagtgagaacaaaggtcagaaaaatgagtacacagcacatgtatactgattaatttctttcttttttccttcttttgatggagcaagactgtaacagaagcctgagagtgaggaagggctttggcaactattactgtagacacagtagtttactcaattttatgaactcttagtcctgggctggaattcacgcctctgctggaattgcacagacaaaacgtgcttgcgaggagtaaggtggcaacaaaagaaaaatgcaggcaaaaacacgcctcattttgaaaccggatctgagcatcctagagccagagcctctcccagccaacattgctgagttgagcagagtgacagactccacactggagccagccccgcagctggccataaggaggagccacgagcaggtgctgggaagacaggcttttgaacgcacactatgctgatgtctctttctgtgaagttttctacatgagtgacgttctcaaagtctgcaacacagtctgccatgagatgccttttttcctctgggaacacaatgctactttcgtgattggctgagtaatggcccccaaagatgtactcttcatcctaatccctggaacctgtaaacatgttaccttatatggcaaaagagacttcgggcaggcacctgtcatcccagatactcaggaggctgaggcaaaagaatcgctcaaacctgggaggcggaggttgcagggagccaagattgtgccaatgcactccagcctgagcaacaaagtgagactctgtctctaaaaaaaaaaaaaaaatttctcagatgtgactcagtgaaggattttgagatggggagagtatcttggattagccaggtctgtgagaactcctgacgtctgaagcttgactcccaagtttccatagcaacaggaaaaaaaaaaatctatccaaatctgaagattgcggtttacagctatcgaacttcacaactaggcctcaattgttccggttttttattttctttacaatttcacttagtctgtacttcatcattttgacagcatcttcctccctcctttaattaatggaatcttctgaattttccctgaatgtttaaagatcatgacatatgacttgatcttctgggagcaggaacaatgactactttttctggtgtgttaacatgtcggtgccgaattcgatatcaagcttatcgataccgtcgac

SEQ ID NO: 78 - DNA, 1688 bp, Homo sapiens
  misc_feature (912)..(912): n equals a,t,g, or c
acccacgcgtccgctcatgtggacttatgccagtctagaggcagaatcagaaggcttggttgaacatatcgctttccctttttcctctccctccgcccctcccagtacagtccatctttcaatgttgcagcctggttgagaaggagagaaaaaggtggcaggaatttccaggagatccccaagaatgctgccttgtctgtggacaaagatggaccatgtgcccttcggaattagggatagaaacaaatattgtgtgctcttaacgattaagctgtgttatggtgggttttcaggtttttaccttttttctttacccctttactctgcaagaatggggaaagaatgcatactgcgaaaatgagtcttttaaattctgtctgcctactagttttaagtatatggtatgttgtaaaatttccaatgatgagagacagcacaataaatgtaccttatctccttaggctgaaggccataactacatagtggagtaatttaagaactctcttgccttcaccaacccaaaaggttgctttttgatagcaactggctaatgaatttttaaaaagagaagaaaaatactagttttcccctcttttgggaaatagattttaaatggctaaactactagccttaaaactactagtctataaatcaactaccacttttgtgaatctgacaggccacatttttatatggccctttacagaatggagtgtgttgaacaggatactaacgccatggagttgagctgggcctagcgatggagggacactctaacacaactttccctcagctattatgcaacagatcagggaaaaagatgggatgacagatggggtcagacagaaagagcttctgggaaacaagcttacatagtcttttttaaaatgcacaaagcctcccagctaagangtcacttggtttgggcttcattaggactggagactttgttggagttctttctgggaacttggagagtggatgatattcaggctctgaaacattcccagcgctctcccgagggtgccactttctcaagatgaaaactgtgactgaaaaaattaataataaatgtttctgagctgcctgtgttctccctgtgtgggtgagagaagggactagactcctaagcctgcctcagatacaagagggatcattggctccaattttagagaacttgaaagcaaggctttggacaaaattttgagaccctaatcactttaccttcctccaaattacccaacatacggtaaacaacatttgtgcagaagtatgtatgtatttagttcaggttgacttgtgtccttataaactgttactcaaatgatttgaacttttatgcgactgggattttttttttccaaagctacaagcatggccgcctgtggtatcgaggtgttgcaaacaatatctgtgttgcgcttcctgttttaacctacctcgttttgtttgtttttgtttcactgttcatcacagcagtgttatctccaggagacatatagagagctcaaccggcaatctcaggtgcatttaacatttttaaaacgaaacagtagttgaccaaatttttcttcttaaaaaattggaagtggggggaatccaatgacaaaaactaatgtggcttgtttctggagaaaataattactgtaaatggaacaacaacaacaataaaacacacgttaaacatc

SEQ ID NO: 79 - DNA, 565 bp, Homo sapiens
tcattttgtggacgaatatgatccaacaatagagagaacaaattaaaagagttaaggactctgaagatgtacctatggtcctagtaggaaataaatgtgatttgccttctagaacagtagacacaaaacaggctcaggacttagcaagaagttatggaattccttttattgaaacatcagcaaagacaagacagggtgttgatgatgccttctatacattagttcgagaaattcgaaaacataaagaaaagatgagcaaagayggtaaaaagaagaaaaagaagtcaaagacaaagtgtgtaattatgtaaatacaatttgtacttttttcttaaggcatactagtacaagtggtaatttttgtacattacactaaattattagcatttgttttagcattacctaatttttttcctgctccatgcagactgttagcttttaccttaaatgcttattttaaaatgacagtggaagtttttttttcctctaagtgccagtattcccagagttttggtttttgaactagcaatgcctgtggaaaaagaaactggaatacctaagattt

SEQ ID NO: 80 - DNA, 675 bp, Homo sapiens
ccagcatcagaagttctgatggatgatgaccttcagaaaagtgtggatatgatcatggatatgttttgtcctccaggaataaaaattgatgcatatccgtggttggaatgcttcatcaagtcatacaatgtcacaaatggaacagataatcaaatttgctatcagatttttgacaccacagttgcagaagatgtaatctaatattgccatccaatttagcatacataaaatgttgccactcaccttccctgtttgagcttcttttcctgacctgagttttgtatcagcaatgttgatgatgttagcatgggtatgggattagaaaatgtccttaccttaaatctcttggcttttactgggtgcaaggtaaataatggctatggattttgttttgctttctgttttgcttttgtacaaagagacctgcttaaacaagtactgctgagataagtgtctgatcaagctacagtgtactttaagtagaaatggcaaagttgctttgttggggtgctgatactgatgattttaggataaattcatttctttaaacttgtaatacatggttttattgcttgtttctcyccaggatagtagagatttctctatttcacctcaamctaataaaagtggtcagatttataatgttaaaaaaaaaaaaaaaaaaaaaaaaaaaaa

SEQ ID NO: 81 - DNA, 270 bp, Homo sapiens
  misc_feature (247)..(247): n equals a,t,g, or c
  misc_feature (260)..(260): n equals a,t,g, or c
ctgagatgccacaagaagcagcacagtgatcagagtgagaacaagaactcagacttggtcaccttcccaccggaaagcggtgcctcgggacagctcagcaccctggtctccgtggggcagctcgaggctcccctagagcccagccaagacctctagctcagccgaagagggtggtcagctgtcggaacttctgaccagtgctgttgcccagccctccagaggtgaggccactgagagacaggctttnggcaccacttctngggctggccg

SEQ ID NO: 82 - DNA, 538 bp, Homo sapiens
  misc_feature (101)..(101): n equals a,t,g, or c
  misc_feature (302)..(302): n equals a,t,g, or c
  misc_feature (449)..(449): n equals a,t,g, or c
  misc_feature (459)..(459): n equals a,t,g, or c
  misc_feature (521)..(521): n equals a,t,g, or c
tatctcttggcagcaggggttgcaactgagaaacatgcaaggtgggggataattggatcttgtggctcagcctaccaaagtgctgggattacaggcgtgancaccatgctcggccagtcagtatcattttttaaaaatgtagaacctggtttgatgactctaattaaattgtctgccaattactgaagagctactacatactagwttctgggctttagttctaaagcccacagcaacctcatgaataaatattattagccccactgtatagatgagataacagactaggagggagaagttanggaaacttgcttaatgcctcctgtttagaaaatagctgaactggaattcagccctgtcttccatttcaccctgcctgtgtctcacgcacagaacacccggggatccgctggttcccaaagcactgatgagaaccctaatttgtcaanattcctgggntccagtaaatggtggtccagaatggtgggtgatctgatttcatattatctgccaggtgaaangtttctgcctggcaaaa

SEQ ID NO: 83 - DNA, 1071 bp, Homo sapiens
  misc_feature (1010)..(1010): n equals a,t,g, or c
  misc_feature (1048)..(1048): n equals a,t,g, or c
  misc_feature (1062)..(1062): n equals a,t,g, or c
  misc_feature (1066)..(1066): n equals a,t,g, or c
ggcaggaggctgccggggcgcgggctgctgcgggagaaggggctccgaggagtccgccgcggctcgctctgtcgccggcgcgggattggggcgcgagggccatgggcgcgctctcctaaggcggaggtcgcgggcgggaggggaggaggcccgagagaggctgctgcgaaggccgcgggcccgtgactgggcgcgaggcggccggcggcggcggcggcaccagcaccaccatgtcgcgctcagtgctgcagcccagtcagcagaagctggcggagaagctcaccatcctcaacgaccggggcgtcggcatgctcacccgcctctacaacatcaagaaggcatgtggagaccccaaggcaaaaccatcctatcttatcgacaaaaacctggaatctgctgtgaaattcatagtcagaaaattccctgctgtagaaacccgcaacaacaatcaacagcttgcacaactacagaaagaaaaatcagagattctgaaaaatctggcattatattacttcacatttgtagatgttatggaatttaaggaccatgtttgtgaattgctgaatactattgacgtttgccaagtcttctttgatattactgtaaactttgatttaacaaagaactacttagatttaattataacctatacaacactaatgatactgctgtctcgaattgaagaaaggaaggcaatcattggattatacaactatgcccatgaaatgactcatggagcaagtgacagagaatacccacgccttggccagatgattgtggattatgaaaaccctttaaagaagatgatggaagaatttgtaccccatagcaagtctctttcagatgcactaatttctcttcaaatggtatatcctcgaaggaatctttcagctgaccagtggagaaatgcccagttattgagcctcatcagtgcacctagtacaatgcttaatccagcacagtccgacactatgccttgtgaatacctctctttgggatgcaatgggaanattggattatctttggctttatttgtgccatggggatncttaaatacttgangctncagta

SEQ ID NO: 84 - DNA, 640 bp, Homo sapiens
  misc_feature (93)..(93): n equals a,t,g, or c
  misc_feature (96)..(96): n equals a,t,g, or c
  misc_feature (619)..(619): n equals a,t,g, or c
  misc_feature (624)..(624): n equals a,t,g, or c
gttgcagtgagccgagatcacaccactgcactccagcccgggtgacagagcaagactccgtcataaatgaataaataaataaataaataatangtnacgatccattgtggcttcctggaaacatccatgttcacagctggggtctggtcagtctgcatagtggagcacactgctaggatgcatccttagcaagtgaaaaaagtgaggctcagaactgtttgtagagtatagccttttatctaaggaaggcagatgaagactggcttatgataaaggtgctaacccccagactagtaaaaatggggttccctgtggagtagggaaggggcagtgttataagttggatttctggccatatctgctatagtactgatcatggaactctaggggaggaaagatgttttccttctacccatcttatgttcattggctggggctcctggaacagaagacagatttccaaagagaaaggcacacmaatttatgtaatataagtttwccatgacmtgggagcctttataaggaatgaccccaaggaawtggttaaacctgagtggttttgtgtaaggttttaatgagcaatgaaaagctatggggacctatgataggaggatgtaanctaanccaatgacctggggga

SEQ ID NO: 85 - DNA, 507 bp, Homo sapiens
ggagcttcaacatatgaattttcagggttatcattcagtccaaagtacttaakatgattcttttccgtttccacatagacaatcacataatctgtaaataatgactcttacttttccactttagtcgttaggttatacctatatatatatwwwmwtgctttactggactaatttcaacctccagcacaccaccaatgaatagcagtaataccagcataattgtctgcagttctgctgagatacgtgctctattttattggcttggctgtaggtttttattttattttttgaagaggctaatctcttacaggaaaggtttctttttatatccagtttttacatgatgaatgatttcccagtatttcataattcatgaggctgaattcctcttgaatttattaaatgcttcctgtgcatcctctgtgatgatcatgtttatttactgctagaactcaagtacctagaactgttcctggccaatgatggtatgtaataaatacttcaatg

SEQ ID NO: 86 - DNA, 1390 bp, Homo sapiens
ggcacgagggagtctgatggggagaagaagtacccatgccctgaatgtgggagcttcttccgctctaagtcctacttgaacaaacacatccagaaggtgcatgtccgggctctcgggggccccctgggggacctgggccctgcccttggctcacctttctctcctcagcagaacatgtctctcctcgagtcctttgggtttcagattgttcagtcggcatttgcgtcatctttagtagatcctgaggttgaccagcagcccatggggcctgaagggaaatgaggcagctgctgtgtccccacggaaacaaccatctggggactgctgggaaatgctgtgaatgcggagggaagtgatgtttgggttctgtagctgagagatttttattcatttttaactgccccccaaccccactccaactccttctccaccacccattctcccaatggtctttagaaatagattttcatctgatattctgcagaaatatcaatgagacttggtatgggacaggggcagaaaacactacataggcctccaaggcaaaaccagtcccagtttctttaatgggaagaagctggaattcctggtgctcaattcttagtgaccccaatcctatacccaaatctatgatattctgggacctcagtgattttggtcccctcccacttctctagttcgtcatcctcccttcccatatccttcaaaagaaccacactagggtctccacctacttatacaatgcggatgcccaactgtttttaaggaagccagaagcatcccatggaccatggggtgagtgtcctccaagagccccctgagctcagccctctgcctggagggctccagacctttctgagccctgcttggaggcgagcattttcactgctaggacaagctcagctgttgaggacacccccaccccaaatttcagttcttacgtgattttaaccattcaacatgctgttgggttttaattctctaattattattattattgttattattttttaggaccagttgtagtgaattgctactgaaagctatcccaggtgatacagagctctttgtaaaccgcagtcacacattagggttagtattaaactttgtttagatgtaccataattaacttggctagttgattgtttgaagtctatggaagaaatagttttatgcaaaattttaaaaaatgccagtctggtcagggaagtagggggtttcaatgctgttgggaaccaggaaggtgggacagccggcaggtagggacattgtgtacctcagttgtgtcacatgtgagcaagcccaggttgaccttgtgatgtgaattgatctgatcagactgtattaaaaatgttagtacattaaaaaaaaaaaaaaaaaaaaaaaaaaa

SEQ ID NO: 87 - DNA, 782 bp, Homo sapiens
  misc_feature (29)..(29): n equals a,t,g, or c
  misc_feature (34)..(34): n equals a,t,g, or c
  misc_feature (738)..(738): n equals a,t,g, or c
  misc_feature (748)..(748): n equals a,t,g, or c
gggcacgagctcgtgccgaattcggccangaggnacctgagcagtctaactactccagttagacctaagggcacaaatgcagaattcatgaccttgtagttgtggcagggtctaggaagtcctctctccccaagtagaaaatattctcttgccattcctgaaattccacattcatataatggctgtgcaatacatgcttctcaataagaaaattaactgcatgtttactgtgtgctgatcacatcagatttttatgtttaaaaaaatctcattatggattgagtccagcccagctctaagagaaaaagaaggcccatatgggagacttcastctcattattattgcctttatccagcagtgcttatgaagccccctaccctgtcccattccagaaaccataagactcaggcagttcttgattctggaggcctgcctggtaagataagatagtataatttggaactgagaacataccagaaacagcagaacgagggccagagcagaaaaatgaaaataagtggagacacttatggatacattggtgcaaaaaaagccacggagcccatactgggcttgatatgactttgaggggacagcagattaatacttaatgagggttaaacctgaccagtctttctacagtgacaggccacactgcatgaatggggagaaccaatgaatccattgtcctctgcctattttcctgtgcacagtcacattccctccttaagaatctnccccttccancctttacattaaccaagggacactgaatctttca

SEQ ID NO: 88 - DNA, 278 bp, Homo sapiens
  misc_feature (8)..(8): n equals a,t,g, or c
  misc_feature (27)..(27): n equals a,t,g, or c
cttctcgntgcccgtgcaaaggctccnctgcagaagacatcctytggcagcctgctcttctgctgctccttttgctgctgtcccatgtgctcctgagaatgagaaccctgcctttgcaacaaaccatgccccggtaaatgcaaaaccacatgctctgtgccccgagagaaaacctctaaccagcaaggaaaatgtattgatgcattcctccattttggcacctgraagagagtcttggrgaactgcaggagagggggaaaactggaaaaaaaaaaaag

SEQ ID NO: 89 - DNA, 828 bp, Homo sapiens
gccaatcaatgagcagtatagagaatttctggaagggagacacaagaagctgttagaaagggcggcttccagggaagttctagggagtctgggatgaatgagaaacttatcctaacaacttttgggctctctgaattttttttagtatctgcaagtattgtacttgttcaaatatgtttaaggctgcaggctgtattctaaactccttgaaagtgagaaccaggtttcactcatatttccatcttttcaacccctagatcagtgacttcccagggaagtagtacctgcatttggggttgacctttgggtttcccctgtactggtctggcctggcctggctggaccactggstggctgggtggctgtgacctagccccttctttctctttgctcctctgtcaaatgagagtgttggtctgaacgatctctaaagcctggaagaggagcagatcctctgtgctcagcccccactctgtgtcagggaggcctggcaaccacagtgttctttctcctgtttatttgttcttggatcttcctgaagccatttcaccaccagccttcatcttctctgccagccccatggagactcaagctttttccagcctatgtcagggaaggagaaccagagacagcaacctcgggtgtgaagggagtcagctctgaacccaggactatggccttctgccactgcctgctttcctcttgctgctggggcctaggtcttcttgctgctgcttccttttccgctaatcaagagtccagggaggtgggaacagcctcaacaaagactttgaagatgagcggggaggatcgcttgagcccaggagc

SEQ ID NO: 90 - DNA, 342 bp, Homo sapiens
  misc_feature (198)..(198): n equals a,t,g, or c
  misc_feature (215)..(215): n equals a,t,g, or c
  misc_feature (319)..(319): n equals a,t,g, or c
caagttgggaagaactgatatcttacggatactgttaaagagaactaaatatggcctgagaaggactccrtatttctatatttgartccttgtgggtgaaccaaaacctagcttaataggtagacaatattgaaaacctaacctagaagtatgcacctgtaacaatagctaggtcttggccaatgcctgtggccatanttcagccattcatacantgctgagtgttcaaagtctgttcaaataagggaaacaacgaggtgtaaccaatccagctgttctttaccttacttccaaattctgtacgtcatttcccattttntgtctataaaccttcttccacca

SEQ ID NO: 91 - DNA, 537 bp, Homo sapiens
ggctttacggctgcgagaagacgacagaaggggggggaccatgttgcttccgaacatcctgctcaccggtacaccaggggttggaaaaaccacactaggcaaagaacttgcgtcaaaatcaggactgaaatacattaatgtgggtgatttagctcgagaagagcaattgtatgatggctatgatgaagagtatgactgtcccattttagatgaagacagagtagttgatgagttagataaccaaatgagagaaggtggagttattgttgattaccatggttgtgatttcttccctgaacgctggtttcatatagtttttgtgctgagaacagataccaatgtattgtacgaaagacttgaaacaaggggttataatgagaagaaactaacagacaatattcagtgtgagatttttcaagttctttatgaagaagccacagcatcctacaaggaagaaatcgtgcatcagctgcccagtaataaaccagaagagctagaaaataatgtagatcagatcttgaaatggattgagcagtt

SEQ ID NO: 92 - DNA, 292 bp, Homo sapiens
tggacagaaaattcaatcctttatttttttctctgtaaatgcacgggctatgagatagcaacaaaaaatgcatagttaatggtcatagactttattccaaaacataattggaaaatagaawctgagccattgccaaatggtaaagaaatgaaaagttttcacagtgactactgaatataccaagagcttttggcagtactgctggctttctgggtgattaattaggtaaacttggaatattcccagtaaaagtttgagaatgcataaaattataccattttgaaaaatataa

SEQ ID NO: 93 - DNA, 352 bp, Homo sapiens
  misc_feature (291)..(291): n equals a,t,g, or c
  misc_feature (345)..(345): n equals a,t,g, or c
ggcacgagtkaaacttgctgttttgttcctgtgtcttgtctttggttggtatttcagtaagtttttggtattctcaaattttatctaaatggataaactattaacatagaacataaaccccaattctccatttcatttttctcttaggcatgaatcatacaaaactcaatatagagcaatgtttgtaatgaattgttctattaacaaagaggaggttctaagatrtaaagcctcagaggaacaggaaggaaaaggcgggtccataaggaagatgaggtcttaaccggggangatgctgcttgaggagggccagagacagttgtgggaggaaatcttttcaccccnttcatgt

SEQ ID NO: 94 - DNA, 404 bp, Homo sapiens
cccccccccttttttttttttttttttttttttttttttttgcgattgctttaaagaaagctttatttactacatacatcctaagaatgtactgtaaatggagcaagatctaaataaaagcttttcaaatataaagcagctaaagttaactaaaccactagcaatgtttgaaaacagaactctaaaactttttttttacatttatatagtttgttcttaacactaaaaaaaaaaaagttcacatttcaagttataaacttacctcagtagtgtacatgaaatggttttgaaacaataggaacagataagtcccagataggrggctcactgatacttaattggccatgtcaccaatgtttgtttttaagggrgtttggtggttgccatgtttatcattttttttt

SEQ ID NO: 95 - DNA, 1555 bp, Homo sapiens
ggcacaggacagtctcatgattataactggtccttcaagtatacagggaatataataaagggtgttataaacatgggttcctacaactatcttggatttgcacggaatactggatcatgtcaagaagcagccgccaaagtccttgaggagtatggagctggagtgtgcagtactcggcaggaaattggaaacctgggacaagcatgaagaactagaggagcttgtagcaaggttcttaggagtagaagctgctatggcgtatggcatgggatttgcaacgaattcaatgaacattcctgctcttgttggcaaaggttgcctgattctgagtgatgaactgaaccatgcatcactggttctgggagccagactgtcaggagcmaccattagaatcttcaaacacaacaatatgcaaagcctagagaagctattgaaagatgccattgtttatggtcagcctcggacacgaaggccctggaagaaaattctcatccttgtggaaggaatatatagcatggagggatctattgttcgtcttcctgaagtgattgccctcaagaagaaatacaaggcatacttgtatctggatgaggctcacagcattggcgccctgggccccacaggccggggtgtggtggagtactttggcctggatcccgaggatgtggatgttatgatgggaacgttcacaaagagttttggtgcttctggaggatatattggaggcaagaaggagctgatagactacctgcgaacacattctcatagtgcagtgtatgccacgtcattgtcacctcctgtagtggagcagatcatcacctccatgaagtgcatcatggggcaggatggcaccagccttggtaaagagtgtgtacaacagttagctgaaaacaccaggtatttcaggagacgcctgaaagagatgggcttcatcatctatggaaatgaagactctccagtagtgcctttgatgctctacatgcctgccaaaattggcgcctttggacgggagatgctgaagcggaacatcggtgtcgttgtggttggatttcctgccaccccaattattgagtccagagccaggttttgcctgtcagcagctcataccaaagaaatacttgatactgctttaaaggagatagatgaagttggggacctattgcagctgaagtattcccgtcatcggttggtacctctactggacaggccctttgacgagacgacgtatgaagaaacagaagactgagcctttttggtgctccctcagaggaactctccctcacccaggacracctgtggcctttgtgagccagttccaggaaccacacttctgtggccatctcacgtgaaagacattgcctcagctactgaaggtggccacctccactctaaatgacattttgtaaatagtaaaaaactgcttctaatccttcctttgctaaatctcacctttaaaaacgaaggtgactcactttgctttttcagtccattaaaaaaacattttattttgcaaccattctacttgtgaaaccacgccgagccctatgcagtctca

SEQ ID NO: 96 - DNA, 455 bp, Homo sapiens
  misc_feature (430)..(430): n equals a,t,g, or c
ggcacgagccagagccgactgcaaatcactgaactgagctggcagctgcttaggggtttgcatgatcaaggcgatttttataacctagaagggcctggactgtagaagcagattccagctgaggcccaggcactgccttgctgtggtgagcacggcggctctgstcttccccgccgagctttctcatcagtgaagtggggtagtgacagcatgcgagggcacggagctgtcagcaggctccagagaccatggccataaagcactgacactgacacggccccagcaagcccttkgggaagggcagccaccacckttgctgctgytgtcacttactgttgctgttgatttaaggcaktacatactcaggtytcatagcttgtaaaamaaaggaaaaatgaaaagtcaccatcatcccagcaaaatgtaaggntcccctgctgcccagattggaatgt

SEQ ID NO: 97 - DNA, 675 bp, Homo sapiens
  misc_feature (427)..(427): n equals a,t,g, or c
  misc_feature (528)..(528): n equals a,t,g, or c
  misc_feature (564)..(564): n equals a,t,g, or c
ggcacgaggtcgggctcggaggaggatccagagacggagtctgggccgcctgtggagcgctgcggggtcctcagtaagtggacaaactacattcatgggtggcaggatcgttgggtagttttgaaaaataatgctctgagttactacaaatctgaagatgaaacagagtatggctgcagaggatccatctgtcttagcaaggctgtcatcacacctcacgattttkatgaatgtcgatttgatattagtgtaaatgatagtgtttggtatcttcgtgctcaggatccagatcatagacagcaatggatagatgccattgaacagcacaagactgaatctggrtatggatctgaatccagcttgcgtcgacatggctcaatggtgtccctggtgtctggagcaagtggktactctgaaacatccaccncttcattcaagaaaggccacagtttacgtgagaagttggctgaaatggaaacatttagagacatcttatgtagacaagttgacacgctacagaagtacttngatgcctgtgctgatgctgtctctaaggatgaactncaaagggataaagtggtagaagatgatgaagatgactttcctacaacgcgttctgatggtgacttcttgcatagcaccaacgggaataaagaaaagttatttccacatgtg

SEQ ID NO: 98 - DNA, 493 bp, Homo sapiens
gtcgccctaggctgggactctagtaggtcttcggctcagttttggctgcagcgcccgcgtagatcgcttcggccgsgttctacgcccggctcaactatgagcckgtgcgcccaggcggcggaagtggcggccacagtgccaggtgccggcgtcgggaacgtggggctgcggccgcccatggtgccccgtcagcgtccttcttcccgccgccggtgccgaaccccttcgtgcagcagacgcagatcggctccgcgaggcgggtccagattgtccttcttgggattatcttgcttccaattcgtgtcttattggttgcgttaatttattacttgcatggccattgctgcatttcaacagtatgctgtcctgaaaagctgacccacccaataactggttggaggaggtaagaaatattttgtccaaaatattaggacataatattaaattaagatatactaaatcaatataagaagagttcatcatagtttagtca

SEQ ID NO: 99 - DNA, 416 bp, Homo sapiens
gtggggatggtgtcgcatagcagccgctgccgctttggcttgctcgggaccatttggctggacccagagtccgcgtggaaccgcgatagggatctgtcagggcccgcggccgggtccagcttggtggttgcggtagtgagaggcctccgctggttgccaggcttggtctagaggtggagcacagtgaaagaattcaagatgccacctawtataaactggaaagaaataatgaaagttgacccagatgacctgccccgtcaagaagaactggcagataatttttgatttccttatccaaggtggaagtaartgagctaaaaagtgaaaagcaagaaaatgtgatacaccttttcagaattactcagtccactaatgaagatgaaagctcaagaagtggagctggctttggaagaagt

SEQ ID NO: 100 - DNA, 1467 bp, Homo sapiens
ggcacgagttcatcttcatcttctcagcttgctccaaatggtgcaaaatgcattccagtacgagaccgtggcttcctggtgcagacaattgagtttgctgaacagcggatccctgtattaaatgaatattgtgtggtttgtgatgagccacatgtgtttcaaaatggccctatgcttaggcctaccgtatgtgaacgggagctgtgtgtgtttgcttttcaaaccctgggagtaatgaatgaagctgctgatgaaatagcaactggagctcaggtggtagatctactagtatccatgtgtaggtctgcgttggaatctcctagaaaagttgtgattttcgagccatatccttctgtggtagatcctaatgatcctcagatgttggccttcaaccccaggaaaaagaactatgatcgagtaatgaaagcactggatagcataacttctatcagagaaatgacacaagcaccatatctggaaatcaagaagcaaatggataaacaggacccccttgctcatcccttactgcaatgggttatatcaagtaatagatcacatattgtgaaactgccagttaacaggcaattgaagtttatgcatactccacatcagttccttcttctcagcagtccaccagccaaagaatccaattttagagctgctaaaaaactctttggaagcacctttgcatttcatggctcacacattgaaaactggcactccatcctgaggaatggtctggttgttgcttctaatacacgattgcagctccatggtgcaatgtatggaagtggaatctatcttagtccaatgtcaagcatatcatttggttactcagggatgaacaagaaacagaaggtgtcagccaaggacgagccagcttcaagcagtaaaagcagcaatacatcacagtcacagaaaaaaggacagcaatcccaattcctgcaaagccgtaacttaaaatgcatagccttatgtgaagtgatcacctcatctgacctgcacaaacatggagagatatgggttgtccccaatactgaccatgtctgcacacgattctttttcgtctatgaagacggccaagtgggagatgcaaatattaatacacaagaaggaggcattcacaaagagatcctccgagtaattggtaatcaaactgctactggttaaaggaccaccatttaattaacatgattcgaaagccttcctcgggttcaaagctggattttgaactgaagaagattataaaattatttattgttattataaacaaaattaaccctttgaatactgattttttttcttagtatttctaagtatctcattaaatacctaaaatggtataagatttatcaattgtagggttatggaatctagtaataaaatttcaacagcacttaaactgaagtttgggttgctcatacaataaacagattgaaaaaacaaaaaaaaaaaaaaaaaaaaaaa

SEQ ID NO: 101 - DNA, 1793 bp, Homo sapiens
ccacgcgtccgatttgtccctattgttctatttttaaataaatatacaatcattgttttgcattgaaatgcatatttgtacattttatttgataatattattttgggaaattgtaatctgttgttttgtttgtttgttaagggaagcacgaagaagaatttacaaatgtgaataaaattgtttaagattaccaatagtttcttttctggacttgaaatagttacgtttctaaatatgagaaaaataactttgcctaaaatttcagtataatgaccaggtcttctctccattttagagaagcagtccaatgtggaacagataagacggcagcgatccagtgaggtcaattccccacagaggaaagctatgcatacctaacttaatggaaggtaaacttctcttcaattaatgatgtcctccttttctcaaggtgtccaaagacaggaggtggtctgtaaaaggttggatgacaactccattgtccagaacaattactgtgatcctgacagtaagccacctgaaaatcaaagagcctgcaacactgagccctgcccacctgagtggttcattggggattggttggaatgcagcaagacttgtgatggtgggatgcgcacaagggcagtgctctgcatcaggaagatcggaccttctgaggaggagacgctggactacagtggttgtttaacacaccggcctgtcgaaaaagagccctgcaacaaccagtcatgtccaccacagtgggtggctttggactggtctgagtgtactccaaaatgtggtccaggattcaagcatcggattgttctgtgcaagagcagtgacctttctaagacattcccagctgcacaatgtccagaggaaagcaaacctcctgtccgcatccgctgcagtttgggccgctgccctcctcctcgctgggtcacaggagactggggccagtgttctgctcagtgtggccttggacagcaccttggctgatgctggaagaggagggcagtcagtgtcacttctgggatgtgccccagcactgagaacaaaatgcaggcatcccccggggcagcatcagagtgcctttctagagggagccacgcacagaatgtaacaggatgaaacagtttcaagtaagccttgaattgaaacctgagtaggttaaaacaattctatttcatagcacatcacaatactgctgctactctgtagccacccccatggctacatgatgccctattcctaaataataacaatagcattgtcagtggaggctgggccaccatggcagaccttccaaaagtagtgagctacatagactacttagggaaccccagggaaactggtaccctacacctgggagcagtatctgccactgggataaagtcctactaaaaaaggaacggtaaatgtaccctaatgattaaaccccgtgagatacatatgatttccaaatagtccatttcattaggaacttttttgtttgaatgaatgtcacataggtatcctcagtaacacagaacgaaattacctttgtattattgtgattagttgttgcttattattttatactcagtaataatgtggtacactgttaatttttttgcttttgtaaattatattctaatttattgccatgtttcctaacacttgtcctacattcattctcctgcttgtaatgaaaatgaaaaaatcattgtaacacttgatggagtgaaattccacgccaggcacagaatttttttgacatagataatttagtaaaataaaaattcagcttataataaaaaaaaaaaaaaaaa

SEQ ID NO: 102 - DNA, 538 bp, Homo sapiens
  misc_feature (486)..(486): n equals a,t,g, or c
  misc_feature (515)..(515): n equals a,t,g, or c
ttttttwcwattttaatattttttattaagggctataaaaatacccagaaagataaataaatgtgatgcaatgatatctgtcctaatatgaagaactttctttcactgcattgttttccttcacaatggccttcaaatcacaggaggcagtgattccatgccatttcctcttcttttattacacgctacaggatttctgaatcagtatccccgccctcagtcttctctttataaatcaaagtcattttcaatccaccgtttaaagggagcgtatttttttcttttccacgaagaggactctttgtttcacaactggatcataatgcaaaagagtcagtttttcccgcagtcggtttctcttggtgttgaagcagaaacctgtcccagcttcgctcaccattctcaccagaatgttttttgacttgctcttggcaaagaagaccgcggagaggaacatggtgaccacacctgggcagtctccgtcancsgccaaaaggcccccaaccaacaamaantcctcgtgccggaatccttgggc

SEQ ID NO: 103 - DNA, 483 bp, Homo sapiens
  misc_feature (444)..(444): n equals a,t,g, or c
  misc_feature (483)..(483): n equals a,t,g, or c
gggaatctatcataactagtctagagatttctcaccaagggaaattttccttatctaaaagaggaacttcaggtctcaaccctgccagtcacacccaattaatgtccttcacaaaaataaacagcatatgttccctttcaatttgagttcagtgagctcacagcaaaatttaccttttaattttcttcagcaaatccaagacgaatatacaaaggatgagattagataaagatttcagtttcccgtatgccaccgctggccgccaattttccaaaaaagcctggctcctcttttcctgttcctccatccaagcccccaaagatctctaaccagaawtaaacaggaagactcagtgatttacaaaagacattttagttttacacgtacagaaaattctacccagcattacagaaattcttagacttcttaaaattcccggatttnccctggtatttaacatttggataagggagccatgggttn

SEQ ID NO: 104 - DNA, 719 bp, Homo sapiens
  misc_feature (1)..(1): n equals a,t,g, or c
  misc_feature (619)..(619): n equals a,t,g, or c
  misc_feature (633)..(633): n equals a,t,g, or c
  misc_feature (643)..(643): n equals a,t,g, or c
  misc_feature (646)..(646): n equals a,t,g, or c
ngggaattgctgagatgacagtgtcccacacagcttcaaataaaatccatggaaagatgttgcatttgtggaataagtgcttacttgaaaagcatgttcttcttttattttcttactgttaagaatttttatttgtaggatgtttgttttaatttaatttttttaagggatgggggccatcatgtggaaaccagaaaatggggaaagtgtgaactatccagacaaagattcattttgtgtctatatttgtttttaattggcctcatttcaaatgtattaaacagttccatacctggattgggtgtttgtaatggttaccaaaaaacaaacaaaaaaagaaagaaaaaggaaaaaaaaaaagaaaataattgtgacatgcttttatcactactttatttttcaaataacatgtaaatattgtaatccattggattttgttttgctaacctgttaataaaaatatgggaccattatccttttaacaaggctagaatgtcatttttttctttttcaacatatacctgatattttgtggccgcacattttggrtgcattattataattckgttgactgtaatgacatagaattacacattttktgktggttaattatacagangacatttttttcanagcttgaganaanaaaataaatagcaaaatgataacctattgactccagtaatcagtgtttcccaatacttcataagaaataggga

SEQ ID NO: 105 - DNA, 613 bp, Homo sapiens
tattcagctactatacagaaaaaggatgaacaaattaatttatttctaattgagccagttagacataatgcatataacgtgatatttggttcatgaaagagttgttttcatgtggttattgtagggagtatatataattgtggaaggggtatgggaagagttgtgtatagttagttgttatctctacaagtttgaaagttttcccatcaaacattatcaatataccaatgttttaaaaattgagtgagggttattatttgtatttgatgaaagaaaatccaaataaagcccacctagaaatagatattttattatatatgtgctatagatatacctatatagtacaaatagacatgtgtgatgcatatatacaatgttatatatgtgtatatgtctgtatacacactgagtctgtaatatgtatacactaaatttgtgkyamgctaacakcttcagggtctgcactgtgaactcccckggagataagtaagtccactttagaataaagagttcttttgagacttcagttactaacgtgctttaagaggtatctactttataactgaattctatgtcgttcatacgtagagttacagtaagggtctagtatgtc

SEQ ID NO: 106 - DNA, 816 bp, Homo sapiens
gggaaaggagggtcaggcgagtccacgaggaggttcgagtgaagatcaaagacttgaatgaacacattgtttgctgcctatgcgccggctacttcgtggatgccaccaccatcacagagtgtcttcatactttctgcaagagttgtattgtgaagtacctccaaactagcaagtactgccccatgtgcaacattaagatccacgagacacagccactgctcaacctcaaactggaccgggtcatgcaggacatcgtgtataagctggtgcctggcttgcaagacagtgaagagaaacggattcgggaattctaccagtcccgaggtttggaccgggtcacccagcccactggggaagagccagcactgagcaacctcggcctccccttcagcagctttgaccactctaaagcccactactatcgctatgatgagcagttgaacctgtgcctggagcggctgagttctggcaaagacaagaataaaagcgtcctgcagaacaagtatgtccgatgttctgttagagctgaggtacgccatctccggagggtcctgtgtcaccgcttgatgctaaaccctcagcatgtgcagctcctttttgacaatgaagttctccctgatcacatgacaatgaagcagatatggctctcccgctggttcggcaagccatcccctttgcttttacaatacagtgtgaaagagaagaggaggttagccaagcccccaccccatcccactccccttccctcmccagatatttatgtgaaatgaactgcagctttattttttgaaataaaaacttttaaaaagcaaaaaa

SEQ ID NO: 107 - DNA, 577 bp, Homo sapiens
  misc_feature (38)..(38): n equals a,t,g, or c
  misc_feature (575)..(575): n equals a,t,g, or c
cagaagccaaaaaggtcttaaaattggaaatagatgtntttattgtacttcagccaacagcaagccaggggaaggaacatacataaatatgacaggtcatatatgaaatttggctctcctcctatcaaagtagcctaggagcttggaggaagcctaattaactaaaacaggaaaaaagcatactcatctgatgtaaaaactcatcagctgtaaattaccaacattaaaccagaagtcattaccagttaaaatgtgtggttttcatcttattcttaaataggagaggtggrcagtagtgtaagtaacattgctttaaagrcataaagcttktcctggtaaacatggtctaaatgagaaatgcctccatcttttcaggtagaaccagatttcaggcatagctcagctacatctgtatttgaaatacaataaaaatatttcttatgtctctgtattctcttttaaaaagaactgctgactggctcctgtctcttcagtaacactgatttttttttaaagaagtgatatgttggactctgttggagaagaatgagcactagtattcagccacaagtgcnat

SEQ ID NO: 108 - DNA, 484 bp, Homo sapiens
  misc_feature (456)..(456): n equals a,t,g, or c
  misc_feature (476)..(476): n equals a,t,g, or c
cttgcagtccacttgctgaagaagttgtgtcatttctctggaagaatttccaaaattctggatttttttttttttttggagtatttcatcagctgaaaagtgattctyactttgagttttcttcctatatttgtatagtgagttcctttttccttcctctttatccctcctgttttactttatacctctctattccttgctcaaattattgcaaaagcctctatagaaagtcctctgtgatctgactcctgcagactcttccagatttttctgcccaaggcctttactgagctcaggactccagctaaatcaaratackcatgttctcacccagagtgacaaaatcctgcagataggtttaagacctagtgggmtcagagcagtagctactgggaagttaaaaggaaggggttagaaaatgaatgggacaaaggcacacttctgatggagatgaancacttgaaagtgagtggtgnctttggag

SEQ ID NO: 109 - DNA, 441 bp, Homo sapiens
  misc_feature (328)..(328): n equals a,t,g, or c
  misc_feature (331)..(332): n equals a,t,g, or c
aattcggcacagggaaaaaggctgagcggagagccgtgctgcctggcccctcctcaccgcccttccccgcacctcttggctgtaccgggagcctctgaagcaccggaaatgaagggttttccaggcctggctcttcactscatccttcaggggaactttgaagccatggagacatctggctttggagccatggcgattcccctgccactctccttgctgggataaagccagggcgtggcatcctgggatgatgttccctgctgctgagtgtgcacacaacctgagctcatcctgtgtacgtcagctacacatgctcgcatctaatttnccnnaacaacctagccagtactattgcttctcctcctcttacagatggggagatgatgacatatagaggttaacttatcagagaccacacaaaaaaaaaaaaaaaaaactcga

SEQ ID NO: 110 - DNA, 524 bp, Homo sapiens
  misc_feature (510)..(510): n equals a,t,g, or c
aaagaaaacgaaaaagaaagcccaaggcaaagaagggggaaggaaaacaaacttcgccactctytcttctccttcctaaccctttgtytagagcaccacaccgctcacaaactctttccaaatgctcagttggctcccaaagttggagcctggcatgggcakggagcccacaaaactctaaccaaactggakgctggcatgggagaartgcttctggttcactcttcctaccctctccctcctaaccctctccttgcctgacagggagcccctgtggcctggactctaggggatgccgccaccagaaacccctctgccaatccctamcttgcaccctgggaaytgcagtaacttattctcaaaggctttaaacacagagatcctctcagcggccgtgggcctgccccttgtcctarcccttgccacgttgagggtccaacctccaagggacaggcactgccccaccaacggcaaatccaaaattctttcaaaaaaaaaaaactgaaaacncaacccaaaaaagc

SEQ ID NO: 111 - DNA, 614 bp, Homo sapiens
  misc_feature (355)..(355): n equals a,t,g, or c
ggagaaggtttctctctcatctccttctccagcaaccttggccatggaccagccggctggcctgcaggtggactacgtcttccggggtgtggagcatgccgtgcgggtgatggtttctgggcaggtgctggagctggargtggaggaccggatgacggctgaccagtggcggggcgagttcgatgctggcttcattgaagatttgactcacaagacagggaacttcaaacagttcaacatcttctgtcatatgctggagtcagccctcactcagagtagtgagtcagtcaccctggacctgctgacctacacagacctggagtccctgcggaaccgaagatggggggccgccagntccttggcccccaggtcggcccagctcaactccaagcgctacctgatcctcatctactccgtggagtttgacaggattcactacccgctgcccctcccgtaccagggcaagccagaccccgtggttctgcagggcatcatccggtcactgaaggaggaactgggccgcctgcccagtccctgccctggccccgtccctcctgctgcccctgggggtctcaggtgtgtgaggccctgaccctgccctctccccaggcagt

SEQ ID NO: 112 - DNA, 544 bp, Homo sapiens
  misc_feature (2)..(2): n equals a,t,g, or c
  misc_feature (5)..(6): n equals a,t,g, or c
  misc_feature (10)..(10): n equals a,t,g, or c
  misc_feature (12)..(12): n equals a,t,g, or c
cnaanntgananaaccctcactaaagggaacaaaagctggagctccaccgcggtggcggccgctctagaactagtggatcccccgggctgcaggaattcggcacgagagaaaaattatttgtatataactttaaaaggagtagaagggctttttgcagagttattacgtttgaagtatactttatttcttgaaaaaattacagattttttgtaaataatgatgtaattcaactctcaaaatatttcctactgtttctttattccagttgtattcacatgtgaaagcatgtgatcagttattgctgcattaaaaacatgagtcttttttattaggtggccattatttatgatcttttctatgaaagagtaaggacattaaaatgtaagatgcatgatgaaaaattaagtgaagaggctctttatggttaatttatattgaataatgcattaggtaggtgttcagagtaatattttgcgttgtgagaacatttttaattttatttaaaattaaatgaaaataaattagtatattattgtactaatt

SEQ ID NO: 113 - DNA, 1887 bp, Homo sapiens
ggcacgagaggaaggaactggtttcggggagccctgggcggggcggctgtggggaggaaggtgacgtgcaggggaccagaggctctgcactgctcctaggacagctcatctgtaatcagaaaaaaaataaataaaatacagaacgctgactcctccgtgagacagatcggggaccttagcactttaatccctcccttctgagcgctcggtgtgcacttttagactatagctgtttcattgacgtgtcactctccatccagtgtccttgatgtggcttttagagacttagcagaaaattcgacacaagcaggaacttgattttttaagaaaaaatattacattttgaggacattttgacaagtaggggaagagagggcttctgttgttttgttttgttttgttaactaaacctgaagtattaattccacaaagacactgtccctcaggaccactcaggtacagctctgccagggacagagtctgctagtgggaggtctcaggtggggcggtgtgttctgtgccatgaggcagcgacaggtccagatggatgtcgtcaccaccttcctcagctctcatcacctggtcgtacgccaggcccacctcttcccagcaagggacgccaaagaactgcagtttttattctgagtcttaatttaacttttcatcatcttttcctattttgragaattttttgtaattaaaagcaattattttaaaatgtgcaagccagtatctcacaaggcatggatttctgtggaatttatttttattcaaataaccatatttatctccaggctgtggaatcgccactttctttgtgaagacagtgtctctccttgtaatctcacacaggtacactgaggaggggacggctccgtcttcacattgtgcacagatctgaggatgggattagcgastgtgggagactgcacatccggacctgcccatgtctcaaaacaaacacatgtacagtggctctttttccttctcaaacactttaccccagaagcaggtggtctgccccaggcataaagaaggaaaattggccatctttcccacctctaaattctgtaaaattatagacttgctcaaaagattcctttttatcatccccacgctgtgtaagtggaaagggcattgtgttccgtgtgtgtccagtttacagcgtctctgccccctagcgtgttttgtgacaatctccctgggtgaggagtgggtgcacccagccccgaggccagtggttgctcggggccttccgtgtgagttctagtgttcacttgatgccggggaatagaattagagaaaactctgacctgccgggttccagggactgktggaggtggatggcaggtccgactcgaccatgacttagttgtaagggtgtgtcggcttttycagtctcatgtgaaaatcctcctgtctctggcagcactgtctgcactttcttgtttactgtttgaagggacgagtaccaagccacaagaacacttcttttggccacagcataagctgatggtatgtaaggaaccgatgggccattaaacatgaactgaacggttaaaagcacagtctatggaacgctaatggagtcagcccctaaagctgtttgctttttcaggctttggattacatgcttttaatttgattttagaatctggacactttctatgaatgtaattcggctgagaaacatgttgctgagatgcaatcctcagtgttctctgtatgtaaatctgtgtatacaccacacgttacaactgcatgagcttcctctcgcacaagaccagctggaactgagcatgagacgctgtcaaatacagacaaaggatttgagatgttctcaataaaaagaaaatgtttcactaaaaaaaaaaaaaaaaaactcga

SEQ ID NO: 114 - DNA, 253 bp, Homo sapiens
  misc_feature (226)..(226): n equals a,t,g, or c
  misc_feature (228)..(228): n equals a,t,g, or c
agattttgaacttaaattatattctatatgtgtatcttcctaggcaaaagctgtaatttccagagagaccattaggaacaggtagtatctattttyctccattatttatttctagaaactcataaaatggattgtatttttctataagaacaaaatattaattaaggtatagatgactgaccaagggsttaatcaaataaaatgactaacagcatctatccataangncacacaagccttatgttctcatctt

SEQ ID NO: 115 - DNA, 705 bp, Homo sapiens
  misc_feature (671)..(671): n equals a,t,g, or c
  misc_feature (688)..(688): n equals a,t,g, or c
  misc_feature (698)..(698): n equals a,t,g, or c
cccaatctctagctagtgttgcttatcaaataaatgcattggccaacaatgtactccagttgctggatatccaagcctctcagcttcggagaatggagtcttccatcaatcatatctcacagactgtggatattcataaggagaaagtggcacgaagagagattggtattttgacaacaaataagaatacatcaagaactcacaaaataatagcacctgcgaatatggagcgccctgtaagtatattcggaaacctatcgattacacagttctggatgatgtgggccatggtgtcaagtggctaaaagccaagcatggaaataaccagcctgcaagaactggcacactgtcgagaacaaatcctcctactcagaaaccgccaagtcctcccatgtcaggccggggaacactgggacggaatactccttataaaaccctggaacctgttaaacccccaacagttcctaatgactatatgaccagtcctgctaggcttggaagtcagcatagtccaggcaggacagcatctttaaatcagagaccaaggacacacagtggaagtagtggaggaagtgggaagttcgaggaaaacagtggtagcagtagtwttggcwttcccwttgctgtgcctacaccttcggcacccaytattttgaaaccatttgttgatngttccaatttccaccgncaccactttncaccaaa

SEQ ID NO: 116 - DNA, 920 bp, Homo sapiens
  misc_feature (920)..(920): n equals a,t,g, or c
gctagaagtggattggagcctctttgatggatttgcagatgggttaggagtggctgaagccatttcctatgtggaccctcagttcctcacctacatggcacttgaagaacgcctggcccaggcaatggaaactgcccttgcgcacttggagtctctcgcagtggatgtagaggtggccaatccaccagcaagcaaggagagcattgacgctcttcccgagatcctggtcactgaagatcatggcgcagttggtcaggagatgtgctgccccatctgctgtagcgaatatgtgaagggggaggtggcaactgagctgccgtgccaccactatttccacaagccgtgtgtgtccatctggcttcagaagtcaggcacctgccccgtgtgccgctgcatgttccctcccccactctaaagaccaaggccgtttactcctggtctgattattttccccatctgaaatccacaatactgcaggagccctcttgaaattaacaatggaaataaaaccaatcagtcagttagcctaaacctattgattcctcgtgattatttccaatgtgaaaacagttgtgtatgattgcattaaaaatcatatcatcttttagaggttagaaaagggaaaactaaactttctaaatgctacttgagattgcagtaagaagatacgttttctaacctgaaagttaaatcgcatttgttttcttcagtagaatgggaatgtgttgctgttacttgtaatgtcaagtttatctgttaaatatgtccaaaaggcaaaatcatttttgttgcatgttatgggtcgatgttcctgtaattgcagtgccgtaaaagcttattaaagttgttcttttggttttaaaaaaaaaaaaaaaaaaaaaaaaaaaaaaaaaaaaaaaaaccccgggggggggccgggn

SEQ ID NO: 117 - DNA, 466 bp, Homo sapiens
  misc_feature (460)..(460): n equals a,t,g, or c
  misc_feature (466)..(466): n equals a,t,g, or c
ttttttgtttcttttcagtgttttatttttcaaaatatacaatttaagtttttatttcacaaccgtagttttgtatatttattccaaaatctttaaatagctccgcagcaaacagtacaaatcacaaggtccgtcaaactgcttctctttagcctttacacttggcgagttttttaagtttcaagtagtaatggtttgtgggtaagaaaggaaccaaaaacaggaggaaacaacattttttacataagctcaacatgtaggattagaaagggccgtctgaccagctccttggtctgggaccagactaagaacatgtatctggtttataaataagaccgtcctgggagcagtgagggttttggttacgaggaggaaggggcaggaacctcatctgcggaggctgggaggcagggggagktgaggcactgagaggtggctccytctgggagcgcccgagtangggccn

SEQ ID NO: 118 - DNA, 323 bp, Homo sapiens
  misc_feature (111)..(111): n equals a,t,g, or c
  misc_feature (113)..(113): n equals a,t,g, or c
actatttttttattttataaatctttgtagaaataagcaatgaaatactactttcatcttttgaaatgggatttttcaaggcagtgtccttttggcattaaggtagggggncngttaatattctctctgccttgtttccacgtggaatcaatattaaagtcatggacattttaaaatctcaatttaatttcttcttatttactatgcagtatagccgtggaacaagtaatgtagatttagttttctcatcttcaaatgccctgatcaccctacctcacagggttgttgtggggrtwaataaaactttatggragcaaaaaaaa

SEQ ID NO: 119 - DNA, 448 bp, Homo sapiens
ttttttcacagcatattagaaatgtttattaagaataatggcatgaactgcttttaacaatttagaaaagacccattccccccgcccscccccgcccccagatccagggcacttcctctaagtaaayacaaatatttctgtagtgaactgtatgcatattcccactgagtaaaggttataagaagcctcaggtcaggtcttaccaccaaacttgaaaacacttggaatgcagctgggcagggacttgagcaggttttgtcttgataagcaggtaagaatggcagaacactggcttattgtcaaccaatgtttttttatatacctgaagtattcacagcaacttattttaagaagctttttaaaagttctacacctccacccccacaactccccaatccagaacatggaacaagggtgtggagccgtttgatggacttgggtctgttcg

SEQ ID NO: 120 - DNA, 849 bp, Homo sapiens
  misc_feature (32)..(33): n equals a,t,g, or c
  misc_feature (39)..(39): n equals a,t,g, or c
  misc_feature (841)..(841): n equals a,t,g, or c
ggtgactccgtctcaaaaaaaaaaaagaaggnngtaccnacagtatacgtgtgggcacttgtgcttgagcctgtattaaaggaatcaggccaggcacagtggctcacgcctgtaatctcagcacattgggaggctgaggtgggcggatcacctgaggtcaggagttcaagaccagcctggccaacatggtgaaaccccatctctactaaaaatacaaaaattagctaggcggggtagtgcatgcctgtaatcccagctactcaggaggctgaggccggagaatcgcttgagcccgagaggtggagactgcagtaagccaagatcatgccactgcactccagcctgggcaacacagggagactccatctcaaaaaaaaaaaaaaaaaaaaaaagacattcaacttgaggctcctgttagttaagctatcttctttcacttgaagcaggtttgagaggcctaggccagaatttaaattccttttatgaatagatttccctttcttcctgaccccaaggtcagaggagactatatattccatggctgcctctaagactaggaataggaatatctgaaaacagcatttctaagggtggtaaccacaggtcgattttaatacgagtcctttttcttgtagaggtaagtaaaatcttcctgacaaggtagtcctcttttcacggcacagacaatgggctttctgtttatgaggggtgagaagtgatgtttgttactatgttctccagcaagtaaacattcctctgctcacctcccaacaagactaacagtctttttagaagtaaatatattcaagacaaacgagaaaatcctggctacccaagtcgngtatatac

SEQ ID NO: 121 - DNA, 876 bp, Homo sapiens
  misc_feature (871)..(871): n equals a,t,g, or c
  misc_feature (876)..(876): n equals a,t,g, or c
aaaaaaaatttacaaaaaaacaamcacamaaaaawtatcttttttaggccagagttttctacaggtattaatgaatatttttcttaatccttataagttttatgtgtttaatatttcttaataccggtagcattaatttatacttttgtagcaacacaatatttttataaacagccggtgcttggctcaagtcttcacgaggggtttaggcagggccatcttggggaccctgtgtaccatgtactgtatttaaaaaaaaaaaaagttacctattgtcacacttgctgtgttaattaacaaaagatgttgtgtgcggtctcctgtatcggtgtggatccaacagctctccagggagtcacattgcatgggggttgagttgacggttcttgtgatatgtaaacccccgagaccaaacttgagggtttatttagggttttctgtttgtcctttgggtttttgtttcactttgttttggtgccgtttctccatttacagccaaatcagtttcatgatgttcaaaacatttactgatgtcaaatggaggaaaggaacagaaaaaaagatttttacaaagtaataaaatttaaaactgagctgtttaatgttgctgtttttacctgtctgttcttgtccaaaagtggaacattcccagggagaagaggaaggttccactcggttctttaagtcgccaaaagccccagcccgggattcagtacctcccctgccccccgaattcttgcagcactatttcccagttggttgatgccaaggcaaaaagataacttttaacagttagagaggatcagttgcttaaatgatttcatgtcagtgttgtatttatggttttacaataaaacaacctttaggaaanaaaan

SEQ ID NO: 122 - DNA, 382 bp, Homo sapiens
  misc_feature (100)..(100): n equals a,t,g, or c
  misc_feature (105)..(105): n equals a,t,g, or c
  misc_feature (341)..(341): n equals a,t,g, or c
gcctcccaggttcatgccattctcctgcctcagcctcccgagtagctgggactacaggcacctgccaccacacccggctacttttttatatttttagtanagacnggtttcatcatgttagccaggatggtcttgatctcctgacctcatgatccgcccaccttggcctcccaaagtgctgggattataggcatgagccaccgtgcccggctattttcagttcttatgctgtgaaccactttgccttgtagctttttctatctttccaaaatcctcactctgttcattgtttgtctcaggggaaaatcttcccccaccgagcttgtaaaaaaactttaatnattgggtggaggataatttaggatgggtatttattggaggt

SEQ ID NO: 123 - DNA, 1070 bp, Homo sapiens
  misc_feature (334)..(334): n equals a,t,g, or c
  misc_feature (882)..(882): n equals a,t,g, or c
  misc_feature (961)..(961): n equals a,t,g, or c
  misc_feature (1018)..(1018): n equals a,t,g, or c
  misc_feature (1070)..(1070): n equals a,t,g, or c
ggcacgagggccgactggactttgtgagctccagctgctacagttgactgagttcaggctccatgtagctgggatatactacatggttacccctcacccctatggagcttccaaaagagaccctccctcaaagcacagccccttctctgagtgcaaataatggccatcagaggtcagtcacaggtgttaggcaggcatctatgaagctggggatgatagcactgacttcagtgcttggacgagaaccaggagagagtgtgtagaaaaagcacagccagcctcccataaaaggacagaytcctgtgacaaccttgtcactctgttcctccctgantactctggggaggtggaggccagtgggcagttctaaagctcagcaggtttggagccattgggtgtggactcctctcccagtgttcctcctgggtgttcacagatgttattgaaatgcacactgggaaccctgcacaggtaaaactaaggytttattggcgtgattgccaaaggtcacacagggtggtttggyagagctgggattagaagcccagcctgtytctyttcagtagtaatggagtcctgggaggtttactaggctttagcctcaatctgtggcggcagggtccacagccctggggagtgacacagtcatggtccccatgattggccaggacctgtktggagagacacaggagacaagaccctgctcttccaggccagaagggaggggagccccagagctgggcagtggcatgccccacagcctggccacctgcttcggctacgcaccatgcagcagctgcacctggctgcctcgggaaaactctgacctctctgggaagtggagccagtggctctgtgggcgtcctttcctgcagcctgganagcaaagcggctttccctgggactgtgtggctcctgtcccaactggcctccccattccacattcccattgctggaccancaccaggactgggcacagggcttccttttgctgattcatttcccccctaactcatcnaaattgaaccccatctgattcccacatgctggccctgaaacggtacaaaggn

SEQ ID NO: 124 - DNA, 371 bp, Homo sapiens
  misc_feature (360)..(360): n equals a,t,g, or c
gtctattagaaaacggtcctaagagattctttggtgtttggcactttaaggtcatcgttgggcagaagtttagcattaatagttgttctgaaacgtgttttatcaggtttagagcccatgttgagtcttcttttcatgggttttcataatattttaaaactatttgtttagcgatggttttgttcgtttaagtaaaggttaatcttgatgatatacataataatctttctaaaattgtatgctgaccatacttgctgtcagaataatgctaggcatatgctttttgctaaatatgtatgtacagartatttggaagttaagaattgattagactagtgaatttaaggagtatttgaagtngggtggggggg

SEQ ID NO: 125 - DNA, 581 bp, Homo sapiens
tttttttttttttttttttttttyttgagtattccagcattatttatttgatcagagtaaaatacacttcccatcactacaaactgagcacaactacagttgtctacacattcatatttttgacgtgccaacattttgcattctacatgaaacatttggtttaaacaaaatcttaagaattctctattttgtttcccatcttccctcctgttctctcccatcctccaaagatgttttatattaactgctatgagatttatttgccggtcacgtaatacggaggacagcagggaacaacacaagatttaccatgcctaggggatgaatggcaaacccaactttggctaatgtcattgagaacaacttgggaagcgtgasaggaggatatctcatggaagtgggcagtgaacctacatttccatttatcagaagcaaacatgggaaggttacatacatgatgaagtattggaagttaaagacttaagacacaaaatcactaatttaaaagracmtgcmacmtgrgtatcaacttgctatgtagkgtacatgtaaatgacccaaatattcacctctagcatccg

SEQ ID NO: 126 - DNA, 705 bp, Homo sapiens
  misc_feature (681)..(681): n equals a,t,g, or c
atcggacgggcttaacatgaaagcctataggtcattcttgctctgggatctacaggcagggtaggcacaggtgcagcctaagaagggaacctgcttcctctcccttccaaagacagtgacagctgactgagggcaaagagcaggcaccactcagaacgtggtgagtacagctcagctcagcactcagtcagtggtaacttgtgcccagccctgtgctaggcgctgacattaacaggagcaaccagggcccaattcctggccttggagctcaaatctttcctttgatttttgctcctgatcatcaaggccccagtggcaaccatgtggtaagtggccaaccaagccctacccagggtcacccaacacactctgccttgagcctctcctcagggtctattccttgcgtggattatgtggccgtagcatgttacagttcaaacatgtctccactaccctgttaagagcagcctgggaacgtacaggccatcaagactatttatttaaatacaaaaaaaggggaaaacacacacacggaaaaaaaattgtaagcactttttttgtaaaaccaatgtctgttttgttacatacctttcatgtcgtgctttgtaaatgtcttatttgtgtaataaagttaatgcaagtaaaaaaaaaaaaaaagatgggcgaagttatcccttgtgnggtaattagtttgctgcgcgttta

SEQ ID NO: 127 - DNA, 1196 bp, Homo sapiens
gcgaccgcctcgcgtacccggcttgcggtccacgagcgagcacgcccggggtggcgatggggtcgcgccgaggcagcggaggttctgcgggcgactggaggttggcagtgggcgggagaaagaggaaggcaggcgcggctgggcctcggcctctggcgccgcggtaccctttgtctcggcagcctgacggccccgccgggctctccggagaggggaacgggcggcgagggtggcgggtcctgggcgccctgtgctgcggggccgagaggcgctcgggtcgcggcgggatcggccggaccagacagggttaatggaagagcctggccagtcccgcgcggggcccccgcagcgacagccttggccgcggggactggagtcctgagggggagaagcctgccgttctgaaggctcgggacttctgccccaaagacttcgccgccgagaactgcgggtgcactgcctcagggaagaagttgagaattttgccaggtcatctctgccagggcacagttcatcactgtgtgtttagtgtgtttcggtgaagctctccaagtgtgttgaatcagcgtgcctagcctcaagggtgcatcgtgaaaactgaaaccaaaggaatgatacaggcctgctttgtgtgtgtcttcccactttaagcttgttttcagtacaaatactcttgctttaaacctgattggactgtggcgagcggacatctgttcaaaggaggggccgagaccacagtacttctgaagggggcttgataatgtggaaacattttaagttttctctccggactgttttgctctctcaattcaggcaagttactgaagtacgttttttatctagaaaaaggtttgatgtagtctgtaaatggtccttgtaaagtacattgccatctcagaattaaaagatccactctcatttattatgcagaagttagtggtcattctttcctgtagatagtttatctcatgtaaagacccacccagcttggtttaaatttttttctcactgacgtataaccatcagctttgatacttccattttcaggctcagactttgaatttaaggaaactaaagatgactttattttcttttctcttggttttttttttccaaaaacaaaaaataaatccattacatgttaacataaaaaaaaaaaaaaaaaaaaaaaaaaaaaaaaaaacggacgcgtgggc

SEQ ID NO: 128 - DNA, 975 bp, Homo sapiens
  misc_feature (794)..(794): n equals a,t,g, or c
  misc_feature (845)..(845): n equals a,t,g, or c
tgtccctttttattctagaggcttttcctttaattcagagattagtggagataataacgtcagtcaaggctaatgtggtacatggaacttgctaatggaggttggacattctgtttcagtcttacatggatattgtttcattggtgttgaggaagaaaaaaattagatactaccatgcattgggacagcataattctaatattacattgaatatggctttttaaaaataagtattaaaaagccaatcgttttctccatttatctatcttttttgtttgtttttaatttggttgattgatatgcacccaggccgtcttatttttacttgttaaatgtctgtctaggaagaactgtgattggaaaggaattaattattatacaaataaatctggtaggatatgagtggagtaagtttgcttgaaacagaagtatattttctactttgaatcacctcaccagagtcatctgtcaagaattatgtataacaatttatctttattgcctacatacaacatactttttctgaattaagataacttctatttgtgagttgaacttcattatctgccattttgtggaatcaaccttacattytttggtggractagagctgattgtcaccacaaggttatatgacaactctgttctargrcttataccyattatatagggktataccttttttcttatgcctcagctctgtacctgacaatttatgattcagtggagccaagctagaaggaacaaaggtcatctaacactgtgatggggatgaattcctgagttttacctgnacaatgaggtggtgccccggaattcacaacagagtagtgatagagcataangatggctgctccagatgactcttgggtttaagtgtacttgtgattgaacaagatttttatctatgaagcttgattctacaaccaaaataatagaaatggggggggggggaatcatgtctgcttatgcttt

SEQ ID NO: 129 - DNA, 331 bp, Homo sapiens
  misc_feature (331)..(331): n equals a,t,g, or c
catatattagtgtgctttgaagttgactgaaagatatactggatatcataattatataatttctaaatagatttctttaaatccatgctatgttttctttttcagtcaggtcctacagaatgactattgcacttggtctattgttttaatagtaaattttgttattaatctcctatgtgttaaacgtgggtaattgtattatgttaatacatacttagggaggaaaagcaggtggatgtaaatcagtgattcccaacttcagcagatggwtagcmgtgggagggtatccttggagctttttgtaaatatttccaaaaaagggggggggggn

SEQ ID NO: 130 - DNA, 233 bp, Homo sapiens
tcgacccacgcgtccgcccacgcgtccgcaaaactgagagggataggaaagaaaaacttatccaggaaggaaaattggatcgaacatttcacctctcatattaagtctggcaatgatgactatatgtattcctgcctaaataaatcatctattaatcattaaaaaaaaaaaaaaaaaaaaaaaaaaaaaaaaaaaaaaaaaaaaaaaaaaaaaaaaaaaaaaggggggggggg

SEQ ID NO: 131 - DNA, 2043 bp, Homo sapiens
ggcacgagcagccctcggccccatccctacgaccagcccttccgtcctgcccaccccggcagcgactggtgttcctgaagacacataaatccgggagcagctctgtgctgagcctgcttcaccgctatggggaccagcacgggctgcgcttcgccctccctgcccgctaccagtttggctacccaaagctcttccaggcctctagggtaaaaggctaccgcccacagggtggaggcacccagctccccttccacatcctctgtcaccacatgaggttcaacctgaaagaggtacttcaggtcatgccttctgacagcttctttttttccattgtccgagacccagcggctctggctcgctctgccttctcctactataaatccacctcatcagccttccgcaagtcaccatctttggctgccttcctggccaatcctcgaggcttctacaggcctggggcccgtggggaccactacgctcgcaacttactatggtttgactttggcctgccctttcccccagagaagagggccaagagagggaatattcatccccccagagaccccaaccccccacagctgcaggtcttgccttctggtgctggccctcgagcccaaaccctcaatcccaatgccctcatccatcctgtttccactgttactgatcatcgcagccagatatcaagccctgcctctttcgatttggggtcttcatccttcatccagtggggtctggcatggctggactctgtctttgacctggtcatggtggctgagtacttcgatgagtcattggttctgctggcagatgccctgtgctggggtctagatgacgtggtgggcttcatgcacaatgcccaggctggacataagcagggcctcagcactgtcagcaacagtggactgactgcggaggaccggcagctgactgcacgggcccgagcctggaacaacctggactgggctctctatgtccacttcaaccgcagtctctgggcacggatagagaaatacggccagggccggctgcagacagctgtggccgagctccgggctcgccgagaggccctagcgaaacattgtctggtagggggtgaggcttctgaccccaaatacatcactgatcgccggttccgccccttccagtttgggtcagctaaggttttgggctatatacttcggagtggattgagcccccaagaccaagaggaatgtgagcgcctagctacccctgagctccagtacaaggacaagctggatgccaagcagttcccccctaccgtctcactgcccctcaagacttcaaggccactctccccataaacatcagactacagatttaggtggaagagcagccatgtttgaagggcacatgtgatgagtggggggcagcaagatgccatttctgcatctcccagaagggatgagtctttgtcccaaatgcaagccccctcttcgctgggctcccagcagtgcttccctcctccaccctccactcattttgttctttccccccaacttttttttttttttgaaacggagtcttgctctgtcccccaggctggagtgcagtggcatgatctcggctcactgcaacctctgcctcccaggttcaagcgattctcctgcctcagcctccagagtagctaggattacagatacgtgccaccatacccggctaatttttatatttttagagacagggattcaacatgttggttaggctggtcttgaactcctcacctcaggtgatccacatgactctgcctcccaaagtgctgccattacaggcgtgagccactaggcctgacctccccttcccctttcctgccccaaggcagatccacatcaccgaagctccctagaggggcaaaagatggagtgagccacaggaagtttggggcgtggtgagttggaatgatacgtccatttctctatgaaatatttgctactagactgttcatttctctctgacatgtttgttgaatgaataaataatttgaaacttcaaaaaaaaaaaaaaaaaaaaaaaaaaaaaaaaaaa

SEQ ID NO: 132 - DNA, 2877 bp, Homo sapiens
tcgacccacgcgtccgggatgaggcccggcctctcatttctcctagcccttctgttcttccttggccaagctgcaggggatttgggggatgtgggacctccaattcccagccccggcttcagctctttcccaggtgttgactccagctccagcttcagctccagctccaggtcgggctccagctccagccgcagcttaggcagcggaggttctgtgtcccagttgttttccaatttcaccggctccgtggatgaccgtgggacctgccagtgctctgtttccctgccagacaccacctttcccgtggacagagtggaacgcttggaattcacagctcatgttctttctcagaagtttgagaaagaactttccaaagtgagggaatatgtccaattaattagtgtgtatgaaaagaaactgttaaacctaactgtccgaattgacatcatggagaaggataccatttcttacactgaactggacttcgagctgatcaaggtagaagtgaaggagatggaaaaactggtcatacagctgaaggagagttttggtggaagctcagaaattgttgaccagctggaggtggagataagaaatatgactctcttggtagagaagcttgagacactagacaaaaacaatgtccttgccattcgccgagaaatcgtggctctgaagaccaagctgaaagatgtgaggcctctaaagatcaaaacacccctgtcgtccaccctcctcccactccagggactgtggtcatggtggtgtggtgaacatcagcaaaccgtctgtggttcagctcaactggagagggttttcttatctatatggtgcttggggtagggattactctccccagcatccaaacaaaggactgtattgggtggcgccattgaatacagatgggagactgttggagtattatagactgtacaacacactggatgatttgctattgtatataaatgctcgagagttgcggatcacctatggccaaggtagtggtacagcagtttacaacaacaacatgtacgtcaacatgtacaacaccgggaatattgccagagttaacctgaccaccaacacgattgctgtaactcaaactctccctaatgctgcctataataaccgcttttaatatgctaatgttgcttggcaagatattgaactttctgtggatgagaatggattgtgggttatttattcaactgaagccagcactggtaacatggtgattagtaaactcaatgacaccacacttcaggtgcttaaacacttggtataccaggcagtataaaccatctgcttctaacgccttcatggtatgtggggttctgtatgccacccgtactatgaacaccagaacagaagagattttttactattatgacacaaacacagggaaagagggcaaactagacattgtaatgcataagatgcaggaaaaagtgcagagcattaactataacccttttgaccagaaactttatgtctataacgatggttaccttctgaattatgatctttctgtcttgcagaagccccagtaagctgtttaggagttagggtgaaagagaaaatgtttgttgaaaaaatagtcttctccacttacttagatatctgcaggggtgtctaaaagtgtgttcattttgcagcaatgtttaggtgcatagttctaccacactagagatctaggacatttgtcttgatttggtgagttctcttgggaatcatctgcctcttcaggcgcattttgcaataaagtctgtctagggtgggattgtcagaggtctaggggcactgtggggctagtgaagcctactgtgaggaggcttcactagaagccttaaattaggaattaaggaacttaaaactcagtatggcgtctagggattctttgtacaggaaatattgcccaatgactagtcctcatccatgtagcaccactaattcttccatgcctggaagaaacctggggacttagttaggtagattaatatctggagctcctcgagggaccaaatctccaacttttttttcccctcactagcacctggaatgatgctttgtatgtggcagataagtaaatttggcatgcttatatattctacatctgtaaagtgctgagttttatggagagaggcctttttatgcattaaattgtacatggcaaataaatcccagaaggatctgtagatgaggcacctgctttttcttttctctcattgtccaccttactaaaagtcagtagaatcttctacctcataacttccttccaaaggcagctcagaagattagaaccagacttactaaccaattccaccccccaccaacccccttctactgcctactttaaaaaaattaatagttttctatggaactgatctaagattagaaaaattaattttctttaatttcattatgaacttttatttacatgactctaagactataagaaaatctgatggcagtgacaaagtgctagcatttattgttatctaataaagaccttggagcatatgtgcaacttatgagtgtatcagttgttgcatgtaatttttgcctttgtttaagcctggaacttgtaagaaaatgaaaatttaatttttttttctaggacgagctatagaaaagctattgagagtatctagttaatcagtgcagtagttggaaaccttgctggtgtatgtgatgtgcttctgtgcttttgaatgactttatcatctagtctttgtctatttttcctttgatgttcaagtcctagtctataggattggcagtttaaatgctttactcccccttttaaaataaatgattaaaatgtgctttgaaaaaaaaaaaaaaaaaaaaaaaaaaaaaaaaaaaaaaaaaaaaaaa

SEQ ID NO: 133 - DNA, 681 bp, Homo sapiens
  misc_feature (101)..(101): n equals a,t,g, or c
  misc_feature (223)..(224): n equals a,t,g, or c
ctccctctcccttttgctgcaagactggatctgctcttgaatctgccccggataattctgggcagcttcttcgatcaagctgacattatgggatttgtggnccttggattcacgacacacaaaacagaggaacttcccatcatcctcgcagaaatagtggaacatctcctggtgcctcgggcaatgtagcctcttttccttttggactgcacctcagaggctnngtagagctttggattttctccaccagattccgcaacagcgagttgaacctgattgcgttcttccttacggaagttttgcagaggggacatttgaaaaatccacatgatgtttccccaatctgagtgatgcatttgaggcagaaattgtgcccacagtcgatggtgacaggtttctgcagaatgtccaggcagatggggcagatcacttcctcttgcagtttgttcacaaactgcccactggccatgacagaacaacagggctgtttcaagactgtaggaagctgtgccaagtctgtaggagccccggagtccactgtggatactgtttctaggaagggagaagggagtcagagaaagtggaggtcagagattctgcccaattagttagaagagcagagagagaggaaaagaagagggagaaaaaaataaagaaatgatagaaaagcgtaaaatttag

SEQ ID NO: 134 - DNA, 606 bp, Homo sapiens
  misc_feature (34)..(34): n equals a,t,g, or c
ttgatggccatttggaagtaaatttccgcagtanttcataggtgcacttaacacagactttgcttaatgaaaatgtcagttctaatagtaactgattcacttctgaacagaagtgattttaggcatatttcttaacatatatcaagcaaagtcctgttaaaagatctaaatgaagaatggagacctcagtgattaaagatattttgtttctgaccttgagcagattgcttacctgttctctagactataacccaacatgtaaaaaaaatttgaagatggtgatgaggaaagtgagatatatatatatatatgtattaygtttctagcacttttcccttttaaaaagtgaaaatatccttgtacatttttgaaaaatatatttycagtyctgaaaaatgtagcagaagtagtgaaaatgycatattttaaatgttgattattagataaatttaacctgcttagggtttattgtaactacacctttcagacgtgtgtttyggagtagtggaattgccagccaggccctgtggcttggaaaggcatcccagaaatcctcggccagaaggtgtggcttgttaaagcattgagattcmgagtattttggtt

SEQ ID NO: 135 - DNA, 1211 bp, Homo sapiens
aattcggcacgagagcggccttcctcggtcaagtcgctgcgctccgagcgtctgatccgtacctcgctggacctggagttagacctgcaggcgacaagaacctggcacagccaaytgacccaggagatctcggtgctgaaggagctcaaggagcagctggaacaagccaagagccacggggagaaggagctgccacagtggttgcgtgaggacgagcgtttccgcctgctgctgaggatgctggagaagcggatggaccgagcggacacaagggtgagcttcagacagacaagatgatgagggcagctgccaaggatgtgcacaggctccgaggccagagctgtaaggaacccccagaagttcagtctttcagggagaagatggcatttttcacccggcctcggatgaatatcccagctctctctgcagatgacgtctaatcgccagaaaagtatttcctttgttccactgaccaggctgtgaacattgactgtggctaaagttatttatgtggtgttatatgaaggtactgagtcacaagtcctctagtgctcttgttggtttgaagatgaaccgactttttagtttgggtcctactgttgttattaaaaacagaacaaaaacaaaacacacacacacacaaaaacagaaacaaaaaaaaccagcattaaaataataagattgtatagtttgtatatttaggagtgtatttttgggaaagaaaatttaaatgaactaaagcagtattgagttgctgctcttcttaaaatcgtttagattttttttggtttgtacagctccaccttttagaggtcttactgcaataagaagtaatgcctgggggacggtaatcctaataggacgtcccgcacttgtcacagtacagctaatttttcctagttaacatattttgtacaatattaaaaaaatgcacagaaaccattgggggggattcagaggtgcatccacggatcttcttgagctgtgacgtgtttttatgtggctgcccaacgtggagcgggcagtgtgataggctgggtgggctaagcagcctagtctatgtgggtgacaggccacgctggtctcagatgcccagtgaagccactaacatgagtgaggggagggctgtggggaactccattcagttttatctccatcaataaagtggcctttcaaaaagaaaaaaaaaaaaaaaaaaaaaaaaaaaaaaa

SEQ ID NO: 136 - DNA, 881 bp, Homo sapiens
  misc_feature (841)..(841): n equals a,t,g, or c
  misc_feature (845)..(845): n equals a,t,g, or c
  misc_feature (848)..(848): n equals a,t,g, or c
  misc_feature (866)..(866): n equals a,t,g, or c
  misc_feature (875)..(875): n equals a,t,g, or c
tcgagttttttttttttttttttttttttaaaatatttgaagagatttattctgagccaaatgtaagtgaacatggcctgtgacacagccctcaggagaccctgagaacatgtgctccaggtggtcggggaacagcgtggttttatacattttagggagacatgagagatcaatcaaatacatttaagatatacattggtcctgtccagaaaggcaaaacaacttgatgtgggggcttctagattataggtagatataacaattttctgattggcaattggttgaaagagtaattatcgatagaaaggaatgcctgggttgtaagaggttgtggagaccaaagttttatcatgcagatgaagcctccaggtagaagacttcagagagaatagattgtaaatgcttcttatcagccttaaggtctgtgttgatgttaatgctggagggtatgatgaggcatgttcgactcccacttcccatcatggcctgaaccagtctttcaggtttaattttcgagtgtcctggcccagaaggaagtccatttagatggttgagggggcctmagaatttkgtttagkccccatggstccctctaaagtkgamcycatagtcctttcttcttgcaagagttcctgtaagaaaaaaaataaaacaacaccaaaaacactaatcacaggaaaactccaaagctttaggtgcaacatggtggggaagttaaaagcacagcttggaagtcaggcttcttgggttgctgaccctggtctacaactatgtagcttctacagcttggtgctatagtctgaatgtctgtgtcccctgaaagtttatatgttgaaacctngtgnaangtgaaaatttcagaaacngagcgaggnatcata

SEQ ID NO: 137 - DNA, 917 bp, Homo sapiens
ccatcttcacattttgcttccatatttgaagagtctcacgtgccagtaattgaagaatctttgagagttcagatatgtgaaaaggcagaagaattaaaggacattgtgcctgaaaagaaaagcactttaaatgaaaatcagcctgagataaagcatcagtctcttctccagaaaaatgtgagtaagagggatccacccagcagtcatgggcacagtaacaagaaaaatctattaaaagtagaaaatggtgttacacgaagaggtagatcggttagtcccaaaaagccagccagtcaacattcagaggaacatttggataagattcctagtcctctaaaaaataaccccaaaagaagacccagagatcaatccctcagccccagcaaaggggaaaataaaagttgtcaggtcagcaccagggcaggctctggacaagatcagtgcagaaaaagcagagtcgtcgccagcccaaaaaagcagcaaaaaattgaaggaagcaaagctccatcaaatgctgaggccaaattattagagggtaagagtcgaagaatagcaggctatacgggcagtaatgctgagcagatcccagatgggaaggaaaaatcagacgtcatcaggaaagatgcaaagcagaatcagttggaaaaaagcagaacaaggtctccagagaaaaaaatcaaaagaatggttgagaaatctcttccatccaaaatgactaataagactacaagtaaagaagtatctgaaaatgaaaaaggaaagaaagtaaccacaggagaaacaagttctagtaacgataaaataggagaaaatgtccagctatcagaaaagaggctgaagcaagaacctgaagagaaggtagtttcaaacaaaacagaagatcacaaagggaaagaactagaggcagctgtacaaaa

SEQ ID NO: 138 - DNA, 1287 bp, Homo sapiens
  misc_feature (1142)..(1142): n equals a,t,g, or c
  misc_feature (1233)..(1233): n equals a,t,g, or c
  misc_feature (1265)..(1265): n equals a,t,g, or c
  misc_feature (1271)..(1271): n equals a,t,g, or c
tttaaaaacccctggaggttttaaccttgtgatgcctttatgaatatcctgttgaaatatccttccccctatgccttataaaccagagaaagccctttgaagccttataatgccaatggaagatacttagaagtaaacaaaatagagaggtatatgtagattttcttaggtcattagtttgtgtctttgtctggtaggctgaaactactgtcatatgactctctccctggccagattttaatagtcatactaatactgatgtgaatcctgataattaaactatcttgtcattacatttgtagataaagttttggttagaaatgattttgtatgtgttaggtatggtaatacagtctcaaataaaaggtcatgttaagataaaaggtcatgcttactttttaattaatttgtgtaataaaatttaggtctttggaaaacttatttttcaaataaatgaacctttcaaataaaaaagagaattagtttaacctttatctcatttcctattataggggtattgaatggacaagtttgactagttttctttcttttgctacctcaacaccaaacaatatgggattagtgagaaatgaacttcaactggttgatcttccaacaggtttgtttttaaagatccaaataggtttgtcatattgaataaacatgttgccatttataaaacatgtttgaaagtacttctttcaccttggaatttttttttatatttcatgcttatatatttatycttttattctctaataattgccctagaaaggcctcatcattgtttacatggaaatgttgttggcacaaatacatggtaaaatggaggaccattagcctgaamagacagattcattaaaaaataggataccggttctacttttaagtgcattgttatatgtaaccaactttaaaagatcgatttaaaaataactctgtcaatggactttattagagtctgtgctggaaattttggcttttataggaaacacttagaaaatttataggttaaggattgtttttaaatgctcaaatttaaaacttgtaatagtctctggcygaatggaatagagaaacttaatttgggattttgaagattctacagtaggaaacgtccccaataaggkaactttttcagnaattggaaagcctaaaccccagtgaatttccaaaataargaatttggaaaattataaagggraagrggttccaaattattttcctgggggnatgcaggaaggttccaaaagagggtttttttnaaaatnacaattgtgatgaggt

SEQ ID NO: 139 - DNA, 603 bp, Homo sapiens
  misc_feature (391)..(391): n equals a,t,g, or c
  misc_feature (517)..(517): n equals a,t,g, or c
  misc_feature (580)..(580): n equals a,t,g, or c
  misc_feature (602)..(602): n equals a,t,g, or c
cgcttgggcttggcgggtataggttgcagtgagccaagatggtgccactgcactgcagcctgggtggctgaacgagactccgtctcaaaaaaaaaatctaaatctgacatttgatgctatttttattaatattggaatgttctgtcttgaactttattcaatataatcaagaataaagatagagtaaacgtcactgatttgtactattaagagagaaaaaatatgccacacaactaaacataggtttaaattatgaagaaatttagaatagaggtttattagatttagggaacactaagaacaaaaaaggaaggagtgatacctgcctgagtggacagctgtaaatcagctgtaattactgcagttgtwccaatagttgtgartggctccnagtcmctttargagtccttggaartwcttggtacacatttgttggctgtwccttaaaggaartggcaartccagtttgttcyctctaccacactaractgccactgacaagtttgggtctgttggnttcaaaattttgtaagccattttcacaagtacaaagatacattttaaccttgtcttctccaanattactgagtaggaattttatnt

SEQ ID NO: 140 - DNA, 532 bp, Homo sapiens
ccacgcggtccgaagagaggttggtagaaaaactaaaactctacaatctatttcttaaaaataatgtttttcttttctttctttcctttcttttctttcttttctttacttttttttttcttttcttttctttttttttttttgacagggtctggctctatagtccaggttgagtacagtggtgtgatcacggctcactgcaaccttaacctctaggctcaagtgacccacctcagcctcttgagtagctgggaccacagacacaccaccatggccagatagttttctgtattttttctttgtagagacagggtttcaccatgttgcccaggctggtctcaaactcctgagctcatgtgatctgcctgcctcggcctcccaaagtgctgggattacaggcatgagccaccacatgtggcccattttttcttcataagtgagtttgtagtttttactttgttctaattttttgaggctatgttcaggaagccatacagcttgaataagtaaccatctcaggagaaaaaaaaaa

SEQ ID NO: 141 - DNA, 776 bp, Homo sapiens
  misc_feature (630)..(630): n equals a,t,g, or c
  misc_feature (669)..(669): n equals a,t,g, or c
  misc_feature (769)..(769): n equals a,t,g, or c
aatcctcagccattttgtgaaaatagccaagaaacttctagaactcaacaaccttcattctctcatgtctgtggtatcagcattacaaagtgctcccatcttcaggctgacaaaaacctgggctcttttaaatcgaaaagaagactacctttgagaaattggatacctgatgtcgaaagaagrtaattacaagcggacacgggaatatatccgargcctgaagrtggttccaagtattccctatctaggaatctatcttctggrtttaatctacattgrttctgcatatcctgcctcaggagtaatcatggaaaatgaacaaagatccaatcagatgaacaatattcttcgaataattgctgatttacaagtttcctgcagctatgatcacctcaccaccctgccccatgtgcagaagtacctgaagtccgtacgctacattgaagagctccagaagtttgtggaagacgacaactacaaactgtcgctcagaatcgaaccaggaagcagctctccaagactagtctcttccaaggaagatcttgcaggtccctctgctggctccggttctgcgaggttcagccggaggcacctgtcctgacacatctgttgctggcagcctccccacanctccagtgcccagacacagggaagagccacagcctaggnaacaatatggatgtgttcagttgagtgttagttgaggagtaaaagtgcgacatttcccttcggagaaaggcaagggcacctacttggacgacagtgttcntagagtt

SEQ ID NO: 142 - DNA, 689 bp, Homo sapiens
  misc_feature (348)..(348): n equals a,t,g, or c
atcagggacccttttgatccaattatagttattgggcagatacagtagtaccctattatcagaagacctagtttcaaatcctgagtcaatttctaattcactgtgtgaccttgtacaagtcacttaagctctctgatcattggttcaacatctttaatatgaggagagtaatgcctatctcaattacctcataaaattattgcaaagatcaagtgagttgatatgttacaaattatttctaaattataagattctgtataagtggaagggttaagtatactcccatattattaaacaccctacgtatcactcaggattctatatgactctgagttctcaatttctagnaaatggtcccatttttgctttgttccctacaattctacggagtcttttttttttwaaaggaagggtgtaggcaaaggtaaatgggagaaaacatggaatcacataccactctttggtgctgctaggcaagaattttaaactgagtttaggtcaccatcgtggacttaaggtccatatcacctcagggagacaagtagagtgggaggcatccaaaaggtaggtgattcttctcccctctagtgaagaatacaaggtcaatttacaaaaaagcaccagcagcaaataattggaaaattaaattcataaamcatttataatagcgtcaaaaaaaaaaaaaaaaa

SEQ ID NO: 143 - DNA, 555 bp, Homo sapiens
  misc_feature (46)..(46): n equals a,t,g, or c
  misc_feature (67)..(67): n equals a,t,g, or c
  misc_feature (72)..(72): n equals a,t,g, or c
  misc_feature (85)..(85): n equals a,t,g, or c
  misc_feature (248)..(248): n equals a,t,g, or c
  misc_feature (520)..(520): n equals a,t,g, or c
  misc_feature (552)..(552): n equals a,t,g, or c
aacaagccagattgatgatggccattgggcccatgcctttgccaanttccgaagaagaagaaaaagntggcngaagttgcccagncactgccaggagaatgctgcccaattgcacgcgctttagaaacggagtamtttgcacagcatgaagcaaggggytttgcgggcgcagccgacatcagcaccctagaccagaagctgcgtctggtcacttccgacttccaccagctaatcttggcttttctccnaatctacgacgacgagctgggcgagtgctgccagcgcccaggccctgacctccacccgtgcggccccatcatccaggccacgcaccagaatctgacttcctacagccaactgctgcaagtggtcatggcagttgctgacacctctgcgaaggccgtggagaccgtgaagaagcagcaaggcgagcagatctgctggggtggcagcagctccgtcatgagtctagctaccaagatgaatgaactaatggagaaatagaaagtcttcagtgatngcctacgccaaagcacaggatggggcgggcangaa

SEQ ID NO: 144 - DNA, 790 bp, Homo sapiens
  misc_feature (776)..(776): n equals a,t,g, or c
  misc_feature (780)..(780): n equals a,t,g, or c
gcaagaatataaaattctgaggcctattttagctctaagccagaccatgttataacttcttaactgaatacttcttatctatactttttttctatatctttccatctatctgtaagtagcttttcccatgatctgacttgtttatatttcctattaactgacaaagcatttaaaaacagttaaaaattgtctcgacaggcattttaaatgtcaagacattataaaatactttagatttatacagcaattgtgaacacctttgacaaatgaacatgtctgttcagcctttttggtacccctttttattttgcttaggtagatcaaattctaagttgatcttttctagcagcagggtcagagtctagtgatcgtttttaaaatggcttagatgctacctttcttttctgagaactcagtgtgatataatccttataagatattgacagctaattttatggattatcctaccgggacagtggaacctaagtagtttgaagacgaraaattgttttgattcakaagcaatgggttcactagtgaaaggaaagatcccacgatcgtaagtggtaaatgtttatatttgttgaataactctctgaaaaaaggaaataaagtagattagccttggtaagaggtggcttaagagtggttttatgaatctaagttttatttgaaaaatgtgtgaacttgtttaaggtaaatgtgagaattaataaaggaattgagaagaaagatatttgatcgttttttggaataacatttacccaatttaagangttnaactactttt

SEQ ID NO: 145 - DNA, 1408 bp, Homo sapiens
  misc_feature (116)..(116): n equals a,t,g, or c
  misc_feature (1364)..(1364): n equals a,t,g, or c
  misc_feature (1381)..(1381): n equals a,t,g, or c
  misc_feature (1393)..(1393): n equals a,t,g, or c
  misc_feature (1399)..(1399): n equals a,t,g, or c
tttgccagctctgaatctttattttaattgatctttttattgatgtgttatataaatgaggaagaaaaattttgtctgattatgtgaaggatctttctgtacatgaaaagaagggnaaataaacttgcaattgaatagactgattatagtagcactgagacacaaaaagattgaccatgttgccctccagacactcatacaaggtcgtggacaccaggttgaaggcggactatttagggtggtaaaggaattatgattgttcttgagccaaagtaatttagtttgaatataatgaaacataccctgtaaagactgctagaaagtaaaaggattcgtcttcagaggttgtagaaggtgcccttcttagttaaaaccaaactgggaaaagtaatactggataaaatattcaggataaattttgcctcagcagaatttcaaagggcagttgttcctctgtttcattattgaatsttcagaatatagttaaagccaaargcttaaaatatgttaaatgtttcacttataaccataatctttttacatagagcatactctgccttcataataactaaatcctctgcatgtggtagatgagtacgtttaggaaatattgtcagtgcaattaaatggcctacactttaaacagtatcataaaaacaaatccttaaatatattctacttgagtcacaaaagctgaacaacagaaaggtgttttgtttttgcctttctcacagtgttgtggtgagaatcagatgagatagtatttkgactaaacacttctgaaattgtaaatatatggtggcattattgttcttatgtcggcttaggaggataccaaaggggaagttaatggtcacagtgcacttatgtagctttctaagctactcaatgtgattcttgttctctttgctgttctttttctcctcccccatggtgtccttcagagagaaaaggaatgtagataaatgaatccctgcagatgtgtcctgacatttcagggagggacagggtataatgatgccatcctgcaaaggcagcctgtgtgagaaaaagaaatcaaataatgtggattttaaaattacaaaagacattcatttgcagtttatgaaaggaaaatgtagtttggatacaaagctgattaaattggatcaagaaatattagaattaaatgcaaaaaataatccatgcatttatggttttgatttttatatattcccagctagttgaaaatggatgattcccacaagaagcataactcagcttggttcctgcttaccggagtatttccactatggtatatattgatacattccttccattatggtaggttgtataccagaggtaccagttaccggtggggatcntaattggaattttggcncccggggttccnggggancctttacaa

SEQ ID NO: 146 - DNA, 902 bp, Homo sapiens
  misc_feature (814)..(814): n equals a,t,g, or c
  misc_feature (902)..(902): n equals a,t,g, or c
aattcggctttcgagcggccgcccgggcaggtacttataattttggccttctgcactactcttttgctcttacgaacataatggactcttaagaatggaaagggatgacatttacctatgtgtgctgcctcattcctggtgaagcaactgctacttgttctctatgcctctaaaatgatgctgttttctctgctaaaggtaaaagaaaagaaaaaatagttggaaaataagacatgcaacttgatgtgcttttgagtaaatttatgcagcagaaactatacaatgaaggaagaattctatggaaattacaaatccaaaactctatgatgatgtcttcctagggagtagagaaaggcagtgaaatggcagttagaccaacagaggcttgaaggattcaagtacaagtaatattttgtataaaacatagcagtttaggtccccataatcctcaaaaatagtcacaaatataacaaagttcattgttttagggtttttaaaaaacgtgttgtacctaaggccatacttactcttctatgctatcactgcaaaggggtgatatgtatgtattatataaaaaaaaaaacccttaatgcactgttatctcctaaatatttagtaaattaatactatttaatttttttaaagatttgtctgtgtagacactaaaagtattacacaaaatctggactgaaggtgtcctttttaacaacaatttaaagtactttttatatatgttatgtagtatatcctttctaaactgcctagtttgtatattcctataattcctatttgtgaagtgtacctgttcttgtcncttttttcagtcattttctgcacgcatccccctttatatggttatagagatgactgtagctttcgtgctccactgcgaggtttgtgcn

SEQ ID NO: 147 - DNA, 730 bp, Homo sapiens
  misc_feature (606)..(606): n equals a,t,g, or c
  misc_feature (647)..(647): n equals a,t,g, or c
  misc_feature (671)..(671): n equals a,t,g, or c
  misc_feature (685)..(685): n equals a,t,g, or c
tacttcagatacactagtaaagcctgctgtattccaactaatgaggacagatatgtaatatatatacatgtatatacgtatgtatgtatatatactatatatataattatactttaagttcctaaggtacatgtgcagaatgtgcaggtttgttaaataggtatacatgtgccatggtggtatgctgcacccatcaacccatcatctacattaggtatttctcctaatgctatccctcccctagccacccacccccagacaggccccgctgtgtgatgttcccctccctgtgtccatgtgttctcattgttcaactcccacttatgagtgacaacatgcrgtgtttggttttctgttcctgtgttagyttgcwgagaatgatggtttccakcttcatccatgwccctgcaaaggrcatgaactmattcttttttatggctgcatagtattccatggtgtktatgtgccacgttttctttatccagtctatcattgatgggcatttgggttggttccaagtctttgctattgtaaatagtgctgcaataaacatacacatgtctttatagtagaatgcacatgtctttatagtagaatgatttatantcctttgggtatataaccagtaatgggattgctgggtcaangggcattctggttcaagatcctcnaggattcaccacantgtgttccacataatttaagctattttacactcccaccagcagtg

SEQ ID NO: 148 - DNA, 524 bp, Homo sapiens
ggcagaggaggccactgtgcctggtcaagaaatggaactcttacacactgctggtgggaatgtgaaatggtaagccacttcggaaaacagtttgacaatttcttatgctaaaaatacacctatcagatratttagccacttctaggtatttacttaagaaaaaataaggcatacatccatatgaaracttgtaaataaatgttctcattatttttatttgaaatagctmaaactggaaacaacccaaatatccatcagcaagtgaatggrtaaacaaattgtratatttgtatgcaatataacaccactcagtaatatgaaaatgaactactgatgtttgcaaaacgttgaaattcaaaataattatgctgagtgacagaatccagaccacaaataatacataatgtwttattctatttacataaagttttagaaaaatccaaactaatcttartttaccaaagccataccaatggtatatggggcttggggcagkttaaacsgattattgaaaaaaaaaattt

SEQ ID NO: 149 - DNA, 869 bp, Homo sapiens
ctgattcctcctcacatatgaaaagtgaaagttgtgagttgttttcctcttatttaaacattggcctattataatctgtgttggttatttttctcctgtaagcatcctgatttttctgtaggaacttttctttaaatgacacacattgccacttgtgtagatatttttaagttctttggctaagtcctctcctaactgcctgtcctctggttaggcccctccctctccactagtggtgaatgcatgtgtctgtctgatcagcatcactgcacacggaggtctagtgagcctcttgctaagtgtcacacacactcttcccaaagacgtgatgagttaaagttgtattctgaaatcatgaagccagagcctgtgccagaccttctgctacctctcatagaattgctctgtaattctaaatttaaaattagaagtagagagagataagccatcgcccctttgcctctgagaattggctgctgtttctaatataattattttctaagatagccagatagttagaaaaagattttcattgatgacatatctttaaactttcttgcatcagtattctaaattgagcaaactgaaagattttcatcaggaaaggagcactgtgggaagagcccagtattcacattttttccccatttttcagaagcgacatttcatatataggtgccaaaagtgaatcggggtgcggagagtgggaaccttttgaatttatgattgtcacagagatggtagaaattatgatctgactggaaaacaatcctgtatcccctcccaaagaatcatgggctttttttttgaattaaaaagcagacaaatagactttctcgggaaaaaaaaaaaaaaaaaaacgcggccgc

SEQ ID NO: 150 - DNA, 586 bp, Homo sapiens
  misc_feature (5)..(5): n equals a,t,g, or c
  misc_feature (439)..(439): n equals a,t,g, or c
  misc_feature (563)..(563): n equals a,t,g, or c
  misc_feature (577)..(577): n equals a,t,g, or c
ggggnaccagcgcgggtgcgcagacgaaaggcgctctttgccagctgaaagttcccacggaaaaactaccatctcccctgcccaccatggcagacgaaattgatttcactactggagatgccggggcttccagcacttaccctatgcagtgctcggccttgcgcaaaaacggcttcgtggtgctcaaaggacgaccatgcaaaatagtggagatgtcaacttccaaaactggaaagcatggtcatgccaaggttcaccttgttggaattgatattttcacgggcaaaaaatatgaagatatttgtccttctactcacaacatggatgttccaaatattaagagaaatgattatcaactgatatgcattcaagatggttacctttccctgctgacagaaactggtgaagttcgtgaggatcttaaactgccagaaggtgnaactaggcaaaggaaatagagggaaaatacaatgcaggtggaagatgtacaggtgtctgtgcatgtgtgcaatgagtggaagaatatggctgtagccataaaaaccctgtcaaataaaacgggnaacattcaggccanggaccactg

SEQ ID NO: 151 - DNA, 614 bp, Homo sapiens
  misc_feature (546)..(546): n equals a,t,g, or c
aaataaaaaggcagtggccccaccacatttttttcagcatagtagctggcattttgttatcattagccagagtagcttcagcatataagttattgatgttttccaacttcaaaagtgcattttatcctcccagtaaatttgataatgatttgtcacagctttgtcatcttttgacttttgcttatgggcctcacttcgtacaactataacatgaaaaaggattgtcctaaagtaagggaatcagttaatggtaggatgaagaaactgtaaaaactcctagaaaaaaaacctgtgtgcatttttctggaaagttttcaaactgtgtaattcagttttcattcaattatataatttggttatatgctttaaaaaacatttgtctaaatgttcccggttttcttctggtcttagagtcagctgagtgctggctatgcagccactcgtatttttgcatccagaaaggagtaactccctttatatgaagrttttttttttaagcttagatgctatgtaaggagaaaactatttgtaatcacatagtacccngggrggggagtgrtggatgcttttttaaaaaaggrtatttaagtatattatgtaatttaaatataaat

SEQ ID NO: 152 - DNA, 574 bp, Homo sapiens
  misc_feature (1)..(1): n equals a,t,g, or c
  misc_feature (19)..(19): n equals a,t,g, or c
  misc_feature (522)..(522): n equals a,t,g, or c
  misc_feature (574)..(574): n equals a,t,g, or c
ntgttaagttctgacattnggagaaaatacattacaaagaacaggagctggtttttggttttccttgtggctgtgtttttgaattgaagggatgtgggatggtggtgacagaagtctgagcatagtttctgaataattggaggggagatgggcattctttgggactatgtccgcattacattgagttttctccctctaggaagagagagtttgtgttttattttctgtaagtaaaagctacatgtttaggatttttaaaccatattaattgttatattttgtatttcataattatattatgtgttagtgtgtactggaataacatgttttatttggttagttggtgcaaaagttttctaaatctactgctgtattagaaactgaaaagggagggaaattccagatgtttgatgggaacatcactggtgaatatctaggrttggtaagtagacycaaggttgaagragtaaggtggggttaacccttaatattaccttkggtatatgcccgtttttagcaccngaatcacgggggtcctttgttccccaaccttaacagcagcccctgtctggtn

SEQ ID NO: 153 - DNA, 2012 bp, Homo sapiens
tatgcaagctcgaaattaaccctcactaaagggaacaaaagctggagctccaccgcggtggcggccgctctagaactagtggatcccccgggctgcaggaattcggcacgagtgtagagctcaaagaaatctgccaacatgtatgtggactcttgagaggtgggctttcccagtacatgctaaacagacttgttatgccaagaggaagtgaatagaaatgatagcatcaaatatccaaactgacaggaagtttcttttgcatagcatagaacatggttgtcttctgagttccactaatgttccaggatatcttggccctctgcctctggctgctccctggtgtttggcaccatagcgttgtcacttacaaccattgccttgggacacacagagtgaactgtttgagtgataagtaatttaggtagaaactttacccttaatttcaaatgataccaaacagctcattactaccccaagggacgctctccgtagcttctggattccccagtttccttctagaaacaaggactccaatagcactataaccctaaacaggccctaacccagaagaatacaccacaaaatgcgattgattttctcaaaatatcacagtcttagacactatacaaataattcaagaaaattctttctaccctgcagtggatatagtattctattatattctccagcaaaacttttaggacttttcaaactcatttctaagccaaatagtttagataaatatttacccttatatttggggggaattcaggctcaccatttgccgaggcaagcccatcaacagtctagaggcatattctgtgtcattccttcccgtctccttcatagaatactactttttccttttgtctcctggccattctccatcatctgctgattattgctaaccacaggatgctggcaaagcttacagtgataggcacatgtgttcagtgatgtccaatacactcttatcacagtggttattgcttcttactcttttcaaatgcattattctacccctcaacctatatccaatcattagaactatacctgactggagcccagaacttgggaccaatacttaattcaaatagcaggggcttgctcacaaacattaagcccaaaaagaagcacagcactttgaaaagtcaaataggcctttggtagctctgtacatttgcaattttacatttgttattagtttatagcactaataacacttcagtcgtgaatctacagtctcaatatgataagtcttagaacatgttctagaaatagtggtaccttgctgctattatacttagtaacttataccccaatataataataagtattaaatacagattgtgtatgcattctttgtgtgtatatgccaactgtactacttaacctcactgatgagcaattagaaaaatacacaaattgtcatagtgaaaataagtcttggtcaattcagatgatacgtgaacctgataaatgctctaatagatatgctattttgtcctgtattgcttgttttacagtatggtgcatgttgtttgctaagtaaaatgataataataataaagtataccaattttaaggttagaattaaaattttgcacatatgcttcttgatattctgaaatgtattctgtggcttaattatcttattcatacacatttcactttggctttttacccctaggaaataactgtccaagtatatatctcgtcttctttcttgtaactttgattaaactgcttacttcaacttacaacattgtaaagccagaatacctcattttaacagtgaaaaaaaatatgatgacctgatgtgttctcttgtatttgatttgaactacctaaataggcttaactgtaataataaatatacaattttggcaggcattttttcctttgtttggatgaacattttgttattggtccacttctaattttgtcttaaagagttataaactcagtgtcaataaaacatcttgttatataaaaaaaaaaaaaaaaaaaaa

SEQ ID NO: 154 - DNA, 558 bp, Homo sapiens
aagttttttcttaccccatcctagtgagtttgaaagtgggcctgaccagaatgtctctttcccattttgccccgtttgaattaaatataatgtctactctttaaaggctgaaggggtgggtgaggggattgtttctcattttgtctcccaagtcatttttctgctgtgaaatatgaccaggcttgtaggaagactcatcttggagaaaatgtgaagtaatcaaattgcttgagattagtctcctattgtatattagagccaaaacacatrataactttggcaacagggagttgtctagactcaattttcagaggtcccattgtagtgagttaatattgctaatcatgtcaatcacttgacakggaagtcagtggcaaatctttaaagtatgcatttgatactggcaaatatatactactgatgtttcacaaaagaatcttagaatctgtagaaaacattaattacttccatgaattatttctaaagtataactttaaagttttgatttttctatttaaataaaaagcyatkgatgkgtttagcakgtccccaaataga

SEQ ID NO: 155 - DNA, 1026 bp, Homo sapiens
  misc_feature (182)..(182): n equals a,t,g, or c
  misc_feature (1007)..(1007): n equals a,t,g, or c
  misc_feature (1014)..(1014): n equals a,t,g, or c
gcatttatatcctgttaagcattaatagctaatcactgggacttgaattctgatggcagatagtctcttgcttagtgagatggagttaactattttttagtaggaagtgagaacagctgattttcatgccacgtttcatagccccacttttggtagactaccaccacgctkcttcgcgtaanagtyggcatcttgggaatgaatgcccagccgctcgtgggttggtgcaaagaagtataaacatatatcactaaggaaaaagaaagtttgtcttgcccttctgacacagtgtgtgcacttcaggcaatttttggaaaatataaaaaattccaawttctgcctttcagcagcatcaattgctaggaacatttcattcatttccctgtaatattaatgttctttaagcataatcactaattataagttgtatcctatttttttccagcttaatttctgtggtttattgaaaaccaagtataaatgtgactaaaagcattttgctttgtttttatagttaactttcytaaggttatggacatttwataatgtaacatttgattggcctggcctcttgacaattcccttctagttatgcatatcctccctgttgcccacatttcttgttttaaaactcagtttcttgttttccagttgttgctatgtataacacccatcttgaaagagagtatataggaagttattcagataacttttgtagtagtgatattcaactatagcagtaccttaactcatgatgagcttaggaacataaaagataattgttgcttgaatagcacccccagagatactgacctaattggtctggggtggagatctggcatggtagtttttttcaagctccaatcatcggccagacagttgctttatgtaggtttttaaatgccaaaggcagatatgaagtagatttaattaagacttgacttcagcaatacaggggaacttaaaatacttrtttttctttaaactgcaggagtcactgttaggtnttgcttnaaaaaattgcat

SEQ ID NO: 156 - DNA, 521 bp, Homo sapiens
  misc_feature (440)..(440): n equals a,t,g, or c
  misc_feature (474)..(474): n equals a,t,g, or c
gggacctggcaagcggcggctgcagggcaggtccaggggccacatggctgagggggacgcacggagcgaccagaggcacaatgaggaaattgaagcaatggcacccatttatggcgaggagtggtgtgtcattgatgactgtgccaaaatattttgtattagaattascgacgatwtwgatgaccccmaatggacactttgcttgcasgtgatgctgccsaatgaatacccaggtacagctccacctatctaccagttgaatgctccttggcttaaagggcaagaacgtgcggatttatcaaatagccttgaggaaatatatattcagaatatcggtgaaagtattctttacctgtgggtggaggaaaataagagatgttcttattacaaaaatctccaggtgacagaaccaggcccagatgttaaaggaggaaaactgnaggaggaagatgttggaatgtggaaggtggatcnccatttttagcatgttcagccgggaaagttcggtttaaaagcattgg

SEQ ID NO: 157 - DNA, 557 bp, Homo sapiens
  misc_feature (17)..(17): n equals a,t,g, or c
  misc_feature (527)..(527): n equals a,t,g, or c
  misc_feature (543)..(543): n equals a,t,g, or c
ggattaaccattaaatngattgaaaaggaaactttgcacggtatgagcttcatacccccaccaaacaaagtcttgaaggtatttattttaccaagtatatttttaaagttgttttataagagagactttgtagaagtgcctagattttgccagacttcatccagcttgacaagattgagaggcccatgccaacagtctaatctaagagattagtctttcaaactcaccatccagttgcctgttacagaataactcttcttaactaaaaacctagtcaaacaaggaagctgtaggtgaggagatctgtataatattctaatttaagtaagtttgagtttagtcactgcaaatttgactgtgactttaatctaaattactatgtaaacaaaaagtagatagtttcactttttaaaaaatccattactgttttgcatttcaaaagttggattaaagggttgtaactgactacagcatggaaaaaaatrgttcttttaattctttcacctttaaagcatattttatgtctncaaaagtattaaaaancttttaatacaagt

SEQ ID NO: 158 - DNA, 1023 bp, Homo sapiens
ggcacgaggaaccaccttctgtaggacagtcaccaggccagatccagaaggcttgaggccctgtggtccccatccttgggagaagtcagctccagcaccatgaagggcatcctcgttgctggtatcactgcagtgcttgttgcagctgtagaatctctgagctgcgtgcagtgtaattcatgggaaaaatcctgtgtcaacagcattgcctctgaatgtccctcacatgccaacaccagctgtatcagctcctcagccagctcctctctagagacaccagtcagattataccagaatatgttctgctcagcggagaactgcagtgaggagacacacattacagccttcactgtccacgtgtctgctgaagaacactttcattttgtaagccagtgctgccaaggaaaggaatgcagcaacaccagcgatgccctggaccctcccctgaagaacgtgtccagcaacgcagagtgccctgcttgttatgaatctaatggaacttcctgtcatgggaagccctggaaatgctatgaagaagaacagtgtgtctttctagttgcagaacttaagaatgacattgagtctaagagtctcgtgctgaaaggctgttccaacgtcagtaacgccacctgtcagttcctgtctggtgaaaacaagactcttggaggagtcatctttcgaaagtttgagtgtgcaaatgtaaacagcttaacccccacgtctgcaccaaccacttcccacaacgtgggctccaaagcttccctctacctcttggcccttgccagcctccttcttcggggactgctgccctgaggtcctggggctgcactttgcccagcaccccatttctgcttctctgaggtccagagcatcccctgcggtgctgacaccctctttccctgctctgccccgtttaactgcccagtaagtgggagtcacaggtctccaggcaatgccgacagctgccttgttcttcattattaaagcactggttcattcactgaaaaaaaaaaaaaaaaaaaa

SEQ ID NO: 159 - DNA, 1256 bp, Homo sapiens
gctcagcctcccaaagtgctggtattacagatgtgagccaccgcacccagcctgagtttctctttctctctttttaactttattttttgaaaaacccggtagactttgtggggagcatttttgttgataatttactgatctaaagctgagtgattttttaaaagaatttgaatctaatagatctgtggttgaatttsctgtgttgttatgaagtccaccctgtgggcacaataacataactgttggtaggagttgtttgagctattctggagattatttggtaaagtatactaaaagccttaaaaccatgtatgtgcgctgtttgaaccagtaagccacttctttgacattagaagacattagaagaaataatcagccttgcataaaacttatggatgaaagtattcatcacaatattatttataataaaaaattgcaaatgttataaatgaacaattgggaaatggttaaagaagtgatggtgcattgtgtggtagaatattatgcatatgtttaaagaatcatattttctaagattatttggaagcatgtttggtaatgtcaagtggagtaccccagatacattttagacatttatcgtcatcatctgctctgagtggaaggccgttcagagaggctagaggttcttattctggctataaattatgtgagtaaaattgtgctaaccagttaaaagtactgtacacccatgctcaatatatagtcctggaaatagcaattgaaacatgtcttctcacaagagaaaatgacagttttaatgatgtatttgatgaatttaaactttaagtcaggtgctgcaaattggaaagaagacttgtggtgttttaagttgctgtggacacttttaagaaacttagaacccatggaacccttgtttatcgccatgcaaattacaatcttgaatgagtgttttttaaaaataaagtattagaaaaatgtgtagtaaagatgtaaaattaaaaaatggaattctccattaactgtggattttactaaatagaattactggtgaagcagatttatccatcgagactatctggtatgcgttatgtatgtagtctgttgctgctgaaagatgtctgtgtgcctgtatcaacatgtgacttcatgtaaagtttctttgtgttcacagttcttagcaaatgcagttacaatccatagatagccagcagtggatgttactccaggaaaatgcaggattaaaattgtccttgtgtaaaaaaaaaaaaaaaaaa

SEQ ID NO: 160 - DNA, 698 bp, Homo sapiens
  misc_feature (683)..(683): n equals a,t,g, or c
  misc_feature (692)..(692): n equals a,t,g, or c
cctcgctcaagccctcagagaagaacattttcaccctcttcatggtggccacagctgccatctgcatcctgctcaacytcgtggagytcatctacctggyragcaagagatgccacgagtgcctggcagcaaggaaagctcaagccatgtgcacaggtcatcacccccacggtaccacctcttcctgcaaacaagacgacctcctttcgggtgacctcatctttctgggctcagacagtcatcctcctctcttaccagaccgcccccgagaccatgtgaagaaaaccatcttgtgaggggctgcctggactggtctggcaggttgggcctggatggggaggctctagcatctctcataggtgcaacctgagagtgggggagctaagccatgaggtaggggcaggcaagagagaggattcagacgctctgggagccagttcctagtcctcaactccagccacctgccccagctcgacggcactgggccagttccccctctgctctgcagctcggtttccttttctagaatggaaatagtgaggccaatgcccagggttggagggaggagggcgttcatagaagaacacacatgcgggcaccttcatcgtgtgtggcccactgtcagaacttaataaaagtcaactcatttgctggwaaaaaaaaaaaaaaaaaaaaaaaacccnggggggggnccggta

SEQ ID NO: 161 - DNA, 1710 bp, Homo sapiens
  misc_feature (142)..(142): n equals a,t,g, or c
  misc_feature (208)..(208): n equals a,t,g, or c
  misc_feature (242)..(242): n equals a,t,g, or c
  misc_feature (317)..(317): n equals a,t,g, or c
  misc_feature (1644)..(1644): n equals a,t,g, or c
  misc_feature (1707)..(1707): n equals a,t,g, or c
aatttcggcccgagggtgagggcagctggagtgcgttctgccgaagcttgtggttgcacgcccttcgtcttaggggctaccttccgtggtgagtgtgtgcggtgttgcacttggggttgcttctcgctgcgtggccgcacgnggctgaacccttcccactccatcccctccccgcacccggaccagcccctgggacgccctcggacgnccacccgctccaaccctggggaagcctcagagtngcagcgaaggcctyttgcctttccgcctctgcgcttgctgtcatcgcccacgtgctttgttgttgttcggtgcanaccatgtccaagtctctgaagaagttggtggaggagagccgggagaagaaccagcccgaggtggacatgagtgaccggggcatctccaacatgctggatgtcaacggcctctttaccttatcccatatcacacaactggtcctcagccataacaagctaacaatggtgccaccgaacatcgcagaactgaagaatttggaggtgctcaacttttttaataaccaaatcgaggagctgcccacacagatcagtagccttcagaaactcaaacacctgaaccttggcatgaacaggctgaacactttgccacgaggcttcggctccctgccagctcttgaggttctggacttgacktacaacaacttgagcgaaaattctcttcctggaaacttcttctacctgaccaccctgcgtgcactctatctaagtgacaacgattttgaaatcctgccgccagatattgggaagctcacaaagttgcagatactcagccttagggataacgacctgatctcgctgcctaaggaaatcggggagcttacccagcttaaagagctccacattcaggggaaccgcctcaccgttctgcccccagaactaggaaacttggatttaactggccagaagcaggtattcaaagcagagaacaatccctgggtgacccccattgcagaccagttccagcttggcgtgtcccatgtttttgagtatatccgttctgagacatacaaatacctctacggcagacacatgcaggccaacccagaaccaccgaagaagaataatgacaaatcgaaaaagatcagccggaaacccctggcagccaagaacagataaggaagggattggcatcggctggccttccagcaccttctctctccaacacttcattctctcttgccctgtctctcaaataaacccaatgctgcgtgtgaggccttttttatttttcttttcactctctttctaatgcttcccaccttaccttttagattcttttgctaggtgggagattgttataaggtctttaaaccatttccatttgtttctttaacattaccaaaagcagggaacaaagctcttattcaactgcgaattccatagtgggctctggcttttcttgaatagatatcacaaggttgcttattatcaaaagaataattaaaatcatgtaaccatttaaatgtcactgttaacacttttcactctttctgttgattcacctaactcattattttgctttattaaaagtcttccttcaccaccgagatatgctaatttaacttacaaatgattttaataaaatcttgagtttgtaaaaaaaaanaaaaaaaactcgagagtacttctagaacggccgcggggccatcgattttccaaccgggtgggnacc

SEQ ID NO: 162 - DNA, 1121 bp, Homo sapiens
  misc_feature (532)..(532): n equals a,t,g, or c
ggcacgaggcagaatggtcctgccagccacagcagggccctggtggggatttgcactgggcactccaatcctggagaggatgccagggacggggatgctgaggaagtcagagagcttggtacggttgaagaaaactgagtcttgggcaatttgtgctaaaactaggtgagttgccaaacccaaggcatcttaccaacagctggtttgggggctggtttccctggtgttgtgtgttacctaccctttggcttggcttgacctctccttgtgagctcacctgagccctcccagggccaggttcctgacagtgttggtttttgcacatccactggaaaggtgtcattaatgacccagtgttagaatgcaagaggtcaggttattctagccctcatggctgaaggcccagtcctggctccaccactcctccagccagagggtctggaccatccagtgcctgtcctcgccacagggcctccagggagcattcgggtcaawtccatggacaccctgggctacaaaccaaggctgctgntcatcccacatcgtgtggggcagtgtccatcccctgcagctacttggtgacttaacaactycaggagccctgtcagctgccctcctccacctaaaccccttcgactcttctgctttgacaaagaaaatgacattggggaggggaggtgctccgcctcccagcttttctcaaaatagtcctatagatactggtaatctggaaatgaagaagtaattctgtctctgcacctacttttgcagaatgttcaaggaagtattctgtgttagtattaatgccaaaaagttgtttttaaaggttttgtactcagcacatcatacaaaccacattacttctgtcacttcagggcatcgggactggctggcgcccttgttatgtgctattttaatcagtgtaacattggtcaagttgttacccatgtatgctgtgtttatcatgtgtatatcgtcyagaaagtattaaggctttaggtagatgcaactggcgaaccttggagagggaatgctgattgtcttgaccaaacccacagcctgtctcttctcttgtttagttacttacggcaataaatcatctatgagttagtgcaccgtga

SEQ ID NO: 163 - DNA, 445 bp, Homo sapiens
  misc_feature (440)..(440): n equals a,t,g, or c
ttttcttgcatctgcccgcgatcttctcccagacctttctgcgagtacgagccaaccggcagacccgactgaatgctcggattgggaaaatgaaacggaggaagcaagatgaagggcagagggaaggctcctgcatggctgaggatgatgctgtggacatcgagcatgagaacaacaaccgctttgaggagtatgagtggtgtggacagaagcggatacgggccaccactctcctggaaggtggyttccgaggctctggcttcatcatgtgcagcggcaaagagaacccggacagtgatgctgacttggatgtggatggggatgacactctggagtatggggaagccacaatacacagaggctgatgttcatcccctgcacaggcgaggagctggttgaagccaaggagagagaggcatttcggggcgcattcttaaatngccgg

SEQ ID NO: 164 - DNA, 798 bp, Homo sapiens
  misc_feature (638)..(638): n equals a,t,g, or c
  misc_feature (665)..(665): n equals a,t,g, or c
  misc_feature (698)..(698): n equals a,t,g, or c
agctcttagacaggtacagagaactacaacttagtacagaaagcaaagtaacagaatttctccatcaaagtaaattaaaatcttttgaaagtgagcgtgttcaacttctgcaagaggaaacagcaagaaatctcacacagtgtcaattggaatgtgaaaaatatcagaaaaaattggaggttttaaccaaagaattttatrgtctccaagcctcttctgaaaaacgcattactgaacttcaagcacagaactcagagcatcaagcaaggctagacatttatgagaaactggaaaaagagcttgatgaaataataatgcaaactgcagaaattgaaaatgaagatgaggctgaaagggttcttttttcctacggctatggtgctaatgttcccacaacagccaaaagacgactaaagcaaagtgttcacttggcaagaagagtgcttcaattagaaaaacaaaactcgctgattttaaaagatctggaacatcgaaaggaccaagtaacacagctttcacmagagcttgacagagccaattcgctattaaaccagactcaacagccttacaggtatctcattgaatcagtgcgtcagagagattctaagattgattcactgacggaatctattgcacancttggagaaaggatgtcagcaacttanaataaagaaaagtcagctttactacagacgganggaatcaaaatggcattaggatttaggaccaacttctaaatcatccgtgaaggaaatttggcaagcaaatgaaaaccagattcctcggttaagatgcatt

SEQ ID NO: 165 - DNA, 400 bp, Homo sapiens
  misc_feature (74)..(74): n equals a,t,g, or c
  misc_feature (379)..(379): n equals a,t,g, or c
  misc_feature (383)..(383): n equals a,t,g, or c
ggaatctggaagcctgactttgcccccagggaagttggggaccgccttccctcccttctccacctctcactctnggcaccctctccaattgcactaaagtagctgttgtgccagtctgccccccacaaggggggaggtctctgcttycagtcttcttcccccgctgcctccgctmccaccctggacaatctccttgtttcccttgtgttcmtggayagctcagctttgtatgtgtgtttggggggtgggggtgggttctggcttgagtgggtttggcaggggtttgggaagggttaggggaggatggaggatgaagtctcctacccccttctccagctccaggccacagaagcctgggaaagggagggtgcctactctnggtngctagtgtgtctttgca

SEQ ID NO: 166 - DNA, 1757 bp, Homo sapiens
  misc_feature (596)..(596): n equals a,t,g, or c
  misc_feature (647)..(648): n equals a,t,g, or c
gccagccaccattttatctctctaaagtctggtcccagtattaaacctattctttagtaaactcatattactgttctaaattgaagaaattatttattactctgtacttctagactcaaaattctttatcaaagatagtctcaaagaggtagtacaagtcctgtttaactgcactttttcacattcacagtgcttcctctgatatctttccttacatcattatacactgttgatatcattttactcttctttctcttctacatttcttaaattttggttcttttcctgtacatgtgttttagcggggcccttttctttgaactttgtctaattagcctgtacatttttgtttcttttaaggtagaacagatctttttttgtttctccttttaagtctactggttttaaaagaggtaaatgtatccatagaccacagtgccttgctttttcctctgccagcacatggagcacgggattagatgcacaaacctatttagggaactattttggtagatgtttgagtttatacagaaattgcagctggtattttattttgctgtacatttactcaacttgtccattagtatttaactatntccagagtttgtttaggagtaagaattgacccattcgttagtttaccatannttttcctggtataaaaaggagccagaaataagccttattgctaaataattaattatgtaagcccacctaggtcctgcataagatccccctcacatacttcacaatatatatgtgtgtgtgtgtgtgtgtgtgtgtgtgtgtgtgtgtgtgtgtgtgtatktggctaaaaaattatactgccaaaattactgattataaatacttgactacactgattgatgggacaaaatgattaaagtattttcagggatcttattccatatgtcaccaccaaagatttctacagtgttataaagtatataaatattccaaatttctgtggttaaatatttttttcttttttttccttttttagaataacacagtctgtgctttccaaaaatgcttgaacttttatgttgttaagaaatatataatgatatcttacattaagcatgagtctaatttgtattaattgggatggactaaattttcatttgattatcaggaaaattaaggagttatatatttaaaagcaattttctgtgttttcttctttgtaagttgactcatttgtgaagcaattaggcaaattttgagaagatcattgttattgtggtttgcagtatatatttcttagtaaatatcacttaagattaaatttttcagaaagaaaattatagcttttttcccaaaatatttttaagatttaatctttttgtagtatgctacagatttaattatattaactcttttttaagacattgaccatgacttaacattttgccttctaacaccttttaaatctatgtactttaatagttaagagaaaataagtttgcagatttttaataatctgtttgtaaaaggctatctctaagcctagtatgtgggtaattttacaggtgtgttttttgataactttaatataaaataaactcattttatttgtggcaattcgcgtttctttttttatgccagagtacatatgttggattccatgaattggtattacttattattatgtgttgattaaatatatgcacacacttaggattacagatcacagagcaaattatgaaaatcataaacattctggtatggtcatccataggattatgaaaaagaaa

SEQ ID NO: 167 - DNA, 1245 bp, Homo sapiens
  misc_feature (1245)..(1245): n equals a,t,g, or c
gaaagccctgaatgttgtacaaagtgttttgcaaatcaacttaagcaattctacaaacagaggatcagtagctgctaagaaatttaaggacatcatacattatgatccaacgaagcaagaccatgccacttacgaaagaaaaagagatgataagccaaaagaaagtaaagcaaaacgaaaaaagaaaagggaggaagctgagaaactacctgaggtgtctaaagaaatgtattataatattgctatggatctgaaagaaatattccaaactacaaaatataccagtgaaaaggaagagggcacaccctggaatgaggactgtggtaaagagaaacctgaggaaatccaggaccctgcagctctgaccagtgacgctgagcagcccagcgggttcacgttctctttttttgattcagacactaaagacataaaggaagagacctacagagttgaaacagtgaaacctggaaagattgtctggcaggaagaccctcgtttacaagacagcagttcagaagargaagatgttactgaagaaacagatcacagaaactccagtcctggagaagcatcattacttgagaaagagaccactagatttttctttttctctaagaatgatgaacgacttcaaggttctgacttattctggagaggagtaggaagtaatatgagcaggaactcttgggaggccagaacaaccaacctgcgtatggattgtcgaaagaaacataaagacgcaaaaaggaaaatgaaaccaaaataataaatgtcagctggttttgatactgaatgtgaacaaggctcacctaaggaaactgacccagaaaacagttttagctgacaaagaagaaatttcagagtgaaggaattttaaaaatctggctgacggaatatcattctggttgccatctttttctgtggaactcctctgcatttcttcctaagtaattacttcaaaaattaaattcaacttcttataaaggaagaacaagatagtccttgaaaatactttttgtatataatctctttgccctctatcctgagtaactaatggacatcttctcatgcaaggtttayatgaagcctttttwaataaatgagtcaaagcacttgtattttccagcctaggctttgtgtgaattataggctatttgaaattttatttctgattatgtcaaatacaccttccgattttgtcatttttgtttaaactgataaattacaagtcaacattgagttttn

SEQ ID NO: 168 - DNA, 379 bp, Homo sapiens
  misc_feature (375)..(375): n equals a,t,g, or c
gtgagctgagaccatgccactgtactccagcctgggcaatagagcgagattctgtctcccaaaaaaaacaaaaaacaacaacaaaacttgctaccacccagggattttctgctatttaaaaggtgaatttcttttctggtactaaactgtagctgcttaacttagtaaaggctgtgtttggccaggcctgtgccagaggtcacctggagtgctccacccactggcaggcaagtcctattcctattcacccaggatccccaaggctgggctgggatataaatgttgggataggaaagaaatatttcctttttagaggaaagcaagaagaaacattgcctgaaagtgatttyctagtcatttccattagtacagaangtta

SEQ ID NO: 169 - DNA, 474 bp, Homo sapiens
ctttatcatattttacaaatgtgtgagtctgctatggattagaaattaataagagatttkgccacagatagtttgagaagcccagcactgccactcaacaaatgctggtgcattcagatggtgaaatattctgcagctattaaaggagttaaaactgcctccacttacctggaggcccatctgtgacacctttttaggttaaaaggaaaagaaaaacttgcttaggactgaatatgagcggttgcaatttgtaacaatgatgtatatatacatatacattttcatgtatttgtatgaacataaaagtattgaaggatattcatcaaactgctaaaagggttgcttcagagtaacggactcggagaaggcagattaattttctcttaatggaactctgtattgtatcacttgtaaaaataagcatgtgttatctttatgataaaaaagtaaaaacctaaaaaaraaaaaaaaaac

SEQ ID NO: 170 - DNA, 1444 bp, Homo sapiens
  misc_feature (4)..(5): n equals a,t,g, or c
  misc_feature (1373)..(1373): n equals a,t,g, or c
  misc_feature (1425)..(1425): n equals a,t,g, or c
  misc_feature (1430)..(1430): n equals a,t,g, or c
gggnntagacaccttagagattcagcagcaagccctgctaagagagcagcagaagaggctgaacagaataaaaatgcaggaaggtgccaaagttgacttagatgccatcccaagtgctaaagtacgagagcaaagaatgcccagagatgacactagtgatttcttgaaaaactcattattggaatctgatagtgcttttattggggcttacggtgagacatatcctgccattgaagatgacgtcctccctccaccatcacagttgccctctgcacgggagcgcaggaggaacaaatggaaaggactagacattgatagcagtcgtcctaatgtagcaccagatggtctctctctaaaatctatatccagtgtaaatgttgatgagcttagagtgagaaatgaggaacgaatgcgaagactgaatgaatttcacaataaacctattaatacagatgatgagagttcactggttgaccctgatgacatcatgaaacacataggggatgacggatcaaactctgtagcaactgagccctggctccgccctggcacttcagaaacgctgaaacgtttcatggcagagcagctgaaccaggagcagcagcagattcctggaaaaccaggcactttcacttggcagggcctgtcgactgcacatggttaaaataaacctgtactggacccagtagtgccttttaaggtgaaaggaatggtaaatctgtacctttaatatgtcctacttttggcccctacctgaaagttactttttttccatcatctgtatataaaattatttttatcatgatgtatattatgtacataaataaaaggccatgattattgatttatataatagaattgtatagattatttttgcacagttttgtcataaattagggtggtaatgaactggattgaactactatatgtgcattatattgaattctgcttgtcattaagataaggtgaataagtgtcttaaacgtcctgtaaaaccggactcccctttgttacatgcacattttccattgttacctcgatgcaaaagaattcatttagtaggtacatctattgtagctgtgattattccagtttctgtgtgatgcaatcaaatgtcctattaattaattattatttcatgtcatttgtagctactgatacagcagaaatgaagggaactgtaattacttgtatttttgtaagccatacgttaaatgtttgttacatcatctttctgcttctatttttatgccaatgaaggcatttgtcttgttactaattacatgatgtaactacttcttgatataaataaatttttattttaattactaaaatctttttaactactatggagctttctagactagttttcnagagggtgaatagaggtggggacacccggggagtcaaggacagaggagactnggagncttccttcttccca

SEQ ID NO: 171 - DNA, 449 bp, Homo sapiens
  misc_feature (268)..(269): n equals a,t,g, or c
  misc_feature (368)..(368): n equals a,t,g, or c
aattcggcacgagttggaatgtgagatggtggttgagagtcaggatctcttttaaaagtgatcttgagcaagttatttaaactttctaattatcagtttctttatctgtaaaatggaggtaatgggaatacttacctcaaattgctgagagaattaaatgaaataattctgcaagatagttatcacagtaaagcagtaaatgctccattcagggtaccattactattgactgccttaaaaatttaatcttctagccaggtgcgaaaanncatgcttgtaatctcaacacttttggaggccgaggtgagatgatcatcttgagcccgagagttcaaggattaaccagagtaacatagcagggatcttgnctctatttttttaaaaaagtcaccttgtaacactggtgaattggataaggagcaattcagatgtagcgaattttaataatg

SEQ ID NO: 172 - DNA, 573 bp, Homo sapiens
cccaccctgaaagccctgagctttctgctatcaaagaggttttaaaaaaatcccatttaaaaaaaatcccttacctcggtgccttcctctttttatttagttccttgagttgattcagctctgcaagaattgaagcaggactaaatgtctagttgtaacaccatgattaaccacttcagctgacttttctgtccgagctttgaaaattcagtggtgttagtggttacccagttagctctcaagttatcagggtattccagagtggggatatgatttaaatcagccgtgtaaccatggacccaaaatttaccagaccacaaaacttttctaatactctaccctcttagaaaaaccaccaccatcaccagacaggtgcgaaaggatgaaagtgaccatgttttgtttacggttttccaggtttaagctgttactgtcttcagtaagccgtgattttcattgctgggcttgtctgtagattttaggacccwatgctgcttgagrcaactcatcttagggtggcaaaaaggcaggrtggccgggcgcgtggtcamgsctgtaatcctagcacttggg

SEQ ID NO: 173 - DNA, 1037 bp, Homo sapiens
aattcggcacgagctgtctgcgaagtggcccttgattacaaaaagaagaaacacacctaaacactttatctccaagttacaaaagtttgaggtgcagagggaaggccagattttttttttaatgaaattatatagattagatctcagtatttaaactgttcctcaattttgtgaggctgtgttggaaataacccgcctctagtgctgttggtatgcaaggcagcggtgcttaatcaatatttcctgtgctcaccagaggcaaaatgtaccaatatcctgacaccattctctctccatttacttctggtggttaccctgactcttgactcttagaagtgcccgagatggggctaacctttattaaacagatcgcatattatgatcttgctgcagccacagtgcagctccacattaactctacagaccaaaccatttgtatctggcatcacttactaacacacgacatgcggcttttctgcatcaactgctatgacggttaagaatgtcagtatacaagaaggaatagaaaactgatactgttttaaataatctgtaatttcaatttttttttttttttgctgaaatacattatattgtacgtttgagataattctagtacaaagtataataaaactagatgtataataaaccctttaaatcattggtaagtgtacaagtggtggaactgaagcatttactggacaaagtaatgttactctaatggttacttgctcgtgcgttgccacactgtgttataatttgcttcatttccttgctatttgatacatagtgtgcatttctctgtcactgtaactattgtaatgacaaattttcatcttactgcacaatcaaaatgacattgataggaatgaactccagaggctgggcctgaacagggaggtggtcgctcaggcctggtgctcagtcgtacgacctgtacctctcaacttttgccctatctgttaaatatatgctatgtcattaaatgcttttaaatctaaaaaaaaaaaaaaaaaaaaaaacgggggggggcccgg

SEQ ID NO: 174 - DNA, 921 bp, Homo sapiens
  misc_feature (881)..(881): n equals a,t,g, or c
  misc_feature (908)..(908): n equals a,t,g, or c
  misc_feature (913)..(913): n equals a,t,g, or c
ccccccccccccttgtggacagctgtgttaataaggccaattttctgagaatgtgggaaagattaaaatatttaactgtttatctttcacagagtagcagtagctctgattaagcctataggcaattaaaagtagtttgtctgtaaaaagagggaaagaaataagatttcttaccccattttatggacttttaaaaattaaaaaactgcgcccccgcccaggagctcttttcttatgacatataaattatgacatttatattctttatatgactttatgttctcttcttatgacatttaaattctttaagtagtttgttggtccaataaactagacgttgtataatctaaattgagcccttgtatatctaaaactgatgagttgtttctaaattgttgattgtccatttacttgcctttggtattaagataatgcaagtaaagtttagtaagtcattggataatgaaatgattatgtttctgaagaccatattatatttttaatttttagaggaatcatgccatcccccaaaaaatcaagaaatatttgaattttaaattataagttcatttgttaaaagacatttttacaaatgtctgaaaatcttaaaatactttacatctacctttaagtagtagaatacagagctgtaaatttccatgccttttttcctgatattaagttttatagtaaaaaagcaactagtgattgcacaaagaatataaaaatccaytctttttacaaaggtgtgaatttaaataacgttattgattggaatatgaaaataaaccaatcatttaagagctttttagcaaatgatccaattcttactccttttctcccaagattggaaaagcataatgtttttcctcctaaagttnggaatcctagaaaagccccggtgagtnggacnaatgttcc

SEQ ID NO: 175 - DNA, 465 bp, Homo sapiens
  misc_feature (428)..(428): n equals a,t,g, or c
aattcggcctcacagagatcatcatctttaccaccttcaaatcgtaaatcaagtactccaaaaaaaacttattctgagaaagccaccgataaccatgttaatcatagctcttgccctgaaccggtgccaaatggagtgaagaaagtatctgtgagaacagcctgggagaagaataaatcagttagctatgaacagtgtaagccggtttcagtcactccacaggggaatgattttgaatatacagcaaaaattcggaccctagctgaaacagaacgattttttgatgaacttacaaaagaaaaggaccagattgaggcagcactaagcaggatgccttctcctggaggacgratcactttacagamraggttaaatcaggaagccttggaagatcgtttggaaggattaatcgagaactggggttcagntcgcatgacgctaaagaattccatgttttgcgcacct

SEQ ID NO: 176 - DNA, 752 bp, Homo sapiens
  misc_feature (651)..(651): n equals a,t,g, or c
  misc_feature (662)..(662): n equals a,t,g, or c
  misc_feature (684)..(684): n equals a,t,g, or c
  misc_feature (693)..(693): n equals a,t,g, or c
  misc_feature (700)..(700): n equals a,t,g, or c
  misc_feature (711)..(711): n equals a,t,g, or c
gtggaaactttttccatcctgttttctctgctatatctgtcagcccccatytccaccwacatcagagaagacagcatcgtgaagcttctgtggcagcctcctaaggaaggggctgccaatctgtagttggcagatgctataggaattgcttacaaatgtcgtctttaagaaaaatgttcttatatttttcctatgggcaaaatgaaggcttgggtgctcatctaaagctcagccaactcctgaagcactctctcagagcatactgctgctgtaatgggctggcttaattatcggcagagtgcttgaaaaggctttgcagacctcccctgcccccaagactgggtgactttatatgtacttcattcaagggtaaatcagggagacgttctccatttatctcttcgtccttcctgcctgggaaagtgatagcactaaatatttcccagcaggatggggtagtgtttctcaaaggaatcaccctttccctaccttcagactcattctttacccttccattgstccagtgctgatggaggccaaagacaaccccagggttttcataggaaattcactggaattgtgcgcaattgtctttgtagtccttttgccttttttttttttaaatatttatgttggcaatagcatttgttngggtattttgntttaaaaggcctcactctaagntattaccgnccccttnattggtttttnaaagacatgtggggggatatagtttttaaaaaataaacgta

SEQ ID NO: 177 - DNA, 1631 bp, Homo sapiens
  misc_feature (255)..(255): n equals a,t,g, or c
  misc_feature (1620)..(1620): n equals a,t,g, or c
  misc_feature (1630)..(1631): n equals a,t,g, or c
tccagagatgtttcctgtcctccccggttcccacttgctgytcaataaccctgccctggagttcatcaaatacgtgtgcaaggtgctgtmcctggacaccaacatcacaaaccaggtgaataagctgaaccgagacctgcttcgcctggtggatgtcggcgagttctccgaggaggcccagttccgagacccctgccgctcctacgtgcttcctgaggtcatctgccgcagctgtaacttctgccgcgacctggnacctgtgtaaagactcttccttctcagaggatggggcggtcctgcctcagtggctctgctccaactgtcaggcgccctacgactcctctgccatcgagatgacgctggtggaagttctacagaagaagctgatggccttcaccctgcaggacctggtctgcctgaagtgccgcggggtgaaggagaccagcatgcctgtgtactgcagctgcgcgggagacttcgccctsaccatccacacccaggtcttcatggaacagatcggaatattccggaacattgcccagcactacggcatgtcgtacctcctggagaccctggagtggctgctgcagaagaacccacagctgggccattagccagccccgggccccgggtgcctctgcgtccgtgccaggcctcctgatgccaaggccacatccccgtgcttccagtgaccagaccactgaccaccctgactgtccaaacctgtgaccccaggccagggaacggggaggaaaccaaagaaaaccattttcagggagctcagacgtcacaggagggagcgggagcaggatgtggccctggcctcgccagagcacctgaagaagcaggccgtgagcgaggctgcgagtgccctgggcgccgtttctcacgcatgaatgcttttccaggcctctgttgcttcctgcaccacacctggtggggtgggagcgtcctctagtgcccctagttctttgtcctgcctcccagagggaggaaaaagcccctgggggcttctggctccctgagattgggctctgagacgagacgggttcccaaggccctggtggggctggagtctcacctgtttgcatggagaaatgggctggccccacagcctcacaggagcagtttgtgggctggtttccccrggaatccagaccctaacccgtgagaatctggattttggcttgtgagccctgcttatttggagccgggtctagagggaaccctctatcagcctcaggaaaacaagacctctgtgcacctcacttttggctcactgcagcccttgtccttcacctccacacaggaccagctggaagcagaaagaagaaaggccaatttcacagggcaccaaacaagtatgaaatgtaaatcagaaatgcagacaccccagacgagagcctcacaggagggagggggccccacaggctccccaggaggctcgtgtctttggcccagagccagccttagtttgtccctgccatctactgtctgaggccatcgctgctacactttgtttttatttgtatttcatactgaagtttcaamaaaaaaaaaaaaaaaaaaaaaaaaaaaaaaaaaaaaaaaaaaaaaaaaaaaaaaaaaaaaaaaaaaaanaaaaaaaaann

SEQ ID NO: 178 - DNA, 740 bp, Homo sapiens
tttttgaatcggttgtggcggccgcggcgaggaatggcggtatttgtgagaggagtcggcgtttgaagaggtggaactcctagggcttttttgagagtgctgatttagaagaatacaaatcatggctgaaaatagtgtattaacatccactactgggaggactagcttggcagactcttccatttttgattctaaagttactgagatttccaaggaaaacttacttattggatctacttcatatgtagaagaagagatgcctcagattgaaacaagagtgatattggttcaagaagctggaaaacaagaagaacttataaaagccttaaaggacattaaagtgggctttgtaaagatggagtcagtggaagaatttgaaggtttggattctccggaatttgaaatgtatttgtagtcacggactttcaggattctgtctttaatgacctctacaaggctgattgtagagttattggaccaccagttgtattaaattgttcacaaaaaggagagcctttgccattttcatgtcgcccgttgtattgtacaagtatgatgaatctagtactatgctttactggatttaggaaaaaagaagaactagtcaggttggtgacattggtccatcacawgggtggagttattcgaaaagactttaattcaaaagktacmcatttggtggcaattgtacacaaggagaaaattcagggttgctgtgagtctaggtactccattatgag

SEQ ID NO: 179 - DNA, 2038 bp, Homo sapiens
  misc_feature (1490)..(1490): n equals a,t,g, or c
  misc_feature (1508)..(1508): n equals a,t,g, or c
  misc_feature (1979)..(1979): n equals a,t,g, or c
  misc_feature (1992)..(1992): n equals a,t,g, or c
  misc_feature (2010)..(2010): n equals a,t,g, or c
tcgacccacgacgtccggcggcgggaagctggcggcagcggtcggtggcggtggctgagcagaggacccggcgggcggcctcgcgggtcaggacacaatgtttgcacgaggactgaagaggaaatgtgttggccacgaggaagacgtggagggagccctggccggcttgaagacagtgtcctcatacagcctgcagcggcagtcgctcctggacatgtctctggtgaagttgcagctttgccacatgcttgtggagcccaatctgtgccgctcagtcctcattgccaacacggtccggcagatccaagaggagatgacgcaggatgggacgtggcgcacagtggcaccccaggctgcagagcgggcgccgytcgaccgcttggtctccacggagatcctgtgccgtgcagcgtgggggcaagagggggcacatcctgctcctggcttgggggacggccacacacagggtccagtttctgacctttgcccagtcacctcagcacaggcaccaaggcacctgcagagcagcgcctgggagatggatggccctcgagaaaacagaggaagctttcacaagtcacttgatcagatatttgaaacgctggagactaaaaaccccagctgcatggaagagctgttctcagacgtggacagcccctactacgacctggacacagtactgacaggcatgatggggggtgccaggccgggcccctgcgaagggctcgagggcttggctccggccaccccrggccctagctccagctgcaagtccgacctgggcgagctggaccacgtggtggagatcctggtggagacctgagcaggagccctgagtgctcacagccgcctctgacgcattgacacgtgagcactggctcccacggagggtgcgcctgccgccagcggcccagccttgctgccctgtctgctgattctgagaaatcccagaacagcccattaccagtggggctgcagcctaggcccgtcccactcacctcccccctgtggagggccaggcagaggctgttctggaaggcttcttgtcttctgacgtccccacagccctgggcccctcgtgtctctttgtgtcccccactgtagaggacggtgagccgcagctgcatcaacctccttttacctttagataggtgaatttttacaattcagttttacatgttttgggcagtattttgtcttaagatatattttttaaactttttataccttatctctttagattttttcagctattttcttaaaagtatattttttctataaacatcctttgctgctacattagaacttttatagcctaaacaattgcagttggtgtgtttcatttttttaaggtttaaataagggttttttgttttgttttgttttttgcagtgagcatcactacagtctcagtcaacagtgtgaatgtatcatgttttactttaaatgtgtgtgtgatacttcttcattatgtcctgcgctgcagtgangacctgggtgaaaatcanggaaccgcacacagccacatcttcctagacctaagagtaaattatggaggattttatttatgtctatttatatgtaaatgtcattgaagacaaaggtcaaatatttgtctgtttgtagatcacaggcaccagttggtcttcagggacctcatagcccctcggtggtgccttctcaaggcagtgttcctggaggctcccrtcagggtcagcccatgcacctgccctgrrtgaggaagtagcattgctgctggatgagaaacgcctgcgctgctctgttagactggtgctgaaacaaaaggttaaggctaggttgaagtctagaatgaaagaaatctgaatccatgtcattcataaccccttgatctgtagtgtcatgggtgctgccgcagaggaagttgagctgggggtgcctgccagcctttccactcctgccccgcttcaacccaaatgctccctgtttcccaagctttncccaaatttcctnaacctttaaccaaaaagnggggtttcctttggggcaaaaaggccat

SEQ ID NO: 180 - DNA, 522 bp, Homo sapiens
  misc_feature (471)..(471): n equals a,t,g, or c
  misc_feature (488)..(488): n equals a,t,g, or c
ggcacgaggttaatctaaggtgaagcaaacagaaaattgtggaggttttgttggtgtgcaactgaggaacatggctcaagaaactaatcacagccaagtgcctatgctttgttccactggctgtggattttatggaaaccctcgtacaaatggcatgtgttcagtatgctataaagaacatcttcaaagacagaatagtagtaatggtagaataagcccacctgcaacctctgtcagtagtctgtctgaatctttaccagttcaatgcacagatggcagtgtgccagaagcccagtcagcattagrctctacatcttcatctatgcagcccagccctgtwtcaaatcagtcacttttatcagaatctgtagcatcttctcaattggacagtacatctgtggacaaagcagtacctgaaacagaagatgtgcaggcttcagtatcagacacagcacagcagccatctgaagngcaaagcaagtctcttnaaaaaccgaaacaaaaaaaagaatcgcttgtttt

SEQ ID NO: 181 - DNA, 1666 bp, Homo sapiens
  misc_feature (8)..(8): n equals a,t,g, or c
  misc_feature (1553)..(1553): n equals a,t,g, or c
tacaaaanctggccctccaccgcggtggcggccgctctagaactagtggatcccccgggctgcttgaattcggcacgagttttttttcaaattaacaaactgtaattgttttcccaaagatacatttttttcatacacatccatcatacactgtaaccaaaaaaagcagtgtacatgaaataagagaaaataaattaaaaatccatagcataggtaaggaggctctagtctggagcacagctgagtttccagcaatataaggaggctcgaaagtttcttttataagaatgcctgctagcaagggttccagcaaggtggttggttggtctgtaagtcagtcttgagtacttgaaacagttctgtgtttgttttttttccttagcgtttagaatagccatcattgtcctgcaataggcagagctatcacgtccaggaaaaatgagggagggaaccacagaggcagcgtgagatccaaatacagcattcaaaggtaattggtccagtggtgcctggggagggaggaagggtgatactccagggttagccgtcttcttttgggggtgtgtaccagccgtttttttcgtggatctgcaccaaggacttgtaggactgctgtgctcttgtcagactgtattgagatttgttggctccaaactgcactcgtgctttccccttcaccagtgtggcactgatctgcatgatcactgactctatggagtaggcactgctccagccctgtttggtgagaagttccatgcagatggcccctccgcccagaacataccctccagagaggactggagacacaaccctgacaaatggtgggtcaaagggaaagttatctttaaaggaaaagttaagtagaatgaagtcggctccttctttctctttgaggatctggagatcgttgtgcaaagcgctgtcctggtcaactttgaggagtttgacattccaatcatacagactgtcattcacgagttcgactgcatagtttccgcctttgaaactctgtgatcggtatatatccctgagctccttcatcagccggtcagtggcctgcaccgagccagacactgcaccatttaagtaatcttgcctctggttctttttaattttctctaggatggccaagttttcttttccaatgccatcatcttcagatttcttgccctcagctggctcttcctctttcatttcatagtgatctaagtcttctgtgtcctcaggcatctcctcatcttcatcttctgaagacacgtcttcctgtgtgcactgctctgctggcaagggttgatccagcatctccacatctggatgctgagggaggttatagagtttacacaggtcggagatgatcctcttcagatgctgcaatagcagagtattccctttctttatgtccaccagcctctccaagacagcagccaagttagggtcatcagactccaccgaccagatggggggcacagcagggtatgactccgtgatgttgcagtggatgcggacaggatccccaggcaccgaccccgtggggggagatgcggtcccgggcncggcccccgccccggcccctccggccccagccagcagkaactcgcagctcagctcgtccaggcaggcgctggcaatgcggaaggcgctcgtggccgcggtggaagatggactc

SEQ ID NO: 182 - DNA, 438 bp, Homo sapiens
  misc_feature (413)..(413): n equals a,t,g, or c
  misc_feature (438)..(438): n equals a,t,g, or c
gcggaggaggtgtatgcccagctgcaaaaaatgcttctggagcaacaagagaagtgcctgctgttctccaagcagttcatgcaccagggcaacgtggctgagaccacccgatttgagaagcttgctcaggaccgcaagaaacagctggagatcctgcagctggcccaggctcagggcctcmaccctcccacccaccactttgagttgaagacattccasactgtgaggatcttctcacaactcaacagcacagaaatgcatctgatcattgtccggggaatgaacctcccagcccctccaggggtgactcccgatgacctggatgcttttgtgcggtttgagtttcactaccctgactcggaccaagctcaaaaaagcaaaacagctgtggtgaacaacacaaactctcccantttgatcactcttcaactaaactcn

SEQ ID NO: 183 - DNA, 2511 bp, Homo sapiens
  misc_feature (12)..(12): n equals a,t,g, or c
  misc_feature (28)..(28): n equals a,t,g, or c
  misc_feature (44)..(44): n equals a,t,g, or c
  misc_feature (2456)..(2456): n equals a,t,g, or c
  misc_feature (2488)..(2488): n equals a,t,g, or c
  misc_feature (2511)..(2511): n equals a,t,g, or c
gtaccattcccngaccgcttggcctgtncgattaatccgccccnataggaattggcccgggccagattcggccgagcaagcggaacctctgggaaaagcaatctgtggataaggtcacttcccccactaaggtttgagacagttccagaaagaacccaagctcaagacgcaggacgagctcagttgtagagggctaattcgctctgttttgtatttatgttgatttactaaattgggttcattatcttttatttttcaatatcccagtaaacccatgtatattatcactatatttaataatcacagtctagagatgttcatggtaaaagtactgcctttgcacaggagcctgtttctaaagaaacccatgctgtgaaatagagacttttctactgatcatcataactctgtatctgagcagtgataccaaccacatctgaagtcaacagaagatccaagtttaaaattgcctgcggaatgtgtgcagtatctagaaaaatgaaccgtagtttttgtttttttaaatacagaagtcatgttgtttctgcactttataataaagcatggaagaaattatcttagtaggcaattgtaacactttttgaaagtaacccatttcagatttgaaatactgcaataatggttgtctttaaaaaaaaaaaagaaatgtactgttaaggtattactttttttcatgctgatgattcatatctaaattacattattatgttagctgacagtggtactgattttttaggttggttgttttgtggatttctttagtagtgatagtagcctgaaccacattttagataactcaattatgtatgtatgtgcatacacatatacaaacacactaatggtagaatgcttttttatgtgctagactattatatttagtagtatgtcattgtaactagccaatatcacagcttttgaaaaattaaaaaatcacactatattaatatttcatatttgccaacagaaacatggcagataggtatcaatatgttttcaatgcctgatgacctataagaagaaagtattgaaaagaagagagattagaactgttagaaggagttgaaattttctaaaagacatagtatttagtttataattaaatgcattcttgaagtccagtgtgaattttattaatgctatcatctcgaccaagctcaaagcctacttattagaaacaatgaagttcacaataggtcataaggtctcttccttttctaaaattgaaagacaagaaatttagtgccaatattgtacagacagaaattccatgtatgagtctcaacaaagactacctttggctaaatgtctagaagcagagaagtaaagtgagcaaaatccagtgttgaggagtcatgacagtactttgatctttatatactctgaagcatttcttcaaacttttctacttttatttgtcattgatacctgtagtaagttgacaatgtggtgaaatttcaaaattatatgtaacttctactagttttactttctcccccaagtcttttttaactcatgatttttacacacacaatccagaacttattatatagcctctaagtctttattcttcacagtagataatgaaagagtcctccagtgtcttggcaaaatgttctagtatagctggatacatacagtggagttctataaactcatacctcagtggacttaaccaaaattgtgttagtctcaattcctaccacactgagggagcctcccaaataactattttcttatctgcagtattcctccagaagagctaaccagggcagggctggcatgagaagtgacatctgcgttacaaagtctatcttcctcataagtctgtaaagagcaattgaatcttctagctttagcaaacctaagccaaaggaaggaaagccacgaagaatgcagaagtcaaaccctcatgacaaagtaggcacaagtctacaataagctaaatcagaatttacaaatacaagtgtcccaggtagcattgactcccgtcattggagtgaaatggatcaaagtttgaattaaggcctatggtaaggtaacattgctttgttgtacttttgaacaagagctcctcctgatcactattacatatttttctagaaaatctaaagttcagaagagaatgtatcactgctgacttttattccaatatttggatggagtaagttttagggtagaattttgttcagtttggatttaatcttttgaaaagtaaattccttgtttactggtttgactataattctctgttatctttacgaggtaaaactgcaagctgactagcatgttctgtgaatctgccattcctaaaaattttataaacacttgatacttttcactgataatggatcgctccaataaacatatattgtgaaaatgcatccacaataaatggaattccttcctgcaaaaaaaaaaaaaaaaagggcggccgntctagaggatccaggcttacgtacgcgtgccngcgacgtccatagccccttctan

SEQ ID NO: 184 - DNA, 230 bp, Homo sapiens
  misc_feature (4)..(4): n equals a,t,g, or c
  misc_feature (19)..(19): n equals a,t,g, or c
  misc_feature (227)..(227): n equals a,t,g, or c
tccntcccagtggtacttntactaaattgttgtcttgtttttattttttaaataaactgacaaatgacaaaatggtgagcttatgatgtttacataaaagttctataagctgtgtatacagttttttatgtaaaatattaaaagactatgatgatgacatttaaaaaaaaaaaaaaaaaaaaaaaaaaaaaaaaaaaaaaaaaaaaaaaaaaaaaaaaaaaaaaaanggg

SEQ ID NO: 185 - DNA, 1191 bp, Homo sapiens
  misc_feature (44)..(44): n equals a,t,g, or c
ggcagagcggcacgagatgtgagccaccatgcctgggtgtctcnttcattctttaggcagttcattgtcacttccttccattggtaaacatgtaaattatagtcgcatgatttagaattttactgaccaaagtcataataatagttaacagtacaaggaactattttkgtataatggtttatttaatacagtatacattatctttcatatactttgttacaatgttaaaaaaacttcatttttcataatataggaaataaagttggaaacaactctggtgggaatacttcagatagagcaagaaagcattcacagcaaggcctataatcagtaagatgtgtgaaaagttgggtagccacaggaggtgttcattaaggatatgattccatttatatagctatttctattgcataaccaggacagttttattgttttgaggtcaatgttcttttaaaatttgattttctgtaagaagaggctttttggcccagaaagccttacttattttacawcttccagtttgtccatcccatgagttagagttcgtcttgactctgcaagctagaatcaaagaattatgaaagtaagatcatttagatttgaccaagggcaccattaaatggtgtcaggttttaggaagcagacgggtgtataaaaagaaaatgaacaaagatttcacttattggggatcaggcataactggatgcctggattgtcctgccacccagctgccaccaataaaatcattcatcactctgcaagagggaccagatgcttccatcatcagtactccttgtttttctgttatctcctttgaggtagctaaaaatggcagccaaaaaaaaatgttgaggcttttctcaagtatatactcatgttattttgcagaagatagggtcaayttcttcagttgagttatctgaaagtgttgggcagtgacaccatgccaaacactgttaaattcatgccattaaaaacagtggagtgttctgcaaagcccgattctctgcagctttaagactggacagtattgaaatattcacaggaatcttccaagccgtgaaagcttaatattaaacagcccttttaattgcaaaggagaaaaaaatggagacacttgtgaaaccttgcattctgagtgctgccacaaataaattaaggaattccagaatttcttcatctacttctgca

SEQ ID NO: 186 - DNA, 1499 bp, Homo sapiens
  misc_feature (1462)..(1462): n equals a,t,g, or c
  misc_feature (1476)..(1476): n equals a,t,g, or c
  misc_feature (1495)..(1495): n equals a,t,g, or c
gccttctcccgcctccctcggccttagccatggcgagtagcggcggtgctggggcggcggcggcggccgcggcggcgaatctgaatgcggtgcgggagaccatggamggctgctgaaaatatgacaagctgactttctggagaaattctgatgagatatgtcaagctctgcaagrgggtttgaagattgcattgtagttgagaatgtacawtgaaattwctgcatgcagcagtgtagaaaaattttmctttttaaaagaattataaaaccatagctttataaatcagtggaaagtggcttacagagagaactatcagatgtgtttacatcacatcttattcactttttttaacagctctaatgctttggcattgctatgktcatatttatgtattccttatttatagctctgatagctttaattttctaagcagtctgtctatcagatgtgcacatctgctgtgccaggttgaagtatagtggaacccatcagtagtaatgtgtagtagttatgacttgttgacatttccattataaactttaattttgaattgtttatgcattataactgtggatttatattgtattgggctgaagttgacaggatttcagccaccacttgtgaatttttatttagattcattatgtatatcagaatcttgttttttgaaataagagcatggaaaacatttcttgtaatctactcttgaacaaagaatatttagtttttcaaacagtttgttgggcagctaatagtgtgaaccaggtcatttttgtattgagtaaaaaaatcaaactttgagaaacttggattttaaaagtaatgacaatgcttaggttagtattatttgtaatttgaatcatttacatctaatgagaatgttagttgagaatgttttcttaaagttttatatcctataaataacggaataaaaaaatttgtaaaatgaaacaacaaacatgcaaaattcctatttacttttattacataaaagtaattttagtgcttacctaataaatcttgaatggttatttaataaattattagatgggtgatgtgtttcaaaagatacttgctattttttgaagaaataagggatttccagtcattaaacaaaactaaacaatcttattagagggtgatgtgtttcaaaggatacttgctattttttgaagaaataaggattccagtcattaaacaaaactaaacaatcaaatgttctatattaggaatctcaagtatggctttttttaaaaaacctttttaacatcttgatgtcaaggattataagtatggcttttcagaattgttttgtttgtcattattcttgcctttaaaattttaactcatcaaagtgaagattagaaataaattttaggaaaatgtaggaatagtattgattctgtccctgtaataggaatctcagtggggtttttttgcaaaactaatatgggtttccanctgattttaagtanttccttgaaatttttgggnttta

SEQ ID NO: 187 - DNA, 1538 bp, Homo sapiens
  misc_feature (50)..(50): n equals a,t,g, or c
  misc_feature (727)..(727): n equals a,t,g, or c
  misc_feature (1218)..(1218): n equals a,t,g, or c
  misc_feature (1487)..(1487): n equals a,t,g, or c
tgtaccgggacctgcagcccgtgggctcgggcgcctacggcgcggtgtgntcgtccgtggacggcgcaccgscgctaaggtggccatcaagaakctgtatcgkcccttccagtccgagctgttcgccaagcgcgcctaccgcgagctgcgcctgctcaagcacatgcgccacgagaacgtgatcggkctgctggacgtattcactcctgatgagaccctggatgacttcacggacttttacctggtgatgccgttcatgggcaccgacctgggcaagctcatgaaacatgrgaagctaggcgaggaccggatccagttcctcgtgtaccagatgstgaaggggytgaggtatatccacgctgccggcatcatccacagagacctgaagcccggyaacctggctgtgaacgaagactgtgagctgaagatcctggacttcggcctggccaggcaggcagacagtgagatgactgggtacgtggtgacccggtggtaccgggctcccgaggtcatcttgaattggatgcgctacacgcagacggtggacatctggtccgtgggctgcatcatggcggagatgatcacaggcaagacgctgttcaagggcagcgaccacctggaccagctgaaggagatcatgaaggtgacggggacgcctccggctgagtttgtgcagcggctgcagagcgatgaggccaagaactacatgaagggcctccccgaattngkagaagaaggattttgcctctatcctgaccaatgcaagccctctggctgtgaacctcctggagaagatgctggtgctggacgcggagcagcgggtgacggcaggcgaggcgctggcccatccctacttcgagtccctgcacgacacggaagatgagccccaggtccagaagtatgatgactcctttgacgacgttgaccgcacactggatgaatggaagcgtgttacttacaaagaggtgctcagcttcaagcctccccggcagctgggggccagggtctccaaggagacgcctctgtgaagatctctgggctccggggtggcagtgaggaccaccttcaccttccacctgagaggggactctcgttgccaccttgaccttggctggggcttgcatcccaaggcatccatcagagcagacgcccgggttccatggaccctcctccccacggccatgcctctgctcttgggcgcccatcatggaggagcanctgaactttctggacaagacctctggccgacctggggatggcctctgatycctggagcagtggcccacttgcccggtgctctcagaaacctcagagctggtggggctccagatcagccttggcctctgagccctgcctgctctgggccatgcagaggaaggacagagggtgggcgcagggcaccaactcagggacatcccctctcctgggcgacgtcagtggaccttcctgcacccccagcctggaatgtaaatcagctgtgtggtgcncgcgtggctggaaggaaatagacccttttgtagctccctgaaaaaaaaaaa

SEQ ID NO: 188 - DNA, 896 bp, Homo sapiens
  misc_feature (194)..(194): n equals a,t,g, or c
  misc_feature (825)..(825): n equals a,t,g, or c
  misc_feature (828)..(828): n equals a,t,g, or c
  misc_feature (831)..(831): n equals a,t,g, or c
ggacgcgtgggctgcacctcaccttgtccacgtaccagcgcaatacctggggtgacttcttagaggccatactgcctctggcagtgcaggctgcaatggaagaaaatgtggagtttcggaggggtctgccccgagacttcatggattacatgggggcccagcattcagattctaaggatccgggaaaaaaccgntttcatggagaaggtgcgggtcttggttgcccgcctgggacactttgctcctgttgatgctgtggccgaccagcgagccaaagacttcattcacgattctctgccccctgttttgactgatagggagagggcactaagtgtttacgggcttycaattcgctgggaggctggagaacctgtaaacgtgggggcccagttgacaacagaaacagaagtccatatgcttcaggatgggatagctcggctggtgggtgaggggggccatttgtttctctattacacagtggaaaactcccgtgtgtatcatctggaagaacccaagtgcttggaaatatacccccagcaagctgatgccatggaactgttgcttggttcttatccagagtttgtgagagtgggggacctgccctgtgacagtgtggaggaccagctgtccttggcaaccacgttgtatgataaggggctgctgctcactaagatgcctctagccctaaattagtttcttgttgattgctggaaacaaggcagtagtgattctccgctgccactgctaacttttttttttttttttttttccttaaactcaagttcttaccttgataagcatcagtgtgctcacatttacctttancantgntcagtgtcacaaacctcggaaggtctctaggaagaaccatctcatctaggtacaaaagggaaagg

SEQ ID NO: 189 - DNA, 568 bp, Homo sapiens
  misc_feature (67)..(67): n equals a,t,g, or c
  misc_feature (469)..(469): n equals a,t,g, or c
ttatcttagatttctagttatttatatattaactttttgtttattcagaatcattttcctgtttgtnggaatatttctaagagccttgggaaaatctcgagtaaaattttaaatgaaatttgtatagtgttctgcctctttccaaaggtatttctcaaaattgggaattgttttattattgaagttgaatgacttcaggggaactctaaaatgcaagatgggaagcttctgtttggttttttcctttccctttggtaaggtcttttgcttcccatccccttgacccacctttgtgctgtctgttgtccagtctgctctcckgatccctaargakgtttcttatctaggctgccatttatgtgggtaaaagacaaggtagaaaatactcttctgtatcttgtatcaagggttaatctaatgtcttcatcactttgttttgaratattttggaatgttatcmacaattatnatagatggagcatgtatgtcttaggtttggtgttaatgtttaacatgcattatcttattcaatcctcacagcagtcataaaatgtaggtgttttagagg

SEQ ID NO: 190 - DNA, 428 bp, Homo sapiens
  misc_feature (405)..(405): n equals a,t,g, or c
  misc_feature (413)..(413): n equals a,t,g, or c
aaacacctatggaaataattttgtttttttttttttaaaaaggaatgagatcatgtcctttgcagggacatggatgaagctggaaccattatcctcagcaaactaacagaggagcaggaaaccaaacaccacatgttctcacttgtaagcggaactgaacaatgagaacacacggacacagggatgagatcaacacacactggggcctgatgcaggggccgtagcggggagagcatcaggataactagctaatgcatgtggggcttaatacctaggtgataggttgataggtgcagcaaaccaccatgggacacgtttacctatgtaacaaaccgcacatcctgcacttgtatccagaacttwaaatattttaaaaayctttagagawtmcaaaaaaaaaggttnttcaatgnttccccattaaattg

SEQ ID NO: 191 - DNA, 2901 bp, Homo sapiens
  misc_feature (10)..(10): n equals a,t,g, or c
agagaaagcnttccattgaaaggtagatactttgaggagtaaaaagacttctttgaatgctggtaaacaccgcatttattttgtgtatgcagtttgatttgcacatgtataaatggagatgcttttcatttttgtttggactgggtttgtgtcactgctcattacagtttgcttttttgtgtgtttgctgtgcgtttggagatattagtcagtttctttagtgatatttgtttccttgatgtgccttttcgtttttctttggggtttttggaatctggatgctgttgaagggcaatagcagactcctccagctaagagacaggacatgttcttgagccactgtagctgttgaagctggacaccagacgctccctataacccccccgccaggccatagcgtgwatgcawgtgcacttccacccacagaggagggtgtgaagccttgagaacctcaagaaagggctggattctgccatacctttgggtctaccttgggactgctggttgccaacgtgtcaaccagcctgtgttccctgccacccacgcacttgctgaggtgtggctgargcagaatcatgtgaatgggtgcatccaaggagttcagggccctgcttggagaagaaatamtttagcatcatgaaagggaaagaacgtgcaccccttttttgtttctttagtgaatgcaagatttaataaaagtgaataatgagcttcccctttgggagtggagcccagtgcagctcactgacagggttgacatcagtatgatgtgttggactgaaactgtatgtctgtaggtaggtgtgtgccttttagggcagaccacggtggccaccccatttctccaaggtggtttacctagcttgtgtatattagacattgccaccctcacctctggccaaaaattcttgatttaaaaagaaaagtctattttgttaacgacaggctctgttgtatgtgttactatcccaagcctggattattttatttatttaaaagtattttaatttccatattggctttattctaatcccatccatccctgtggagctgcagagcatcttcatgtgagtagacggatggacataaatagattcatgctcatttaggaagctgggagtttcgtgaagctgagggtgagttcctgtgattcttgttcgcttcaacaaaaagtgggagaccaagtttttatagcaaaagaccaaattagctgtagagtcttgaatgcagaaaaaaattaccctagctttcttagcacttagggttttgtgaggattcagtgtttagcacagtgcttggccatagtaagccctagtaaatgttaaatattgttattagtgtttcgtaaaacttgagaaatagagctgagctcattcccttcctgttgattcaaaaataatacctacatgaaaacatgattccaagttgattgaatgttgtaggaattactggtttagagtagcccagttctcggcctaccctgctggttgggatcttactgtattcttgaatgcactggtttgaaaatatgccagacttcagcccccaaggaaacaaggctgcaagaatttatgaactccagctggaaaaggtaaaggtgacctttggctagccacatactggaccttaccccactgacgtctttcagaacattccaagggttttcctcaaggaacatttttgagctagaaattaaaatgggttctctggcagactgcaccccttgagtcaaagttaacagtattcctttgaatgcaataatagaggcttttctgcgttaagggagaaggaatgaccaattgaacttacacattccccaggcaggtccctttgccggcccctacaggctggggtggcccctcctgtcctcagggatcagactcccagactggttagttctgcatgtttccatcaaattaaaggttattccctggccgcctcctggagaaaaccaaccccaccctgccagctgggggcaatggggcagggattttggcctctcagaacagctcctagaggctgctcatgactgaatgttttcccaaatcacctaaatatcggtttgctttttgttttgggggagaggatttagcctcttacttccctgatggattcaaagttttatctatctccttatctcctgccctgtcttggcacaactctggatagattgcaggtgtggaatttgctggagtttggtgacttcgtcaaattcctttggattctgttccgccaaatcagcagtctcgtcctgtggatgcagtgactggaatttcccatctgcaaagcatctctgtagcccagattttgtggagccttaagacactccctcaatgccaccctgaccccacggctggagaaccctgtgcttatgtggtgggcagggccactgttgatggaggatggcggggacggggtggtgctcaaaggatctgtggtgctggaggtctacacgcctctcaggacagcgtgtcaggaacctcagagcagcttcacatctgccaaagctgagagggagcgaacttgggaagcattttgctcattgtcctacccaagtattaatagcataatagttgatgccaaaggagatggtgacgtcccttccactgtagttgctgtcacaaccttgacgtctttaagctaatggccgtttgcatctgtgtcttcaaacagatcctggttacagccattttgtgtgattcacttcgggggttaagtaatgcaggattctgcaaacaaggtgtcgccgtccaaatgtactgtcctggcatagagagcactgctttgttttccactgttgtagagaaaactagggagaactttatttttcaataaacttttcttgtgtgaaaaaaaaaaaaaaaaaactcgagggggtgcccgtacccaattcgccctatc

SEQ ID NO: 192 - DNA, 290 bp, Homo sapiens
  misc_feature (276)..(276): n equals a,t,g, or c
  misc_feature (286)..(286): n equals a,t,g, or c
taatttaggtgacactatagaaggtacgcctgcaggtaccggtccggaattcccgggtcgacccacgcgtccgataaaacatgattttgttttctacccttcaaggtaaacattaaaaataargtggtacttgtgtwcttgtwcataaaaccaaaattatakttgggaaaaaaataaatttatatatgaaaatgtcaaaatcattttaaaagtattattttcaaataaaatggagaagctggtgaaaarwmaaaaaaaaaaaaaaaaaaaaagggngccccttttngggg

SEQ ID NO: 193 - DNA, 641 bp, Homo sapiens
  misc_feature (14)..(14): n equals a,t,g, or c
  misc_feature (43)..(43): n equals a,t,g, or c
  misc_feature (55)..(55): n equals a,t,g, or c
  misc_feature (68)..(68): n equals a,t,g, or c
  misc_feature (80)..(80): n equals a,t,g, or c
gttcaggaaacccncaagggggggggagtccaaacgggatgcnaggggaagcttnccttttcccagcnaatttgtgttcnggtttgaaaagacccaccacaaagcttttyctattttctgatttaaaagtcgcttttgaatatgaccatgagaaaccaagaaatgctgcttgtgtggtgctctgcttcctgaggatttggctggaaggggattctccgctggcacatgggagaaggccatcttctgtgtcggtgctgtgatctgccttgttctcacttgctgaggataagggcatacacgctgctcctcgctttcttgttgcccgacttcgtactaagcagctcaggagcagtcactcagacccaaatgtcttgactgtgttgtttttaatcactgtgacccttaaagtacaggccaagtgttgtcaaacaccttggctaaaacagtggagggtgatgggtaaagcagtagagggccctcaacccacacactggctgaaactgccaccaactgccacgatgaacccaactgctgtttatgcccccattttcctttttttgtatctacacccacacgattcccaatgttggatatttctacatgaataaagcaaggatcagtgcctcttatgtaaaaaaaaa

SEQ ID NO: 194 - DNA, 522 bp, Homo sapiens
  misc_feature (514)..(514): n equals a,t,g, or c
caccacgtggctgtgaaaatgacaaagcatggtcgtgagccactatgcccggccggatttgcccttattaatggttatttcttgtgaaagtttctttttgcctttgcattccttttattctgtttattcccccatgcctcacccaaagagttgcacggtcaattggcccgtgaaggggacgcctactttcaaacaaggcagacaggacacgacaggacggcggctcatagcacagactttggattgcagtggatgggaccagatcctggctccacttctsgcyagctgtgtggccctgggcaagctgcttaacctctctgggcctcagtttctccccctgtaaactgggggatgtgaacagcgcctgcctccgagtcctaaggattgggagtagtcgtgtaaagtgctcaggtccacaggccatcaatactaatagttaaaaattattcttagaatcttgcttccctcagctccctgaaaggccactaaggcaccccagttgcagaggccaatnggtccggg

SEQ ID NO: 195 - DNA, 735 bp, Homo sapiens
  misc_feature (197)..(197): n equals a,t,g, or c
  misc_feature (293)..(293): n equals a,t,g, or c
  misc_feature (386)..(386): n equals a,t,g, or c
agtataaccatttaggtgccagatttgataatcaccagckgctcatksargtcctatgttgcaaagttactcttacsctttttttacattrcttgataaaggcaatstttaattayrtatttyctrttaactagctggtagagttcatacctaaagtcagtaaataatgttaagaattttttccagctgagcaaatngtatgtatctagttgtaagaaatcaagaagaggatataaaatataatcaggatgtggactctaaaacggaataacctctatgtcctgtaacttttntcactygtaataatacagcattctcaccctrttaaatggaaatttaragcaccyttaaattccggaataaaattgctatttggatwgaaaaancccttaggcaacatttattgaatattaggaaataacttttatgggattagaatccattttttatagaaaccaaatttaaaagtatacatattttaatataagtgttgtgataatacagtaaccaaaattgaacacacagttttawagctttttatatttagtagcagttgaatatatatggcatgttttacatagattaattttactatttttctttrtttaaamaagagraccaaattgaaagccracagatactgcaratgactgggatttttgtttctgycttatctttttgtgttttttttctgaataaaatattcagaggaaatgcttttacagaaaaaaaaaa

SEQ ID NO: 196 - DNA, 785 bp, Homo sapiens
aattcggcacgagagcaagcggaaccaggtatcgtacgtgcggccagccgagccggcgtttctggcccgcttcaaggaacgggtcggctacagggagggacccaccgtagagactaagagaattcagcctcagcccccagatgaagatggggatcacagtgacaaagaagatgaacagcctcaagtggtggttttaaaaaagggagacctgtcagttgaagaagtcatgaaaattaaagcagaaataaaggctgccaaagcagatgaagaaccaactccagccgatggaagaatcatatatcgaaaaccagtcaagcatccctcagatgaaaaatattcaggtttaacagcaagctcaaaaaagaagaagccaaatgaagatgaagtaaatcaggactcggtcaaaaagaactcacaaaaacaaattaaaaatagtagcctcctttcttttgacaacgaagatgaaaatgagtaagtgtaaatattttgaatttagtctactttgaaagtatatggagtgttcattaaaatcacattttttcctattataaagatactacaagttctttatagaaagtttaggaaatagagaaaaaaatttaataaactacatctattcatcaatacccctctgacttaaaatgccaactctatagaaattagctagtattaacattttgttatttcccttgtgtggttgtatatatatgtaaattatatttttaagcaaaatacattttttgtgtgtaaacaaaattttataaatacaactgtattgcaaaaaa

SEQ ID NO: 197 - DNA, 1679 bp, Homo sapiens
gatctttaggtttttcctatagaaaacattcttcctccatcagtagccctttatttgatattcagaagtggaaagctttttcattctccagtagaacttttaaaaattgttacagatacctagctcttcacagatatcatgtattgtaaacagtcatgtgtcttaattttattttctctatttgagtgcataattatcctaataatcccaaagacactgacaactcaaggaacagcagtacagtactattagaagttaagtatgttgttgttatttcacatttcatttaattgtggataaatgttagacatctgttgaaataagctcatatggtggaaacgacaactatattatgaattattttcagaaatggatctttgaatagcagatcaggatttaaataataaaattatctatgaatcacttttatggtcatacatatatgatacaaatccagagttattggtgcagaaatggctacccgagagcttggtaaatttgccttggtttcttatgttaaatgtattgtgcttcccttctgtctctagaatgtggctcttcagaagacagacaatcgacatttaaatttttccaaacaatgaaaaactaaattaaaaacattgcttgatatttcatttaaaattgcaccttgcttaaggtttactgaataactgaaatgtcagcaatttaaaataaattcaattgtgtgataaaatatctcacctataatagaagaaaaggaaaatcatattatttggcaattttgcagcattgtggttgcctaacaggtatatccagcagatgagaaacagtatgaaaggattgtattaacatggtaagttttgccctaaggaaaacgatcttgcattctggattcttgcagcaaagtctcagatacttaatacgttttcttgktttatcatctgktctatgattcggcttcactttgtgtggktattgaattatgtaacagagatttggktttcccaaaatgktatcacatttgaaactatgattgctttgkgktcagtccttttggaacacgtagcttycagcttaagggtagaggaaatatatacctaaaatcatcaatacatgaaagaaaaaggatggaaactatgtcctcagttttacttctaccaaaacatccctgtatgtgtgtgcatgtatgttggcgtgtgtgtgtgtgcatgcatattagtaaatgtgtgtttgcatgtgtgtgttggggagtgtatgtgatctgggtgtttgtttatctctgttattattcccctttagctttattttagtcaactctacattatgatgaatttcaaaatgaagctgtattaaaataattgtaatataacaattcaatctcacatgttactgcagatagttaacttttgctgcaatctattgtacatttgcaattttctgtgttagtaaacttagcagaatctggttawttattttwgtgtaggcttaatgttcactgaaagataagtcaattactgytagtaaaaaattaaggtactctcactgcagagatttaagcctgggcctaatgtgctgtattatgaagccttgtgactgaaaaatatgtttacatatgttgtctatttttttaataaacttttatagctggtctatttgctcagtaaaaaaaaaaaaaaaaaaaaaaaaaaaaactcgag

SEQ ID NO: 198 - DNA, 780 bp, Homo sapiens
  misc_feature (289)..(289): n equals a,t,g, or c
cggtgggctcgcgttgaggctgcggtcatggagggagcaggagctggatccggcttccggaaggagctggtgagcaggctgctgcacctgcacttcaaggatgacaagaccaaagtgagcggggacgcgctgcagctcatggtggagttgctgaaggtcttcgttgtggaagcagcagtccgcggcgtgcggcaggcccaggcagaagacgcgctccgtgtggacgtggaccagctggagaaggtgcttcgcagctgctctggacttctagggatctcagccgtggcknaggccacccccagaggagcccctggtccacagaagcaggccttgtgtttccagcggcctctgataagaggcagggaaggamctgaaggatttggarttgattcaaacaagatctctgggagtctccagcctgtgcagaaggggcaggactgcagtgcactgcgggccttggagtgtccagtggggacactggtgtgggaaggggcagcacctggggagtccctgcctctcctccctgggacaatagtgtgcatgccacccggggtcctacaggcaggtgctgggaaaggcctggccagcaggtagcctgtgtgtttgacaaacagcagctggcagcgctgcctcctgcccacattcctgccacccgacatcaaagctggcgtgtgacctttccagccatgcgatattccccttggaagatgcttccccaggctataaatttgttctcacaaagcaacatcaataaatcaaaactgtctctyccaaaaaaaa

SEQ ID NO: 199 - DNA, 533 bp, Homo sapiens
  misc_feature (485)..(485): n equals a,t,g, or c
  misc_feature (498)..(498): n equals a,t,g, or c
  misc_feature (522)..(522): n equals a,t,g, or c
ggtccctttaaggtttgcttctacagcccgtggactttagcctaaacacggacccgcgaagctggctttatttgtccatgtctcggacagagcctgggaagctgccagtgagatttcagagaccaagagcgcgaaggggcgggcgatgtggcaatccgtctgggatgtgaaaagcgtggagcgcatttagaggcattcgacgaaaacacaggaaatcactcctctcccgctcctgggcgccgctgccactggggcagaggactgggaaccgcggcagcgggataagtggcccagccagagagcgcagctcccgcgcccggtcctgccctgcgaaccacgcggccccctgggctgaagctgctccggccatggccctcggccccgcgcccgcccargggtygctgtcccctgcttgctgggctcctccctggtacattgcctcctcccggacacaaattactccctgaaaaaaaggccctttgttnaacctactgtggntaaccgcctttcaaaaactaaaanttgctggggaa

SEQ ID NO: 200 - DNA, 602 bp, Homo sapiens
  misc_feature (548)..(548): n equals a,t,g, or c
  misc_feature (583)..(583): n equals a,t,g, or c
  misc_feature (590)..(590): n equals a,t,g, or c
  misc_feature (600)..(600): n equals a,t,g, or c
tccttaatcttggttttccttaaactttctataagtccagcatctgaaatattttgtcaattatcacattaatgtgttcattttgtaagtaagagtactcaatttaaaatgatcttactttaaaagtggcctagtttgcagtgcccagcaggacactgacagtcacagctgtgtgactttttgtgggttacttaatttttttgagcctccttttctcttctattcaatgaggataatagggcctacctcataggattatwatgcattcccctctgttaatgcacgtaaagtttttacttggaaaactaactcaccatttaacaaccattctaagcaccatagaatatattttgtttcacaaatttggtattcattcagaataagtatttgaaaagtgagtaaattctatgcaattatagttattaaatgacttataaactgtgtttctcttccacttcttgctacatttaatcttctaggtgttcagatatctttggagattataggcagcaataaagctaaggcagctaacctttaacattcttggngtcaagctaatattttggtgaaagggaattcttgnggttctnaaaaaacttnga

SEQ ID NO: 201 - DNA, 858 bp, Homo sapiens
  misc_feature (772)..(772): n equals a,t,g, or c
  misc_feature (801)..(801): n equals a,t,g, or c
  misc_feature (814)..(815): n equals a,t,g, or c
  misc_feature (852)..(852): n equals a,t,g, or c
cttggctcaaacaatattttccctataacaaaggcaataggacacaaaattcacatcctgctgggccttttttcatcaagtcagggtgatataaaaacattggaagtcttttcaccaaaccctgactttattgaatgctagtagaagatgtagaattagagacatctgatttgtttatcaccttagcagaaaaaccacagtccaaaagacaagcaaattaagaatggagcttaaccatgcctccattgggaagtctagactttgagccaggtacagtaagaaaaattagcctctgattcattaagtttgccacatgacttattttgatattttggatacattaactcacttaggagaattcagaaaagaatgggtgattaaagttcattacagctgaataaatgtgtctaaaacagactcttgtattctgaaagtacagtctacaactgataaaaccttatgattcttttctcccccattatgcccctatatatatcaagatttgggtactttattttagtagaaaatatatatcttttacatatgtatgtatttataaatgcatagatatatgtataaaaatttgtaagcgttagcggcattaattcaccaatgcatttggacaacttgatgtaactgactttattttatgtgactataataaaaagcataattttctcaaaaaaaaaaaaaaaaaaaaaaaaaagggcggccgctctagaggatccaagcttacgtacgcgtgcatgcgacgtcatagctcttctatagngtcacctaaattcaattcactggcccgtngttttacaacgtnntgactgggaaaaccctggcgttacccaacttaatcgncttgca

SEQ ID NO: 202 - DNA, 667 bp, Homo sapiens
  misc_feature (82)..(82): n equals a,t,g, or c
  misc_feature (234)..(234): n equals a,t,g, or c
gcgggggaagcggggctgtagctgggcagggagagggcggacgaaatcggtagcgatctcggctgcggcgctgcccacttgncccggcccgcggggcgcgccctgacccttcatctttgggcaggctcgagggcgcgcgcacggttggcgttctggggcctcaaactcctgggccttgaccgggcaggccgcgtctccccgggtgtgagtccaccgggacccggccgccgcctnaagcgcgkgcgccacagaagcggcggcgcccgaagacgcgctcctggctcggcccgacagcctcgcttggccgccagttcttctgcagccgaaggcggttgttcttttaaagaattattgaagacgaaggtttttttctttttatttttttaatggytttacagaatcttaaatagaatacagtttgacatgacggcaaaaaatgttggtttgacttccacaaatgcagaagtaagaggatttatagatcagaatctcagtccaacaaaaggcaacatttcatttgttgcatttccagtttccaataccaactcacctacaaagattttaccaaaaaccttaggaccaataaatgtgaatgttggaccccaaatgtgatagaaaacgggctagaaaatttatagactctgatttttcagaaagtaaacgaagc

SEQ ID NO: 203 - DNA, 537 bp, Homo sapiens
  misc_feature (85)..(85): n equals a,t,g, or c
  misc_feature (511)..(511): n equals a,t,g, or c
  misc_feature (537)..(537): n equals a,t,g, or c
gttaccgctctataccggcagcagccgcggagagcatgccccgcccccgtggagcccaccccgggcggttaacctcgggtctcantcccgggctgtgaccctccccgaggccccgcccccacggcgaaggcccggggcagttaacccttctcttgctgcggcagagtccgcacccgggcaggcccatctcagaattaacgctttgatggcatcaccgcgtcgggaatccctggggatggtgttctccaccgtcaagacctttgagccgcctgagcgactaactcctgcgcccctgaggggacattttattcagaaattaaatcattcagagttccagcactgtcgggggtcatcgggctctgtccaccgccatagcctagcattgtcaccaacggagccatrgagggacctcggcccaagctggggcctcttcattgtcgaaaaggcctcttgccagaccaggatctgtgggcgcggccaggctggaggactagggcggtggcagtggcangtgagtgcacatggctgtgggtggtn

SEQ ID NO: 204 - DNA, 400 bp, Homo sapiens
tctaactatattaaaaaatttctgtatggggatatcattaggaagggtatcagtaccttgtctgtwatgtgtctactaagcaaaacccaaactgcagcacccccctgtggtacactgcacctccagtttgtactgggggttgttggccaggctataggcatctttcacaggtccttgcttagcatcccaagtactgtgaatacatgttgattctttaaaaagacctggattccaactcaaataaatcacatcataatactggcagagatcatcccaggaaatccaaaatattccgttgtctattttctgagctgttcggggatcaaagtttaaatacttttgcaactctggagtccagttttttacatcattttcactgtatcttcctttccaacgtaac

SEQ ID NO: 205 - DNA, 431 bp, Homo sapiens
  misc_feature (411)..(411): n equals a,t,g, or c
  misc_feature (417)..(417): n equals a,t,g, or c
cgcgtgggcggacgcgtggggtgaattttcagccctcagagcagaaaatgagaaaataaaactcgaactacatcagttaaaacaacaagtaatggatgaagtgatcaaagtccgaacagataccaaattagacttcaacctagaaaagagcagagtaaaagaattgtattcattgaacgaaaagaagctgctggaattgagaacagaaatagtggcattgcatgcccagcaagatcgggcccttacccagacagacaggaagatcgaaactgaggttgctggcctcaaaaccatgcttgagtcacacaagcttgataatattaaatatttagcagggtctatwtttacstgcytaacagtagctctgggattttatcgcctgtggatctaataaagtgtctatttaaaggngaaaanaaaaaaaaaaaagg

SEQ ID NO: 206 - DNA, 417 bp, Homo sapiens
tttcactttctacttttttcattttgttctgttcgaattttttataagtatgtattacttttgtaatcagaatttttagaaagtattttgctgatttaaaggcttaggcatgttcaaacgcctgcaaaactacttatcactcagctttagtttttctaatccaagaaggcagggcagttaacctttttggtgccaatgtgaaatgtaaatgattttatgtttttcctgctttgtggatgaaraatatttctgagtggtagttttttgacaggtagaccatgtcttatcttgtttcaaaataagtatttctgattttgtaaaatgaaatataaaatatgtctcagatcttccaattaattagtaaggattcatccttaatccttgctagtttaagcctgcctaagtcacttactaaaa

SEQ ID NO: 207 - DNA, 734 bp, Homo sapiens
ttttttttccatattcactgctaaaatattttattttaaaatgtaccacagtgaatggatgtatccatactggttcttataaatgtacacatacacatccatatatttgacaaagtatatatatgaactggttaaagacctatccaaaagaggaaatatttctagaaagttcatgtgtttatacttcatttgacaattaaaacttatttgaactgatgaagttttagttgcttagcaatgactaataataccaatgcctgtcaataatgacaactaaattgrgaactataaatttcactgctgtgccttgggtcaaaattttcaatgatggaatcctaaataagtaacagttattcctataatggggtatatattcagaaggaataaatacctgccactattaccaaaagactgttctctgtagagctcaaaaaaaggattatgccacaatacataatttttatttaaaaaagtctctttagatgccactgcaaattctgcttttactaaacagaaaggcagcacccyatttctytcttgtaaaggaggaaagtctttcataaaaaactctttgaagaagttttggtagtatgttcagagtcaaacacagcagcactttattaacaaggacagagtaatataatcacaaggaaatacttgttaagtctaaattaaatgatatcttgggcagcataaaatgaatactccacaagggcaggcacctcaatatgtct

SEQ ID NO: 208 - DNA, 606 bp, Homo sapiens
  misc_feature (144)..(144): n equals a,t,g, or c
  misc_feature (155)..(155): n equals a,t,g, or c
  misc_feature (598)..(598): n equals a,t,g, or c
aggaagctgggggaccattttgcaccatgagtttgtgaaaaatctggattaaaaaattactcttccagtgttttctcatgcmaaatttyctyctarcatgtgataatgagtaaactaaaactatttycagcttttcctcaattnacattttggtngtatacttcagagtgatgttatctaagtttaagtagtttaagtatgttaaatgtggatcttttacaccacatcacagtgaacacactggggagatgtgcttttttggaaaactcaaaggtgctagctccctgattcaaagaaatatttctcatgtttgttcattctagtttatattttcatttaaaatcctttaggttaagtttaagctttttaaaagttagttaaaagaattgagacacaatactaatactgtaggaattggtgaggccttgacttaaaactttctttgtactgtgatttccttttgggtgtattttgctaagtgaaacttgttaaattttttgttaactaaatttttttcttaaaataaagactttttcacaawraaaaaaaaaaaaaaaaaaactcgagggggggcccgtacccaatcgcctgtgatgtntcgtatac

SEQ ID NO: 209 - DNA, 373 bp, Homo sapiens
  misc_feature (251)..(251): n equals a,t,g, or c
catcttggaggtcaaataatagtaggaaaagttcagcagatactgaattttctgatgagtgtactactgcagaaagagtactgatgaaatctccatctccagcattacacccacctcagaagtacaaagatagaggaattttacatcctaaacgaggtactgaggaccgatcagatcagtcttctctgaaatctacagacagcagtagttacccaagtccttgtgctagtccttctcctccatcctcaggnaaagggctcaaaatctccttcrccaagaccaaacatgcctgttcgatacttcataatgaagagtagcaatttgagaaaccttgaaatttctcaacagaagggtatctgggctacaactycta

SEQ ID NO: 210 - DNA, 3652 bp, Homo sapiens
  misc_feature (306)..(306): n equals a,t,g, or c
  misc_feature (1412)..(1412): n equals a,t,g, or c
  misc_feature (1519)..(1519): n equals a,t,g, or c
  misc_feature (2101)..(2102): n equals a,t,g, or c
acgagctgatgtctcccggaggaatctgcaattgcataatttagttggttgcttgtctactgtctctctctttggcaagaatgaaagctctatgagcaaacagaccttgtctgccttatgatccattttattactagagcctaggactgttaaattcattaataaagtctttccatcactttttgttctttatattcctttactcaattgatattcagcatgtgcagaacagttcttttccaaggctgcataaaagttttggaatgaggcacataaataatatccttctaccaataaatgctatcngttataaaatagtttttattttataatcactgaatatgtcaaaactttacagttcaggccttttgaatcaaatgcaaaatcaaatatgaaaaggttaatgatcttgtccactaaaattgtagtttgccatacaggaaaatagactcttaaaaatgataaaaaaaaaaaaatcattcttaaggaaacatattaataagacatttaaaaaggctaagatctttaatgtgaaaaataataagataaagatgacaaccactgaagagaagaaaaaacgttttatgttttttctaaatgtgtgtaaaaacaaaatcttgtacctaccaaaatgacacttttttcaaagaaaggtatcaaatgtgtatactttaacacacagcccttccttgtgtaaatatataggaaatccttaaaggagcataaaacaatttacttagaaattctatacttaaacttattcaaaggaaataattaaaggtgtgtaaataagatatgcatagcattgctctaaatgtcaaatagtagggaactaggtaaataagatatatctatttagggaattagtcaagtaagatatacctatttagctaattccatgtagccatcaaaaggataccatagaacagaacttattgatgtgaaaagatgattaaaatgtacttgttactaaaaacagcaggctgcaatactgtattaaataatgagcccatgctgtatatctagacaaacatatatcataatgataataataaatgtatgagacttatatttttgcttctctgtattttctaatttgtctgtgataaacaaatattattaatgtaatgaagaataagctaaaatatacaaaaacaataacaactataaaaagaaccccttcaatcaaaaagagatcatcagggatttaattcaactatggattggcactattaggaggccaaatatgattcgttgaactgaactgtagtaaagacaagatattaggaaaatgtttaaattatgtgagaactattctcaagcactttaaagatctatttgcaagataacaatgtgctaactttaagtaatgtctatgtattcttgagaccagctttgacaatgacagctgncattccatttgacttggacttacattatgttttgtctatattttcaaaaacagaacccagggactgattcttacaagcattttcttaaagattcactgggtggctgnaaatctgatcaagctgttctttgggagatcattattcaacacttatcacatactttatttctacagctatgactgtcactccccaagcttcacttcataatgaaaataaagaatacagcccttttggaaaagttggatggtaataccaagtgcgtaagtttttagtacatgccatatcacaaccttctacgtggctgacttttgactttttcatttcttttataactgacagaagacacaaaggcaaaaatgtcaacttcacaaaaaatcttagtgctttttggaaagaatgttatagatcatccagtctaaccccctgatgttataaatatggaaatttaggcctagaaaataggtaagtgatgaatcaaactagaagcaggtgtcctgcctctaagcccaatccagttgccatcatcatttactatttacatggaacatcaggttctactttagaagttaactatcaacctacagggttaaggaaaatagcaatgtgtatatacagaccttgcatctggtagctgtatggtgcctgtccaggttgaggggtactgaagcttgtgccatagctgagaaatnntgtctgtccaggtgactgagactgtgacaatccaccttcagtcttgatgcctgcccacaatgcacctaaatcagttagtgatagcttatctatctgtccattttcaaaagctggtaaatatacaaaaacatacacttccacaaccgtttaactacaaatgcttccccaatcttatctcaaaaataaagggtatacatgcattcagtgaaataccataaagtacaacttcagttttttaaatccaggattacagatttgaatgtctattcacattattctctcttgttttattgcacttcaagacatatcccttctataaaatgtaactccagtgatatattttcatacttaattttgttgttttaattatgtaagagttgaagatcatctccttcacagtaaagaaatagccataattaaattttagctaaatgttcccaaagttgctatattgactagtgttaaaaataaaatccttttttatattaaaaatattaattagatcctataccatcacagtatttttccctcctttactctttctactacaaagctgatttcagtaccaactcattttgaagtccaaagaagcaatactgggcacagaactaaacaacatggtggaaaggcttttcctgaatatctaggtcctatcagaaaataagcacaaaggaagcagaacactaatgagctgaatcttataaaacagcagtgatttataaacaagtgaggttgaccagcagtttccttttgtccctgttagtgtgaaatatttgactataattgttttcgatgtagtctaaagtacctttgtttttatcatatgataatataaaaatgatgtatctgtggcccccaaatacttccccaaacaccaggctaacatcgtaattttgggacttggatttggcagcactgaggtatggggctcagctctgtctttaattaattacaattaaagacagtcatacatgttaacaactctccttcattctcacagagggagggaagaaaaatttctgccgagggaattcacattttttaataattttgcttcgtacttaagataaatgatatctttaggatctagaatacacagtagtcttactgtttatttccattttaggggaatctcatcagcagagtacagctaggtaattgttttaaggcagtgggagaatctgactcttggctgagagtgcctactttaattcctgcagtatctctaaataacttcataatgaccttaacatttaagtcttaacacaaccttaacattttaaaaatgtgattttccctgtaaaggtgatcccaaaccaatgaataacccacacatagaaatggtccctggaaatacacctgccccagacaggtggcatgatggctttagaaaatccctttctttccatgttgtcacccctagggattttccacctcttgctgcatttgagactatactgatctgcttccagccttcacctataccaataaaataccaataattcatgtattttttttttttgagacggagtctcgctctgtcacccagg

SEQ ID NO: 211 - DNA, 551 bp, Homo sapiens
gctgcagcgacgtcgggagcagaagcagcggcgacacgacgcgcagcagctgcagcagctcaagcacctggagtccttttacgaaaaacctcctcctgggcttatcaaggaagatgagactaagccagaagattgcataccagatgtaccaggcaatgaacacgccagggaatttytggctcatgcaccaactaaaggactttggatgccactggggaaagaagtcaaagttatgcagtgttggcgttgcaaacctatggtcaccgaacgggtgacaaagaatgccctttctttatcaaaggcaaccaaaagttagagcagttcagagtggcacatgaagatcccatgtatgacatcatacgagacaataaacgacatgaaaaggacgtaaggatacagcagttaaaacagttactggaggattctacctcagatgaagataggagcagctccagttcctctgaaggtaaagagaamcacaagcaaaaaaaaaaaaaaaaaaaaaaaaaaaaaaaaaaaaaaaaaaaaaaaaaaaaaaaaaaaaggggggg

SEQ ID NO: 212 - DNA, 665 bp, Homo sapiens
  misc_feature (463)..(463): n equals a,t,g, or c
  misc_feature (471)..(471): n equals a,t,g, or c
  misc_feature (582)..(582): n equals a,t,g, or c
  misc_feature (612)..(612): n equals a,t,g, or c
gcggcacgagaagtcacaggtcttgccaatactgttgtagtttcttgcctatatccgtaatttgaaggaaatggtragagtgattagagaagtgtaattactgtaattttttcccctattgtagtttcttgcctgtatccataatttgaaggaaatggtaagagtgattagtgaaatgtaattactgtaattttttccccattcaactttatatatctttaactgatgaccagatcattgttgttctgaaccagtttgtggtcagcaagtgttttgtggggttttgtttgtttgtttttaaagaacagtttgggtcacttgacatggttctccaaagggatkttatgggttgtwtttggttctgggtgataaccgacttgttagataatttagataagcaaccgagttgccatgtttgtttgtcaaatctcaagtgtagcttatattttatgttcctagagangttgtcanggaaagatttgaccctttggcaaatctgtttgaatagagatactaccatgctgcccaataaggctttctggccctgaaaaatatacggaattattcttggaaatttgaaanggaaaaaagaaataaactgatccatgtttnttaccatgccaaattaattgaaggaattttcctaaaaggtatctcccctcggt

SEQ ID NO: 213 - DNA, 2102 bp, Homo sapiens
  misc_feature (1861)..(1861): n equals a,t,g, or c
aaaaaaaaaaaaaaaagaaaaaaaccaaactaaccaaaactctgtaaaagagtgctttgagctctacaaataccaagtatttattgtggtatatttttagaatgtagccatacagtgtaattatgggtatctgtcatggatcacaattattattcatagtaagtcattgtgatacagaagtttgtttcttcacttccccttaagaagccaactatagtaatcatgcaaagttgaggagtatgtccttcagggatataaaaagaaaaacaaatctgttttttgagctaaaagagcacatccaaacaagaatttaactggctaaaatttagtaattactgttaagtaactatcaaacttgaaatcttacaagataaatggttaagatgtcttgagtatttgggatgggggcctgtgagtctgattgagacatacattttacagagtagcagcactggaaagggctagtccaacctcccagcctctgcttgggtctccgctgccccagccacacacatcctagaattcttgtaaacatatctggctctgtgttaacagtgcacttgttatatgttttctaagagattagttcttcctgtgatttttccaagtacgctgaaagtagtagtatgaacttaaggaggctagtcaaagaaacttggagttataggtatttttaaagaataaatcctcaattccatcatcacttggcggggagggggcacttattaagcattttagataataaaactggttaagcttactctggtagaacagacaatcaaatctggggattgctgagaacaataataagctgaagtatggctcacagaatcctaacacaaatcattaagtctctagttagatttgttatcctaaaatttttcatagaattttaaaatctaattctgacttgtatggttaagaaaagcagttaaatattttactacttatcaagggcttttaaaataaataaatctgattgataggaagaaaggcaaataaatacctatgtagacattctataataacaaagagccatagatgataaaggaattagattttaatgtagaatgggtggtttctgaaacaaaggtatgtggtactttgtagttattgatgagaagccagtaaccagtagtgttttcctagatatatgcccaccctcacacaactttcttcattaacaaacattaaatatgcatttgtatcttattaaattatattgtataatgctgaaggaaaacaaaaagtgttcaaataatcataacttctacattacaggttctgtttagatgcagaactagaggggccagggtaaatgtagataaagagatatatagcaccatgcttcttaatgcttcatacttttgcaaacagaaaaaaaaagttttacttttattataaaacttcatctatggtcaaagtaaacactgttacatttaaattgctttttaaaaacaattgcgatctaaaaagtcaaaaatctgaaatttaataatatgagacttacactgaatataatgttcatttagaagttgctgtggtccacttcatttataaggaacaaatatttttacagtacactatagcaacagcaaaagccctctctcaccctgataggaatgggtttgctgggtgtctagaagttagattcctgctgaatagaattagccatccttaaaagattttaatccaatactgaactgtttataaaatgctttctctattgtaatgtactgtaagtagtgaaattctgtatatactgctattttctgtctgttcattgttgtgaacttcttatgtatattagtgaaataaattttcagctttcatgttgtttcctaaacattcataagtatanctaactattaagagatttcttcctttcttgagtaacaaatttggtgattatattctttctgatccaaccccaaaaactagctattctgaaaaggctgatgttcactaatgggaagaatgaaatgacccttcacctcttaagggaaaacagcctccgccattccctttcaaaactatacttcttttacttgatactcaaaacttctgcaccaaaatcagtcagtatttttccagaatgcctt

SEQ ID NO: 214 - DNA, 283 bp, Homo sapiens
  misc_feature (181)..(181): n equals a,t,g, or c
  misc_feature (282)..(282): n equals a,t,g, or c
aactgatatttaataatatttaatattgctctaaaatttctggctaaaatgaaaatattcaaccatcaggaaggagaaacaaaactattactgtttgtaaacagtttatcatcagtacttacctaaaaatcctggagaatgagctcagaaatatttctaagagttgagacagtttagcaanatgaacagatacaacctcaaaccaaaccaaactagaaagctcagaggacacagaatgccagtactgggctgggcaacacctctgttgtttgtgaaaatgtnc

SEQ ID NO: 215 - DNA, 425 bp, Homo sapiens
  misc_feature (34)..(34): n equals a,t,g, or c
  misc_feature (77)..(77): n equals a,t,g, or c
  misc_feature (424)..(424): n equals a,t,g, or c
ccacacccccataaggccatccaaatatttaaangcccccccagtgggaaatttggtgtttaaaacctcaatggaancctaatatttcccttatgtccgttagtcccctgtaaaatgttaggtcaccccaaggaaaggggagaaatagcaatggttgttcctaaggtattgcttgccctccatgtcttcctaaagagcagaacttggagtttctcctttatgtagagaagaagtwacttagggtgtatttgcaatgaaatattcatagatattgaaagcttgtgtttacatkaaatatgtttattatcaagaagtcctttttccaattctgtacattaaatatatgtgttttaaaaaaaaaaaaaaaaaaaaaaaaaaaaaaaaaaaaaaaaaaaaaaaaaaaaaaaaaaaagggggggggggnc

SEQ ID NO: 216 - DNA, 483 bp, Homo sapiens
  misc_feature (444)..(444): n equals a,t,g, or c
  misc_feature (469)..(469): n equals a,t,g, or c
cccacgcgtggrcagaccgcgcagggagcacacaccgccagtctgtgcgctgagtcggagccagaggccgcggggacaccgggccatgcacgcccccaactgaagctgcatctcaaagccgaagattccagcagcccaggggatttcaaagagctcagactcagaggaacatctgcggagagacccccgaagccctctccagggcagtcctcatccagacgctccgctagtgcagacaggagcgcgcagtggccccggctcgccgcgcyatggagcggatccccagcgcgcaaccaccccccgcctgcctgcccaaagcaccgggactggagcacggagacctaccagggatgtaccctgcccacatgtaccaagtgtacaagtcaagacggggaataaagcggasgrrggacagcaaggagacctacaaattgccgsamcggntcatcgagaaaagagacktgacggnttaamgaktgatcg

SEQ ID NO: 217 - DNA, 976 bp, Homo sapiens
  misc_feature (19)..(19): n equals a,t,g, or c
  misc_feature (48)..(48): n equals a,t,g, or c
  misc_feature (784)..(784): n equals a,t,g, or c
aatttcggkaactcccaantttcttcccagtttcyctgttgagtttgnatttttttggtggcgcacttaaagaaatttgtccttttcaggggtcctawccattttttcagtatcaggttccattttgcgctttggtgcatggtttcactatttcagtcacttctagtttcgagattttcattgaagaagactcaaaatctttatctacgcctttttcttcagtttttctttttcttttttctcccttattatcaagtggtttgtttttctcattaggcttcttggccttttcttccttagttgttagcttttctgatttgacatctttggaatagtccttcttcactttttcctctttgactggttttgtttcttggtgttcttttgctgatttagagtgagcttttctgggggttccagtgattttttcatccttctgagaggaagatgatgatttagtattgtcagtcttcggagtctcctctttgggcttttttaattgggaggttcagatcgagggagatctctcacgttctccatctactttttcttggggtcctttagcaggttttacaatattttcttttttggacacagcagatccatcattcttccgtttggttttatcaccctttgcttttggtttatccctttctctctkgtctttttcagacackgatttaaaagtgawtgattctgcatccattggttcatctctaacaggtgtggcatcatctctacttgggagaacaaacaatgagtctgttttattttcttcaacacntgtaggttctcttgatttcctagaagtctctaataactctgggttcagaaaaccctcactttcctccccttttcttctttttctgtgtttcttatgcttatttcctttaccatctcctggaagcgttttcactctccttctcttttgactttgtattatccttctgattgtgaccatctcttgctgaaagct

SEQ ID NO: 218 - DNA, 660 bp, Homo sapiens
  misc_feature (560)..(560): n equals a,t,g, or c
  misc_feature (567)..(567): n equals a,t,g, or c
  misc_feature (583)..(583): n equals a,t,g, or c
  misc_feature (589)..(589): n equals a,t,g, or c
ccacgcgtccgccgacacgtcgggattggcggctgcagccaggggtcctccgacgctgggcttccgtgagcggcgctctgccaggtggggccggagctgcggggagggagttggcgcctagcgcgcactccatccccgcctctgcagtggactcggccgcagaatcggggtcccgggctcctggaacttgtcccscccaggccgcggcgaggaggtcactccagccgatctctggaccggattcgtcccattctcgtcctcatggtggacaagaaactggtggtggttttcggaggcacaggtgcccagggtggctccgtggcccgcacactcctggaagatgggacattcaaggttcgagtggtgacccgaaaccctaggaagaaggcagcaaaggagctgaggctgcaaggtgcagaagtagtgcagggagaccaagatgaccaggtcatcatggagctggccctgaatggggcttacgscaccttyatcgtgaccaattatgggagagctkcagccaggagcaggaggtmaagcaggggaagcttcttgctgatctngccaagngccttgggcttcactntgtggncttcaaggggccttgaggacaataaagaaggttacgggaagggagatttgccgccggggaacttttaccgg

SEQ ID NO: 219 - DNA, 514 bp, Homo sapiens
  misc_feature (56)..(56): n equals a,t,g, or c
  misc_feature (464)..(464): n equals a,t,g, or c
  misc_feature (467)..(467): n equals a,t,g, or c
tggaaccaatctttgtggtacatattccagctttttgaatgagtgcatatccagtnagtacctttaaagtaacactttgtacataacaartactcagcaaatgtgaaactttatttgctcttacttcaaaattagtccaaaatgttggaaataaaatataagacattgatctagatatgaggtttttctccttcattctcagctgtcgaagaaatcraagtagcatatgcacaaggwtaaaaaccacatatacaaatactatagaacagcttataatgaaaaccttgcctgcctttataaaaaatgtgattatcttcttctgttaatgtcaataaaagatggtttgtcctagaaggtctataaatggtattatgttctggagggtttacatatgaaaaatgtagaaaatacaaaaagtgtctatatatacaaaaatgtaagtgttaacatttttatatttgccntcnagctttttttttaaataaaaggaatgccatattgccattaaaaaaaa

SEQ ID NO: 220 - DNA, 173 bp, Homo sapiens
gtcaatgctctgaaatctgtggagcaaaccacagtttcatgcccatcgtcctagaattaattcccctaaaaatctttgaaatagggcccgtatttaccctatagcaccccctctaccccctctagagccaaaaaaaaaaaaaaaaaaaaaaaaaccctggggggggggcccgg

SEQ ID NO: 221 - DNA, 1521 bp, Homo sapiens
tcgagtttttttttttttttttttttttttttttttttttttttttttttttgcaagtggccagctttcttttattctttcaccggccaagggggagcaacgttttgtgcagggccacttcaccaccaaggactctgaccgcttctccacctccaggacaagcactgaggccaattccacctccaatctgctggtcttccacattcacacagggccatttcaccaccgactcctactgcttctctgcctccaagaggagcactgaggccaatttcgcctcgattctgaatgtctcccactttggtgtagggccatttcaccacagaggactctgaccacttctccacctccaggatgagcactgaggccgatatcacctccattctggtggcctcacacagcaactcgctgctgaacccagacatctttgctgaagtcagttgactggacagtacagtgcaggatctgcgtgtggcacagggaaacgcaagccagctccagtaccagcaggtgtgcgcgaggtacaagatgctctgcgtggtgcccccaacccactcctgtacacctggcaggtggacaaaacgctcgacctgggcagcatctccttcaccatctataaccatagtggacaccccctctacctgaccagcttcttcagaggacacatctttggggacagcctaggaatgggccacttactcctgcaggccaaagccatgcagctgctgtactgcctgaagaccgagcactctgaggacgatgtgcagagcaagcagtggctcacccatttccttgaccaatttaccaacattaagaacagcctggtcttgaagaaaattgaggtacctggcggtttgggtttacaaggaggccaggagaaggtgggagggacgaggaagatttgcacccagaaccctaacaaaagtactgcatgactacttgatggggcccttgcctcaaagccgggtttgctctgctgtatttggtactcaatccaattttcttaaccctgacagatgctagaaatcgtgaatcctgggtaacattgcagtcgataacgcaaatcctgtgtccaccagatgggccagctcagtacagacactgatcttcacatttaattttggggtttggtttctaatactttgaaattctacttttagttaaagtcttcactggttttggggagcctcctaaaacttgtttggagctcactgggattaaaaaagaaaaacaaacttttaagtaaaagttaatggtgttaaggtaactagctcagcatttttcaagttagatacatatgaagcgcctggcttagtgtgaggtacatatcagctgttcagttattgctgggtcagcaactctaytaagacttataaatagaggagcagtggtgttggcagcrtcagggcatggccagkgmaggagcagcggccacagcgttcatccatctatggaggaagaggctgccttggcgggtcaactgtgttgctccaagtgacataatgtcatgattttgatagc

SEQ ID NO: 222 - DNA, 1875 bp, Homo sapiens
  misc_feature (1052)..(1052): n equals a,t,g, or c
  misc_feature (1291)..(1291): n equals a,t,g, or c
  misc_feature (1849)..(1849): n equals a,t,g, or c
gtctgctgttgtcagaaggcagggagggtgatgaaggactgacccacatggactgggatgtgtgtcggttatgggcatgactgcacgttcactctcagtgggatctgggcaacatggagttcattgtcctgttgcttacttactgcaatgtctttggccctccttttcaactggttcctctgttgggcccaaaggttgggagtaggagacagtatcccaggctgacaagggcttgccytttaccttgggcaccttgttaatttttagcctgtgcccttccccacctttgccctcccagtggttggtatgtgggaagcccatctcagttcctgtgacttcatgtctcaaaccaaggatgagcgtctggtctctgctatgatggtggtatccgaggcctttccctgcccagtctggtgcctgccccacattgtaccggacactggattcctggacccccttctcctttcctttctttccttcaggtcacgcagccctgtactgtatccagcaccacagaaacctcagtgtttttcctctgctggtttggggcacaaggaagccttagggtatggggaaaggctgttattacctagagtttactcccaggccagggggctgccatcttcttcacagacatccctgaaaggaagcccctttggggcagggaggtgaggacttcatctcaacatcggctggtggttggtaggggagcttttycttttctttcctttttttttgtttttgtttttgtttttgtttttggtaacatgttaggagttaatgttgcaaagagtagtttacatcttcactttctgaagacacttgaatttaggaccgatgtatctgtgacaagcatgccagaagtggcaggggccatcagggctaaccacttcacacctaccatcgtcccatggggatccaagacctgagataaagcaacagcctgcccagatccctctgttcatcctatcccttccaaggttggtccatgccaacataacctctgggcatcagacatcagcaggtctgtgtgcctcagccctgttaagggncaggtttctctttagccctcttcctgcacttgggagcaaaggcactaccagtagagaagggccatccagccgtgccccagcctggacccctggggctcagatagaggtgctgagcccctgtgtcaaagttgttaaatgtttttgttttgttccattgtagctcttttttttttttttttccctttcctggtgattgattttacaaaagaaagtaagctgcttagaaggccctggaaggnaagtgaggaggagggacaaggaagatgactagttacggagggtgagggttgttttttgccaaaaagcctgggtagagtgatctgaattatctggcaccctcctgaatggaaccccagagtacctcctgtgtggaagggtccctggattttccctaacacccaccctctcccccttcagccatgctgatggcagagaagataagaacttggagcccatttctcactggagaggaaaacttgtcatctggctttgcggagaaggttccaccttacgctcgtagtacattatctttactatgtgctaggatatcatatttaaaaggacaaaaaaatgtaaaatacttgaatgagcttgtattataacattaatattattgagagtatctgctttccaggctgaagtgattcattcattattctagtcctgctttagtcctttgtaatttgtggtaattatgcttttctttttaatacaaaaaaatgtataaaaataaacacttgaaaaggcaaaaaaaaaaaaaaaaaaaaaaaaactcgagggggggcccgtacccaatncgccggatagtgatcgtataacaatc

SEQ ID NO: 223 - DNA, 1917 bp, Homo sapiens
  misc_feature (798)..(798): n equals a,t,g, or c
  misc_feature (802)..(802): n equals a,t,g, or c
  misc_feature (1073)..(1073): n equals a,t,g, or c
  misc_feature (1748)..(1748): n equals a,t,g, or c
  misc_feature (1829)..(1829): n equals a,t,g, or c
  misc_feature (1887)..(1887): n equals a,t,g, or c
  misc_feature (1891)..(1891): n equals a,t,g, or c
gaattcggcacgaggcagtggtgtgatctcagctcactgcaacctccacgtcttgggttcatgcaattgtcctgcctcagcctcccaagtagctgggattacagacatgtgccaccatgcccggctaatttttgtatttttagtagagacggggtttcactatgttggtcaggctgatctcaaactcctgacctcaagtgatccacccccctcggcctcccaaagtgctaggattacaggcatgagccaccatgtctggccctacttttcttttatgccttctttttggattaatcaaatatttagtttcattaccccactattaactttttctattatatattctttttttaattaagtgattacccttgggttgttacatacatcctgaacttcttatagtaaatatacatgattaatttaacctcttccctagcaatgctcagattttagaacattataattccatttagtctcttctaccttttgttttattgttttcatgtattgtaatcctaaacatattttacaccccacaagacaatatattagtgttgcatatcctcaatattcatttagattaatccatacaattactctttctattgtctttcactccttactgaatttctaggcttttatctgaaattattttccttctgcctgaagaactaccttttatagtaattttagtgtaattctgcttargaagtattatctgttcttgttattctgacaacattttcatttctccttcatttttgcaggatgtttttgctgggtgtattttctgggtcngtantyctagattacagttactttcttcactacttatattctcactgccaccattttattgaaagtcagcaccaaatcaattaaaaactgaaggtaatatttctccccctcaggctgttawaaatttttttcyttgaccttggtttttawtagkgttactgtaatgtgccaagatgtgmctttctttawattcatcctgcttgggattttcaggaattcatgcctcagggctttatgtctttcattagttttgggaaaattttaagccattaacntttcaaagatcatctcttccctattctctcttyctctctctgctatccttttgraactccaattmcatgaaagttagatttgttcatgttattccttacgtttcttatgttcttttttatattttccatctttttccctctctgagtgtcagctctgtgataaggtagtcttgaggacttgtgtctgctggaaggaactgatctgacttggagamcctcaaaaaagctctatctctggatattcatgaaaagaatagcaattagaagcaatctgctcaaagtcagcattgcaactgcttagggctgcaatataggttgaggcaccaagagactagcaaatattttatagggttacctgagaaacaagagagccacaagggactttgataagctctataatatgtctgtaatgttcctgggaatttagaaggttgtgtgcatgttcaaggctgcatgcatgttcaggaaataccaacaggggccaagttacttattcatctcttactgaccttggagctcagtgtaagcaggcaatgaaacctaaggcaaatttataaactgcctgaactttgaaggcatgtggaaactcataaacagcttctctcagccagttgcagaagatttacttattcaagtcatttaagaaaaccttctaacccaaaatttcccatgctncctgagatgaccaggacctagaagtagctaaaatagaacagatttaaaaagtacataattctgtggagatctgaggctttnactagcttgaatgtacaacacacaacctgtgggtgggataaattaagcataaacttgngtanaaaaaaaaaactcaggggccggccat

SEQ ID NO: 224 - DNA, 1544 bp, Homo sapiens
ggcacgagctatagcaatctgggttttcttagccaattgaaatgggcatttattagatcatttaagcatcatatcaatatagtatatttggcgactttatgataagttcttatgatagatgttcaaaactctgctcaggtgacatttttatggatccacatagtttttgtcatatatgaaaagaaagcattgagttgtgcagatggttaaatgtgcattgagttatttctctggaatttgcatgagaatggaccgacttgtagttgtattaacttttctagtgcccaggttagaaagtttgatctgtgtagtttttaaaggcagcatccaaatcacttatattcagaagaaaatggtaacagatttagaagctgtctatattttccccattatccataatacatattattggcaatatggttttcactctttgttgttaacgtatcaacaatgtgcaatagccactaataatcatttgttaatgcatgcttccaagttctgtatttgaaaatctcagacttcatatatggtaagtgatggagtaatttataacttttatgttgaattcttgctactttaaaaaattgtgcttctccttttttaaagcatatgacttacttaacagctgatagtcagttacctggatttttagtatttttttacatcacaaaaagatttctctgaagtttgcgcaggggtctatttgtaggcagtttccaacttactaataagtaaggttctgaaagttataagttagctgtctggaatagatagtctcatagaaaccaggttgtagatggtgatttggttccttgggcaacctactgaaacccatttactatataatgtggctgaataatattattgatagtgctatagtatttagcaactgtctgtcaagtgattttgaactctcattttgaaatctaactttcatagcattatactgatgaatttttggtagtgcgatttgactttttctacctccattctaccagttcacagcgcattctagcagtggaaatcaaaaaacctattgagatggaatttgggaggaaaggaggacttactgatatccctagctgtagaaagaaagtaactgggtatcctgtctgaaagaggaaggatgtgatgatcttcatggctctgttgtggagatgtatgtctgcttatacatggcaggcaaccaattggaggtttatatattttaaaaaataaagaaggggcggccgggcgccgtgctcacgcctgtaatcccaacactttgggaggccgaggcgggcagatcacggggtcaggagatcgagaccatcctggctaacacggtgaaaccctgtctccactaaaaatacaaaaaattagccgggcatggtagcgggcgcctgtaatcccagctactcaggaggcggaggcaggagaatggcgcgaacccgggaggcggagcttgcagtgagccgagatggctccactgcactccagcctgggcgacacagcgagactccgtctcaaaaaaaaaaaaaaaaaaaaaaaaaaaaaaaaaaaaa

SEQ ID NO: 225 - DNA, 1762 bp, Homo sapiens
catgagccactgcacccagccgatactactatatccccattttacagatgagcacatgggcaaattgagggtaaggcactgacccatgatcatacagctgagaagtggcaaaggcaggatttgaacctagaacctctggctccacacactagtaatctaaaccactctccctacaatacaacatacgtggtaaagatgtgtggtgggcacgcaatcaacgtaggtcccttcacagttgctgggagaggcaggaatttgcagttcctccgcgttctcctcctccgctgcccacctgtcctgggtcattcctgcagcctgccctgccctgcctggtctcaccctccctctgccaacagaagtctgggcagggttttatgggctctgataaggccctggcagggccgaagttcatgagcacttcctctttgcaggagggcgtaggggaggggacccaggtgatttgggtcctggctggtcaccagggaagctggcaagggaagggagactagggtgcgctctaggagaagccgacagcctgagagtcccagaagaggagccctgtggaccctcccctgccagccactcccttaccctgggtataagagccaccaccgcctgccatccgccaccatctcccactcctgcagctcttctcacaggaccagccactagcgcagcctcgagcgatggcctatgtccccgcaccgggctaccagcccacctacaacccgacgctgccttactaccagcccatcccgggcgggctcaacgtgggaatgtctgtttacatccaaggagtggtcagcgagcacatgaagcggttcttcgtgaactttgtggttgggcaggatccgggctcagacgtcgccttccacttcaatccgcggtttgacggctgggacaaggtggtcttcaacacgttgcagggcgggaagtggggcagcgaggagaggaagaggagcatgcccttcaaaaagggtgccgcctttgagctggtcttcatagtcctggctgagcactacaaggtggtggtaaatggaaatcccttctatgagtacgggcaccggcttcccctacagatggtcacccacctgcaagtggatggggatctgcaacttcaatcaatcaacttcatcggaggccagcccctccggccccagggacccccgatgatgccaccttaccctggtcccggacattgccatcaacagctgaacagcctgcccaccatggaaggacccccaaccttcaacccgcctgtgccatatttcgggaggctgcaaggagggctcacagctcgaagaaccatcatcatcaagggctatgtgcctcccacaggcaagagctttgctatcaacttcaaggtgggctcctcaggggacatagctctgcacattaatccccgcatgggcaacggtaccgtggtccggaacagccttctgaatggctcgtggggatccgaggagaagaagatcacccacaacccatttggtcccggacagttctttgatctgtccattcgctgtggcttggatcgcttcaaggtttacgccaatggccagcacctctttgactttgcccatcgcctctcggccttccagagggtggacacattggaaatccagggtgatgtcaccttgtcctatgtccagatctaatctattcctggggccataactcatgggaaaacagaattatcccctaggactcctttctaagcccctaataaaatgtctgagggtgtctcatgaaaaaaaaaaaa

SEQ ID NO: 226 - DNA, 253 bp, Homo sapiens
  misc_feature (236)..(236): n equals a,t,g, or c
  misc_feature (238)..(238): n equals a,t,g, or c
gggtaaatgagtgccagggccggcaagcccccgctccccgggctctcggggtcgcgcgaggatgcttggcacgtaccccgtgtacatacttcccgggcgcccagcatggaaataaagcacccascrctgccctgggcccctgcgaaaaaaaaaaaaaaaaaaaaaaaaaaaaaaaaaaaaaaaaaaaaaaaaaaaaaaaaaaaaaaaaaaaaaaaaaaaaaaaaaaggggggccgntntaaaaggttccctcg

SEQ ID NO: 227 - DNA, 511 bp, Homo sapiens
  misc_feature (471)..(471): n equals a,t,g, or c
ccccagcgggcgcgggccggagcacgggyacccagcatgggggtactgctcacacagaggacgctgctcagtctggtscttgcactcctgtttccaagcatggcgagcatggcggctataggcagctgctcgaaagagtaccgcgtgctccttggccagctccagaagcagacagatctcatgcaggacaccagcagactcctggacccctatgtaagcacctgggcccttgtggcatctgagtctcagagaactatggggttaggaagggagtgagaagcagggaggacaggcctagccccactccatatggccaggtcggggaactgagtcgctatgttattccagccttaaccctgaggagctaaggctggccctccagctttcctagctctgtggtcccggggcgggactccggacaccatcaccatgctmactgcttactcagtgtgtttcctgcacacctgccangcttctggtctaggcaatgggacgtagcagtgaagcaaga

SEQ ID NO: 228 - DNA, 2945 bp, Homo sapiens
ggaattccaactatggcctgctgcctgtttttggctggtgagctaagaatgatttttacatttttaaattattggaaatatcaacaccggaattatatttcatgatatgtgaaaattacatgaagttcaaatctcagtgtctagaaataaagttttattcgcacacagcctgctcatttgtttacctattgtgcatggccactttcacattacagtggcagagttgaacagctgctgcagagactagccacaaaactaataacgtttactgcttggcccttacagaactttgccgagccctcatttaaagtaatagatttaaacagtctccataagcagctgctggctttgaaggtaggtgcagccactagtgcttttcttggcagattcattgccaaggaacagtttgttaagtaattcccttgttttgtgtgccaggctccataaagaaagggttctcacgctcaaatatatgggcaatacctcatgctatgtatgtatatgtgatttatttctctctagggaacaaacctgtataattgcttaatgtagtctccttaaaaggtagaaaagggctctttggtcaaataattgtaggaaaaagattgacaatcacagtgctgagaaggcctccaatagagaagttggtttagttgttcctcgatctcccacctcctccttttgagctcagccttttagaaattaatcattgcctcctcttcttgcccctgagtggaagggatgaggcccatgggctttgtatccctaggaggagaaagagccagtaagtgaggagcttttaaagccctttctttgtgggaggggccacaaggggccaggtctcttagggctgagaaagccaaggccagcatttctcagagtgctgtcaggactgtctgcctcagaatcatctaagggaccagctaaaacagactctggggccatttcagactcactgggcagtagagctcaggaatctgcatgatgttgctgacgaaagcttaggttggatttcctcttggtgtcccctcccaagagcttgaagatcctgtctccttcctcctctgtcccaacctggcttggatatttgttgaatgaataataacacctgccacttatcagtgtttattgggtgctgagctgatctcattggattttttttttttcttgagacagagtcttgctctgtcacccagtcacccaggctggattgcagtggtgtgatctctgctcactgcaccctctgcctcctgggttcaagtgattccttctgcctcagcctcccgaataggtggggctacagacacacgccaccatacctggccaatttttgtatttttatagagacggggtttcgccatgttggccagactggtctcgaactcctgacttcagctgatccacatgcctaggcctcacaaagtgctggaattataggtgtgagccaccgtgcccggcctgatctcatttggatctttgcagcaatttgatgaattgggtgttctcgttatccccaggtgacaggcaactgaggcccagaagaaggttggtaatatgttaatgagttaagacatagcgccagggttcatgtgggtgagggtctgacaccagacagatgaagggtcgtcggctacagtgacttgagtacccgagctgggccagatttggacccgatggtgtgaggaacctccacccctctaatgctggcagaaaggagtttggggagggcaggggctggaggaggatggtcttcgccttgttcaaggcaggcagcagccttttccctctcacggtgggcaagtttctctgctgcccgagtccctgggcctcggagcactaaggctggccacctgctaggtgggaaggccccaaacggcttctcatcctgcctgcctccactcctaccagaatgacctcacctggcagggagggtggccccagggccctgtcagctctgttcctgccagccaggagggtcctggagtccctcccaagcctgccgcaagcccagagggcacatccaagaggcaagtgtaagctcctgtttccttcatcctcagcagcacaaagctctggaggctggaaggcagcaggcagggccagaaggtattttcatctttcctggaactgcgttaaagggccctgggcagtgaaggagccagagccatttcctgcgtgcttacagcatgccaggtgcctggccacacactgcccacaggatcagcttgaaccctcagcagccccgcctggtagggccagccgtcctcccatttcacagatggagccgtaggggctctcctcaaaagtcacacagttaggagatagccaaattcaaatcgtggtgcatccatccccgtccagggctcgtttcttacctaccttgcccccctgctaactcggacacctcttgagtttggcatccaagagcagaacctggatcccgggggagggaggcacagggaggcgtgaaggatgggaaccagcctcccctgggctgcttgggccggcttcccccttgccagttctgctgcccttaactgcggccttgggcagggggcgtaacctttgcaggtgacgcttgggtctccctgttggaagaccggcaagatgccgtgtacttactttaagaagcaaatgaaggttgggcgcggtgctcacgcctgtaatcctagcactttgggaggccgaggtgggcggattacttgaggtcaggagttcaagacctgcccaaccaacatggtgaaaccctgtctccactaaaaacacgaaaattagctggatgtggtagtaggctcctgtagtcgcagctactcgggaggctgaggcaggagaatcacttgaacccgtgggggcagaggttgcagtgagccaagatcgtgccactgcactccagcctggatgacagagtgatactccatctcaaaaaaaaaaaaaaaaaaaaaaaa

SEQ ID NO: 229 - DNA, 445 bp, Homo sapiens
ggtaccgggtccggaattcccgggtcgacccacgcgtccgggaactgtgacttccccaccccaaattctatggccggctaatgttttgctatggtgactatcacccatctacctggaagcaccagaatggcttagtacagctagggagctcagccagatctcggtgtctgctgtttgagattgtgtggaaggactattgctaagaagcaggagacagactgaacccagtgttggccacaagtgaggactgagacccaggtcacctcttggctgaacatgttagcttgttggtaaatggctctgcagtggttctgcattttagtggggaatttgttttggttcattttggcattcccgcaaccatcttgttggttttttggtaaaatgtggcaccccytccagacctyttagctgtggaamtgagrtattttagcagggtcccgtt

SEQ ID NO: 230 - DNA, 522 bp, Homo sapiens
  misc_feature (402)..(402): n equals a,t,g, or c
  misc_feature (417)..(417): n equals a,t,g, or c
  misc_feature (480)..(480): n equals a,t,g, or c
  misc_feature (482)..(482): n equals a,t,g, or c
cctttaaataatgaataatagtgatagaaaatgtcatttcttggacaaatgaaaaattgaaattaatgtatataattagatattattagctactcttaggtagcttcatttgttgaaagtttgacaagtgaatgaagttcacatctggaaatcgttgaacatttttcgttcatggaactcaatggctacgttagtcgtttatgcttttcactgttgtggtaggggctttggaagtaaatgccatcaacaatggatacagaagacctggatttggaataagggcaaaatttatttgatggggctgaattgctctgccaggagcatttggtatgagatgaaatggctctcttgagactgagctgccacctgggcaatattggccgctaagggtctctttattcnccttacttggacttnctttcctggagggaatctcccgaaaaaggaaactttccttccccaggggggccccaatggttncnagggctggcttcaaaatgggttccccaactggtggcatca

SEQ ID NO: 231 - DNA, 1516 bp, Homo sapiens
  misc_feature (1493)..(1493): n equals a,t,g, or c
  misc_feature (1497)..(1497): n equals a,t,g, or c
  misc_feature (1508)..(1509): n equals a,t,g, or c
  misc_feature (1516)..(1516): n equals a,t,g, or c
gaatgagcaggataactgtgtcctgattcatgatgtggaccaaaggaacagcgataaagatatctttggggatgcctgtgataactgcctgagtgtcttarataacgaccagaaagacaccgatggggatggaagaggagatgcctgtgatgatgacatggatggagatggaataaaaaacattctggacaactgcccaaaatttcccaatcgtgaccaacgggacaaggatggtgatggtgtgggggatgcctgtgacagttgtcctgatgtcagcaaccctaaccagtctgatgtggataatgatctggttggggactcctgtgacaccaatcaggacagtgatggagatgggcaccaggacagcacagacaactgccccaccgtcattaacagtgcccagctggacaccgataaggatggaattggtgacgagtgtgatgatgatgatgacaatgatggtatcccagacctggtgccccctggaccagacaactgccggctggtccccaacccagcccaggaggatagcaacagcgacggagtgggagacatctgtgagtctgactttgaccaggaccaggtcatcgatcggatcgacgtctgcccagagaacgcagaggtcaccctgaccgacttcagggcttaccagaccgtggtcctggatcctgaaggggatgcccagatcgatcccaactgggtggtcctgaaccagggcatggagattgtacagaccatgaacagtgatcctggcctggcagtggggtacacagcttttaatggagttgacttcgaagggaccttccatgtgaatacccagacagatgatgactatgcaggctttatctttggctaccaagatagctccagcttctacgtggtcatgtggaagcagacggagcagacatattggcaagccaccccattccgagcagttgcagaacctggcattcagctcaaggctgtgaagtctaagacaggtccaggggagcatctccggaactccctgtggcacacgggggacaccagtgaccaggtcaggctgctgtggaaggactccaggaatgtgggctggaaggacaaggtgtcctaccgctggttcctacagcacaggccccaggtgggctacatcagggtacgattttatgaaggctctgagttggtggctgactctggcgtcaccatagacaccacaatgcgtggaggccgacttggcgttttctgcttctctcaagaaaacatcatctggtccaacctcaagtatcgctgcaatgacaccatccctgaggacttccaagagtttcaaacccagaatttcgaccgcttcgataattaaaccaaggaagcaatctgtaactgcttttcggaacactaaaaccatatatattttaacttcaattttctttagcttttaccaacccaaatatatcaaaacgttttatgtgaatgtggcaataaaggagaagagatcatttttaaaaaaaaaaaaaaanttcnggggggcccgnnccaattn

SEQ ID NO: 232 - DNA, 1387 bp, Homo sapiens
acagttggctatgttggtgccgacctgacagcactctgtagggaggctgccatgcatgccctccttcatagtgagaagttccaggtttgaccataagcacctctcacttaggtggaccagtcagctgctgtcgtcccagggtggagcccactgctacttcaggaggggcctgctcaggtgtagttaccacaggtgatggctgagttcagaaacaacccaggggaagtggaaggaagaaaggcaaaaagcatgaagggacagacaactgggaagaaccaggacaatcctgtgattgatgaaatagacttccttgaagcttttaaaaatattcagccctcatcgtttcgaagcgtcattggattaatggatatcaagcctgttgactgggaggagattggtggccttgaagatgtaaaactgaagttaaaacagagcattgagtggcctctgaaattcccttgggaatttgttagaatgggcctgacacaaccaaagggagttctcctctatgggccccctggatgtgctaaaaccactctggtgagggccctggccacaagctgtcactgctctttcgtttcagtgagtggagctgatctgttttcaccgtttgttggagattcagaaaaagtgttgtctcagatatttcgacaagcaagagcaagcactccagcaattttgtttttggatgaaattgattcaatcttgggagctcgctcagccagcaagacaggatgtgatgttcaagaacgagttctttctgttctcctgaatgaattagatggtgttggacttaagacaatagagagaagaggaagtaaatcaagtcaacaggagtttcaagaagtttttaaccgaagtgtcatgattattgcagcaacaawtagacctgatgtgttagatactgctttgttacgacctggaagattagataagatcatctatatcccacctccagatcacaagggcaggctttctattttaaaagtctgtacaaaaaccatgccaatagggcctgatgtctccttagaaaacctcgcagcagaaacctgttttttttctggagctgatcttagaaacctctgcacagaagctgctttgctggctctgcaagaaaatggactagacgcaactacagtgaaacaagagcactttctaaaatcacttaagactgtaaaaccgtcgttaagttgcaaggacttggctttatatgaaaacttatttaagaaagaaggattttctaacgtggaaggtatttaaaaatcaccttaaactcttgttcagttcacattaattgaaatgtgaacttgcctgtcgtttgcaacttcacacttttagaatttgtgtttatatttcctgtaagtgaataaataaaacaaaacaaaac

SEQ ID NO: 233 - DNA, 1506 bp, Homo sapiens
gaattcggcacaggtgggtagaggtgatgcagtgctgaagacctgggcccctgctcagtgcctttgctctagaatgggtccagcttggctttggctactgggaacagggatcctggcctctgtccactgtcagccccttcttgcccatggagataaaagtctgcaggggcctcaaccccccaggcatcagctctcagagccagcccccgcctaccacagaatcacacccaccattaccaattttgctttgcgtttgtataaagagctggcagcagacgcccccggaaacatcttcttctcgccagtgagcatctccaccaccctggccctgctctctcttggggcccaagctaacacctcagctctgatcctggagggcctgggattcaacctcacagaaacccctgaagccgacatccaccagggcttccggagcctcctccacacccttgccctgcccagccccaaactcgaactaaaagtaggaaactccctgttcctagacaagcgactaaagcctcggcagcactatttggacagcatcaaggagctttatggagcttttgctttttctgccaacttcacagattctgttacaactgggaggcagattaatgactatttgagaaggcaaacatacgggcaagtcgtggactgcctcccggagttcagccaggacacgttcatggttcttgccaattacatcttcttcaaagccaagtggaagcaccctttcagtcgctaccagacccagaagcaggaaagtttctttgtggatgagaggacttctctccaggtccccatgatgcaccaaaaggaaatgcacagattcctctatgaccaggatttggcttgcaccgtcctccagatagaatacagaggaaatgccttggcgctgctggtcctccctgacccggggaaaatgaagcaggtggaggctgctctgcagccacagaccctgagaaaatggggccaattgctcctgcccagtctgttggatttgcacttgccaaggttttcaatttctggaacatataacctggaagacatacttccccaaattggtctcaccaacatactcaacttagaagctgacttctcaggagtcactgggcagctcaacaaaaccatctccaaggtgtcacacaaggcgatggtggacatgagtgagaaggggaccgaggccggggctgcttcaggcctcctctcccagcccccatctctgaacaccatgtcagacccacatgcccacttcaacaggcctttcctcttgctcctttgggaggtcaccacccagagcttactcttcctgggaaaagttgtcaacccagttgcagggtaaccatggtgggaggccaggagttatcttatctcatcctggaccaaacagataggccagaaccagcctgcatcctggggctgctatgtggttcagttaatcagtgtgccaagattctaataaagttgaccttgggttctgtgaaaaaaaaaaaaaaaaaaaaaaaa

SEQ ID NO: 234 - DNA, 896 bp, Homo sapiens
  misc_feature (18)..(18): n equals a,t,g, or c
  misc_feature (40)..(40): n equals a,t,g, or c
  misc_feature (45)..(45): n equals a,t,g, or c
aaaagctcggcccttaanccttactaaagggaacaaaagntgganctccaccgcggtggcggccgctctacaactagtggatcccccgggctgcaggaattcggcacgagaagagcactggccaagtcagcttcttctgagagagtctctagaagacatgatgctacactcagctttgggtctctgcctcttactcgtcacagtttcttccaaccttgccattgcaataaaaaaggaaaagaggcctcctcagacactctcaagaggatggggagatgacatcacttgggtacaaacttatgaagaaggtctcttttatgctcaaaaaagtaagaagccattaatggttattcatcacctggaggattgtcaatactctcaagcactaaagaaagtatttgcccaaaatgaagaaatacaagaaatggctcagaataagttcatcatgctaaaccttatgcatgaaaccactgataagaatttatcacctgatgggcaatatgtgcctagaaatcatgtttgtagacccttctttaacagttagagctgacatagctggaagatactctaacagattgtacacatatgagcctcgggatttacccctattgatagaaaacatgaagaaagcattaagacttattcagtcagagctataagagatgatagaaaaaagccttcacttcaaagaagtcaaatttcatgaagaaaacctctggcacattgacaaatactaaatgtgcaagtatatagattttgtaatattactatttagtttttttaatgtgtttgcaatagtcttattaaaataaatgttttttaaaaaaaaaaaaaaaaaaaaaaaaaaaaaaaaaaaaaaaaaaaaaaaaaaaaaaaaaaaaaaaaaaaaaaaaaaa

SEQ ID NO: 235 - DNA, 127 bp, Homo sapiens
  misc_feature (94)..(94): n equals a,t,g, or c
ggaggaacctccagtctcagcaccatgaatcaaactgccattctgaatttgctgccttatctttctgactctaagtggcattcaaggtaagggncatcaaagggtacttgaatttgtaagatgagat

SEQ ID NO: 236 - DNA, 1949 bp, Homo sapiens
  misc_feature (1466)..(1466): n equals a,t,g, or c
  misc_feature (1540)..(1540): n equals a,t,g, or c
ctgagaggcaggtagctgcggcgcagggctgacggcggcgagtccacgtgctccccgcggccggttgaaaccgttggcgggcgctggctgagaggcaatgtttgctgtcttccattggagtgactgaatttctacatgacggctttttgacaagacttaaaacctgtcttggatagagaatatttagccatttacctaaaaatggtattttttacatgcaatgcatgtggtgaatcagtgaagaaaatacaagtggaaaagcatgtgtctgtttgcagaaactgtgaatgcctttcttgcattgactgcggtaaagatttctggggcgatgactataaaaaccacgtgaaatgcataagtgaagatcagaagtatggtggcaaaggctatgaaggtaaaacccacaaaggcgacatcaaacagcaggcgtggattcagaaaattagtgaattaataaagagacccaatgtcagccccaaagtgagagaacttttagagcaaattagtgcttttgacaacgttcccaggaaaaaggcaaaatttcagaattggatgaagaacagtttaaaagttcataatgaatccattctggaccaggtgtggaatatcttttctgaagcttccaacagcgaaccagtcaataaggaacaggatcaacggccactccacccagtggcaaatccacatgcagaaatctccaccaaggttccagcctccaaagtgaaagacgccgtggaacagcaaggggaggtgaagaagaataaaagagaaagaaaggaagaacggcagaagaaaaggaaaagagaaaagaaagaactgaaagttagaaaaccaccagggaaaactccaagggattcagaagcctaagaagcgcaaaaagggacaggaggctgaccttgaggctggtggggaggaagtccctgaggccaatggctctgcagggaagaggagcaagaagaagaagcagcgcaaggacagcgccagtgaggaagaggcacgcgtgggcgcagggaagaggaagcggaggcactcggaagttgaaacagattctaagaagaaaaagatgaagctcccagagcatcctgagggcggagaaccagaagacgatgaggctcctgcaaaaggtaaattcaactggaagggaactattaaagcaattctgaaacaggccccagacaatgaaataaccatcaaaaagctaaggaaaaaggttttagctcagtactacacagtgacagatgagcatcacagatccgaagaggaactcctggtcatctttaacaagaaaatcagcaagaaccctacctttaagttattaaaggacaaagtcaagcttgtgaaatgaacatttgtgtatttaaaaattgaatccattctgctgacttcttcctttcactgctgtttataaaatgtgtaatgaattctaacaactcaaattttgctttttgaagctgtatttttaagtnaagaaaatatatttttggtataacttttatgagaaaaataaaatatattctggtccaaacttctaaaaaaaaanataaaaaaaaaagggcggccgctcgcgatctagackagggatctttgtcacgtgggtttgttttctgtctccgtgcctccggcttcccaaagagatccaggtctttgcgtttccagggcgtggggaccccggccccctatgccgccacgccgccacaccgcctcaccctggcttctgtgctacttggcagttccatttcattatttattttttgtgctgctttttatcatgatataaattattgaaaacagatcacatgtgggcccgtgtctggccgccgccgccctgccccgtcctgcggccaccacctaatttattgccgtgcgtcctgctgctgtgactgcttttgtacctttgcaataaagaattttctggtttcagaaaaaaaaaaaaaaaaaaaaaaaaaaaa

SEQ ID NO: 237 - DNA, 1179 bp, Homo sapiens
acccacgcgtccgcccacgcgtccgcccacgcgtccgcccacgcgtccgggtggcatgtcggtcaggcacagcagggtcctgtgtccgcgctgagccgcgctctccctgctccagcaaggaccatgagggcgctggaggggccaggcctgtcgctgctgtgcctggtgttggcgctgcctgccctgctgccggtgccggctgtacgcggagtggcagaaacacccacctacccctggcgggacgcagagacaggggagcggctggtgtgcgcccagtgccccccaggcacctttgtgcagcggccgtgccgccgagacagccccacgacgtgtggcccgtgtccaccgcgccactacacgcagttctggaactacctggagcgctgccgctactgcaacgtcctctgcggggagcgtgaggaggaggcacgggcttgccacgccacccacaaccgtgcctgccgctgccgcaccggcttcttcgcgcacgctggtttctgcttggagcacgcatcgtgtccacctggtgccggcgtgattgccccgggcacccccagccagaacacgcagtgccagccgtgccccccaggcaccttctcagccagcagctccagctcagagcagtgccagccccaccgcaactgcacggccctgggcctggccctcaatgtgccaggctcttcctcccatgacaccctgtgcaccagctgcactggcttccccctcagcaccagggtaccaggagctgaggagtgtgagcgtgccgtcatcgactttgtggctttccaggacatctccatcaagaggctgcagcggctgctgcaggccctcgaggccccggagggctggggtccgacaccaagggcgggccgcgcggccttgcagctgaagctgcgtcggcggctcacggagctcctgggggcgcaggacggggcgctgctggtgcggctgctgcaggcgctgcgcgtggccaggatgcccgggctggagcggagcgtccgtgagcgcttcctccctgtgcactgatcctggccccctcttatttattctacatccttggcaccccacttgcactgaaagaggcttttttttaaatagaagaaatgaggtttcttaaagcttatttttataaagctttttcataaaaaaaaaaaaaaaaaaaaaaaaaaaaaaaaaaaa

SEQ ID NO: 238 - DNA, 1958 bp, Homo sapiens
  misc_feature (374)..(374): n equals a,t,g, or c
  misc_feature (377)..(377): n equals a,t,g, or c
  misc_feature (1244)..(1244): n equals a,t,g, or c
  misc_feature (1300)..(1300): n equals a,t,g, or c
  misc_feature (1311)..(1311): n equals a,t,g, or c
  misc_feature (1327)..(1327): n equals a,t,g, or c
aattcccgggtcgacccacgcgtccgcagctccctctctccctctggcccagtcccttccgcttgtgtccgggaagctgtgggcggtgatttaacatgactcacttgggggcataggcgctatgaagttcagtggctgggtgccaggtggcgccaatgacaccctttttctcagagcccgggctgaatggacacctccctcaaagccttccagacccagggttacggccgttcccagagacatgttcccgtgctgctgggcacacctgcagaggggagggaaggtcctgtgtttgctggtgctgctcgtcctctcacttcctaccgagcatcatgttgcaaacaaatgaccttggcaccaccgttttgcaaatngtnctttcttgggctttactttttggtctatgtgagcaaaatgaactgaagtcaaggtacgactcccaataacctgctgtgggatgagagggctttgtcattatgcatctgattagttatccacgcccagagctacactttctcgatgcttctcagctctgactctcacagggccagggagaaatttttgtgccccctaaatcatgtagttggatacaaaacattccctggaggcctaccattctcaaatccccgtgcagggctctgtggggtgcaacatgaaactcgctctaactccctacgtggaggacagacagacccatcctaactccaaagccagacacaagggacaaaggtaccaaaaaggtgcaaggtgcaagaatggacgacgctggtcttccaatttgctggaatatctgtgcggctagaatggtgtcttgtcagcatatatcaagcatcttgcccttgctctgtcctgcctggccacaaaggacactcagacaacaccggcctcataaatgctgcctggagaaaagcctagctaggtacggagggtcagggtatttcagaaaagagaaactgcttcagccaatgctcatgagatttaccagggaatagcaaacaagtctagtgcaagccagggttgggggagtgggagggtgattagcagagatcaatctagaaaggaggtcaaggttctgtaggtggggaaagagggtgcttgtgtattaaaacttgttttccagcagtttggagatttctcacagaactaaaaatagaactaccattcatcccagcaatcccattactaggtatatactcaaaggaaaacaaattgttctatcaaaaagacacctgtactcctatgtntatcgcagcactattcacaatagcaaagacatggagtaaacccaggtgcccatcancggtgaactgnataaagaaaatgtagncatatgcctaccatggaatactacgcagctgtaaagaggaaagaaatcatgtcctttgcaacaacatggatacagctggaggccattatgctaagtgaattaatgcagaaacagaaaactaaatatcacatgttcttatttgtaagcagaagctaaatattgggtgcacacaggcacaaagatgggagcaataaacactggggattccacaaagggagcaggcagagggaagggttgaaaaactacctatcaggtcctctgtgcactacttgtgagacagaatcattagaagcccaaacctcagcatcacacaatatacttatataacaaacctgcacattgacccctgaacctaaaaaaaaaaaaaaaaaaaaaaaaaaaaaaaaaaaaaaaaaaaaaaaggggggggggggggggaagaagtggggtgggacgacagtgaaatctagagtaaaatcaagctggcccaaggtgtcctgcaggctgtaatgcagtttaatcagagtgccatttttttttttgttcaaatgattttaattattggaatgcacaatttttttaatatgcaaataaaaagtttaaaaacttaaaaaaaaaaaaaaaaaaaaaaagggcggccgctctagaggat

SEQ ID NO: 239 - DNA, 1751 bp, Homo sapiens
  misc_feature (1741)..(1742): n equals a,t,g, or c
aattcccgggtcgacccacgcgtccgacaacttttctttagaaccacattattggtcataatccttgttactgtcatgaggattgttgcatgggttaaacacaaacacagactagcaatgcacttgaacaaacctggtggtctttggaaataaatcaccattagatttcacctggttatgctgcatcccataagttccaaatgaatcacctgcttatcctattaacgaagcatttaattcacacacaaatgcttgaatttcccctgtataaatgtagtcatgcgattcaacttttctaataagatttgtgaatgctgcatcatgatgaaaatgtggattaactgtgggttgcatgcctgttgttcatacttcagtgatggtcacacacaaaacaagatgagttttacttaggtgaaacattattaaactgtactaacaatacagaaacatattctctttgtcgctttttatcaccaaaactgaatggcaaatatgtcttgacattacttggatgaactgtggctagcaaaatggaattaacttagccactataattttttaaaacattaaagtttctaaattgtttttgggggccgagtaacgcagagtcaataaaggtggttatattgtaagcttttagatggtgcttaagaattcttatctttttaaatagcagtattttttttttaagaataaattgtaaggagcaaataaggcagaatgccactctaccctcaggtcaattttatggtatatgaaaatgccagtaatatttgtgccacttgccaactcgggggaggaggggcttttcccttactggatacttttgttatagtttgactatgtcattatgttgtttagagagcctccacaatgagaagttgccactgcagggctaactcgccttcagaaataatcagaatgattcaagggtcaaaccactttcatcccttaaaatatagggactaatatttctttttcttttttttaaaaaaaacatttcttctgtggcttagaaatgtgccagtgtgttcaaaacatttacaccaatttcaccagatttaggacctattaaaaattcaaacaagtttctttttttttttttttttctgtgtaacagggatttttaaataacggactatatgcattcttttgttatttcacacttcagttaaagtgataacaatggtaaactgtgatcattatcagactgactgaatgctttctgatttccagtgagtgatctagttctacgtattacacaggtgtaatatctgtgagtgtaaataactggaactgtacactgattaacatgacagtttctcttttgttgttcttatctgtactgtattatagtatgtgggtataaatatctacaagtatacacacatatgtacttgtattccactattgtaacctgaaagaaagactatgtattcccttttttaattccgtactggtatttgtgttatttaaaaagcaaaattctgctctatttagttgtataatattagaggatactttgctgtgcacaattccaagtgccttagaacattgtttagctttcctaagtatatataaatgcatatatgtataaaattgggaaaagttacctcaataaaatcattgggaaatcccaaaaaaaaaaaaaaaaaaaaaaaaaaaaaaaaaaaaaaaaaaaaaaaaaaaaaaaaaaaaaaaaaaaaaaaaaaaaaaaaaaaaaaaaaaaaaaaaaaaaaannaaaaagggc

SEQ ID NO: 240 - DNA, 2153 bp, Homo sapiens
ccattctaaggaagagcccttctttccaccccctttatttacttatttatttctctctctttatatcattatgaactcagggattcttaatttatgtacttattttgatgcttaaattgtcccatatgtggtctgtgagccacccttaacactggttcctttgctctttgatatgcctacatcatttttttagtacttttttgttttctagcaaaagttgtttgaagcttaccatactgtatttttttattgtggtaaaatatactttaacattcaagttacctttttaaagcgtgtggttcagtaacatccagtgcagttgttcctcagtatccacgggctgttggttccaggactcccacagatactaaaattcacactcaagtccgttattttatataagtgtgagatcttagataacctatgcatactctcccatatactgtaaataatctctagatgatttgtaatacctaacaaatgctgtgtaaatagttgttacactgtattgttaacagtacagtaacagacctgtctgttcagattcttcctggccttttaggggatcactgacaaaaaaacttagtgcatgttcagtacagacaaccatcctttttttgctttcgaatatttttgacctgagattggttgaatccatggctgtggaacccatggacacagaaggccagtggtacatttacagtgttacagagctgtcacccctgtcgattccagaatttttccatcattccattagcagctcctccccagcctgctctgctccggaccccggcagccactatctgcttcctgtctctgtggatttgtctacattagatagttcacagaaatggaatcacaatatgtgagcttttgtgtctggcttctttcacttagcgtgctgttttcaaagtccatccgtgctgcaccatacatgagcgctttattccatccatgctgtaccatacatgagcgctttattccatccatgctgtgccatacatcagcgctttattccatccatgctgtgccatacatcagcgctttattccatccatgctgtaccatacatgagcgctttattccatccgtgctgcaccatacatcagtgctttattccttttctggctgaataacatcacattgtatcgataggtcacatctggtttctccattcaccaaacattgggcatttgggttatttccaccttttggccgctgtgaataatgctgctatgaacatgggtgtacaagttttagtttgaacacctgcggtcacttattttggggtatatacctgggagtggaactgctgggtcatgcagtaacttgaagtttaagttactgaggaattgccggactgtttcccacagtggctgcagcagcttttattccagttagcaatcacgagagcttcccaccttctcacctacacctgtgatctgcctctttcgttgtagccatccctgtccatatgagctggtctctcatcttgccgtgatttgcatttccctgatgactgttgatgttgagcatcttttcatgtcctgattgaccatttgcgtatcttctttggagaaatgtctgttcacgtgctttgcctagtttttaaccgggctgtttatcttttgttattaagctataagagctctttatattccaaatgctagacccttaacagatctgtgatttgcaagtattttctcccattctgtgggctatctttttactttcttgatagtgtgcttctacaaaagtttttaattatggtaaaatcacatttattttctcttttgtaacttttggtgtcatgtctgagaaaccattgccaaatcaagatcacaaaaaattgacgaggccaggtgcagtgcctcacacctgtaatctcagaactttgggaagccaaagatcacttgagcccaggagttaggaacagcctagacgacatggtaaagccccgtctctacaaaaaatagacagattagccgcatgtcgtggtgtctgcctacagacccagccactcaggaggttgaggtggcaggattgcctgagtctgggaggttaaggctgcagtgagctgtgatggagccgctgtactccatcctgggcaacagagtgagatccgagaccgtgtctcaaaaaaaaaaaaaaaa

SEQ ID NO: 241 - DNA, 1360 bp, Homo sapiens
ccacgcgtccggaggggcagagcctgcgcagggcaggagcagctggcccactggcggcccgcaacactccgtctcaccctctgggcccactgcatctagaggagggccgtctgtgaggccactacccctccagcaactgggaggtgggactgtcagaagctggcccagggtggtggtcagctgggtcagggacctacggcacctgctggaccacctcgccttctccatcgaagcagggaagtgggagcctcgagccctcgggtggaagctgaccccaagccacccttcacctggacaggatgagagtgtcaggtgtgcttcgcctcctggccctcatctttgccatagtcacgacatggatgtttattcgaagctacatgagcttcagcatgaaaaccatccgtctgccacgctggctggcctcgcccaccaaggagatccaggttaaaaagtacaagtgtggcctcatcaagccctgcccagccaactactttgcgtttaaaatctgcagtggggccgcaacgtcgtgggccctactatgtgctttgaagaccgcatgatcatgagtcctgtgaaaaacaatgtgggcagaggcctaaacatcgcctggtgaatggaaccacgggagctgtgctgggacagaaggcatttgacatgtactctggagatgttatgcacctagtgaaattccttaaagaaattccggggggtgcactggtgctggtggctcctacgacgatccagggaccaaaatgaacgatgaaagcaggaaactctttctgacttggggagttcctacgcaaaacaactgggcttccgggacagctgggtcttcataggagccaaagacctcaggggtaaaagcccctttgagcagttcttaaagaacagcccagacacaaacaaatacgagggatggccagagctgctggagatggagggctgcatgcccccgaagccattttagggtggctgtggctcttcctcagccaggggcctgaaaaagctcctgcctgacttaggagtcagagcccggcaggggctgaggaggaggagcagggggtgctgcgtggaaggtgctgcaggtccttgccccttgtgtcgcccctttcctcctcggaaacaaaaccctcccacagcmcatctacccggaagcccaccctcaaagggtccttttggaaccacctgtttgtggaaaaaatggggtccttttgtcagggacttctgacggctggtcctgaggaaggccaaactgcccagattgagcccaattaaattttatttttctggttttgaataccaaaaaaaaaaaaaaaaaaaaaaaaaaaaaaaaaaaaaaaaaaaaaaaaaaaaaaaaaaa

SEQ ID NO: 242 - DNA, 1986 bp, Homo sapiens
  misc_feature (6)..(6): n equals a,t,g, or c
ggcacnagcgccgccgggccgcagcatggggcgcttccgcgggggcctgcggtgcatcaagtacctgctgcttggcttcaacctgctcttctggctggctggatcggccgtcattgcttttggactatggtttcggttcggaggtgccataaaggagttatcatcagaggacaagtccccagagtatttctatgtggggctgtatgttctggttggagccggggccctgatgatggccgtggggttcttcggatgctgcggagccatgcgggagtcgcaatgtgtgcttggatcattttttacctgcctcctggtgatatttgctgctgaagtaaccactggagtatttgcttttataggcaagggggtagctatccgacatgttcagaccatgtatgaagaggcttacaatgattaccttaaagacaggggaaaaggcaatgggacactcatcaccttccactcaacatttcagtgctgtggaaaagaaagctccgaacaggtccaacctacatgcccaaaggagcttctaggacacaagaattgcatcgatgaaattgagaccataatcagtgttaagctccagctcattggaattgtcggtattggaattgcaggtctgacgatctttggcatgatattcagcatggtcctctgctgtgcgatacgaaactcacgagatgtgatatgaagctacttctacatgaaaattgcaatctaaagctttcataccaaatgtcacaggagctgtctcccagctcatttttaacactgaaatgacattaggatctaaaataatttgctgtcaattgtacatttgcatgagtacgtatgtttggctcattactggtttaccccttgagtgaatgcctgtttatgatgactgagagcatattcatgtgtgatctgcgtgtttctggaatatgctttataccgtaatgaaatctgtttgctgggaattcctgattcttggtatataagaagaacaacctatttcgctcccagaaaaaaaagatcaaagagctttcagaaactttgagaacttggctatttagaaaaagtgataatgggtcaagtttctcagactgtagccattgaaaattagatgcagagaattcagagatttcttcttaatggaagtaataagctgtaagaattgagagatcacaatggagtgttaaaactgactgtgtctaagttgggtgtaagggtttcctgggtttttttatatacatgctctccccagaatacagtaaaccacagttttagaactaaacacatctgtaaaactaaatatagcatggaaaatccaatttgaataagtcatgctttcctagaatttaaaaataaaaaagtcttcctctggaaagagaagtcacacagacaatcatgtgccctataaaagtgagtgtttataggactaaaaaacttttaacaactttttaaggaaatatttttgttcttatacaaaaacatgtaaatattgctttattactttcattttctgaccctgctgtaaactactgcaaccctcacatcctcaaagggacttttatgtcaaactcttctgtttctccaaatataaggaaaaaagactaaagcaagagatctggcagttgaaaattgtgggaaagagaatttgtatgggcactgtatctatgaaatacctcataacttacgtttacatgttttcctaactttttgtatttttcttggatagccacctagagaattcttcatagattaagaactacagttttcaccacttaacataagtaaaacaaagtccttcataatttaaccattagcatctttggccaaacccaaataaagaaaagcatcttctcctagttgtgtgtgggcaacagaaacaagttaaggaaaccaaaatacttatatatacacaggaccaaaataatgttctttttatgcaaatcccctgtggaaataaaattttcaatgtttaaaaaaaaaaaaaaaaaaaaa

SEQ ID NO: 243 - DNA, 705 bp, Homo sapiens
  misc_feature (108)..(108): n equals a,t,g, or c
  misc_feature (680)..(680): n equals a,t,g, or c
  misc_feature (696)..(696): n equals a,t,g, or c
ggattacatgtagttattgagaatcctttcgtaattcagtggcttaatcatgtaatgtctaaatattgttgtacattaggatgtatacatgtaaattaaagttacatntgtttagcatagacaagcttaacattgtagatgtttctcttcaaaaatcatcttaaacatttgcatttggaattgtgttaaatagaatgtgtgaacactgtattagtaaacttcatcacctttctacttccttatagtttgaacttttcagtttttgtagttcccaaacagttgctcaatttagagcaaattaatttaacacctgccaaaaaaaggctgctgttggcttatcagttgtctttaaattcaaatgctcatgtgacttttatcacatcaaaaaatatttcattaatgattcacctttagctctgaaaattaccgcgtttagtaattatagtgggcttataaaaacatgcaactctttttgatagttatttgagaattttggtgaaaaatatttagctgagggcagtatagaacttataaaccaatatattgatatttttaaaacatttttacatataagtaaactgccatctttgagcataactacatttaaaaataaagctgcatatttttaaaaaaaaaaaaaaaaaaaaaaaaaaaaaaaaaaaaaaaaaargggggggggncccccaaaaaaacccnttttttttt

SEQ ID NO: 244 - DNA, 838 bp, Homo sapiens
  misc_feature (32)..(32): n equals a,t,g, or c
  misc_feature (51)..(51): n equals a,t,g, or c
  misc_feature (822)..(822): n equals a,t,g, or c
  misc_feature (832)..(832): n equals a,t,g, or c
taaacccgaagtgccaaataataatttaaaanatgttaatttttttggccncctaaatttgccctttccatccattaaaaatgtccaagttccaagtgatatgtgcccctaatatccaccttggatgttggtgggtttttgaatttttgggtggttaatccagttttattttgaaaagacgtacttgaatagttacagcatatgtttgaacaggaagtaggaacatgcatacacgaagaaatgctaacggaaggatttgttatgtttaggatcttcccttggaaactaaaaatagaatattaatgacattactgtttgtagaatgacatatgcagattttctcataagcagtcattgtgtttgccagtaatgtttgagagacatgtaagttgaaagttttgctaaattataaagctcctttaattcgttggttttgattctcttattctcttgtcttttctaaatgttaacaaaatatatcttaacagattacatgaaatttaggaattatttaaaagttaccattagctctaaaattaagattcggatgctttatttatagtaactgaagctaataatgttttatgttttgattttttgaaatttaattgtagaagtcactgccttctgagttttcaaatagataaccacctttaatattacactgcttataatactaatgtttacagatatgtttctgtttataaccatataatacattggctttgtcatattagttttttttgcaagtagttatgtaaaagagatagataataaaatattaaataacaaaaaaaaaaraaaargctcgagtaarggcanagtggcatgngccata

SEQ ID NO: 245 - DNA, 1410 bp, Homo sapiens
ccacgcgtccggtccctaggagataagagtatcttgcacagcaggtgcaggtttcccagcagctcaggcaagagtccgatgtttgtgccatctgatcctgatgtctggagagatagccatgtgtgagcctgaatttggcaatgacaaggccagggagccgagcgtgggtggcaggtggcgagtgtcctggtacgaacggtttgtgcagccatgtctggtcgaactgctgggctctgctctcttcatcttcatcgggtgcctgtcggtcattgagaatgggacggacactgggctgctgcagccggccctggcccacgggctggctttggggctcgtgattgccacgctggggaatatcagtggtggacacttcaaccctgcggtgtccctggcagccatgctgatcggaggcctcaacctggtgatgctcctcccgtactgggtctcacagctgctcggggggatgctcggggctgccttggccaaggcggtgagtcctgaggagaggttctggaatgcatctggggcggcctttgtgacagtccaggagcaggggcaggtggcaggggcgttggtggcagagatcatcctgacgacgctgctggccctggctgtatgcatgggtgccatcaatgagaagacaaagggccctctggccccgttctccatcggctttgccgtcaccgtggatatcctggctgggggccctgtgtctggaggctgcatgaatcccgcccgtgcttttggacctgcggtggtggccaaccactggaacttccactggatctactggctgggcccactcctggctggcctgcttgttggactgctcattaggtgcttcattggagatgggaagacccgcctcatcctgaaggctcagtgaagcagagctcgtgggattcctgctgctccaggtgtcctcagctcacctgtcccagactgaggacaggggagttcctgcatttcctgccagggcagaggcccagaggagcgaccccctgcttccactgcttgggcctgctttctcagatagactgactgctgaggaggctctaggttcttggaattcctttgtgctcatcagagaccccagcctggggaacacgctgcccgcactgcccagagagcagtgcaaacaccacaacacgagcgtgtttcttgagaggaatgtccccgagttggacaaggaggctgtttctgcacatcagctcatttcccgcaccccatttcttgcttgattgctttgttgggggcctggccacttccttgcttctcaagctgacaattctcactttgcaataaatagtccagtgtttccttccaaaaaaaaaaaaaaaaaaaaaaaaaaaaaaaaaaaaaaaaaaaaaaaaaaaaaaaaaaaaaaaaaaaaaaaaaaaaaaaaaaaaa

SEQ ID NO: 246 - DNA, 422 bp, Homo sapiens
aaactatttagtctgtaacagagccatatgctgcagggctaactcacagtagaaatgggcaatttcgacgcgctgtttatctttacccagcttcaccaggcgttcggcaacatcaattgctttctgccactcactggtagcctggtagatttgtagcaactgttgcagcgcgccaatgcggaagtcagtttcatcggtcagctgattgaacatgtcttccgcgcggtcatataacccggcggccatgtaatcacgccccagttgttgaatcgccaacagacgctgttcataggtcagcgaggcgctttccattagggtctgatggatgcgaatagcgcggttcaacttcgccacggaacgggaacaggttttccgagcgtaaggtgggcttcaacggtgcccgttattcctgttttaagcat

SEQ ID NO: 247 - DNA, 351 bp, Homo sapiens
  misc_feature (253)..(253): n equals a,t,g, or c
  misc_feature (322)..(322): n equals a,t,g, or c
ctgtccctgcactccgtggcggaaggcggctagagcggctccctctgagctctccgagagattggtcgggacctgaagcgttgaggttaagggcaaggcaaggagcaacgaggagtttttcgttacgttagaaaaatttcgttgcgtgctgaaagcgcttttacctgtgttgtatgatttaaccttatgaaaatggacagtatttccagttttacaagtgaggaaagaagattaagaaacttgcctccgccangcgtggtggttcactccctgtaatcccagcactttcggcggccgaagcaagcggatcacttgaggtcangagttcgaagaccagcctgggccaaacat

SEQ ID NO: 248 - DNA, 2682 bp, Homo sapiens
  misc_feature (2036)..(2036): n equals a,t,g, or c
ttttttttttttttttttttttcaacattgaagtaattatttaatgacacaggaaaataacatgttatgaaacaagctggttacaagtagtaggtagatgacttaatttttgataaaaaaattaaaaagcatraacatgcatataaaaattagattatgtacaaaataccaacagtatttacttctgctcagtaattaaatattcttccctttgtttttgtcttttaaaaaacattatttctgaaaaaaaaaatcagaaaaacatgatcgtggagagaattattaaacaccaggaattaggaacccaagaagctaagccaggagctcagcagtcaaggttggaagtccaggacaggtccgaccagggtgatggtggccaagcccagaaatggaagattgttcttttcttttcctactggaatgttctttaccagttttctctatattcgatgttagcacacttatttaatgggatcctatgattaactggcacaacagcaaaatgatgctagcaactttggctttgaactgctacaaaatgtactatcttgtagttatatactgtacaaaacacactagaaatcaagtgctcctacaacgaaaaactcatctgactaaatcactgattttgctgtttttttttctaactttgttcattttcaatcttcacagcaaatgtattttttgtttcagggcctggaagaggtatttttttctcagaaagaagctaacattaatgtgtgctgggcaccgtctgacagcttggctctaactccaagtaagttgcccttgtcttctaagtactctacagagtgcaaaggcttaccaaatccaaaccaccttgaattaaacaaatcttaatgaggagcatcatcgttctttgtatgaaagtctttgttatgttaccaaatgaagaaatgcagtacattacacctctattgatgtaaatgaggctcaaacatctcaattccatcctcttcctaccccccagccatcaaacgttataactgcttagtgacactttattcaaattacaacccatagtttttgctccaaaaaatgcaacacctgagaaaggcctgttgctttaaaatcaagaatctataaaagcaatgccaccctaatcttaaggtgcttcttaggtatttcccaaagctctttgctcttttatactgcagcattttcaggaggagtcattagatactgtcaaggtccaagaaataactaaaaacaaaaaataacctgagactcttttctgcaccgccaccagctgcccagtacactaggtcaccttttacagcagtgagcacagcaatccatgccacaaaaatcttcacaaaacaagaaggaaaggtacaaaaagaattatattaaaatggtaacatacacttgtatgagggagggatatttaaaattaaaatattatcatcacaagaaacaccagatattccttgctctgcccttgggcaaccaagaaacttaaagcctgttttatatcccagaaataaaagagagacgtgatagaagtaacagtgctcagtgcttgcaacccaagtcaatttatactcttgttaggtaagtccaaattctaaagtctacaaaaatcctgttaaatcaaggggaaaaaaaattcattttaggacaaagttattcaagatgaaaggaaggcatgtgttcagtgagagaactgcctgctgtcagatgatttcttgctaatgtgtttaaagattttggatttctcaactttcttggttttctggtagccaaatccaccaccacctcctcgctttttctgcttgccttcattactgttgacgttcagatcaacgaagggaggcaccttgaaaccaaatgacagagcaacctgaggcaaatttaggttattaacattaaagatctgtttcagagaatgggaatcataggctcgtatgtatgacttatatgcttcctgggctgacttatgaagaaagtaattcttttcaatcaatttctcaagctgagactgaatgtcagaaattttagaccaggaaaagtcnaaattcacttaatggaaccttggattgtttcaagtaacgaagaaaacccaattcttctgggcgcaaaatgagcaaggcatgccctctcccatttargcctctggctgttctacccacacgatgaatatattccttagggtcatccggagggtcatactgaacaatccagtcgacttcaggaatgtctagtcctctcgctgccacatccgtacacaatagtgttcccgaatctgcattgcagaactggaagaatgtggttgtacgcttattttgcttttgctttccatgaatggccaagacgggcaaatcaatgtagttcagcaactcatagtggtatttcacagacatacaagatgaaaagaagaccataagcttcttctttcggttcttctgttcaagaccatccactgttgcattcgctttatcatcatcaacgccaacatacaatggctcctttttcagagaaatccttgccaggtcttcaacttttcgagtttgggtggcagaaaagagcatagtctgtctacgtgttggcaaaagtttaataatttgctttaattcctcttcaaaccccacatcaaagatacgatcagcttcatcaataaccagacactgcaggtttttatacataaatcctggggtattc

SEQ ID NO: 249 - DNA, 2254 bp, Homo sapiens
gataatatttaatgttgttctgcacatctctatacagttaactttttggctttcattctgtatagataagaaaatgttatattataaacagcctactcagtgcaaatatttatctgtttatcaaatccacaatatgctgtataataccggttttactatataatctattttagacatagctgtttagaactagagtgtgctatttttgtgtttttctgatgtgtggtgctagacaagttacttttgtgaacaacaaaaattatcccttttattcctagacaataccacctttgggtcttgttaatttcactgagtataactatatatttgtatatatatacatatatatatatatctacctatgcccaactggcagctgtatcagagtgctggatttgggacatgcttttctctttaaatacataatatcattatataaattattctagagtgtatttaattaggataaaattacttccttagtatggatatttgacatctatagggtgaatttgtttataaatatggctatatggaaacttattagcatttactttatgtttgctacttggctttacagcatatctcctaagctgaaaaataatttgccaggccttcaagatcctaaagaaacttgtttaatggagtaatatacttttttttcttattaaggaattgtattactggcacctaacacagttgtattcttagctcctattatagataatgggcatttacataaaatatcctagatggcttgatggcagaataaacctttcccctcctacctgagtcatgagaaggatggagacgtcctctgccataacatgggccataaagcaaattcgacatgggatgttctgtttcagtatgacctcaaccagttccatgaactgagtgaaggaccttcattttcaaagttatttaataagtagcttaattaagcctttctacccattctcccaagatctattggcattattgaaaagcaaagtttatcaaatatctaactaaggatgtagttaaccttattaaatattgattagaattgttctgtaatattactgaatttgtaagatctttagcaaagatttttgagcaatttataaatgtagagcaaatgtttctgtttactgcactttttgtaactgaaggtgataaattctcaagccatgattattggcttccatgcactgcaatatttatccacaattctagacattttccatttttgtggaagagttgctgttaccttaattataaatgcaattgtgtggttaatgagagctaatgctagtagttaaccttttaaagtggattggctacagttgagggagaaatctcttttaatataaatcacatcattccttaactgcctctcttggaaagagattgaaaccttttttttaaagcacgatttagcatcctaagcttcctgagggtagagattgtatctttttgcgtctgcacaatggctagcacatgtcagcatttgacaattgttaaatgataacaagtgtgccccaattaaaacgtttttcctgggttgttttgttaaatttacaaagtaagccaagccttacggttaacattctcctctacaaccaagtattaaagccacatttaaaaagaccacatgaaatgctgattctaattgtgtgtaggtcttgaggattaagcacacaaatttcacaaacttctgtttgagtaaacaaactcagccttctgtaaatatacatgcaagtttggaaacagtaatactgtacctataaatatatgctgtctgttttgtgtacagtatgtaaaaactccttttctgccacactaaaaatgcaagccatttatgggaatcctaaaactagtattgaactaaaactttgctaatgatctttattagaggatcgtccaacttttcacttaccytgggttttcttttcaattcactcttacactagtctgcttatttccagctgtttattttattgagtcctgaatttaaaaaaaaaatattttgattcattttgtaaatacaagctgtacaaaaaagagagatttaatgttgtcttttaaatactccaattttcattctaatatgaatgttgttatattgtacttagaaactgtacctttaatattacattacctttattaaaagtgcattgaacacatcaattttagatgtgctttatgtactgttatcctataataaaacttcagcttctaatggaaaaaaaaaaaaaaaaaaaaactcgag

SEQ ID NO: 250 - DNA, 1057 bp, Homo sapiens
  misc_feature (958)..(958): n equals a,t,g, or c
  misc_feature (966)..(966): n equals a,t,g, or c
  misc_feature (1035)..(1035): n equals a,t,g, or c
  misc_feature (1053)..(1053): n equals a,t,g, or c
ttaactcaaactctaaagtcttgagtgtttcaaagtcagtcgttacctgtttaaaagcctcagcctttagcttattcctccttcaatacacgggacctttggttaatttggggcaggaaaactcttaaagtaatctctcttgggcagaggccttattgcaccagagggaaaaagtatatacttcatttgctgttactccagttatgccttaaattcatttgcttggtaatcctatcaacgrgcactaacttcttagtatactttaaacacttagttgggtaacactgagattttgttgtcctttattttttgctgagatggagtcagtcagatgttagtcatagctaacaccgaatttgtgttgtcatttagacagttactgattcgatctgctttatatatgagaacgtatttttaactattccaagaaggaagaggtagctaaatgtaatcccctcttcctatccccccagaaaactgaactgtaagttctaggtagactaattgggagcagacacggagttttagatgccttagccaaacccagcagaaacctttcacacagccactcatcgtaagaaacgcagatttttctcttctcatgcttgtctctggttccctgcatttgtagtgacagaactttcactagcaggatataaagaaagtaattatgcttggagtccctctttactgggtttgagttaggtgcataacatggaaaggagtggtgccttcaaatgaatgtgaccactccgtattgtggagtgacttccctagggcatcctatacatcctaccacagaaggccaagggacagagcaccaacttcagtatccaagaaattagatccacaactcttgattttccacactgaggactgtcgcgagtaagttgtaagtttgccgtcttccttctggcttagcaggtgctgcagctgtactctcgactcctgtctgtgnagcgtganyagggaaaatgaggagtggagtctatttccaaaaaaaaatgtggatggagttttttccttaaagtggcnttcattggcccaattccntttt

SEQ ID NO: 251 - DNA, 498 bp, Homo sapiens
  misc_feature (493)..(493): n equals a,t,g, or c
  misc_feature (496)..(498): n equals a,t,g, or c
gagttgatcctgagatgaaggtggagcgttacaagcgcacctttgaccaaaatgaggagctagggctcaatgacatgaagacagagggctatgaggcaggcctggctccgcaacggtagcagtgggtggctcaagggccagcctccagcgctgctctttctgtaggttatttattagtattggatgaaggcgaaggctgggagtgtctttcccaccagcccttgcccatggtggggaggacatctggtctgagtcagagatctgtgcacactttctaaacagcttgtgatgcaagtgtgagcctattgtgttacttgaccttattttggaagttttgaattggcctaggaggaaacccagaaatgaaccaggggtatgtcatcacttttttcatatcaagtcctcaccctccttccacataatgctctatcctctaargttggaactctgaarttggagaargtggaataaagttacacctggaaaaaaaaanaannn

SEQ ID NO: 252 - DNA, 1784 bp, Homo sapiens
  misc_feature (8)..(8): n equals a,t,g, or c
  misc_feature (46)..(46): n equals a,t,g, or c
cttctggncacctctttaagttaaccttaaacccaggcaaaaatcnttccaaagatctcccagggtcctggccagcttaaatccagggtcagttgtgctttcaaatgagtggattcatgtgcagggaggtgtagctcttcccctcctgaactctggtcagggaaagggtagttcaggcttcaagttggcagttgggagttgaggktgcggcctgcagtggcagggtgtggcaggttctgtttctgagcaggagttggcagccagataaggtgggacaggtggaactcctggaagtctctatcctggctgggagtttggaaagagtggattaggatagtcttaaattttctataaaatgacagtctttgaggcagttaggggaagcagtggttattactccagtggacagtgatagaggcctttttctctatgtgccataatgggaaatgggtgggaagagcctctaaggcagagtttaagtgaaactactggtagtgagtcttaggagtaagtatatttagttggttatattcagtatttttaatttagtaggatagaatatatcagattgcattattttaatttgccaattaaaagtatgactgggacactgtaaaatgtactatttttaatgggtgtgcatgtcaggattttctttagaaatacactggtctggtctaatttatttaagcaggagcactttaaagtatcccaccctaccccattccacccccagtggacagaaaggaaattgactgacttgaggggatgcagacatctgggttattccaacagaccagtggttaggaggagggggtgggtagcattatggcctcgggcaggcccccccaccctgagcctctgaaagctgactttatctgtaagagggaggtcaggctcgccttctcaatagcgtgtatttggatgagatgagtttcttctggagtacacttaggcagagcagggctggcttagggctggagcctcagcgtttcacaacttctcaccttctcttccatgtcagtcagaatggcatccagctttgccaccacctgccgtgcattgtccaggctgaagcacattgggggcttaaacttcaggatkttcctcccagggccatcagtgctcagcaaaacgtagttctccttcagccttgataccaagtagrcagcctcttcagttgctggtgtccttgtggcctcatctttgatcagatccacaccaatgaagagcccaacacccctgacatccccgacgatgggatgtttgattttttgctgcccgaggagctgcatcaggaagctgcctacactggtggcatgatcctggrgctgctccttctccaagacattcaggacggccagccccacagcgcaggacactgggctgcccccaaacgtgttgaagtactcaacccggtggcttcaaatgccctcgccacaggctgggttgcggccacgcaggcaacagggtggccgttgccaatggacttgcccatggtgacgatgtcagggacgaagtcttttccctggagctggaaggcccagaagtgcttgcctacccggccaaagccaacctggatctcatckgcaacaaagacccctccggccttgcggatgtgctctgccacttgggagaagtagccagcagggggaatgatctgccctcccacactgggcagagactcagcgaagaaggctgcaatcttcctgcccttctcctgtgcactgctgaccacacgtttcacctcgttggcataggccatagctgggttggctcgtgcc

SEQ ID NO: 253 - DNA, 936 bp, Homo sapiens
  misc_feature (840)..(840): n equals a,t,g, or c
  misc_feature (854)..(854): n equals a,t,g, or c
  misc_feature (865)..(865): n equals a,t,g, or c
  misc_feature (905)..(905): n equals a,t,g, or c
catatgtttgcttgggatagaggtcaaagaggatcctctggcatgttttgctgggttcctgtagtcatttcaacaggattaactataatctataattgatagattattgagtgacacacagcgtgatgctgggcaggccccaagctgaaaagcatctcctccaacttactttattcttagcaattcattcctttggtttgaaaattcttcagcatcttcaagagtcctttactaatgsatcctttgggggagttgtgctaaattatcaactcacaaggatgagatkgctggctctagggagccagcctgccaacatggatgggctgtcccaggstctcaagtgagctcaggtctgtacactgcactccrgggagagtaaatgtgcctggggcatagaatggagactttggagtttggagtttggagtgggtttggggacatcagcttctctcttccagttagtctgataagtcctttgttgcctggccctggaaaccacttgtsctccgaaaatgccattctctggaatgtagctgtggagtagggagagagttggcccctgtgttctgtaacccaagcaagtactgtctcactgccatcttggggcagactccgcagtaaggagaatctctcttgcctttttgtgtttcttggtttcttcctttgtaaatacaaggcatagtctctgcccttcccccagattgccagaagagtgggatatattgttctagcaatataaagctctgaggcctttctgcaggactgtagacaccactttgctgtgatagtgaagaatgtgggggagtgttgtgagggctaggcgaagcggcccggccttgncccattgacagctncagtcttcctnccctcataacttttttaacctaacagaggatttaaaaaanaaaaacaattttagctggggcacaatggctc

SEQ ID NO: 254 - DNA, 1381 bp, Homo sapiens
  misc_feature (23)..(24): n equals a,t,g, or c
  misc_feature (32)..(34): n equals a,t,g, or c
ggggggaaatkgggaccggggcnncccccccnnntttttttttttttttttgtataaaaacggcatattctttattttgcatactttaatttcagaacaaaatgaagaaaataaaataaaccacaatacacaacatccaatcctgctgtcaagagtagagagggaatggggcttgacacccttagtttactgccttcaacacaaggacaggagagggaaaaaaacactagacaccagcagggggagccaggtgggacaggggcactcgaggctgcagtgggagcccatggggacactatacaagggcacaagttttccaactatgaactcctaacctaatcgacttcttccatgcgagacgcatcctcatcgccctcgagaggggggatctcatcaggaactgcagcattgggttcctctgctgccacttcatcttcatcaatacctagacctagcttgatcatgcgatagatgcggttggagtgggtctggggatcctcaagggaaaagccagaagatagcagggcggtttcaaacagcagcaccaccaggtccttaactgccttatcattcttgtcggcctcagccttctgccgcagcgtctccacaatggggtggtcagggttgatctccaggtgctttttggccatcatatagcccatggtggagttgtcccgaagtgcctgggctttcatgatccgctccatattggctgtccagccgtaggtgctggtcacaatgcagcaaggtgaagacacaagtctattggagattgtcaccttctcaaccttcttatctaagatttctttcatgagcttgcagaggttctcaaactttgccttgctctcttccatcttcttcttctcctcctcatcctcaggcagctccagaccctccttggtaactgagaccaggctcttcccatcaaattccttgagctgctgcacacagtactcgtcaatgggctcggtcatatataccacctcgaagccccgtttccgcactcgctccacaaaagctgagttggccacctgctctttgctctcaccagtgatgtaatagatggacttctgtgtctccttcatgcgagaaacatactctgacagagatgtcatctcatctccagactgggaggtatgatagcgcagcagctcagacaggcggcggcggttagtggagtcttcgtggattccaagcttgagatttttagagaatgcctcatagaatttcttgtaattctccttgtcttctgccagctcagagaagagctcaaggcacttcttaacaatgtttttgcgaatgactttcaagattttgctctgctggagcatttctcgggagatgttcaggggcagatcctcagagtcaaccacaccacgga

SEQ ID NO: 255 - DNA, 779 bp, Homo sapiens
  misc_feature (10)..(10): n equals a,t,g, or c
  misc_feature (39)..(39): n equals a,t,g, or c
  misc_feature (41)..(41): n equals a,t,g, or c
  misc_feature (650)..(650): n equals a,t,g, or c
  misc_feature (669)..(669): n equals a,t,g, or c
cttttccttncaggtggaaaggaccccttggtacccatncncaagcagttaggaaaggacctggctctttacatatattggatggtcctcatggcaaaacttctcaattccttaattagtcatgtctcagcttcaaggatatcagacaggaatgaaacacacttgaaaatgagattgacctggagattttttttccctaatctctcataccttaattggaaaaataatcaattaattctatgttaattaggrtatacaaagttcaccctccttgmaagtgactagggcaagccctgaagatcttcctcacctccttttatctttctataaccttgtctcctccagcaccacagggaagacaatcacagtgggtcaagagcgaccctctttcacgtgggctctgcatgacctctgagacctgcttatgatcagtgcaatgaagttagaagtaactgatgattgggagcctttgcagatagctgggcaaatgggtgatttacttatccccattctaaatggagtgagctctctttgaggctaagcaaggaggcgttgtatgctagtttctagactttgcctggagacccctttggaaatctgtcttctttttaaactcacttaatatgccttaatcatctgkgtgtaatggnagtcatccgctcctcaatntaaccctyctmccctggggctttggctgtcctcaatgagagtttcatgcagaatggaaaatcctctatatgtacaatctctctccccctcatttctcttcctcctcacct

SEQ ID NO: 256 - DNA, 1231 bp, Homo sapiens
  misc_feature (795)..(795): n equals a,t,g, or c
  misc_feature (1219)..(1219): n equals a,t,g, or c
  misc_feature (1229)..(1231): n equals a,t,g, or c
ccacgcgtccggaagaaggcctaattcctaacctgggacccagagagagacataagatatccagagagatatgcaccaagaaactgcaatttatacaaagacagtcagaaagcagctgaagacagaatgagagagaaactaagtaaaagaaacttgatgcctccaaaatgaagagtatgcctcatttccatatgtgaactgaaaagctctccacttttgaaataaaggcttactatagagcagccctggtaatagaactacaagacttataataacttcctgtttgagttgaaatgaaaactcataaagaatctatgctattaaccccctaatttatacttttgtattcttttatgttgtattttgtattttatgttggacttcttttttaaaattttgtatttatttttaattgaaaaataattgtgtatacttattgttgtacaacatgatgttttgatatatgtatatgttgtagaatgactaaatcaagctagttaacatatgcattacctcctatacttatcatttatttgtggtgagaacatttaaaatctactctgttagcaattttgaagtatagaatacactatgtcaactataatcatggtgttgtacagtaggtctaaatgtattcatttctcctatctaactgaaaatttgtatcttttgaccaacatctccctggtccctccatctcctcccctggtaactaccattatttttttttcttttttttaaaaaaaagcttttagtttcgagggtacacgtgtaggtttgttatatagataaacncaagtcatgggactgtgttgtacagattattttgtcgtccacgtactaagcctagtgcccaatagttattttttctgctcttctccctcctcctaccctctgccatcaagttggcctaatgtctattgttcccttctttgtaacaaccactctaatctctgcttctaagggttcctatgtctgacttctttcccttgattttgtgagattcatccacgttgtgtatgcagcagtagtttatttattttcattattggatagtattcctttgtgtgaacataaattgctgatggcagatgtttgaattgtttccagtttttgagtattatgaataatgctgttgtgaacaaaaaaaaaaaaaaaaaaaaaaaagggcggccgctctagaggatccaagcttgcgtacgcgtgcatgaaacgtcanaagggtcttnnn

SEQ ID NO: 257 - DNA, 851 bp, Homo sapiens
  misc_feature (817)..(817): n equals a,t,g, or c
  misc_feature (834)..(834): n equals a,t,g, or c
  misc_feature (842)..(842): n equals a,t,g, or c
  misc_feature (844)..(844): n equals a,t,g, or c
  misc_feature (849)..(849): n equals a,t,g, or c
gcggacgcgtgggcgtggatcggctggagcggggccgccgccggctgcagcaggagctggacgacgccaccatggacctggagcagcagcggcagcttgtgagcaccctggagaagaagcagcgcaagtttgaccagcttctggcagaggagaaggcagctgtacttcgggcagtggaggaacgtgagcgggccgaggcagagggccgggagcgtgaggctcgggccctgtcactgacacgggcactggaggargagcaggaggcacgtgaggagctggagcggcagaaccgggccctgcggctgagctggaggcactgctgagcagcaaggatgacgtcggcaagagcgtgcatgarctggaacgagcctgccgggtagcagaacaggcagccaatgatctgcgagcacaggtgacagaactggaggatgagctgacagcggccgaggatgccaagctgcgtctggaggtgactgtgcaggctctcaagactcagcatgagcgtgacctgcagggccgtgatgaggctggtgaagagaggcggaggcagctggccaagcagctgagagatgcagaggtggagcgggatgaggagcggaagcagcgcactctggccgtggctgcccgcaagaagctggagggagagctggaggagctgaaggctcagatggcctctgccggccagggcaaggaggaggcggtgaagcagcttcgcaagatgcaggcccagatgaaggagctatggcgggaggtggaggagacacgcaccttccgggaggagatcttctcccagaatcgggaaagtgaaaagcgcctnaagggcctgaagctgangtgctgcngntgcanga

SEQ ID NO: 258 - DNA, 1802 bp, Homo sapiens
  misc_feature (1680)..(1680): n equals a,t,g, or c
  misc_feature (1747)..(1747): n equals a,t,g, or c
  misc_feature (1757)..(1757): n equals a,t,g, or c
  misc_feature (1800)..(1800): n equals a,t,g, or c
acgcgtccgcttccatctgctctggaattaaatatgcatttcaggtgattggagagctacattcccaactcgatggatccgaagtactgctgctgactgatggggaggataacactgcaagttcttgtattgatgaagtgaaacaaagtggggccattgttcattttattgctttgggaagagctgctgatgaagcagtaatagagatgagcaagataacaggaggaagtcatttttatgtttcagatgaagctcagaacaatggcctcattgatgcttttggggctyttacatcaggaaatactgatctctccsagaagtcccttcagctcgaaagtaagggattaacactgaatagtaatgcctggatgaacgacactgtcataattgatagtacagtgggaaaggacacgttctttctcatcacatggaacagtctgcctcccagtatttctctytgggatcccagtggaacaataatggaaaatttcacagtggatgcaacttccaaaatggcctatctyagtattccaggaactgsaaaggtgggcacttgggcatacaatcttyaagccaaagcgamcccagaaacmttaactattacagtwacttctcgagcakcaaaattcttctgtgcctccaatcacagtgaatgctaaaatgaataaggacgtaaacagtttccccagcccaatgattgtttacgcagaaattctacaaggatatgtacctgttcttggagccaatgtgactgctttcattgaatcacagaatggacatacagaagttttggaacttttggataatggtgcaggcgctgattctttcaagaatgatggagtctactccaggtattttacagcatatacagaaaatggcagatatagcttaaaagttcgggctcatggaggagcaaacactgccaggctaaaattacggcctccactgaatagagccgcgtacataccaggctgggtagtgaacggggaaattgaagcaaacccgccaagacctgaaattgatgaggatactcagaccaccttggaggatttcagccgaacagcatccggaggtkcatttgtggtatcacaagtcccaagccttccttgcctgaccaatacccaccaagtcaaatcacagaccttgatgccacagttcatgaggataagattattcttacatggacagcaccaggagataattttgatgttggaaaagttcaacgktatatyataagaataagtgcaagtattcttgatctaagagacagttttgatgatgctcttcaagtaaatactactgatctgtcaccaaaggaggccaactccaaggaaagctttgcatttaaaccagaaaatatctcagaagaaaatgcaacccacatatttattgccattaaaagtatagataaaagcaatttgacatcaaaagtatccaacattgcacaagtaactttgyttatccctcaagcaaatcctgatgacattgatcctactcctactcctactcctactcctgataaaagtcataattctggagttaatatttctacgctggtattgtctgtgattgggtctgttgkaattgktaactttattttaagtaccaccatttgaaccttaacgaagaaaaaaatcttcaagtagacctagaagagagttttaaaaaacaaaacaatgnaagtaaaggatatttctgaatcttaaaattcatcccatgtgtgatcataaactcataaaaataattntaagatgtcnggaaaaggatactttgattaaaataaaaacactcatggatatnta

SEQ ID NO: 259 - DNA, 444 bp, Homo sapiens
gggtgcctttctcatggccacagcagcttggcttacaaccgtcttcaaacagccaggctgtgccccagaacttcactgggcttccttccataactatggatctgtgagcatcactttaatttcagagtgtggaagacaccttaataagaatcatgaatcacattttacaaatcaggatacacaggatgtaaggttaagtgacctgtcctatcagggccacaaagccagttaaacttctttattaactgagtcacttaaaaatcatttatttaaaaacctattttgttccaggaactattctgggtactggaaatraaaacagtggagacagagagaggggaaataaaaaacaagacaaaaatgattgctttkgtggagtttatatattccactggargaaggtagatsataaataaaagtgaaaaagtacattatwaggtggga

SEQ ID NO: 260 - DNA, 1746 bp, Homo sapiens
ggcatcagtaaggtctgtatttaaatgtggatgtagacatcataattaccaagacaagaaattgttttgagaaattctctgatgtttttcttcttcaggtttcacgtgccacgatcatggtgccacggtactgcagtatgcacccaaacagcaactcctaatctcggggggtaggaaaagacacgtctgcatttttgacatcargcaaaggcagctcattcacacgttccaggcccatgactcagctattaaggctctggccttggatccctatgaggaatattttaccacaggttcagcagaaggtaacataaaggtttggagattgacaggccatggcctaattcattcatttaaaagtgaacatgctaagcagtccatatttcgaaacattggggctggagtcatgcagattgacatcatccagggcaatcggctcttctcctgtggtgcagatggcacgctgaaaaccagggttttgcccaatgcttttaacatccctaacagaattcttgacattctataaagattggggttttatttttatatacatttcagttaaaaggcacactacagtcatcactaggcaattctgctttctaagcagttgtattgaaaacagagaatctctgtgtagaatttgaatatgacccaagctgagtattatctaaacaggttggtggaatgaatgcgcatgtaccttattatgctgacatactaaaaaaaataaaacctagtattgtatgaaggatagctattctttacagcatttagcaaacctgattcagaaaacatttgagattagcaaattagtaacttgaaataatgaaaaggacgtttataccaaattaaggaagaaaatgttgctgatttgggtttttcttcctgttcttaccactgactgaagcatgcctgcagtctcctcctctgttgaatgaaggataatcataaggtgtttgttaggagcgctagaccacctggaaaactttcttagctgtggagcagtgcgcagtgaccagttctctgctgtgagaggccgtttccattctttcctgctgaatatttttcctgttagtgtttatactgagctagtactgtaacttgcaaatgagtgcaaatttaaatgcaatgttttactcacaatttgcacattcacattttttggactgctagtttttctatttaaatatttgccttcatgttaggaatgtactatgtgaacatgacatatttgtagttaaccaaacacaccttcttagtccagtttagtactttttcttttcgtgtattcaaggttaaacacccaaacatttaaggatatgttgaaactacaccaatagagcatttcatatcataattaaaatgaatgttaggcttcttgtggccagttaatagttgatgagattggtgacattatttattgccacagcctattgtataaactatgcagagttaaatatttgcttgtaaaatattagccaatgttgtcattattttgatgtatttccttggttatgaccaaaaatatgttgagatactgaaactaatgtctgtgtgtttaaatgtttaccagcaaattgtcttatcatgttaatgagaatgttcaatgcctgtgtggtaaatagtaaatacaatggcataaaagtaactttctctgaagatgtgatgttcaggctgtgaaatatatatgtaaaagaaaaataaatgttatttgttagaaaaaaaaaaaaaaaaaaaaaactcgta

SEQ ID NO: 261 - DNA, 1935 bp, Homo sapiens
gaattcggcacgagggagcattgcccgtcagacagcaactcagagaataaccagagaacaaccagattgaaacaatggaggatctttgtgtggcaaacacactctttgccctcaatttattcaagcatctggcaaaagcaagccccacccagaacctcttcctctccccatggagcatctcgtccaccatggccatggtctacatgggctccaggggcagcaccgaagaccagatggccaaggtgcttcagtttaatgaagtgggagccaatgcagttacccccatgactccagagaactttaccagctgtgggttcatgcagcagatccagaagggtagttatcctgatgcgattttgcaggcacaagctgcagataaaatccattcatccttccgctctctcagctctgcaatcaatgcatccacagggaattatttactggaaagtgtcaataagctgtttggtgagaagtctgcgagcttccgggaagaatatattcgactctgtcagaaatattactcctcagaaccccaggcagtagacttcctagaatgtgcagaagaagctagaaaaaagattaattcctgggtcaagactcaaaccaaaggcaaaatcccaaacttgttacctgaaggttctgtagatggggataccaggatggtcctggtgaatgctgtctacttcaaaggaaagtggaaaactccatttgagaagaaactaaatgggctttatcctttccgtgtaaactcggctcagcgcacacctgtacagatgatgtacttgcgtgaaaagctaaacattggatacatagaagacctaaaggctcagattctagaactcccatatgctggagatgttagcatgttcttgttgcttccagatgaaattgccgatgtgtccactggcttggagctgctggaaagtgaaataacctatgacaaactcaacaagtggaccagcaaagacaaaatggctgaagatgaagttgaggtatacataccccagttcaaattagaagagcattatgaactcagatccattctgagaagcatgggcatggaggacgccttcaacaagggacgggccaatttctcagggatgtcggagaggaatgacctgtttctttctgaagtgttccaccaagccatggtggatgtgaatgaggagggcactgaagcagccgctggcacaggaggtgttatgacagggagaactggacatggaggcccacagtttgtggcagatcatccttttctttttcttattatgcataagataaccaactgcattttatttttcggcagattttcctcaccctaaaactaagcgtgctgcttctgcaaaagatttttgtagatgagctgtgtgcctcagaattgctatttcaaattgccaaaaatttagagatgttttctacatatttctgctcttctgaacaacttctgctacccactaaataaaaacacagaaataattagacaattgtctattataacatgacaaccctattaatcatttggtcttctaaaatgggatcatgcccatttagattttccttactatcagtttatttttataacattaacttttactttgttatttattattttatataatggtgagtttttaaattattgctcactgcctatttaatgtagctaataaagttatagaagcagatgatctgttaatttcctatctaataaatgcctttaattgttctcataatgaagaataagtaggtatccctccatgcccttctgtaataaatatctggaaaaaacattaaacaataggcaaatatatgttatgtgcatttctagaaatacataacacatatatatgtctgtatcttatattcaattgcaagtatataataaataaacctgcttccaaacaacaaaaaaaaaaaaaaaaaaactttgaggggggg

SEQ ID NO: 262 - DNA, 1919 bp, Homo sapiens
  misc_feature (253)..(253): n equals a,t,g, or c
ataaggcggcatttatcattcccaccactgacatctactgtataccacatctgctatgccatggatacatggcatcatgatgatgagtccctcccctgggcctgccaaggggaaacagagtgcatatcccaccataatagggaaattaataattgtattaagtggttgaaaaaaagggggaggatgttcactcactgttccctgtgtagtatcctgcaaatgcatgaatggtgaactccccatgtcagcattnttgtgcccatttatttagtacccagacatagtgctggtctcacagcttaatatttggtaatgaataaattctgctagtggtatatgttgatctgaacttacaatgatgggatatagaattggcagagtggcagatgttcacaattgtctacaagtagatgtgctagacaatggaaggatgcaggccaacctctttgattacaattgagattcatgtgactattgagccctggaaatgtagcttgtccaaattgagatgtgctgtcagtataaaatacataccagattttaaagatgtaccaaaaaatgtaaactatctcaatttttatattggtgaaatcaatatgtcttggtatagtggcttaaataaaacaattttagcctttctcagtttatttttctgcaaaaagattaaaaattgtacatgaagctcatgttaactttcttttggtcagtgctattttaaaggaagtatgagttgaaaaaaaattgaaataaactatatcatattactaggacttaatatagtggcatacccaggaaatgcttagtaagtgttcccttcacattttaaaatttgagtatacaatcatgtttgacaatatagaaatttaatttttagtgaaacaattctaaaccccttttccatagacacaagaaagatggcaaatttatgctattcctggaaaaatacattgtggcttagcaaataagcaagttcccacgttacttttgttttgcttcaagtaatacttctgccagttgtgttttatgaattaaacagggaacggcatgctgaacttgaaactagatttgttcctgcttttttcacaatgtgagtagttttgaaaagtcagatctggccatttgtctttcctagaatagcataactttgttcattgttttttttgtttgtctttctgacacagaaagactgatgatggtgtccactatgtattcttcaaaacatttggcacatgctgcactaacctagtctatcttttctatcttggaatttgctcatacaaaccctatagcctagactagatcccttaccctctctccagttcctatcattcacccatttcactgtgcaagacacctcactagtcaccagtgatacagaaatgacttttaagcagtttctgctcttaagggcttaccgttttgtctataagatacacaagtataaatgacaagtacaaataacaatgaatgtttaatgctttacgtttagtgtttaagcttgttgttggaagagcagcattttgacccttggagaagaaaaactagctgtggcattccaggtggagaacctgacagaggactaagaagttatctaatgtaaaagacctcaggcaccaccttcgcataaactttttccagacaaggctaaatgtgcatgcttcataaccataattcttatttttctttaataaatatttttctacttgtaacactgtgcattatttcaaactgtttacctgtttgtaaagcttgtctcttaatcaaatttgtcttgaccaaataagtttcctgagggctggaattatgccttaactatatctatagtatttaacagtgaatcctttgtataatgaaagcatcaacagataattttaaattgataaataaaaagcacagtttcaaatggtaaaaaaaaaaaa

SEQ ID NO: 263 - DNA, 2468 bp, Homo sapiens
  misc_feature (2076)..(2076): n equals a,t,g, or c
gggtttgagaagattggacagtgcttcaggcaccgtgtacacagcaatggatgtggccacaggacaggaggtggccattaagcagatgaatcttcagcagcagcccaagaaagagctgattattaatgagatcctggtcatgagggaaaacaagaacccaaacattgtgaattacttggacagttacctcgtgggagatgagctgtgggttgttatggaatacttggctggaggctccttgacagatgtggtgacagaaacttgcatggatgaaggccaaattgcagctgtgtgccgtgagtktctgcaggctctggagttcttgcattcgaaccagataaccccagagcagagcaaacggagcaccatggtaggaaccccatactggatggcaccagaggttgtgacacgaaaggcctatgggcccaaggttgacatctggtccctgggcatcatggccatcgaaatgattgaaggggagcctccatacctcaatgaaaaccctctgagagccttgtacctcattgccaccaatgggaccccagaacttcagaacccagagaagctgtcagctatcttccgggactttctgaaccgctgtctcgagatggatgtggagaagagaggttcagctaaagagctgctacagcatcaattcctgaagattgccaagcccctctccagcctcactccactgattgctgcagctaaggaggcaacaaagaacaatcactaaaaccacactcaccccagcctcattgtgccaagccttctgtgagataaatgcacatttcagaaattccaactcctgatgccctcttctccttgccttgcttctcccatttcctgatctagcactcctcaagactttgatccttggaaaccgtgtgtccagcattgaagagaactgcaactgaatgactaatcagatgatggccatttctaaataaggaatttcctcccaattcatggatatgagggtggtttatgattaagggtttatataaataaatgtttctagtcttccgtgtgtcaaaatcctcacctccttcataaccatctcccacaattaattcttgactatataaatttatggtttgataatattatcaatttgtaatcaattgagatttctttagtgcttgcttttctgtgactcaactgcccagacacctcattgtacttgaaaactggaacagcttgggaatgccatggggtttgataatctgccagggacatgaagaggctcagcttcctggaccatgactttggctcagctgatcctgacatgggagaacaaccacatttttctttgtgtgtgcttctagcagctgttcgggaggaccttgacccaayagtgttcccatgctgtttcttgtgaaatgctctcggctatgtagcagcttttgattccctgcataccctaggctgctgcccctatcctgtcccttgtttataacattgagaggttttctagggcacatactgagtgagagcagtgttgagaagtcggggaaaatggtgactacttttagagcaaggctgggcatcagcacctgtccagctctacttgtgtgatgtttcaggaactcagcccctttttctgcctaggataaggagctgaaagattaacttggatcttctaatggtccaaatcttttggtcacaataaagagtctccaaattagagactgcatgttagttctggatggatttggtggcctgacatgataccctgccagctgtgaggggaccccgtttttaagatgcatggccaagctctctgcaaatggaaatgcttacactgggtgttggggatgtttgctacctcctgctatttttgtggttttggttctcccactatggtaggacccctggccagcattgtggcttgtcatgtcagccccattgactaccttctcatgctctgaggtactactgcctctgcagcacaaatttctatttctgtcaataaaaggagatgaaaatattctattggagtatgcctttcttttttctcttcgttttttctttccttttctaattttttatatgaaataatgagtaagtttcttnctgaaccatttgagagtggtaagttgcagatagaatgcccctttaccactatatacctgaatgtgtattctttcyttttaacacttttattttaaatataaattaagagaaatgggccaaaaccatttgtattgtttaaagaataattataaacacacttgtatccaccaaatcaagaaakggaacactgacagtaagaaccttctctatcttgtccttcctttctcattatagcccccacctaagaggtaaccaccatcttgacttttatttaaataactttcttgcttttctgtatactttcatcacattcaggtgtgttccaatacaagtagattttagttcggccagtttttgaactttaaataaacatatcataatagataaaaaaa

SEQ ID NO: 264 - DNA, 2861 bp, Homo sapiens
  misc_feature (2861)..(2861): n equals a,t,g, or c
ggcacarccacagcttctccagtggctatgtggagatggagtttgagtttgaccggctgagggccttccaggctatgcaggtccactgtaacaacatgcacacgctgggagcccgtctgcctggcggggtggaatgtcgcttccggcgtggccctgccatggcctgggagggggagcccatgcgccacaacctagggggcaacctgggggaccccagagcccgggctgtctcagtgccccttggcggccgtgtggctcgctttctgcagtgccgcttcctctttgcggggccctggttactcttcagcgaaatctccttcatctctgatgtggtgaacaattcctctccggcactgggaggcaccttcccgccagccccctggtggccgcctggcccacctcccaccaacttcagcagcttggagctggagcccagaggccagcagcccgtggccaaggccgaggggagcccgaccgccatcctcatcggctgcctggtggccatcatcctgctcctgctgctcatcattgccctcatgctctggcggctgcactggcgcaggytcctcagcaaggytgaacggagggtgttggaagaggagctgacggttcacctctctgtccctggggacactatcctcatcaacaaccgcccaggtcctagagagccacccccgtaccaggagccccggcctcgtgggaatccgccccactcygctccctgtgtccccaatggctctgcgttgctgctctccaatccagcctaccgcctccttctggccacttacgcccgtccccctcgaggcccgggcccccccacacccgcctgggccaaacccaccaacacccaggcctacagtggggactatatggagcctgagaagccaggcgccccgcttctgcccccacctccccagaacagcgtcccccattatgccgaggctgacattgttaccctgcagggcgtcaccgggggcaacacctatgctgtgcctgcactgcccccaggggcagtcggggatgggccccccagagtggatttccctcgatctcgactccgcttcaaggagaagcttggcgagggccagtttggggaggtgcacctgtgtgaggtcgacagccctcaagatctggtcagtcttgatttcccccttaatgtgcgtaagggacaccctttgctggtagctgtcaagatcttacggccagatgccaccaagaatgccaggaatgatttcctgaaagaggtgaagatcatgtcgaggctcaaggacccaaacatcattcggctgctgggcgtgtgtgtgcaggacgaccccctctgcatgattactgactacatggagaacggcgacctcaaccagttcctcagtgcccaccagctggaggacaaggcagccgagggggcccctggggacgggcaggctgcgcaggggcccaccatcagctacccaatgctgctgcatgtggcagcccagatcgcctccggcatgcgctatctggccacactcaactttgtacatcgggacctggccacgcggaactgcctagttggggaaaatttcaccatcaaaatcgcagactttggcatgagccggaacctctatgctggggactattaccgtgtgcagggccgggcagtgctgcccatccgctggatggcctgggagtgcatcctcatggggaagttcacgactgcgagtgacgtgtgggcctttggtgtgaccctgtgggaggtgctgatgctctgtagggcccagccctttgggcagctcaccgacgagcaggtcatcgagaacgcgggggagttcttccgggaccagggccggcaggtgtacctgtcccggccgcctgcctgcccgcaggcytatatgagctgatgcttcggtgctggagccgggagtctgagcagcgaccacccttttcccagctgcatcggttcctggcagaggatgcactcaacacggtgtgaatcacacatccagctgcccctccctcagggagcgatccaggggaagccagtgacactaaaacaagaggacacaatggcacctctgcccttcccctcccgacagcccatcacctctaatagaggcagtgagactgcaggtgggctgggcccacccagggagctgatgccccttctccccttcctggacacactctcatgtccccttcctgttcttccttcctagaagcccctgtcgcccacccagctggtcctgtggatgggatcctctccaccctcctctagccatcccttggggaagggtggggagaaatataggatagacactggacatggcccattggagcacctgggccccactggacaacactgattcctggagaggtggctgcgcccccagcttctctctccctgtcacacactggaccccactggctgagaatctgggggtgaggaggacaagaaggagaggaaaatgtttccttgtgcctgctcctgtacttgtcctcagcttgggcttcttcctcctccatcacctgaaacactggacctgggggtagccccgccccagccctcagtcacccccacttcccacttgcagtcttgtagctagaacttctctaagcctatacgtttctgtggagtaaatattgggattggggggaaagagggagcaacggcccatagccttggggttggacatctctagtgtagctgccacattgatttttctataatcacttggggtttgtacatttttggggggagagacacagatttttacactaatatatggacctagcttgaggcaattttaatcccctgcactaggcaggtaataataaaggttgagttttccacaaaaaaaaaaaaaaaaaaaaaaaaaaaaaaaaan

SEQ ID NO: 265 - DNA, 766 bp, Homo sapiens
  misc_feature (107)..(107): n equals a,t,g, or c
  misc_feature (709)..(709): n equals a,t,g, or c
  misc_feature (722)..(722): n equals a,t,g, or c
  misc_feature (732)..(732): n equals a,t,g, or c
aaagggggtcgagtaactcaagtgttagaagttcgttgacttttgactggggagaaaggaaccttaaacttggggaggagaagggagtcctggagttgttacctaanaacaaagatggggcggaatggaggctacagcccgaaagccaggccagcagtggcgttcttctgtgtccccaagtagtggacttgagcccgctgagacctcggcaggagtctcgtcccagggcaggtgggtgtgcggggtgagccgcggagcggttccagctcgggtaaagaggaagttacctcgggtcctttgcactccaactcggcggcgcccgagcccgaggggccccagccaacccgacgcccgtgtgttgtgtgtgtctaacacccggtccgtgccrgcgccgcgccgcccgcgctgcccccagctcgaggaggacatcgcggccaaggagaagttgctgcgggtgtcggaggacgagcgggaccgggtgctggaggagctgcacaaggcggaggacagcctcctggccgccgaagaggccgcgccaaggctgaagcccgacgtagcttctctgaacagacgcatccagctggttgaggaagagttggatcgtgcccaggagcgtctggcaacagctttgcagaagctggaggaagctgataaggcagcagatgagagtgagagaggcatgaaagtcattgagagtcgagcccaaaanggatgaagaaaanatggaaattnaggagatccaactgaaagaggcaaagcacattgc

SEQ ID NO: 266 - DNA, 1394 bp, Homo sapiens
  misc_feature (1238)..(1238): n equals a,t,g, or c
gcccacgcgtccgagctcagtcagcagaagagataaaagcaaacaggtctgggaggcagttctgttgccactctctctcctgtcaatgatggatctcagaaataccccagccaaatctctggacaagttcattgaagactatctcttgccagacacgtgtttccgcatgcaaatcaaccatgccattgacatcatctgtgggttcctgaaggaaaggtgcttccgaggtagctcctaccctgtgtgtgtgtccaaggtggtaaagggtggctcctcaggcaagggcaccaccctcagaggccgatctgacgctgacctggttgtcttcctcagtcctctcaccacttttcaggatcagttaaatcgccggggagagttcatccaggaaattaggagacagctggaagcctgtcaaagagagagagcattttccgtgaagtttgaggtccaggctccacgctggggcaacccccgtgcgctcagcttcgtactgagttcgctccagctcggggagggggtkgagttcgatgtgctgcctgcctttgatgccctggattttgcccgwacaggtcaattgactggcggctataaacctaacccccaaatctatgtcaagctcatcgaggagtgcaccgacctgcagaaagagggcgagttctccacctgcttcacagaactacagagagacttcctgaagcagcgccccaccaagctcaagagcctcatccgcctagtcaagcactggtaccaaaattgtaagaagaagcttgggaagctgccacctcagtatgccctggagctcctgacggtctatgcttgggagcgagggagcatgaaaacacatttcaacacagcccagggatttcggacggtcttggaattagtcataaactaccagcaactctgcatctactggacaaagtattatgactttaaaaaccccattattgaaaagtacctgagaaggcagctcacgaaacccaggcctgtgatcctggacccggcggaccctacaggaaacttgggtggtggagacccaaagggttggaggcagctggcacaagargctgaggcctggctgaattacccatgctttaagaattgggatgggtccccagtgagctcctggattctgctggtgagacctcctgcttcctccctgccattcatccctgcccctctccatgaagcttgagacatatagctggagaccattctttccaaagaacttacctctntcgcaaaggccatttatattcatatagtgacaggctgtgctccatattttacagtcattttggtcacaatcgagggtttctggaattttcacatcccttgtccagaattcattcccctaagagtaataataaataatctctaacaccaaaaaaaaa

SEQ ID NO: 267 - DNA, 1329 bp, Homo sapiens
tttttttttcatatttcaagtgtttttattctgagcagtaggtacaaaaaataatgacatagttgtgtctaattctgtatagttcagcaccctccacaggctgtcaatctctgatttgatctacttttaccagatttaacagatccttgaatttactttactgtatatacttccttcttgctcacattgggaatcaaactaatgctggaaacatgcatcttcagacttcattgaggaattccagattgagacacgctgggatgtggattgagtccatggttagagaagatggattaaatggaaacaaaacaggaaacatgtgcttggcatctaatagcagttgctgagggtcattccgctcttgtagttgtgcctggattgttcgtataaaggccactgttacccgttcttcaaattcattcaggggagtataaaggtttaaaattttgacaatctgctgggtgctgagggaggtacacagggagcagatagcctctgcgtcctcctgggttttcttctttaattgcaggagctgggctgcttggatcagaggttccatggtctgaactgctccactctggtgaaggtttcttccccgaagccactcctcaagctgacttatattgtacctgagttgcatgcctgtgctccaagagcagacgtccttccgcaagagcaggttgttaagagtcactgcgttgatcatgtagaagagctgtttgaatacctgcaggatgatctcagggtccaagccctggtcacacatgactgtatgaaaggcattcatctggcggatgawagcttccaggcrgtatgagttatccccatctgccatgctggaggagygcttcyggkagccrgtgggcttcacaccagatagaccctgaatgctctcattttccaacatggcagaaactatcatcggctgtaacrcrccctcggcaattttaawgagctgctggtagatctgaatggaaaggtcgctcagtactgacggtattcggtgaggtcaaarttcttaagrcagtgttcgttgtgctttgcwgtattctgagtcatgaagccctcatccccgctgtaccgcttcagacagtgaagaaggtggcaggtgttggataacmagaatgacgtcatctcaaagtcatcaytgtgcttyttcaggacttycttaatgccgttgrtggtggaggtcakcagggagkgcaccttgagatcatcattggtttggtccgcgagccggatgcacatgtagaggatgtaggcggggatacagggcactgtgtccaacagcatctggggcttcaagtctgtcaccaggttgaggatgag

SEQ ID NO: 268 - DNA, 2196 bp, Homo sapiens
aattcggcagagcgggaagtcgctgaagacagagcgatggtagttctggaggcctcgctccggggccgacccgaggccacagtgcctccgcggtagaccggacttgggtgacgggctccgggctcccgaggtgaagagcatcgggggctgagggatggaagggtctaagacgtccaacaacagcaccatgcaggtgagcttcgtgtgccagcgctgcagccagcccctgaaactggacacgagtttcaagatcctggaccgtgtcaccatccaggaactcacagctccattacttaccacagcccaggcgaaaccaggagagacccaggaggaagagactaactcaggagaggagccatttattgaaactcctcgccaggatggtgtctctcgcagattcatccccccagccaggatgatgtccacagaaagtgccaacagcttcactctgattggggaggcatctgatggcggcaccatggagaacctcagccgaagactgaaggtcactggggacctttttgacatcatgtcgggccagacagatgtggatcacccactctgtgaggaatgcacagatactcttttagaccagctggacactcagctcaacgtcactgaaaatgagtgtcagaactacaaacgctgtttggagatcttagagcaaatgaatgaggatgacagtgaacagttacagatggagctaaaggagctggcactagaggaggagaggctgatccaggagctggaagacgtggaaaagaaccgcaagatagtggcagaaaatctcgagaaggtccaggctgaggctgagagactggatcaggaggaagctcagtatcagagagaatacagtgaatttaaacgacagcagctggagctggatgatgagctgaagagtgttgaaaaccagatgcgttatgcccagacgcagctggataagctgaagaaaaccaacgtctttaatgcaaccttccacatctggcacagtggacagtttggcacaatcaataacttcaggctgggtcgcctgcccagtgttcccgtggaatggaatgagattaatgctgcttggggccagactgtgttgctgctccatgctctggccaataagatgggtctgaaatttcagagataccgacttgttccttacggaaaccattcatatctggagtctctgacagacaaatctaaggagctgccgttatactgttctggggggttgcggtttttctgggacaacaagtttgaccatgcaatggkggctttcctggactgtgtgcagcagttcaaagaagaggttgagaaaggcgagacacgtttttgtcttccctacaggatggatgtggagaaaggcaagattgaagacacaggaggcagtggcggctcctattccatcaaaacccagtttaactctgaggagcagtggacaaaagctctcaagttcatgctgacgaatcttaagtggggtcttgcttgggtgtcctcacaattttataacaaatgacttttttccttagggggaggtttgccttaaaggcttttaattttgttttgtttgcaaacatgttttaaattaaattcgggtaatattaaacagtacatgtttacaataccaaaaaagaaaaaatccacaaaagccactttattttaaaatatcatgtgacagatactttccagagctacaacatgccatctatagttgccagccctggtcagttttgattcttaaccccatggactcctttccctttcttctctgaaaaaaactaatttaaatttgcttttcttttttttaactgagttgaattgagattgatgtgttttcactggatttttatctctctcaacttcctgcacttaacaatatgaaatagaaacttttgtctttactgagatgaggatatgtttgagatgcacagttggataatgtgggaaaatgacatctaagctttacctggtcaccatgtgatgtgatcagatgcttgaaatttaacacttttcacttggttcttatactgaatgccgactctgctctgtgttagagatatgaaatggtgtttgatactgtttgagacattatggagagatttaattatttgtaataaaagatttgctgcagtctgaaaactgcccaggggtgcactgttgggtttttctttaaaatagagtactttgtattctgggaaaaaaaaa

SEQ ID NO: 269 - DNA, 567 bp, Homo sapiens
  misc_feature (236)..(236): n equals a,t,g, or c
gtttacataagagatcctttagtccactcaacggctgacattagcagcatctttaatacaactgtttgttcaaaggcaaggtggtcccttttaaagttacacttctagactcacctgttctcactccctgttttaatgtaacccagccatgagatgccagataatagaattgctacctactagctgaacaggaaagaacctgtgctgtttctgacacttcttgttgcacatagatnaatacaatgggtattatagagactcagttgcagaaattaacaaacatgctgcttggttaaaatgggtagactcatctggctcattctttattccattttagttggtttgcatcttgcctaaggtgcatactccaaactyttggtattattctcctgatagtcacactagtagtctccctggtgtgctataatctctaaaagctttaaatgtttgcwtgcagctatccatcgaatgtcaaatggtctctctttggctggaatgacaaaactcaaaggaatgtgtgatcaggaagacatcataacctatgaatgatggaacccaaaatgaatg

SEQ ID NO: 270 - DNA, 950 bp, Homo sapiens
gactaatgaaataactgttcactattgtgggttctacttgcagggttcagactaggcaatgtggtacatgctatacaggcaactgagcagagcattcatgccactgacctggtacctcgcttatgcttaacattagccaacctgaaccgtgtgatttatttcatctgtgacaccatcctctgggtgaggagcgtaggtctcacctctggcatcaacaaagagaaatggcgaacgagggctgctcaccactactactattctcttctgctgagccttgtcagggatctgtatgaaatctccctgcagatgaaacgagttacatgtgacagggcaaagaaagagaaatcagcatcccaggatcctctttggttcagcgtggctgaggaggwaacagaatggctccaatcctttctacttcttttattccgatctctgaagcagcatcctcccttgctcctggacacagtgaagaacctttgtgatatcctgaaccctttggacctgctggggatctataaatccaatcctggcatcattggacttggaggtcttgtgtcctctatagcaggcatgatcactgtggcatatcctcagatgaagctgaagacccgttagtgtttttaggcttggaactagtacctactttaaaagatggcctcttggtgggacagacatttgtataagtcacaggccatgtcatactgtgcttaagttcttgttcatgtgagcatttaacaacctgtgatgtgggcagagatgaggccaagaacggagaagggaggagcatgaagagttgtatgtttttggagtgctggagtgacttgtgaatttctgaatattttcccttcatctaacattgattgaacatctcttatgtgcatagtgggagcttagtatttgctgaatgaataaaaattgaaaggaaaaaatttaaaaaraaaaaaaaaaaa

SEQ ID NO: 271 - DNA, 475 bp, Homo sapiens
  misc_feature (444)..(444): n equals a,t,g, or c
  misc_feature (451)..(451): n equals a,t,g, or c
  misc_feature (454)..(454): n equals a,t,g, or c
  misc_feature (470)..(470): n equals a,t,g, or c
caaagaattcggcacgaggtctgatcttcctgcggctgaaccgcccggctgagccgacattgccggcgtcttggcgattcggcccgacgagctccgctttcgctacagcatggtggcctactggagacaggctggactcagctacatccgatactcccagatctgtgcaaaagcagtgagagatgcactgaagacagaattcaaagcaaatgctgagaagacttctggcagcaacgtaaaaattgtgaaagtaaagaaggaataatctaccctgactaaagcttgaaatgctacatttccaaggtgaagatgtgtgggcacatgttatggcagattgaaaaggatctcattccatgggaaaaaaaaaaatcctgtcttgttcataaattgacaatgtcaataaattgaaatatggttcactgttaaaaaaaaaaaaaaaaaaanggggggnccnttttaaagaatccaantttac

SEQ ID NO: 272 - DNA, 1244 bp, Homo sapiens
  misc_feature (1230)..(1230): n equals a,t,g, or c
  misc_feature (1232)..(1232): n equals a,t,g, or c
  misc_feature (1235)..(1235): n equals a,t,g, or c
ggcacgaggaaagtacttttgctataagtttcctaaaagtatttaatacttttttttttcaatttagattaaatctcttgatgaacagtgtgtggttggcaaaatttccaagcactggactggaattttgagagaggcatttacagacgctgataactttggaatccagttccctttagaccttgatgttaaaatgaaagctgtaatgattggtgcctgtttcctcattgacttcatgttttttgaaagcactggcagccaggaacaaaaatcaggagtgtggtagtggattagtgaaagtctcctcaggaaatctgaagtctgtatattgattgagactatctaaactcatacctgtatgaattaagctgtaaggcctgtagctctggttgtatacttttgcttttcaaattatagtttatcttctgtataactgatttataaaggtttttgtacattttttaatactcattgtcaatttgagaaaaaggacatatgagtttttgcatttattaatgaaacttcctttgaaaaactgctttgaattatgatctctgattcattgtccattttactaccaaatattaactaaggccttattaatttttatataaattatatcttgtcctattaaatctagttacaatttatttcatgcataagagctaatgttattttgcaaatgccatatattcaaaaaagctcaaagataattttctttactattatgttcaaataatattcaatatgcatattatctttaaaaagttaaatgtttttttaatcttcaagaaatcatgctacacttaacttctcctagaagctaatctataccataatattttcatattcacaagatattaaattaccaattttcaaattattgttagtaaagaacaaaatgattctctcccaaagaaagacacattttaaatactccttcactctaaaactctggtattataacttttgaaagttaatatttctacatgaaatgtttagctcttacactctatccttcctagaaaatggtaattgagattactcagatattaattaaatacaatatcatatatatattcacagagtataaacctaaataatgatctattagattcaaatatttgaaataaaaacttgatttttttgtaaaaaaaaaaaaaaaaaaaaaaaaaaaaaaaaaaaaaaaaaaaaaaaaaaaaaaaaaaaaaaaaaaaaaggggcggccgntntanaggatccaa

SEQ ID NO: 273 - DNA, 1132 bp, Homo sapiens
cttccaacttggtacctgtggatatcatagaaagtgtagtttcaaaggagatggacaaacgatacctacagtttgatattaaggcctttgttgaaaataatcctgccattaaatggtgtcctactccaggctgtgacagagcagtaagactaacgaaacaagggtcaaatacatctggatctgatacactcagcttcccattgctgagagctcctgctgttgattgtggaaaaggacacctcttctgctgggagtgccttggtgaagcacatgagccttgtgactgccaaacatggaagaattggctgcaaaaaataaccgaaatgaaaccagaagaacttgtgggagttagtgaagcctacgaggatgccgccaattgtctctggttattaactaactccaagccttgtgccaactgtaagtctccaatacagaagaatgaaggctgcaatcacatgcagtgtgctaagtgcaagtatgacttttgctggatttgccttgaagagtggaaaaaacatagttcgtccactggaggttattacagatgtactcgctatgaagtcattcaacacgtggaggagcaatccaaggaaatgactgtggaggctgagaaaaaacacaaacgatttcaggaacttgacagatttatgcactattatacaagatttaaaaaccatgagcatagttatcagctagaacaacgccttcttaaaacagccaaagaaaagatggagcaattgagcagagctctcaaagaaactgaaggaggctgtccagataccactttcattgaagatgcagttcatgtgctcttaaaaactcggcgcattctcaagtgttcttatccatatggatttttcttggaacctaaaagcacaaagaaagaaatttttgaactaatgcaaacagacctagaaatggtcactgaagaccttgcccagaaagtcaataggccttaccttcgcacaccccgccacaagatcatcaaagcagcatgccttgtacagcagaagaggcaagaattcctgggcatctgtgggctcgggggagtagctcctgcagactcaccagaagcttccaaggcgcattttgstggtgggaacatggggrttggggratatttwggggtttt

SEQ ID NO: 274 - DNA, 499 bp, Homo sapiens
  misc_feature (447)..(447): n equals a,t,g, or c
  misc_feature (466)..(467): n equals a,t,g, or c
  misc_feature (469)..(469): n equals a,t,g, or c
ggcacgagtgaagctgaagtactgcttcacctgcaagatgttccggccaccccgaacctcacactgcagtgtctgcgacaactgtgtggaacgatttgaccatcactgcccctgggtgggcaactgtgtggggagacggaactatcgcttcttctacgcgtttattctctccctctcattcctgacggccttcatcttcgcctgtgtggtcacccacctgacgttgcgcgctcagggaagcaacttcctctccactctgaaggagacaccagcaagcgtgctgggagttggtgatctgcttcttctccatctggtccattctgggcctctcagggtttcacacgtacctcgtcgcctccaacctgactactaatgaagacatcaaaggttcgttggtccagcaagagggcggtgagcctcttgtcaaccctacagcataaagtattntcaccaatggcgggtgggnntngggccctaacttccagctattgacgggggg

SEQ ID NO: 275 - DNA, 735 bp, Homo sapiens
  misc_feature (648)..(648): n equals a,t,g, or c
  misc_feature (713)..(713): n equals a,t,g, or c
  misc_feature (730)..(730): n equals a,t,g, or c
ggagacaccaccattcctctcagcctgtgtctgtctcaaaggccccacctcacctcccctaaaggcagccgctgcagtcgccacacctttgcccctgctgcgatgaccctgtcgccacttctgctgttcctgccaccgctgctgctgctgctggacgtccccacggcggcggtgcaggcgtcccctctgcaagcgttagacttctttgggaatgggccaccagttaactacaagacaggcaatctatacctgcgggggcccctgaagaagtccaatgcaccgcttgtcaatgtgaccctctactatgaagcactgtgcggtggctgccgagccttcctgatccgggagctcttcccaacatggctgttggtcatggagatcctcaatgtcacgctggtgccctacggaaacscacaggaacaaawtktcaktggcaggtgggagttcaagtgccagcatggagaagaggagtgcaaattcaacaaggtggaggcctgcgtgttggatgaacttgacatggagctagccttcctgaccattgtctgcatggaagagtttgaggacatggagagaagtctgccactatgctgcagctctacgcccaggctgtcgcagaactatcatgagtgtgcaatgggacgcggcatnagtcatcacgcaacgccacgacagatctctcagcacaaagatatgtcctggtacgcaatggaacntgagataaccagtctanctgtt

SEQ ID NO: 276 - DNA, 851 bp, Homo sapiens
  misc_feature (834)..(834): n equals a,t,g, or c
ctattggtgtgaacagtgtgatgtacaattctcctcaagcagtgaactctacctacatttccaggagcacagctgtgatgaacagtacttgtgtcagttctgtgaacatgaaactaatgatccagaagacttgcatagccatgtggtaaatgagcatgcatgtaaattaatagagttaagtgataagtataacaatggtgaacatggacagtatagcctcttaagcaaaattacctttgacaaatgtaaaaacttctttgtatgtcaagtatgtggttttcggagtagacttcacacaaatgttaacaggcatgttgctattgaacatacaaaaatttttcctcatgtttgtgatgactgtgggaaaggcttttcaagtatgctagaatattgcaagcatttaaattcacatttatctgaagggatttatttatgtcaatattgtgaatattcaacaggacaaattgaagatcttaaaattcatctagatttcaagcattcagctgacttgcctcataaatgtagtgactgcttgatgaggtttggaaatgaaagggaattaataagtcaccttccagtccatgagacaacttgattattctctttaacttacagaatgttagtttaaaataataaattcatcctttttttggagatgattaaatggatgattgtaaacacaacttatgaaatctgcctttaacaagtaacttttttaaattataaaattttattggcattgctccattttctgtatataaatatatctttaatgtggtattttcaaaaaaaaaaaaaaaaaaaaaatccacgcggccgcgaattcccgggtcnaacaagctcactaatcc

SEQ ID NO: 277 - DNA, 1257 bp, Homo sapiens
  misc_feature (51)..(51): n equals a,t,g, or c
  misc_feature (118)..(118): n equals a,t,g, or c
  misc_feature (1213)..(1213): n equals a,t,g, or c
  misc_feature (1217)..(1217): n equals a,t,g, or c
  misc_feature (1238)..(1238): n equals a,t,g, or c
  misc_feature (1245)..(1245): n equals a,t,g, or c
tcccggtgtttggtggatgtggtggtcgccaaagaagagttagccattccnaccgcagattcaaattcgaacaggccaaagtttcagcctgtatattgcgcgcaatcatcagcggacncggtgatgaagtgatcgaactggcgaaaacaaatggctaaggtaaaaagggtggcatttccgtcataataaggacatgccatgattgatttacgcagtgataccgttacccgaccaagccgcgccatgctcgaagcgatgatggccgccccggttggggacgacgtttacggagacgaccctaccgttaatgctctgcaggactacgcagcagagctttccggtaaagaagccgccatttttctgcctaccggcactcaggccaacctggtcgctctgctcagtcactgcgaacgcggcgaagagtatattgtcggtcaggccgcgcataactatctgtttgaagccggtggcgcggcggtgctgggcagtattcaaccgcaacccatagacgcggctgccgacggcacgctaccgctggataaagtggcgatgaaaatcaaacccgacgatatccatttcgcccgcaccaaattactcagtctggaaaacacccacaacggcaaagtgttgccgcgggaatacctgaaagaagcatgggaatttacccgcgagcgcaatctggcgctgcatgttgacggtgcgcgcatctttaatgccgtggtggcttacggctgcgaactgaaagagatcacgcaatattgtgattcgttcaccatttgcctgtcgaaaggtcttgggacgccagtcggttcattactcgtcggtaatcgtgattacattaaacgtgccattcgctggcggaaaatgacaggtggcgggatgcgccagtccggcattctggctgccgccgggatatatgccctgaaaaataacgttgcgcgcttgcaggaagaccacgacaacgctgcctggatggcggacagctgcgtgaarcargcgcggatgtgatgcgtcaggacaccaatatgctgtttgttcgcgtcggggaagaaaatgctgccgcgttaggcgaatacatgaaagcgagaaacgtgctgattaacgcctcgccgattgtccgcctggtgacgcatcttgacgtctcgcgcgaacaactggcggaagtcgccgcccactggcgtgcattcctggcgcgttaaggagagaaacgttncgcnaagcattttagttctccgtgncaattgntacattgtcaac

SEQ ID NO: 278 - DNA, 1085 bp, Homo sapiens
  misc_feature (1067)..(1067): n equals a,t,g, or c
  misc_feature (1081)..(1081): n equals a,t,g, or c
  misc_feature (1083)..(1083): n equals a,t,g, or c
gcaaaattttagcatctctcaataatcatactttttctctttaattatcaacaaaatattttcatgttaagctatctcttgcattcctagaataactctacttgatcatgatgttttttcttttaataatggaattataaataagtatacagtttttgtatgaaaatgtttttatttctctggagcatgtacctatggatggaattactaaatcatatgctagttctgtgtttaactatttgaaggattgaaggagtgccagattgttttccaaagtggctgtaccattttacattcctacctgcagtgtatgaaggtttcaatttctccacatcctcaccaatattattatctgtctttctgattgtagccatcctagtgggtgtgaagtggatatcttgtgacttggatttgattttccctgatggctaatgatattgaacatctatctttctctgtgcttattggtcatttgtatattttctttggagaaatgtctattccagatccyttttctgtttttaaaaaatarctttattgaggtwtatttgacaaataaaaatttgktgtatatttaaaatgtatttaaaagaaaattgagagaaaggactacagagccccgaattaataccaatagaagggcaatgcttttagattaaaatgaaggtgacttaaacagcttaaagtttagtttaaaagttgtaggtgattaaaataatttgaaggcgatcttttaaaaagagattaaaccgaaggtgattaaaagaccttgaaatccatgacgcagggagaattgcgtcatttaaagcctagttaacgcatttactaaacgcagacgaaaatggaaagattaattgggagtggtaggatgaaacaatttggagaagatagaagtttgaagtggaaaactggaagacagaagtacgggaaggcgaagaaaagaatagagaagatagggaaattagaagataaaaacatacttttagaagaaaaaagataaatttaaacctgaaaagtaggaagcaraaraaaaaaaaaaaaaaaaaaaaaaaaaaagggcggccgcnctggggccccagcntncg

SEQ ID NO: 279 - DNA, 1315 bp, Homo sapiens
ggcggcagcgccggaaaggaggccaagagcgcgggcggcgaggcaagatggcggcaaccaagaggaaacggcgtggaggctttgcagttcaggcgaagaagccaaaaagaaacgaaatagatgcggagccgccagctaagcggcacgccacagcagaggaggtggaggaagaagagagggaccggatcccaggccccgtttgcaagggaaagtggaaaaataaggaacggattctcatcttttcttccagaggaataaattttagaacaagacatttaatgcaggacttgagaatgttgatgcctcattctaaagcagatactaaaatggatcgtaaggataagctatttgtgattaacgaggtttgtgaaatgaagaactgtaataaatgcatctattttgaagctaagaaaaaacaggatctctatatgtggctttcaaattcacctcacggaccatctgctaaattccttgttcaaaatattcataccctcgctgaactgaagatgactggaaactgtttgaaaggttctcggccccttttgtcttttgaccctgcttttgatgaattaccacattatgctttgktaaaagaactcttaattcagatctttagtacaccacggtatcatcccaaaagccaaccatttgtggaccacgtgtttactttcaccattttggataataggatatggtttcggaactttcagatcatagaagaagatgctgctcttgtagaaataggacctcgttttgtcttaaatctcataaagattttccagggaagttttggaggaccaactttatatgaaaatcctcactaccagtcaccaaacatgcatcggcgtgtcataagatccatcacagctgcaaaatacagagagaaacagcaagtgaaagatgtgcaaaaactgagaaagaaagagccgaagactcttcttccacatgatcccactgcagatgtttttgtaacaccagctgaggagaaaccaatagaaatacagtgggtaaaaccagagccaaaagttgatttgaaagcaagaaagaaacggatttacaaaaggcaaagaaaaatgaaacagaggatggacagtgggaaaacaaaataagtcaatggaaacctgatttgtttttcagttactttatatttattttgtattcaatgtgtaaatacttttattatctaatactatcttacgtctaattagtgtagcatttacaagaaagaaaaattaagatcttaaaatcagtgattatctttttctaaataaaatatcaccagaattcatcagttaaaaaaaaaaaaaaaaaaaaa

SEQ ID NO: 280 - DNA, 2959 bp, Homo sapiens
  misc_feature (2948)..(2948): n equals a,t,g, or c
  misc_feature (2956)..(2956): n equals a,t,g, or c
ccattcccgggtcgacccacgcgtccgctggaaatttggattctccagaaggtggtttcgatgccatcatgcaagttgcagtttgtggatcactgattggctggaggaatgttacacggctgctggtgttttccacagatgccgggtttcactttgctggagatgggaaacttggtggcattgttttaccaaatgatggacaatgtcacctggaaaataatatgtacacaatgagccattattatgattatccttctattgctcaccttgtccagaaactgagtgaaaataatattcagacaatttttgcagttactgaagaatttcagcctgtttacaaggagctgaaaaacttgatccctaagtcagcagtaggaacattatctgcmaattctagcaatgtaattcagttgatcattgatgcatacaattccctttcctcagaagtcattttggaaaacggcaaattgtcagaaggmgtaacaataagttacaaatcttactgcaagaacggggtgaatggaacaggggaaaatggaagaaaatgttccaatatttccattggagatgaggttcaatttgaaattagcataacttcaaataagtgtccaaaaaaggattctgacagctttaaaattaggcctctgggctttacggaggaagtagaggttattcttcagtacatctgtgaatgtgaatgccaaagcgaaggcatccctgaaagtcccaagtgtcatgaaggaaatgggacatttgagtgtggcgcgtgcaggtgcaatgaagggcgtgttggtagacattgtgaatgcagcacagatgaagttaacagtgaagacatggatgcttactgcaggaaagaaaacagttcagaaatctgcagtaacaatggagagtgcgtctgcggacagtgtgtttgtaggaagagggataatacaaatgaaatttattctggcaaattctgcgagtgtgataatttcaactgtgatagatccaatggcttaatttgtggaggaaatggtgtttgcaagtgtcgtgtgtgtgagtgcaaccccaactacactggcagtgcatgtgactgttctttggatactagtacttgtgaagccagcaacggacagatctgcaatggccggggcatctgcgagtgtggtgtctgtaagtgtacagatccgaagtttcaagggcaaacgtgtgagatgtgtcagacctgccttggtgtctgtgctgagcataaagaatgtgttcagtgcagagccttcaataaaggagaaaagaaagacacatgcacacaggaatgttcctattttaacattaccaaggtagaaagtcgggacaaattaccccagccggtccaacctgatcctgtgtcccattgtaaggagaaggatgttgacgactgttggttctattttacgtattcagtgaatgggaacaacgaggtcatggttcatgttgtggagaatccagagtgtcccactggtccagacatcattccaattgtagctggtgtggttgctggaattgttcttattggccttgcattactgctgatatggaagcttttaatgataattcatgacagaagggagtttgctaaatttgaaaaggagaaaatgaatgccaaatgggacacgggtgaaaatcctatttataagagtgccgtaacaactgtggtcaatccgaagtatgagggaaaatgagtactgcccgtgcaaatcccacaacactgaatgcaaagtagcaatttccatagtcacagttaggtagctttagggcaatattgccatggttttactcatgtgcaggttttgaaaatgtacaatatgtataatttttaaaatgttttattattttgaaaataatgttgtaattcatgccagggactgacaaaagacttgagacaggatggttattcttgtcagctaaggtcacattgtgcctttttgaccttttcttcctggactattgaaatcaagcttattggattaagtgatatttctatagcgattgaaagggcaatagttaaagtaatgagcatgatgagagtttctgttaatcatgtattaaaactgatttttagctttacaaatatgtcagtttgcagttatgcagaatccaaagtaaatgtcctgctagctagttaaggattgttttaaatctgttattttgctatttgcctgttagacatgactgatgacatatctgaaagacaagtatgttgagagttgctggtgtaaaatacgtttgaaatagttgatctacaaaggccatgggaaaaattcagagagttaggaaggaaaaaccaatagctttaaaacctgtgtgccattttaagagttacttaatgtttggtaacttttatgccttcactttacaaattcaagccttagataaaagaaccgagcaattttctgctaaaaagtccttgatttagcactatttacatacaggccatactttacaaagtatttgctgaatggggaccttttgagttgaatttattttattatttttattttgtttaatgtctggtgctttctatcacctcttctaatcttttaatgtatttgtttgcaattttggggtaagactttttttatgagtactttttctttgaagttttagcggtcaatttgcctttttaatgaacatgtgaagttatactgtggctatgcaacagctctcacctacgcgagtcttactttgagttagtgccataacagaccactgtatgtttacttctcaccatttgagttgcccatcttgtttcacactagtcacattcttgttttaagtgcctttagttttaacagttcactttttacagtgctatttactgaagttatttattaaatatgcctaaaatacttaaatcggatgtcttgactctgatgtattttawcaggttgtgtgcatgaaatttttatagataaagragttgaggaaanaaaaaaanaaa

SEQ ID NO: 281 - DNA, 2025 bp, Homo sapiens
  misc_feature (1339)..(1339): n equals a,t,g, or c
  misc_feature (1916)..(1916): n equals a,t,g, or c
  misc_feature (1944)..(1944): n equals a,t,g, or c
ttattttacagcctcaaatatttctcattatcttgtcacttagttcttcatgtttctccttctgacttttaataatggtaataggaaaacaaaacccaaagcttttcagaacttcagtgtgaggtttcctattttracaagttaacttgtaaatactcaggttttacgatgtataatttacctaatagaccaaactaactcatggagatattttgaactattatttaggtacaaactttataaagaatgttagtatgtcataaaatataacattacagcttatttaaaaccaaatatagttgaacatatttaaaatacattttcacagaatggatgaattagttgtttcttcagagttacttatgaacagttgaatgctttaaaatgttctgtctgtaggtaacatctaaaacacaagtgggtttatttaaatttttaaaatttgaaattttttatttgcaaaaaattgttttatgctttattatatcgcaaatgagtgtcagatttttgagtaccaatgatcatgcttccattttttttagttttaaaccaccaaaccaatatttttcctttaaattttaatcttataatatagaaatcttatgtaaatgaaattttgtcatgtttcaaataaagagaactgaagtagaaaatagaaatgccagtaaacaacataatgtttaatttacaacttacattaggggtttgggggaatgctaattatatattgagaatatacattagaactcttcaaaatgggctcttctaatgaggtcactactgaacaaaattgttccctcttctgttaaatagaataggtttaaatgactagtcaaatgaattattttcttcttgttaaataaattaaatcttactttcttttaatgaccaaccttaggtaaaacaaaaatattgtaatcctagaaattatcctccagctttctcacctgaaaatctattgaagtgatccctggtcatcctaataatgggatgagggaagtttccagcagatttcaggctgttcttaaagtttttgttggtcattttctcaatagtacatgaaatcaagatgcttatgagcatggaaatgtatttaaagtttttgcttgtgtcctcctcagtcagaatagaaaagtaactgaaatactcttacctttctgtccttgataaaatagtaaagaaaaccaaacaaacccaggcctgatgggaaaaatgattcctttattctagcaacttactttctgttggtatgggaaatgttattaatttctattactaaagttcatatcacaaaatgatatttaataataaccttggggtaaatcatgaattttttttnctacgtgtgagtataaaagacaaaagttgaacagcatggaatctcattgccaaattattagtgaatgtatagttcaggtattctttgagacacacagtatcattaatttccgaattgtatttcagtgttattttttgtttgtgaccactaagcttctgtcttaatacaaagctgttaccttctacagaatttaagtctgaagatgtaaagagagaacaggccttgtgtaacagaagatactcttttttatgctccttactgtgatcacagaaaaattaaaaatccaagtgctctctagatttgttgataaacattttatgcttgcatttaaacttgaaatgtatgagcagaatgagacaatcagttaaatcagaaatgagaagtattataatgtaaaggccttgttttgctgtagcaataaaatgaccaagtgcaatgacttgatttaataaaatcatattttaaaagtgctgstatgaawatttttggctataaaattttaccctgacttgstttcaataactgttacgtaatgcagtttgatgttgtaacctaacattccaaaaaaaaaattganagggggaatctcaaaatagtatatactncactaacttgtttacaggtgctgtatttaaaagcatgcttctctctcaaaaagaaaaattaaaggattttattgccaaacc

SEQ ID NO: 282 - DNA, 852 bp, Homo sapiens
  misc_feature (767)..(767): n equals a,t,g, or c
  misc_feature (769)..(769): n equals a,t,g, or c
ccacccgccacaaggcccagctaatttttgtatttttagtagagacagggtttgattatgttggacaggctggtctcaaactcctgacttcaagtgatccacccgcctcggcctcccaacgtgawgggactatagacatgagccatcgtgcytggccttcttgawtcttgaatacggggttttgaggtgaaagcatttcatgaaaacttaagttcatacacaagagcatcatgaatattctaaaagaggtatctgtgctttttttgtgaccacaaaatattacttcttatgaaatgtttacactaggtgaggaaaagttcattaattacctttaaaccgttccttattttttttaagattttaaattgtattttggcttttgcctccagtatcctttctggttgctctggtttgaattaagttcctattatgctgcagcacatatcaaccttccctaagtaaccatttcctggaatgtgaagcatcggtgccattagcagaccatatgcagaaatgtcgtgtacttgcatttcttttttgtgcactctataaggctggttgtgactcagatcagcttaactttttatattatgttatttcactaactgctacagtcaaaatgatcaaatctttgtacaatagaaaattatttaaattttatttttctactgacatttctaattctagtgtaaatgtttatcaataaaaaattactttcaattctgagttggaattatatttctttttggtggctaaatgaggttaancntttggaataaaaaatgacttcaagttttcaattttttaaaataacttaaaaatcttagcaagggggaaacttttttttaaggg

SEQ ID NO: 283 - DNA, 571 bp, Homo sapiens
  misc_feature (7)..(7): n equals a,t,g, or c
  misc_feature (535)..(535): n equals a,t,g, or c
gcccaantactttccagcccagtaaggggtatttcaggagagcagtccactkaaggttctttccctttaagatatgtgcaggatcaagttgcggcaccttttcagctgagtaaccacactggccgcatcaaggtggtctttactccgagcatctgtaaagtgacctgcaccaagggcagctgtcagaacagctgtgagaaggggaacaccaccactctcattagtgagaatggtcatgctgccgacaccctgacggccacgaacttccgagtggtaatttgccatcttccatgtatgaatggtggccagtgcagttcaagggacaaatgtcagtgccctccaaatttcacaggaaaactttgtcagatcccagtccatggtgccagcgtgcstaaactttatcagcattcccagcagccaggcaaggcattggggacgcatgtcatccattcaacacataccttgcctctgaccgtgactagccagcaggagtcaaagtgaaatttcctccttaacatagtcaatatccatgtgnaacatcctcctgaagcttccgtccagatacatcagg

SEQ ID NO: 284 - DNA, 710 bp, Homo sapiens
  misc_feature (667)..(667): n equals a,t,g, or c
  misc_feature (689)..(689): n equals a,t,g, or c
  misc_feature (701)..(701): n equals a,t,g, or c
gtaagtttgagagcatctgctggaaaaccactagaatttgcaaacggccacctcaaaatactccagccagtcccactaagccaaagaccagaatctgagaacagggatggggaaattattcctttctgtggatgattatgcagctgggccatgatttcacacccgggggccatgggctaagatggaggggaaggaaggaatgtaatgtgtgccctctacctcttcaccaggcatcatcctctcactggccctggctggcattcttggcatctgtattgtggtggtggtgtccatttggcttttcagaaggaagagtatcaaaaaaggtgataacaagggagtcatttacaagccagccaccaagatggagactgaggcccacgcttgaggtccccggagctcccggggcacatccaggaaggaccttgctttgggaccctacacacttcggctctctggacacttgcgacacytcaaggtgttctctgtagctcaatctgcaaacatgccaggcctcagggatcctctgctgggtgcctccttgccttggggaccatggccaacccagagccatccgattcgatggatggggatgcactcttcagaccaagccagcaggaattccaaagctgcttgctgtaaatgtgtgagattgtgaatgggctgnattctggattcaaaaccagccngctggtgggccntaaggttgg

SEQ ID NO: 285 - DNA, 595 bp, Homo sapiens
taaaagagtgtcctaacagtccccgggctagagaggactaaggaaaacagagagagtgttacgcaggagcaagcctttcatttccttggtgggggaggggggcggttgcctggagagggccggggtcggggaggttggggggtgtcagccaaaacgtggaggtgtccctctgcacgcagccctcgcccggcgtggcgctgacactgtattcttatgttgtttgaaaatgctatttatattgtaaagaagcgggcgggtgcccctgctgcccttgtcccttgggggtcacacccatcccctggtgggctcctgggcggcctgcgcagatgggccacagaagggcaggccggagctgcacactctccccacgaaggtatctctgtgtcttactctgtgcaaagacgcggcaaaacccagtgccctggtttttccccacccgagatgaaggatacgctgtattttttgcctaatgtccctgcctctaggttcataatgaattaaaggttcatgaacgctgcgaaaaaaaaaaaaaaaaaaatttgccctatcagtgagtcggattaattgtccgcgcggccggacatttagtagtagt

SEQ ID NO: 286 - DNA, 1172 bp, Homo sapiens
  misc_feature (119)..(119): n equals a,t,g, or c
tactatttatagctttagatagggcctcccttcccctcttctttctttgttctctttcattaaaccccttccccagtttttttttatactttaaaccccgctcctcatggccttggccntttctgaagctgcttcctcttataaaatagcttttgccgaaacatagtttttttttagcagatcccaaaatataatgaaggggatggtgggatatttgtgtctgtgttcttataatatattattattcttccttggttctagaaaaatagataaatatatttttttcaggaaatagtgtggtgtttccagtttgatgttgctgggtggttgagtgagtgaattttcatgtggctgggtgggtttttgcctttttctcttgccctgttcctggtgccttctgatggggctggaatagttgaggtggatggttctaccctttctgccttctgtttgggacccagctggtgttctttggtttgctttcttcaggctctagggctgtgctatccaatacagtaaccacatgcggctgtttaaagttaagccaattaaaatcacataagattaaaaattccttcctcagttgcactaaccacgtttctagaggcgtcactgtatgtagttcatggctactgtactgacagcgagagcatgtccatctgttggacagcactattctagagaactaaactggcttaacgagtcacagcctcagctgtgctgggacgacccttgtctccctgggtaggaggggggggaatgggggagggctgatgaggccccagctggggcctgttgtctgggaccctccctctcctgagaggggaggcctggtggcttagcctgggcaggtcgtgtctcctcctgaccccagtggctgcggtgaggggaaccaccctcccttgctgcaccagtggccattagctcccgtcaccactgcaacccagggtcccagctggctgggtcctcttctgcccccagtgcccttccccttgggctgtgttggagtgagcacctcctctgtaggcacctctcacactgttgtctgttactgattttttttgataaaaagataataaaacctggtactttctaaaaaaaaaaaaaaaaaaaaaaaaaaaaaaaaaaaaaaaaaaaaaaaaaaagggcggccgctcgcgatctagaactag

SEQ ID NO: 287 - DNA, 780 bp, Homo sapiens
  misc_feature (161)..(161): n equals a,t,g, or c
  misc_feature (773)..(773): n equals a,t,g, or c
cgcggacaaggccaggctagccttgagctccgtcgggcagggcgccgggattggtgtccggcagagcgtgagccagcggtgcgamgtcggcgagcgggagtgaaagaagaaaagctagagagcgaaggcaaagccgaggagagagggccgcggtcggcganggaatctgactgcacggttgcgtgcgctcacttccggaggctccctcagscgggcggctccgstagtggctaaaggcaaagcattccggggcgcggcgcatgaagttgagcttcgtccctgctagccgccgctttctccccaaaaatacatcctagccttaatgtttatgcctccattgccccagttcttatctgttttgctcaatgtctcatagctacaagaaggcaatttctgacgaagccctccgtsccttccaaatggattattttggcgggcttycacccggacagtatgccacccgaatgactggacaagtgcacgggagcggctgtcatttgcggagtgcgccttgcgatctaggcgcctcacagcgmaaytatccagtaatttctctgaaatcgatgctggtttgttttcccaaggcaaatcagcagcttatacagacattggggccacaaagccggtggaacaacgggagacggcttcctgagtgtcaggtcctccaagatgagcttaaamttcgggtggtgggcaggytcgtaggcgggaaaggsccgtgtccagatgratgcaktccatgtatatattgatgaaagacacgtataccattnggtcaag

SEQ ID NO: 288 - DNA, 2375 bp, Homo sapiens
  misc_feature (9)..(9): n equals a,t,g, or c
  misc_feature (920)..(920): n equals a,t,g, or c
cggcagcgnaccaagatggcggcgccctgtgagggacaagcgtttgccgtagggttgaaaagaattggggtgcagtagttcgctccccagaagggaccccccagaaaatccggcagctgatagatgaggggattgccccggaagagggaggcgtggacgcgaaggacacgtctgccacatcccagtcagttaatggatcaccccaagcggaacaaccttcattggaatctacaagcaaagaagccttctttagcagagtggaaacattttcttctttgaaatgggcaggtaagccctttgagctgtctccactcgtctgtgcaaaatatggctgggtcacagtggaatgtgatatgctcaagtgctctagctgtcaagcttttctctgtgccagtttacaaccagcttttgactttgacagatataagcaacgatgtgctgagctgaagaaagccttgtgtactgcccatgagaagttctgtttctggccagacagcccatccccagaccgatttgggatgttgcccctggatgagcctgctattcttgttagtgaattcctagatcgttttcaaagcctttgtcacttggacctccagcttccttccctaaggccggaggacttgaaaactatgtgcttgacagaagacaagatcagtcttctcctacacttgcttgaagatgaacttgatcaccgaactgatgagagaaaaactacaatcaaattaggctcagacatccaagtccacgtcactgcctgtattctctctgtgtgtggctgggcgtgtagttcctctttggaatccatgcagctctccctgatarcatgttcgcaatgtatgargaargtggggctctggggcttccagcagattgaatcgtccatgactgacctggatgcatctttgcctgaccagctncccaatcccaggccttgaggggcgaccagagcgcttacctctggtgcctgaatctcctcggaggatgatgacccggagccaggatgccactttctccccaggctcagagcaggctgaaaagagccctggtcccattgtctcwcgaactcggagctgggactcttccagtcctgttgaccgtcctgagccagagctgctagccccaccaccagaactcgcccagtgacccgaagcatgggaacaggagacacccctggcctggaggtaccatctagccctctgcggaaagcaagcragctcgcctctgctcctccagcagttcggacacatcttcccgaagcttctttgatcccacctctcagcatagagactggtgcccttgggtgaatatcacacttggcaaagaaagcagggagaatggtggaactgaaccagatgccagcgccccagcagagccaggctggaaagcagtgctgaccatcctcttggcgcacaaacagtctagccagccagctgaaacggactccatgagtctctctgagaaatcaaggaaagtattccgaatatttcggcagtgggaatctctgtgctcatgctgaagatactccagcgccttcctggagatagctggaatgagagtgactttttgaaaaattaaggctgagttcctttcggtcagctgacactaagtttttcctgttctgggttaatcataaggagccccctgccatagcaaaggcagtgagtgtcaactatctgcatctggctgagagagacccgtttcctttcagggatgtggacagggtaagggcagcaagcatggttctgttaaaggagtgtggggttaacagactagaaggaagactaaggacctgaccacccatttcagcatcttcaatgtggagcagtgttctgaggactcttctatcctaggactatgacagtgtgtattaataaaatatttgctaagattctcattgttggagaactgttttcccccttgccctgtgggccggagaaacttcagtggaacattcaacttttgattttcagattggctgcaaagcctwaaatttgkgattccagtcaaggaggtataatctttcctwaaccaaaagcaagatgattttcattatgccaccaggaaatttcctggtgtgttatagtgaatggtcaactgataattttctccttgctttgataataacagaataaaacaacgtaatggggaggaaggcacttcagaagaracccctytccatgtgccattgaatgcatgagtcccccarttgggcttccccaagactcgttgcttttgggggatcatcagtttttgtggtagagaaggtggaccctgaactgcccactgataaagtaaccatgacctagcaaaggctagaaagtgattattctctgatatggccatgtttttcgtcactgagattgtttctcgtg

SEQ ID NO: 289 - DNA, 2461 bp, Homo sapiens
  misc_feature (14)..(14): n equals a,t,g, or c
  misc_feature (1164)..(1164): n equals a,t,g, or c
tttcaattcttggntttctgttcccttctaccaaaacccagcataggactcagtgtacacttactttaaaacaaaaactcacatttcttagctgcaggtgatggcctcagtcattttaatacagcctggaatgagtttgcttattacccagtcactttcgtagtgaatgttcaaaccccaaagcaaatgtttgcatctccttgtccataaaggagaaagccaggttataggagaaagagagagaaaggcgcatgtctgtttgcacagagagaggcaattttgtctacctttcgagaatcagttataaacagaagggcctcttaggattttgagctctcctgacaatgaaggaaaagctctcttgagtatacaagttccacactcattacctttcagtggtgacccatcacccactacaatttgttgaaggaagggagtgtcagagatatgctttaaagttgtactttaggctgaaattctctctgtatttggacctgcagatgttgtgtacagaaccgatgcatggcagggtcaggaagctaggagagtgaaggcgcttgtggagacagctctgtagcaaatgaaacacggaagcctccgggaatgtgtttgtgtcaccagcagcaggcatttccctgtcctccccacccccagtctccacatccccagcagcctcttccagaagcatgtcagggagacggacaggtgctctccttctcgtgcaccacatccaagtccacccaccgtggacgcagtgtgactaaatgctggccttgaagagaaaccctcagccagcttgtctgttgtccaggtccctcagtgtctctggtttccctgccctgcataatttaagcattagtgccaaatacatctgtcatattcctctccctggagactgcgaaatgtccagactttttcagactagtggagggaaggaatgttacataactaagtggaggcctggaactgtcaggatttgacagggctggaccagagacccttccgcctctgcctagtgtgtctgtcaggcaggcagcagccatcaatccaagaatgagccatggcggcaagcactktgtggagaaaggaacccagccgaggtctgagtttcagacagaaactggggagttgggacatcttctctgtgccaggcttcattgacancatcggtccttcattgasctgagcccaagccctcagtggaacctgtcaagagcatcagcagcatggagctgaagaccgagccctttgatgacttcctgttcccagcatcatccaggcccagtggctctgagacagcccgctccgtgccagacatggacctatctgggtccttctatgcagcagactgggagcctctgcacagtggctccctggggatggggcccatggcacagagctggagcccctgtgcactccggtggtcacctgtactcccagctgcactgcttacacgtcttccttcgtcttcacctaccccgaggctgactccttccccagctgtgcagctgcccaccgcaagggcagcagcagcaatgagccttcctctgactcgctcagctcacccacgctgctggccctgtgagggggcagggaaggggaggcagccggcacccacaagtgccactgcccgagctggtgcattacagagaggagaaacacatcttccctagagggttcctgtagacctagggaggaccttatctgtgcgtgaaacacaccaggctgtgggcctcaaggacttgaaagcatccatgtgtggactcaagtccttacctcttccggagatgtagcaaaacgcatggagtgtgtattgttcccagtgacacttcagagagctggtagttagtagcatgttgagccaggcctgggtctgtgtctcttttctctttctccttagtcttctcatagcattaactaatctattgggttcattattggaattaacctggtgctggatattttcaaattgtatctagtgcagctgattttaacaataactactgtgttcctggcaatagtgtgttctgattagaaatgaccaatattatactaagaaaagatacgactttattttctggtagatagaaataaatagctatatccatgtactgtagtttttcttcaacatcaatgttcattgtaatgttactgatcatgcattgttgaggtggtctgaatgttctgacattaacagttttccatgaaaacgttttattgtgtttttaatttatttattaagatggattctcagatatttatatttttattttatttttttctaccttgaggtcttttgacatgtggaaagtgaatttgaatgaaaaatttaagcattgtttgcttattgttccaagacattgtcaataaaagcatttaagttgaatgcgaaaaaaaaaaaaaaaaaaaaaaaaaaaaaaaaaaaaaaaaaaagggcggccgctcgcgatctagaactagt

SEQ ID NO: 290 - DNA, 2520 bp, Homo sapiens
accacttgcactccagccttgaacagagttaggatcctgtcaaaaaagaaaagaaaaagaaagcagcattcaaatgtaagacaactgtaaaatattgagccccacttggtctaaaattcaaaaagaagaacgcctgtccatcgcctttttataagtccttctctccacacctaaaagcagctgcagctggaagggcacaaattccactgtgtaaaataaaatattaggggcaacacacttcatcaaggcagcaggaatgagagagagcagagaagatcaaggatgaagtcttgggtactgaaaaattcagtgctgggcagaaaaactgacagggcagtacaagtaacaaacagaatccaagtggggtggcccttgtgcacagagctccaggtgacctctggagagacatgggcattcacatggaaagctaaaacggaagctcaagtttcatactcaacataatcttctgtgtgacaaaggacaagccatgtagcctctctgtgcctatttcttcatgcataaactgggactcataatatttgtaaaatgtattgatactctcagggcaaattcactatattgctatacagttgagatcagtgttgtaaaattaaactgatctggttctaattgcctcaaaggccaaagcccaggcatttgaaatggaaagaagcagagaggaggctgacttagctgattggtatggaaacagttgggccaagagccagaatttccctttgtagcaacacggctagttttactttgagaagctctgctcagctgctttataacattaagtctggcggaatggatgtcactgtgcacaataaagttttcacaagtataaacaatggtgatgtaagtcaacattgctgtagccaggtgtgaaggttgtatggtgtgtgacgaatgtacatcatgtttgtaggtttggatgctaatcttgaattgtagyttaaaaaatacgtatttttgtaactctttgaaagtttatgaagactgacagctttccttgtaagcactaagagaaaaaaaagaaagagggacatttgacaattttaaagaaacaacaagaaattagaatgaaaatctgtgacaaacagcgtcagtgtggccatgtccacattcctacatgtctctctctacaagcacctctctaagaagcctgacatcccggtggactctttatagtcatgtacacttgattccagatgagctctggtcttatctggatgctcagataagaggtttctatctgagcatccaatgttccctcaggttccaagacatttcaccccaggccctgggtttcactctgggaattcgtaggcttcacgtctctctagaaatgacgtgtaaaatttaagaccagacctcagccatcagcgtccagaccatcctagaagtctttcccaatctcacagagaaagccctagtatttcccagtgaccccaggattccacgttggggtggccaaagaaataggtctctcagggctttgccacagcctccagcccatccttcagaggcacacacagcacctctcggctgctccagctctgtaggatagcctcccctggggtccgtgggacgcgggccacagtgttgaggtagacaaggaggatcagtgagaggcctcttccctctccacagagactggattgtcattgttccttcatttatatcgtagggcttaacatttcactcaaaaaaaagcccctctttttctaatccttagtctttgtttcaaggaaagccagtttttcttctaccacattttccaggatcgactttaagaaaaatgcaacatctattgaaaaaaagtggggtgtatgcatgtggtttaattccagattgcttttgggtttaagtggtatcaaatttcagtatatttctgtcttatgtgaaagaaatatattactaaaacgtcagtgagcaataatgtcagctgtcaagcactagatttatttttgcaggatatggagtgcaatgaactgagtcaatatggcaaggtgtatgtgatctgtgggagttatgccatttaacataggaagtgcatgggactttccctctctgcactccagctcttactgtaccattagaagatgcagaattctgttggtgtgcaaaaagtatagccttacattcaagcagaatggatctgaagaaagcagcaatatctgttactagagaacattcccatgtgtttaaactcttcacttcttagatgcatttaaattcttaatgcaaatgacgtagcaatttgaaaacttctccgtattacttgtgtttaaaatgtcttgctttaaatacaaaacaaatggtaaaggggattatcttttgtttagatggttaaatattatttttgccttagatagctttgtaataatttttctccagacagttcaacacttttgaaaaatgacatgaattttcattaaaaacccttttcctatgtttattgtatacaagaattatgcaataaaatttctttataaaaataaaaaaaaaaaaaaaaaa

SEQ ID NO: 291 - DNA, 1448 bp, Homo sapiens
  misc_feature (1427)..(1427): n equals a,t,g, or c
  misc_feature (1432)..(1432): n equals a,t,g, or c
  misc_feature (1440)..(1440): n equals a,t,g, or c
cagcgccactagcctcattgtgcccaggagttctccaaacccgcgctgcggagtgagtgaccaagttccggccagttcgacctcgaggatccagaggtggagacggtactacctcccagctctgttttccatccccttcaggtccttcctcgggaggcggcgaaggcggtccaccctgcgcgtgatccttyatgcccggcccctgcccctccctccgggtggaacttccccctcaccgccagacttaagctgaggatcgttggatctctggcggggtgcagaactgagcccaggccacagtaccctattcacgctctgtgcttgtgccaagggggcaatggcggcttcctgtgttctactgcacactgggcagaagatgcctctgattggtctgggtacctggaagagtgagcctggtcaggtaaaagcagctgttaagtatgcccttagcgtaggctaccgccacattgattgtgctgctatctacggcaatgagcctgagattggggaggccctgaaggaggacgtgggaccaggcaaggcggtgcctcgggaggagctgtttgtgacatccaagctgtggaacaccaagcaccaccccgaggatgtggagcctgccctccggaagactctggctgacctccagctggagtatctggacctgtacctgatgcactggccttatgcctttgagcggggagacaaccccttccccaagaatgctgatgggactatatgctacgactccacccactacaaggagacttggaaggctctggaggcactggtggctaaggggctggtgcaggcgctgggcctgtccaacttcaacagtcggcagattgatgacatactcagtgtggcctccgtgcgtccagctgtcttgcaggtggaatgccacccatacttggctcaaaatgagctaattgcccactgccaagcacgtggcctggaggtaactgcttatagccctttgggctcctctgatcgtgcatggcgtgatcctgatgagcctgtcctgctggaggaaccagtagtcctggcattggctgaaaagtatggccgatctccagctcagatcttgctcaggtggcaggtccagcggaaagtgatctgcatccccaaaagtatcactccttctcgaatccttcagaacatcaaggtgtttgacttcacctttagcccagaagagatgaagcagctaaatgccctgaacaaaaattggagatatattgtgcctatgcttacggtggatgggaagagagtcccaagggatgcagggcatcctctgtacccctttaatgacccgtactgagaccacagcttcttggcctcccttccagctctgcagctaatgaggtcctgccacaacggaaagagggagttaataaagccattggagcatccaaaaaaaaaaaaaaaaaaanayctngsggccgncaagggaa

SEQ ID NO: 292 - DNA, 827 bp, Homo sapiens
  misc_feature (725)..(725): n equals a,t,g, or c
  misc_feature (800)..(800): n equals a,t,g, or c
  misc_feature (814)..(815): n equals a,t,g, or c
  misc_feature (817)..(817): n equals a,t,g, or c
  misc_feature (819)..(819): n equals a,t,g, or c
gcggacgcgtgggcggacgcgtgggtccaagggaccccaaagctccagggcagtttgggcgtcctgtagttgtcccccatggaaaggagaaggaggcagaaagaagatggaaagaaggaaacttcaatgtctaccttagcgatttgatcccagtggatagagccattgaagacaccagacctgctggatgtgcagagcagctagttcacaataacctcccaaccaccagtgtcatcatgtgctttgtggatgaagtgtggtccactctcctgagatctgttcacagtgtcatcaatcgctctcctccacacctcatcaaggagattctgctggtagatgacttcagcaccaaagactatctaaaagataatttggataaatacatgtcccagtttccaaaagttcggattcttcgcctcaaagagagacatggcttaataagggccaggctggcaggagcacagaatgcaacaggtgatgtgttgacatttttagattctcatgtggaatgtaacgttggttggttggaacctcttctggaaagagtttatttaagtagaaagaaagtggcctgtccagtaatcgaagtcatcaatgataaggatatgagttacatgacagtggataactttcaaagaggcatctttgtgtggcccatgaactttggttggagaacaattcctccagatgtcattgcaaaaaacagaattaaagaaactgatacnataaggtgccctgtcatggctggtgggattggtttctattgccaaaagttactttttttgaacttggaacatacnaacccttggccttnnangntttggggg

SEQ ID NO: 293 - DNA, 524 bp, Homo sapiens
  misc_feature (518)..(518): n equals a,t,g, or c
  misc_feature (524)..(524): n equals a,t,g, or c
gcgcatttggccgcctccctaccgctccaagcccagccctcagccatggcatgccccctggatcaggccattggcctcctcgtggccatcttccacaagtactccggcagggagggtgacaagcacaccctgagcaagaaggagctgaaggagctgatccagaaggagctcaccatkggctcgaagctgcaggatgctgaaattgcaaggctgatggaagacttggaccggaacaaggaccaggaggtgaacttccaggagtatgtcaccttcctgggggccttggctttgatctacaatgaagccctcaagggctgaaaataaatagggaagatggagacaccctctgggggtcctctctgagtcaaatccagtggtgggtaattgtacaataaattttttttggtcaaatttaaaaaaaaaaaaaaaaaaaaaaaaaaaaaaaaaaaaaaaaaaaaaaaaaaaaaaaaaaaaaaaaaaaaaaaacaaaaaaaaaaaaaaaaaaaaaaaaaaaaaanacaaan

SEQ ID NO: 294 - DNA, 613 bp, Homo sapiens
cctcactaaagggaacaaaagctggagctccaccgcggtggcggccgctctagaactagtggatcccccgggctgcaggaattcggcacgagccgcaggccacgagaagctgccggtgcacgtagaagacgccctcacctatctggaccaggtgaagatccgctttggcagcgaccctgccacctacaacggcttcctggagatcatgaaggagttcaaaagccagagcatcgatactcctggagtcatcagacgtgtctcgcagctcttccacgagcaccctgacctcattgttggattcaacgcttttcttcccctcggatatagaatagacattcccaagaatggcaagttaaacatacagtcgcctctgacaagccaggagaattcgcacaaccacggggacggtgcagaggacttcaagcagcaggtgccgtwtaaagaggacaaaccccaggtgcccctggagtccgattccgtggaattcaacaacgccatcagctatgtgaataagattaaaacccgcttctagaccacccagaaattacaggtcattcctggagatctgcacacstwccaraargarcarctgaacacgaggggccggccattc

SEQ ID NO: 295 - DNA, 533 bp, Homo sapiens
ggcacgagsggcgggaacacgcggggcccaagatggcggccagccggtaccggcgttttcttaagctctgtgaggaatggccagtggacgagaccaaacggggccgggacttgggcgcttacctgcgacagcgggtagcacaggcctttcgggagggagagaatacccaggttgcagagcctgaggcctgtgatcagatgtacgagagcttagcgcgactccattcaaactactacaaacacaagtaccctcgccccagagacaccagcttcagtggcctgtcgttggaagagtacaagctgatcctgtccacagacaccttggaagagcttaaggaaatagataaaggcatgtggaagaaactgcaggagaagtttgcccccaagggtcctgaggaggatcataaggcctgagctcaggccttacctcgtgcacatacctaggtgtggagtcttgtacattgccatcgtcaataaaactgccccagtttccccttgaaaaaaaaaaaaaaaaaraaaaagaaaaaagtcgac

SEQ ID NO: 296 - DNA, 2071 bp, Homo sapiens
  misc_feature (303)..(303): n equals a,t,g, or c
caagcggaaaataatgatcaagcggcacgaggtggagcagcagaacattcgggaggaactaaataaaaagaggacccagaaggagatggagcatgccatgctaatccggcacgacgagtccmcccgagagctagagtacaggcagctgcacacgttacagaagctacgcatggatctgatccgtttacagcaccagacggaactggaaaaccagctggagtacaataagaggcgagaaagagaactgcacagaaagcatgtcatggaacttcggcaacagccaaaaaacttaaaggccatggnaatgcaaattaaaaaacagtttcaggacacttgcaaagtacagaccaaacagtataaagcactcaagaatcaccagttggaagttactccaaagaatgagcacaaaacaatcttaaagacactgaaagatgagcagacaagaaaacttgccattttggcagagcagtatgaacagagtataaatgaaatgatggcctctcaagcgttacggctagatgaggctcaagaagcagaatgccaggccttgaggctacagctccagcaggaaatggagctgctcaacgcctaccagagcaaaatcaagatgcaaacagaggcacaacatgaacgtgagctccagaagctagagcagagagtgtctctgcgcagagcacaccttgagcagaagattgaagaggagctggctgcccttcagaaggaacgcagcgagagaataaagaacctattggaaaggcaagagcgagagattgaaacttttgacatggagagcctcagaatgggatttgggaatttggttacattagattttcctaaggaggactacagatgagattaaattttttgccatttacaaaaaaaaaaaaaaaaaagaaaacaraaaaaaattcagaccctgcaaaaccacattccccattttaacgggcgttgctctcactctctctctctcttactcttactgacatcgtgtcggactagtgcctgtttattcttactccatcaggggcccccttcctccccccgtgtcaactttcagtgctggccaaaacctggccgtctcttctattcacagtacacgtcacagtattgatgtgattcaaaatgtttcagtgaaaactttggagacagttttaacaaaaccaataaaccaacaacaaaaaaagtggatgtatattgctttaagcaatcactcattaccaccaatctgtgaaagtaaagcaaaaaataataataataaatgccaagggggagagagacacaatatccgcagccttacaccttaactagctgctgcattattttattttattttatttttttggtatttattcatcaggaataaaaaaaacaaagttttattaaagattgaaaatttgatacattttacagaaactaattgtgatgtacatatcagtggtgacatattattacttttttggggacggggggtgggtggggtgaagagatcttgtgatttttaagaacctgctggcaagagtttaacttgtcttcagcatattctgattgtatcataatcattttctgctgttgcagaggatgtgaatacacttaaggagctcacagaatcccagtagcacaaattgggctttggcaaatcgtgtattttgtgtatagaaggaatttaaggagaggtattacttattttcatattgtattttaactgtttctctgatcaaatttttttacttcctcctcctgttcctccccacctccctccttttccagttcagtatttggagttcaacactgtctctcaatcagatcatcttgatctttttctttatctcccttccccttcctaagtcccatttcttggtcataaatattgcattattcacactttcaaactgtgtattttcttacaataaaaaatgatgaaaaaaaaaaaggctttacttcttttgcatgcactttaaaaacaaaacaaaacatttttcaggttccaaggaaragcatgataactgtcagagcttttaattatatttgtaaataaaagtgttcatcacaaaaaaaaaaaaaaaaaaaaaaa

SEQ ID NO: 297 - DNA, 1966 bp, Homo sapiens
  misc_feature (56)..(56): n equals a,t,g, or c
  misc_feature (788)..(788): n equals a,t,g, or c
  misc_feature (1753)..(1753): n equals a,t,g, or c
gaactagtctcgagttttttctgtctagctccgaccggctgaggcggcgcggcagnggagggacggcagtctcgcrcggctactgcagcactggggtgtcagttgttggtccgacccagaacgcttcagttctgctctgcaaggatatataataactgattggtgtgcccgtttaataaaagaatatggaaactgaacagccagaagaaaccttccctaacactgaaaccaatggtgaatttggtaaacgccctgcagaagatatggaagaggaacaagcatttaaaagatctagaaacactgatgagatggttgaattacgcattctgcttcagagcaagaatgctggggcagtgattggaaaaggaggcaagaatattaaggctctccgtacagactacaatgccagtgtttcagtcccagacagcagtggccccgagcgcatattgagtatcagtgctgatattgaaacaattggagaaattctgaagaaaatcatccctaccttggaagagggcctgcagttgccatcacccactgcaaccagccagctcccgctcgaatctgatgctgtggaatgcttaaattaccaacactataaaggaagtgactttgactgcgagttgaggctgttgattcatcagagtctagcaggaggaattattggggtcaaaggtgctaaaatcaaagaacttcgagagaacactcaaaccaccatcaagcttttccaggaatgctgtcctcattccactgacagagttgttcttattggaggaaaacccgatagngttgtagagtgcataaagatcatccttgatcttatatctgagtctcccatcaaaggacgtgcacagccttatgatcccaatttttacgatgaaacctatgattatggtggttttacaatgatgtttgatgaccgtcgcggacgcccagtgggatttcccatgcggggaagaggtggttttgacagaatgcctcctggtcggggtgggcgtcccatgcctccatctagaagagattatgatgatatgagccctcgtcgaggaccacctccccctcctcccggacgaggcggccggggtggtagcagagctcggaatcttcctcttcctccaccaccaccacctagagggggagacctcatggcctatgacagaagagggagacctggagaccgttacgacggcatggttggtttcagtgctgatgaaacttgggactctgcaatagatacatggagcccatcagaatggcagatggcttatgaaccacagggtggctccggatatgattattcctatgcagggggtcgtggctcatatggtgatcttggtggacctattattactacacaagtaactattcccaaagatttggctggatctattattggcaaaggtggtcagcggattaaacaaatccgtcatgagtcgggagcttcgatcaaaattgatgagcctttagaaggatccgaagatcggatcattaccattacaggaacacaggaccagatacagaatgcacagtatttgctgcagaacagtgtaagcagtwtmagwttagctttgtgttagcttatacatactaaaacctttaaaaagcttttcttctcaattgatttttttcttttagaagccatggtgtctcaaccttttggggacctaacttctaaacattctaatagtttgccttaatttttcttctgctttcttactaaaaacgargacattcaatactaatcttgcctggnaggaagccttgaaccaagcaaacttctgcatttctctggtgaaaactgctgccaaaaccacttgttaaaaattgtacagagcctgtaggaaaatatagaaggttccattgggatgttggcctagttctgtgtgggaagacttagtggattttgtttgtttttagataactaaatcggccaacaaatcaccgttctggcctatgggaccgggcc

SEQ ID NO: 298 - DNA, 869 bp, Homo sapiens
  misc_feature (869)..(869): n equals a,t,g, or c
gctctggcgggcataccagcgggccctggccgctcacccgtggaaagtacaggtyctgacagctgggccctgtggtaggaggctggtacaaggttttggatcggttcatccctggcaccaccaaagtggatgcactgaagaagatgttgttggatcaggggggctttgccccgtgttttctaggctgctttctcccactggtaggggcacttaatggactgtcagcccaggacaactggccaaactacagcgggattatcctgatgcccttatcaccaactactatctatggcctgctgtgcakttagccaacttctacctggtcccccttcattacaggttggccgttgtccaatgtgttgctgttatctggaactcctacctgtcctggaaggcacatcggctctaagcctgcctcactccatcgtttccaccttgcagtgatgcagcttgaccctggaacggtcagacaacctcctcaaagtgggcataccagtttccacggggttgggttgccggtcagagcttaagaggactagcaccctgcaatgcccctcttcactctaaaatgtacactgactgctttagagcccttgataatagtcttattcccaccacatactaggcactccataaatatctgttgaaccttcatgaccttatcaactttacacccatatcccagcaaatgccactcatccccactcttcatagacacatttgttactctaaccctgcctaggcttcttgtagctccagctctttagagactcccggaaccctttatatggtgcctcagtaaatatgttattaaatatgtaatccggaaaaaaaaaaaaaaaaaaaaaaaaaaaaaaaaaaaaaaaaan

SEQ ID NO: 299 - DNA, 1105 bp, Homo sapiens
  misc_feature (34)..(34): n equals a,t,g, or c
cagaatgtattcggcagaaaagggactcaggtangcccagcctgggactgagagcagaaaagcattcaagatttgcaggccttgctatggatgcgcttaatcaccatggaggccagcaatacccatctcagcatggctttgatattctctacttcctggcctttaaaaatgacctataatttttcagtttgctttactatattttataaagaaaattctatcttatggttgattgagcattgagacttatgaaggcattaggatagatagctcaggaatgtaaaggttcagaaaaggtctgttttctcagattaacaaatatgatggattccatggctgaccttggtgcttaaaccaggaggtttcaatctagtcctagagttgtgtccctctgaaaggcccaatgccatgtaactaactttaaactggatatatactttgagccttacttaattcacagataagttgacttaactcagtatttttatttcaattaatgaaaacagtcctcttttcaaccccaggttgcttacattttgctggtctccccaagtgaccattggtggagaccaattaatgaaggaatgaaattcactttattgggactgtggtattcaacagagccacacttaaccactttttccaatgaagaatctccagaatgataatgcccaaatatggatggccaaraagaatttgtatctacggtgtgctttatgtgtttttgacactgctgtattctgtgtgatcaagtgatttgsagctggttccaatgtkactgagtgttctcaaaratttctagtaactaagtcaacttaattttcttaagcctggtattactatcagcctcacatttaccactttgattctagttttttaactgttcataacagggcataccgagggttgggatgagagcctacttcctacctcttaaggcactttcctcattattttgccatataatcttgaactgcatgataagctgtttaaatgtccatgacttctcccagagcaactagcaaagtatatgaccattttgaatagaggttagtggaaaggaaaatgtagaggttttaagttccagaggtacaaacctccaata

SEQ ID NO: 300 - DNA, 1982 bp, Homo sapiens
tggatcccccgggctgcaggaattcggcacgagcagagacgtggaggcgtgagggagaacatgcttgttaaatatgcaggtagattaggagacaccaaacagagattcagacacagtaaggctgggatgagatcctcgaagctgtgttttaacaaactccactggagagtcccatattccctcaaatttgggaatcacgaccctgaaccaggttgggcctgaagcagtcaactgaattcactttttcggatagtaatttgttcccaggggcagtgacaaccatgatgttccaggtttggtctggcactctgccttgaacgtaggaagctcttgatgatttgtggaatgaatttttaaaaaattactatctggggaaaactagttggcatacagagttgtaggacagggtttatgtgattcatttgatattttagtattttggtgtaaaagccaacaggcaaactttgccaggtactgtgtagaaactcgaaaatgtgaggccagtttgtacagttcagaggaaatgctttaacgtagaatcagatagctggaagagatcttcgagggaaagtaagttccctaaagtcacatctatgtctcctagctcagtgttctttgtcattgtgtgtgtgtgtgtgtgtgtgtgtgtgtgtgtgtgattagaaagggcttcattcataccttttcccttggacctggaaaaaaaattttttttatcttttcaaatgaaatctattgatttctagtaatcatatktgaatcaatgttaaagcatatatagtcttatatgtaaactagattcttaagattatktgaacctttgagatgaagtttacactcaactaaaatcattccattgattttattgattaacatcaatcagtatgtttaaagttattctaagaagcaatagtttatttttaaaaaccttgtayagcaaaataacttaaaaccctttgtgatatcatcttaccagtttatttggtaaaaacaaacagttatttggtatttgtcagaattcttcagtgcctgctattacagctattttccaattactaatttgattatactcactcaaggcagtgcaagatcttgaagtactttttagcagttaagtaatattgaattgtattgaatagtttacatagtttattctagtctttgaaaattactgaacatggacaatgtgcatgtcattgacatctgccttagaacttctgggacaatcctgattcgagagattctatcccattatttacatataccaaaaatactttgttaatttaatgtgttggcttcccaactcctgaacacgacacaattttattattagattttgtatggtgattttaggctatgaaaacatgatcattatatgtatatagatacatttttatttgttacaaatgtttgagcagctcactagcccacccctcctctattttgggtaagagaatttactaccttttttaactatgtagttgagagcaacatgtattttgttatttttagaatggtcagtatattgctataaaattttaaatgagactatgaaagttaaagtattctgattctggttaaattaacgaatatggttccaggccctgttctctgggtttttgagagagaataaaggttatgtttgtcttacctttgttatcgagtttgctgaattcttttgaacgatgatcttaaaggcacaaacaccaccagccactttgctaatttcttaatagcagatttacattgcagcaagaaaaccatcttttatagtaacattcagttaaaatgaactcaattcattgttaacttcctaaaacagaatttgaactttatcaacctcaacgtgtatataaactagatagtcctcaatactttatcaacctcaacatgtatataaactagatagtcctcaaatactgtttgaatttaataaatgtcaatttaaaaattttaaaaaaaaaaaaaaaaaaaaaaaaaaa

SEQ ID NO: 301 - DNA, 2329 bp, Homo sapiens
tttttttactctagggaaaacactgacgaatggtcagagctcctatcctgatcttttcatcaaggcgcctttcctaataatatggttcaactgtgaatgtagaagtgggggggaggggggagaaaaagaaaactctggcgttagaggatatagaaaaatataagtacaattgttacaaataacgcagacttcaaaaacaaaaaaatcacaacccaaacaaaccaaaatttaaatgatcagaattggcagcacaaagaaaacgccctctcctgacttgtattgtggcagtctgaacgcccccagaaaattgtgccaaagagtttagaaaaataaatatacaataaaagtaaacacatacacacaaaacagcaaacttcaggtaactattttggattgcaaacaggataattaaatgttcaaacaatctgataaaataaccatttggaaactgcttggccttctgttcttttatttgattgactacaatgcggtattggtctcttgctgcacttcaaaagcaaccaacaaaacaaaaacaaaaaaaagtgtgtgtgtgtgaatacacacacacactaactagaagtcttgtgatgaaaatggcacttggaaaaggttttatttttccactgaagttgaaggttaataaaatggtgtcaaacgtcccctggtcacacacttgaatatttttttagaagtgtgatgtggtatgattaccataaatcagacttaattattttcccttttacaagggaacagggcatcctgaattttagagcctttcagcaataagaagggatgttggtgagctttgatcctcttttggttttgcagttgttaggagtttttgctggcattttgaatatgctgctttcagaaaaaccaaggaagttttaaaattgcttcctggtccttagaggactaaaaacaagaccctcattcccactttcatttccactctagcaaaaactgggcttgcgtttttctccaactcctcgtttatatcctcccttccatgtccaagccttccattcctaagtgggattggctcagttttgcccatccatatggcagcatctctaatagctcttgtacagggtatcagatattgtgccttttggtgccaggttcaaagtcaagtgccgatctatgaaccagtgtacaaaaaaaaaaaaatccaggtatttgaaggagagacgctccattgtgaataaagagctcataccagctcctaagccctattaagaagaggcctggtcctctaatgccttgtttccatttcagttgttctttgagagacagaatgatgtactaaccattcgtgattattaagatagggttgggtcagggcttagggagggggcagaaatattggggatagaaaaaaaatctgatcattcctcagtgctacccatttctgtcctgtgtgggctgcttagctagacagcaggagaataaagtacaccgagaaccataatgaaaaaaccttccgtgtgttttgtcatgttttgttccagggaagcagttgatgagtgctgttactaatgctttctcccagatccattcagtggtggagaggaggaaaatgggctggttggatgtggtcttggtgccttgcagttactctgcactggttatgcatttaattctcctcttttctagttaaccttttgccagtgggttttccatagtctgggtatttgkccttatatcagttataccacctaaggcaactgggtgcaaaatgcattctgttcactcactgtctgggccttccccaccctagtcttggcacattccttcaagaatgtagttaccgtctgcttgggaagatgtcagtgcaaatgtgaagataatgggcatcggactaggctttggtttkccacaagtggcagctgcctgtatcaattacatttattaattttgcttttcatttttcccagttctcctcaccccccctttgttgaaatgttggacttgctgtcagaggcaactgtaatattgccttagggacttgtggagaaggggaattgctcagtgtagtgttttaactttcagaaccaagcaatctatttactcttacaaatatttaagaagtgtgttagtccaactttaagaaaaatccaaactcatcagcttttgatagcatcttggtttttgaaacaacttcaatctgtaattggcattcagaatgcccttggcatgccagtctgtgatggcatttaagacctgtaaaacacttgagcccaactcgattaaccaaaaccgataaccaccacctttatcttctaaataaagtccgctttatttttattttcaacaaaaaaaaaaa

SEQ ID NO: 302 - DNA, 2424 bp, Homo sapiens
  misc_feature (666)..(666): n equals a,t,g, or c
  misc_feature (1757)..(1757): n equals a,t,g, or c
gatcaattctcacttaagaggccaataaacaacccaacatgaaaaggtgacaagcctgggtttctcccaggataggtgaaagggttaaaatgagtaaagcagttgagcaaacaccaacccgagcttcgggcgcagaattcttcaccttctcttcccctttccatctcctttccccgcggaaacaacgcttcccttctggtgtgtctgttgatctgtgttttcatttacatctctcttagactccgctcttgttctccaggttttcaccagatagatttggggttggcgggacctgctggtgacgtgcaggtgaaggacaggaaggggcatgtgagcgtaaatagaggtgaccagaggagagcatgaggggtggggctttgggacccaccggggccagtggctggagcttgacgtctttcctccccatgggggtgggagggcccccagctggaagagcagactcccagctgctaccccctcccttcccatgggagtggctttccattttgggcagaatgctgactagtagactaacataaaagatataaaaggcaataactattgtttgtgagcaacttttttataacttccaaaacaaaaacctgagcacagttttgaagttctagccactcgagctcatgcatgtgaaacgtgtgctttacgaangtggcagctgacagacgtgggctctgcatgccgccagcctagtagaaagttctcgttcattggcaacagcagaacctgcctctccgtgaagtcgtcagcctaaaatttgtttctctcttgaagaggattctttgaaaaggtcctgcagagaaatcagtacaggttatcccgaaaggtacaaggacgcacttgtaaagatgattaaaacgtatctttcctttatgtgacgcgtctctagtgccttactgaagaagcagtgacactcccgtcgctcggtgaggacgttcccggacagtgcctcactcacctgggactggtatcccctcccaggktccaccaagggctcctgcttttcagacaccccatcatcctcgcgcgtcctcaccctgtctctaccagggaggtgcctagcttggtgaggttactcctgctcctccaacctttttttgccaaggtttgtacacgactcccatctaggctgaaaacctagaagtggaccttgtgtgtgtgcatggtgtcagcccaaagccaggctgagacagtcctcatatcctcttgagccaaactgtttgggtctcgttgcttcatggtatggtctggatttgtgggaatggctttgcgtgagaaaggggaggagagtggttgctgccctcagccggcttgaggacagagcctgtccctctcatgacaactcagtgttgaagcccagtgtcctcagcttcatgtccagtggatggcagaagttcatggggtagtggcctctcaaaggctgggcgcatcccaagacagccagcaggttgtctctggaaacgaccagagttaagctctcggcttctctgctgagggtgcaccctttcctctagatggtagttgtcacgttatctttgaaaactcttggactgctcctgaggaggccctcttttccagtaggaagttagatgggggttctcagaagtggctgattggaaggggacaagcttcgtttcaggggtctgccgttccatcctggttcagagaaggccgagcgtggctttctctagccttgtcactgtctccctgcctgtcaatcaccacctttcctccagaggagnaaaattatctcccctgcaaagcccggttctacacagatttcacaaattgtgctaagaaccgtccgtgttctcagaaagcccagtgtttttgcaaagaatgaaaagggaccccatatgtagcaaaaatcagggctgggggagagccgggttcattccctgtcctcattggtcgtccctatgaattgtacgtttcagagaaattttttttcctatgtgcaacacgaagcttccagaaccataaaatatcccgtcgataaggaaagaaaatgtcgttgttgttgtttttctggaaactgcttgaaatcttgctgtactatagagctcagaaggacacagcccgtcctcccctgcctgcctgattccatggctgttgtgctgattccaatgctttcacgttggttcctggcgtgggaactgctctcctttgcagccccatttcccaagctctgttcaagttaaacttatgtaagctttccgtggcatgcggggcgcgcacccacgtccccgctgcgtaagactctgtatttggatgccaatccacaggcctgaagaaactgcttgttgtgtatcagtaatcattagtggcaatgatgacattctgaaaagctgcaatacttatacaataaattttacaattctttggaaaaaaaaaaaaaaaaaagtcgac

SEQ ID NO: 303 - DNA, 2160 bp, Homo sapiens
  misc_feature (470)..(470): n equals a,t,g, or c
gctcgtgccgtggatgcggctctgcaggatgaagatgagatacaggtggatgcatcatcatttgaaagcactgcaaataagaaatcctcctcctcttcctcaggaacccctgcatctcagctttatccacagtctcgggggctggttccaaagtaaagccagcttctcctctcccagggcggaaacagcatttgccttctgagagaagagactagcaaaaagctgcagagaggattcggcccaaactcagaactgttcccctgaggagaagcggtggcctctttgcagatcaaccaacttaatctggttgaacgtgctgttcctaatctggcactcagcccctctgggaaacatcttttaattagcatctcagaaatgcatgggtaaggtaaagtgcgatagttcaagtggaaagcaagagaatgaccagtgaccttgcttccttcccccttgccttcttctcccccttnccctgtgctccctttctctcctctctccttttctagcctgttcttwacatggggctcccttcttgttgaacaatagggcagaatcaggrgtcaccttagcaggaccacatctttggagcctcgggataaaatgacagtgaggttgaaaagtgaaaaccctaggaacttgaataggtgcctgttcttgtagggagaaatgagaaatcgcatttggatccaggccccaggtgggcaccatcagcagtcttgcttccatgcacctcagtaagaagtggatctgcctttgggacctgctcagtgaggaaatctcttccaatttctgcttctgaatgattcaatgttgggagcaatagaaataacattccctttgccttctctgagtgtttagggaaatagcttctttaaaacctcaaaaccatgaccatcctgtcaaagacctaagtctgtaagctggtgccatgtccatacaccatgtcactttactcttcatttgtcaccatcttttcccatgcacgcatactctgaacatccttgtgtgggcccatcctctgcatccagagcatgctctgcagtgggcctgttttgtggaagaaaggaggctgtctctgccttctctgatgggactggagttgagggaaggagctgtattgtggcacttctgaattccccgttttgttccatattggtatagagagcagaagagtagctaggcagatgcagagatggagacatgagactcagtgcagtgggcagggaagacataacagatggaagcaaaggaatcctgcctgccttcagcagagaattcaccgaatcctagaactgtggctccctccaggcagagcctaagatgctggtgaagaatagctgtgtgattgaataggctcaaaggagagttcagaattcccatttacatattactagtttggtttgtaagttttagttccttgtattattgagattcagagcttcattttatgttggtcattaggtgaatattactcattttccctcaagagaagctcataagtgtgtgtgggtgtgagagcacgatggtgcctgtgttctgtgaatgtgtccatatgtgtctgtaagagagacagagaccaagaacttgcccaattttagaaatacactaatgtgcagttgttgccttttgtctgtattgaaggcccattgaatgactaatccaggctggaagcattcccatgtgggtgtctgagtccatgagccaagcctgaggggacagtgagtctccaggtctgccacactggtgcaccttgctggcacggtgcctcaggaaggtggcgactcargtgggccttgagttatattttaactcagctgctcagttcccagggcacatttctggatcagaacccatgggaaacaggaggtactaagtgcaatgtcttagcattctgcaaaatggagatctgttgtccagcggcttatctcctttttagtaacccttctttctgaacccagggcccttttcagccttccctcatattttcttgagatcaaactttacttctttcttatttactaagaatttgcctgtttgaataagaacaaaacgctaaggtgggtagcctaagctgattttctgctggttacacgtgtctctcacaccacatttcctcaaagctaatctgaattctgtaggctaaaaatattcatgtagcaa

SEQ ID NO: 304 - DNA, 1257 bp, Homo sapiens
tcgaatgtcatcaggaatgagcagctgcccctgcagtacttggccgatgtggacacctctgatgaggaaagcatccgggctcacgtgatggcctcccaccattccaagcggagaggccgggcgtcttctgagagtcagggtctaggtgctgrakygcgcacgraggccgatgtagaggaggaggccctgaggaggaagctggaggagctgaccagcaacgtcagtgaccaggagacytcgtccgaggaggaggagtccaaggacgaaaaggcagagcccaacagggacaaatcagttgggcctctcccccaggcggacccggaggtggcacggctgcccatcaaaccaacagacaggaaaaaagcccccaggaccctggggaccccgtccagtacaacaggaccacagatgaggagctgtcagagctggaggacagagtggcagtgacggcctcagaagtccagcaggcagagagcgaggtttcagacattgaatccaggattkcagccctgagggccgcaggctcacggtgaagccctcgggaaagccccggaggaagtcaaacctcccgatatttctccctcgagtggctgggaaacttggcaagagaccagaggacccaaatgcagacccttcaagtgaggccaaggcaatggctgtgccctatcttctgagaagaaagttcagtaattccctgaaaagtcaaggtaaagatgatgattcttttgatcggaaatcagtgtaccgaggctcgctgacacagagaaaccccaacgcgaggaaaggaatggccagccacaccttcgcgaaacctgtggtggcccaccagtcctaacgggacaggacagagagacagagcagccctgcactgttttccctccaccacagccatcctgtccctcattggctctgtgctttccactatacacagtcaccgtcccaatgagaaacaagaaggagcaccctccacatggactcccacctgcaagtggacagcgacattcagtcctgcactgctcacctgggtttactgatgactcctggctgccccaccatcctctctgatctgtgagaaacagctaagctgctgtgacttccctttaggacaatgttgtgtaaatctttgaaggacacaccgaagacctttatactgtgatcttttacccctttcactcttggctttcttatgttgctttcatgaatggaatggaaaaaagatgactcagttaacaccaaaaaaaaaaaaaaaagtcgagc

SEQ ID NO: 305 - DNA, 1117 bp, Homo sapiens
gccctgagccccgccatggtggtgccggaggaccagctgacccgctggcacccgcgcttcaacgtggatgaagtacccgacatcgagccggccgcgctgccccagccacccgccacggagaagctcaccactgctcaggaggtgctggcccgggcccgcaacctgatttcacccaggatggagaaggccttgagtcaattggccctgcgytctgctgcgcccagcagccccgggtctcccaggccagcactgccggctaccccaccagccaccccgcctgcagcctctcccagtgctctgaagggggtgtcccaggatctgctggagcggatccgagccaaggaggcacagaagcagctggcacagatgacgcggtgcccggagcaggagcagcggctgcagcgcttagaacggctgcctgagytggcccgcgtgctgcggagcgtctttgtgtccgaacgcaagcctgcgctcagcatggaggtggcctgtgccaggatggtgggcagctgttgtactatcatgagccctggggaaatggagaagcacctgctgctcctctccgagctgctgccggactggctcagcctccaccgcatccgcaccgacacctacgtcaagctggacaaggccgcggacctsgcccacatcactgcacgcctggcccaccagacacgtgctgaggaggggctgtgagcctgggggccactgtggacagacgtgggcttcagaagctcgctggcctgggcccaccagcattttcttttatgaacatgatacactttggycttcctttccccagcgcccctgagggccagaggcagatgtgggctgcaggctgcacagcccgagggtctctggctgcgggcggtgggccccttcatggggctcacctggtggattcacattaaaccggtttctgtgggcacctctgtccttgctgctggtggggaagggaagccagatccagcaccccctggggggccatcgggagtgtggctggrggtgaagggggctctgtggcaatatggggttgggtagtgtgggtggcaaggccatcccctctaatcttggaacctctgaatatgggaccttccacagcaaagggtgacttttg

SEQ ID NO: 306 - DNA, 468 bp, Homo sapiens
tcgacccacgcgtccgccacgcgtccggaggtttttcccttggagggcaaacaaagtggcagtggggaccagggtgtcccctgctgagaaatggagagctcttttcccctgtacttctctggggtttgccttgtggaaccaagtgcttgggggaggagctcctggcaggactccagctgttatttgtcagaggacagctaggattggttcacccttgctctgagttggccccaaagcgagctatgctgaactcttctccatctccaagcagacaacctttgtctttacatgcaagagggatccaattatgacaggctgacccagctggtttcatgtttggggtttatctactgagtaaggctgaccttacctgagtttctgtatgtgtatttgcaagacagttaatactaatccatcatccctcacagagatgtagaggatgagatgtagtaacttatagcagtgtca

SEQ ID NO: 307 - DNA, 464 bp, Homo sapiens
  misc_feature (80)..(80): n equals a,t,g, or c
  misc_feature (458)..(458): n equals a,t,g, or c
  misc_feature (461)..(461): n equals a,t,g, or c
  misc_feature (464)..(464): n equals a,t,g, or c
ggcacgaggtcctggaggccttgatgaggcccagcaaacaggcattctcacagctgggtttatagtctttgggccccttnctcagtatcctgggaaccctgggccaggaggttacagtggtcatcataattgctgaagagatcccctcccctgcccctgggttcctgccttccctcctcaagcaggcacccaggctttagagaagtatagggggcttcttccctgctgggcttaccacactgctctcaggcctcaaaccctttcatacctttattcttttttttaaccaaaaaagtttttcttataaaataaattttgggcaaacawmaaaaaaaaaaaaaaaaaaaaaaaaaaaaaaaaaaaaaaaaaaaaaaaaaaaaaaaaaaaaaaaaaaaaaaaaaaaaaaaaaaaaaaaaaaaaaaaaaaaaaaaaaaaaaaaaaaaaaaaaaaaggggggnccnttn

SEQ ID NO: 308 - DNA, 2630 bp, Homo sapiens
gctgcacttcccaggccccaccagccgcggctccggctcgtagcccacagcccactgccggcggctgggcgctgccgaggctcggggcgcgcgcagttggcgtctgccagtgccaagactgtgccgcccccacagccgaggcgcgaaagggggacgcccggcctctgggccgctgccttcgctttctcttcgttgttgcgaacgccgtccgctcaggaggcgccccgcgaccggcgcgatgagtgccaacgaggaccaggagatggaactagaagcattacgctctatttatgaaggagatgaaagtttccgggaattaagtccagtttcttttcaatataggataggtgaaaatggtgatcccaaagccttcttaatagagatttcctggacagaaacatatccccaaacacctccaattctatctatgaacgctttttttaacaacaccatatcatcagctgtaaagcagagtatattagccaagctacaggaagcagtagaagctaatcttggaaccgctatgacctatacattgtttgaatatgccaaagacaataaagagcagttcatggagaatcacaatcccatcaattccgcaacatcgataagcaatatcatctcaattgaaactcctaatacagccccatcaagtaagaaaaaagacaaaaaagaacaactttcaaaagcccagaagcgtaactggcagacaaaacagatcacaaaggagaacttcctcgaggctggaactgggttgatgttgtgaagcatttaagcaaaactggctctaaggatgatgagtagcacttggaatttgagacaaggaaagagcattctttaaagagtaaaactgggttcaaaatctttcattactattttctggtattgaggcgactttttataaaacacaattttttgtatgtttcttacattaaaaaggttgtaagttgaaagttcatgaagagatcttgttgtattaaattattttcacaaacttgccttaataaaaggtgaaaatgttactgtttagtatactttatgaagccccttgagctttataaatggacaggcatggggaataagaatcagtgttaatttaaatgatcttatcctggtggatgtgctrttttcttaaaggagtatgaagcccttttcaaactatcatcccagtggagcggagtactcagtgaacagttactccatagtgcaatccatattaataggcttcttctcttaagtcttcatctcttcttttgcttaattactgaaccgtaaattacttcagagaaatttaaatgctggtatttgaactttatacatgatactttttgtagtttcttttaatttttgaaagatgaactgcttccttttaataaattaatatctatttatacttttctcttgatttgggtcaagatgtttgatcatgagtgctttgagtggtatgtggaataggagaatataaaaacaaatctgccaaatacactagaaagcattttagtaagaaatgctggccctttcttaaaacatttctcttgcatataccaggatgggagtaaaagatgccttaatatttagtttttgtattgttggagacattgattttaataaaatcctatttatctgctgttgtgtgcttttagttgttggataactgaggtctcctaaatggttcaacataaaaccacatttcaagtcttgtttctttttggagtgtcttttcaagtattcaaatgtatttctcaacctgagcatctttttaatcatatacatgggagtcttttaaatgctgaactgttacacatgcttgatttaaaaataataataatagaggaaactattggtctagttgtgccaagaaaagtttctgatgtttatgtgtgatgtacagtgattttgtatatgcgcccagctttaagaacacataaaactattacgtctggtaggaagattgttagtgcctcaagttacacctgtgcagcttgggtctgagttttgatagaacagtaaacatttaaagaagttaagagcagtttgagctgtatccgcggtttttactcgttaactgacttcagctaaatagtttgaattatagagtaagtataattacagcaaaggagttaatctcattttcaaagctgtttctcattttatttcttgaattaatgtagagcaaaacatgttaaaattcaggacmactggaatatggcaacttatgtttcagggttgtgtgtgggtagtatttgtggttgtattggtttgttttttgtttttggagaaacatctgctagtggaataaaatactttgttttgctctgaagagactgaaattgttcaggcttattatggctcatagattacagagaatgatgctagttacatgccaatgaactatttttactctttttatatgaaatgtaaaaatttgtaggggttctggtgatggtggtacctcttattaccttatgtaaaacacttgaacagcctcatcaatattgccgtcatctgtttaacactcccagtatattttctcaatgtctgtttacttaaaattttgtggagtgacataattaataagcaataaagtctgaattatacacagaaaaaaaaaaaaaaaaaaaaaactcgag

SEQ ID NO: 309 - DNA, 1422 bp, Homo sapiens
  misc_feature (13)..(13): n equals a,t,g, or c
  misc_feature (16)..(16): n equals a,t,g, or c
  misc_feature (1205)..(1205): n equals a,t,g, or c
  misc_feature (1367)..(1367): n equals a,t,g, or c
  misc_feature (1381)..(1381): n equals a,t,g, or c
  misc_feature (1398)..(1398): n equals a,t,g, or c
  misc_feature (1401)..(1401): n equals a,t,g, or c
cggacgcgtgggnaanaaaaaaagaaaaagaaaaagaaaagaaaagaaaaggtacatcagacatgactgcctgcatgaagtcaaacagggtaacaccagtgaagctcaagtcaagagctgtggatattttgtctaaccaacaagaagtctcaagaaatcaggcagtgcagctgctgctctcagctatcgtatccagccaaaagatgcatgatgatggagtggtgggggaaggccagttcagtatcctatttaaaagtaaacttcctgaataatggatatatgtggagatacagacatagatatatagatacagctgtaattatttagcctcaagtgactttctccattgcttcacgctatgccactattttgcttctttaatttttttaaccttgcttagtattctatagtttgcccaaccagttttacgtccaaggaaaattagccaatgcataaaatatacaaactatgaaaggcaaggwtcaggaaaccagagactttgccaccaaatctcagattattagaaactaggtgtcagggtttatcaagaaggccaggaaggccttttgggttaagccttacattcatgaagaacctcgagggtagatttttgagagcattccaaatgaatggtctctggtcaaatgaatgaatggtcaaatgaataaatctgccctcacagagatacaaaaggaaaaggaatataattcataccatttggtttaagccttacattcatgaagaacctcaagggtagatttttgagatcattccaaatgaagtcgaatctgccctcacagagacacaagaaaggaatataattcatacactattgcatttttaataaatcttttgaaatttgcagaattagattgtattgtgtattttcggttaaatgataattgaatgtaaatatttagatgcagcaccatattttataacccagctttagcatttcttcatattttaaggaaaccccccacctccttcttttaagggcgcttcttgctctctgaaatgccctgctaaatgcttctcttaattatttgaataaggtagtttggaataaagaaagaaaagatcactctacatacagatagtaaacttaatttgtgatcctatatatgagacagtataaaaatmcagataagttttagaaagactcaaaacaatatgtaaatgactgatgtttgcattattaaggnaracttgggatgttgggtcaagaggggaaagtgttagtcaatccactttggagcaatatcatgaaggtcaattataattccatatacctttctttgatgccacagtcagagatagatacagttgggtggccatgggtgtgcccatacagacaatttttggtnaattgtttcagacnttcaggtctgagactgncantgctggggggcctcctgggtt

SEQ ID NO: 310 - DNA, 553 bp, Homo sapiens
  misc_feature (484)..(484): n equals a,t,g, or c
gcccacgcgtccgatggtttcttctattcaggcttcaatggacaggcaccttcgggatcaaagtacagagcagtcaccatctgatcttcctcaaaggaraacagaagttgtgagttcttctgcaaagtctgggagtcttcagactggtttgcctgaatcttttcctttaactggtggtactgaaaatttgaatacagaaacaactgatggctgtgtagcagatgcactgggagcagcctttgccacaaggtcaaaagcacaaaggggaaattccgtggaggagcttgaagagatggatagtcaagatgctgagatgactaacacaactgagccaatggatcactcttgatttaattagaggctaataaaggcagaatgtttattgtgaatatgtaatatttgttggctgggccacgtaacttgattagtcattaaaaatcttgtacgtatataaaaagattatatcttgttattcagtgcatgntagcaagtgtgtgattggccatagcttttaatatactgctgcccaggctggctctgaatttctataaat

SEQ ID NO: 311 - DNA, 464 bp, Homo sapiens
ctcaaaaatcaccagaaaactcatactagtgaaaaatcctataaatgtaatgaatgtagaaaggcctttagttactgctctggtcttattcaatgtcaggtcattcatactatagaaaaaccttatgaatacggtaaatgtggcaaagcctttaggcagaggacagaccttaaaaaacatcagaaaatgcataccgargagaaaccctatgaatgtaatgaatgtgggaaagcctttagccagagcacatatcttacaaaacaccaaaaaattcatagtgaagagaaatcaaatatacatactgagtgtggggaaaccwttwgrcaaaactcttcttttttacaacaataaaaacctcacactggagagattctctgaatgccttaagaatttggttaatatggagacccttcccaggggaaccagaaggaggatcgtgaaaacctgttgactacttagatgat

SEQ ID NO: 312 - DNA, 2018 bp, Homo sapiens
  misc_feature (1997)..(1997): n equals a,t,g, or c
  misc_feature (2012)..(2012): n equals a,t,g, or c
gccacatcccggcagccctcctacckgcgcacgtggtgccgccgctgctgcctcccgctcgccctgaacccagtgcctgcagccatggctcccggccagctcgccttatttagtgtctctgacaaaaccggccttgtggaatttgcaagaaacctgaccgctcttggtttgaatctggtcgcttccggagggactgcaaaagctctcagggatgctggtctggcagtcagagatgtctctgagttgacgggatttcctgaaatgttggggggacgtgtgaaaactttgcatcctgcagtccatgctggaatcctagctcgtaatattccagaagataatgctgacatggccagacttgatttcaatcttataagagttgttgcctgcaatctctatccctttgtaaagacagtggcttctccaggtgtaastgttgaggaggctgtggagcaaattgacattggtggagtaaccttactgagagctgcagccaaaaaccacgctcgagtgacagtggtgtgtgaaccagaggactatgtggtggtgtccacggagatgcagagctccgagagtaaggacacctccttggagactagacgccagttagccttgaaggcattcactcatacggcacaatatgatgaagcaatttcagattatttcaggaaacagtacagcaaaggcgtatctcagatgcccttgagatatggaatgaacccacatcagacccctgcccagctgtacacactgcagcccaagcttcccatcacagttctaaatggagcccctggatttataaacttgtgcgatgctttgaacgcctggcagctggtgaaggaactcaaggaggctttaggtattccagccgctgcctctttcaaacatgtcagcccagcaggtgctgctgttggaattccactcagtgaagatgaggccaaagtctgcatggtttatgatctctataaaaccctcacacccatctcagcggcatatgcaagagcaagaggggctgataggatgtcttcatttggtgattttgttgcattgtccgatgtttgtgatgtaccaactgcaaaaattatttccagagaagtatctgatggtataattgccccaggatatgaagaagaagccttgacaatactttccaaaaagaaaaatggaaactattgtgtccttcagatggaccaatcttacaaaccagatgaaaatgaagttcgaactctctttggtcttcatttaagccagaagagaaataatggtgtcgtcgacaagtcattatttagcaatgttgttaccaaaaataaagatttgccagagtctgccctccgagacctcatcgtagccaccattgctgtcaagtacactcagtctaactctgtgtgctacgccaagaacgggcaggttatcggcattggagcaggacagcagtctcgtatacactgcactcgccttgcaggagataaggcaaactattggtggcttagacaccatccacaagtgctttcgatgaagtttaaaacaggagtgaagagagcagaaatctccaatgccatcgatcaatatgtgactggaaccattggcgaggatgaagatttgataaagtggaaggcactgtttgaggaagtccctgagttactcactgaggcagagaagaaggaatgggttgagaaactgactgaagtttctatcagctctgatgccttcttccctttccgagataacgtagacagagctaaaaggagtggtgtggcgtacattgcggctcctccggttctgctgctgacaaagttgtgattgaggcctgcgacgaactgggaatcatcctcgctcatacgaacttcggctcttccaccactgattttaccacacactgttttttggcttgcttatgtgtaggtgaacagtcacgcctgaaactttgaggataactttttaaaaaaataaaacagtatctcttaatcactggaaaaaaaaaaaaaaaaaaaaaaaaaccncggggggggccccgnacccca

SEQ ID NO: 313 - DNA, 658 bp, Homo sapiens
  misc_feature (621)..(621): n equals a,t,g, or c
gacatttaggaacaattgcacttttaaagggagagaatgcatagttgctcacatatctcagtgtcagtcacctaacatggatcagtgctttatttgagattacaaaactagaaaatgacggagtcaaggctaggaccaatattctgttcagtcttagataattatagaatacacattaaaatcagatatttgaattttcttaattttgtaactatttgtcattgaaaggagatactaaaaaaattatatatcgtcctagaaagtacatgaactaataatgcatttctaaaggtgaaaaaagaataggtatttttctgtttaatattcaatttatagagagtagtacgttaatttttttaaaccccagaagctcaggatcttatcattttaaaagaaattatcaccagttctgtgtgagtaaataaagtattataacactttgttttttcatccatgataccttgtatttacttacctgagctttttttctagggaaagaaaaatgctcaggtaataacagagccttgaaaaattkggattttcaaaactacctatttatgtataggcctttagatcatctgatgttgaatactctttaagtgatctaaaggcctacatatnaaaaggtatttttattaaattctggattaaacatttc

SEQ ID NO: 314 - DNA, 671 bp, Homo sapiens
  misc_feature (524)..(524): n equals a,t,g, or c
  misc_feature (593)..(593): n equals a,t,g, or c
  misc_feature (657)..(657): n equals a,t,g, or c
  misc_feature (659)..(659): n equals a,t,g, or c
  misc_feature (671)..(671): n equals a,t,g, or c
tttacttaatcttgcctagtcacaaaataagatgtgcacccatggtttggagagttcctatattagctgagcagtgagatacactatttccaaacggtgcacacctacagtagctttggaaatgagccaatcactgttttacttaatggttcttatcagcatgcaaatattgcttgaaagttatttccttattcactgttttgttagtccattttgttaggaaacattaattcctaaaaatttgttcagaataattaaaagtgaacatttggtgctgatactcaaaaacctacaaatgtagccatttaaaaagtaacatgtttttctcccctgctcattgcctgggagaatggaattttatataactacctttctttgcaaaaataacggtcgtgtcgagttggtggtgattttggcattccatcttgcactggtttctagtataggcttagaaataattggcaggtaataatctttccagtcaagttgcaagggatgcttatttctcttcaaaaaaagacatnctgcgggattgagtagaaaatttaggtcagtttgggagcttatttgaatattttctactacattggagntagcagtctttttctggatcagatcagtgcatggttatctacagggtgaatgcttcttggtggngnaagatctagctn

SEQ ID NO: 315 - DNA, 1680 bp, Homo sapiens
ccaaagtgctggaattccaggcatgagccactgcgcccagtctacacactaattcttgttagcccaacagctgttctgttctatctacccctcatttcacgctcaaggagtcatacctagaatagttacacacaagagggaaactggaagccaaacactgtacagtattgtgtagaaagtcacctccctactccttttattttacatgagtgctgatgtgttttggcagatgagctttcagctgaggcctgatggaaattgagataacctgcaaagacataacagtatttatgagttatatcttagttcttgaaattgtggaatgcatgattgacaatatatttttaatttttattttttcaagtaataccagtactgtttaactatagccagaactggctaaaatttttatattttcagagttgaagttggtgaagacattcatgatttaaacaccagatcctgaaaggggttaaatctactttgaaatgaatctgcaatcagtatttcaaagcttttctggtaattttagtgatcttatttgattagactttttcagaagtactaaataaggaattttaacaggtttttattaatgcacagataaatagaagtacagtgaggtctatagccattttattaaaatagcttaaaagtttgtaaaaaaatgaatctttgtaattacttaatatgttagttaagaacccgtcaagcttatatttgctagacttacaaattattttaaatgcatttatcttttttgacactattcagtggaatgtgtaagctagctaattcttgttttctgatttaaagcacttttaaatcttatcctgccccctaaaaacaaaaggttttgatcacaaggggaaatttaagattgttaaccctgtttttcagaagggctactgttaattgcacataaacatgaaatgtgttttcccctgtgtactaacacattctaggcaaaattcaaacttatagtggtaaagaaacaggttgttcacttgctgaggtgcaaaaattcttaagacttctgtttgaaattgctcaatgactaggaaaagatgtagtagtttactaaaattgtttttctaccatatcaaattaaacaattcatgcctttatagggtcaggcctacaatgaataggtatggtggtttcacagaattttaaaatagagttaaagggaagtgatgtacatttcgggggcattagggtagggagatgaatcaaaaaatacccctagtaatgctttatattttaatactgcaaaagctttacaaatggaaaccatgcaattacctgccttagttcttttgtcataaaaacaatcacttggttggttgtattgtagctattacttatacagcaacatttcttcaattagcagtctagacattttataaacagaaatcttggaccaattgataatatttctgactgtattaatattttagtgctataaaatactatgtgaatctcttaaaaatctgacattttacagtctgtattagacatactgtttttataatgttttacttctgccttaagatttaggttttttaaatgtatttttgccctgaattaagtgttaatttgatggaaactctgcttttaaaatcatcatttactgggttctaataaattaaaaattaaacttgaaaaaaaaaaaaacga

SEQ ID NO: 316 - DNA, 782 bp, Homo sapiens
gaattcggcacgagtgaagcattagaatgattccaacactgctcttctgcaccatgagaccaacccagggcaagatcccatcccatcacatcagcctacctccctcctggctgctggccaggatgtcgccagcattaccttccactgcctttctccctgggaagcagcacagctgagactgggcaccaggccacctctgttgggacccacaggaaagagtgtggcagcaactgcctggctgacctttctatcttctctaggctcaggtactgctcctccatgcccatggctgggccgtggggagaagaagctctcatacgccttcccactccctctggtttataggacttcactccctagccaacaggagaggaggcctcctggggtttccccagggcagtaggtcaaacgacctcatcacagtcttccttcctcttcaagcgtttcatgttgaacacagctctctccrctcccttgtgatttctgagggtcaccactgccagcctcaggcaacatagagagcctcctgttctttctatgcttggtctgactgagcctaaagttgagaaaatgggtggccaaggccagtgccagtgtcttggggcccctttggctctccctcactctctgaggctccagctggtcctgggacatgcagccaggactgtgagtctgggcasgtccaaggcctgcaccttcaagaagtggaataaatgtggcctttgcttctgttaaaaaaaaaaaaaaaaaaaaaaaaaaaaaaaaaaaaaaaaaaaaaaaaa

SEQ ID NO: 317 - DNA, 1791 bp, Homo sapiens
  misc_feature (487)..(487): n equals a,t,g, or c
  misc_feature (515)..(515): n equals a,t,g, or c
  misc_feature (1769)..(1769): n equals a,t,g, or c
ggggattgttcctgaaacattcacgctgtccaatctcccacatttcagaattggtgggagtgtgcatttgattgttaataaccagctgggttacaccactccagctgaaagaggaaggtcttctttatactgcagtgatattgggaagcttgtgggctgtgccatcatccatgtcaatggagacagcccagaggaagtggtccgtgccacacgactggcttttgaataccaacgccagttccgcaaggatgtgattattgatctgttgtgctacaggcagtggggccacaatgagctggatgagccattctacaccaaccccatcatgtacaaaatcatcagagctcgaaagagcattccagacacatatgcagagcacctcattgctggcggactcatgacgcaggaggaggtgtctgaaataaaatcctcctactatgccaagttgaatgatcacttaaataacatggcccactacaggcccccntgccctgaacctgcaggcccaytggcangggcctggytcagccagaagsgcaawtcaccacctggagtacaggtgtgcccctcgacctcctgcggtttgttggcatgragtytktagaggtgccaagrgagytgcagwtgcacagtcamctgytgragacacatgttcagtccagaatggagaagatgatggacggaatcaagctagactgggccaccgcggaactcttgccttgggttctttacttgctcaaggttttaatgttcgtctaagtggccaagatgttggtcgtggaactttcagtcagaggcatgcaatggtggtttgccaggagacggatgacacctacatccccctgaaccatatggacccaaatcagaaggggtttctagaggtcagcaacagccccctgtcagaagaggccgtcctgggattcgaatatgggatgagcattgagagcccaaagttactgcccctgtgggaggcacagtttggcgatttcttcaatggtgcccagatcatctttgacacattcatctctggaggagaggccaagtggctcctacaaagcggcattgtcatcctccttccacatggctacgatggggctgggccagaccactcatcctgtcgaatagagcgtttcctgcagatgtgtgacagtgcggaagagggggtggacggagacactgtgaacatgtttgtggttcacccaacaactcctgcacagtatttccacttgcttaggagacagatggtccggaacttcagaaaaccactcattgttgcttcccctaagatgttactcargctcccggcagccgtgtcaactcttcaagaaatggcaccaggaacaacatttaacccggtcattggtgattcatctgtggatccaaaaaaggttaagaccctcgtkttctgctccggcaaacatttctactccctggtgaacaaagagaatctctgggggccaagaagcatgactttgccatcatccgagtagaggaactctgccccttcccgttggattctttacagcaagagatgagcarrtacaaacatgttaaagatcatatttggagtcaggaggaacctcagaacatgggtccgtggtcgtttgtttctccaaggtttgaaaagcagctggcctgcaagctccgtctggtggccggccccctttgccagtacccgctgtaggaattggcacagttcacttgcaccagcatgaagatatcctcgccaagaccttcgyttgatgatgattttgaaggaacatatttcntttaggaatggcattaggccct

SEQ ID NO: 318 - DNA, 723 bp, Homo sapiens
  misc_feature (705)..(705): n equals a,t,g, or c
gggcaagacctcatgcctaaaaaataaagagaaagcagagtaaaactggactctgagataygactaaagttctgtgtgatacgtgtgccttatttagctcaagacattcctggagcacctataaaaactgacttgtaatccaggctatgtctctttttagcttcgtaatctttggcaaggccattggattcttcagctgtacaattaggagactcgatcaggtgattgcctttctcagctgtcagttctctaatttcaggcttggtagcttgtaggaactgaaattgcaattaaaacctttataaactcaaactaaatcatgaattacagaaaaagtccattcttccaaaacttgatgttaccacacttacaagtttaaaatatgaagtcgactgtttaaaggattctgcatatattctagtgtgcacattcagaaacatttttcttggaaaaagtacccaacattttttataactgcacatattaatttattgccagaataaattgcattgcatgctaaataaagtcagataattcaaatccatttgcttttatgtagtttttcttctaaatgtcaacattttggaattaaaatgtttatggttttatatgagggtaggaaatcttaactgctttggggggtattgtttataggctttttgttatggggccggtagttttttaatagggggattgcccatttcnaccgtttgggggcccggg

SEQ ID NO: 319 - DNA, 533 bp, Homo sapiens
  misc_feature (393)..(393): n equals a,t,g, or c
  misc_feature (396)..(396): n equals a,t,g, or c
  misc_feature (463)..(463): n equals a,t,g, or c
  misc_feature (527)..(527): n equals a,t,g, or c
aattcggcacgagcgacgtggtgctgggcgttgggaccctactttatctagttcgggaagttgggttgtggggtcatacctgtctgtctgctcccagctttcttgggtttcttccgacggcgtggggcctcgctaaggaattcccggcccctcagggccacggctttagcggtgtcttttgcgagttcttcgtaagtacatcttaaagctgtcaagatggttctagcagaccttggaagaaaaataacatcagcattacgctcgttgagcaatgccaccattatcaatgaagaggtatgtaaaatattgtatgraatatatatgattgtattattgtcactagcattgggaagatggcttattcataatccccgtatttatatgtattttgangtngacttaatacttgtgggtaaaagcccaaaggggttaacagtaggaggggtttattggggaattaccnccaactcaaattacttcaaccttccttaagggatttcccaaaaaaaaaaaaaaccggggggggnccccga

SEQ ID NO: 320 - DNA, 763 bp, Homo sapiens
  misc_feature (317)..(317): n equals a,t,g, or c
gtttggaataaagaaagaaaagtttactatctgtatgtagagtgatcttaatttgtgatcctatatatgagacagtataaaaatacagataagttttagaaagactcaaaacaatatgtaaatgactgatgtttgcattattaaggaaaacttgggatgttgggtcaagaggggaaagtgttagtcaatccactttggagcaatatcatgaaggtcaattataattccatatacctttctttgatgccacagtcrgagatasaatacartttgggtggccatggatgtgccccaatacagtacacatttttkggttnaaatttgttttcagatcatttcatggaatctttgaagtatctttgactctaactttgacttggtggtggaccttccttggtttttataacacctaagagatatcctttagaattacatgtattttagcataaggaaattgaaaaagtaaaacatactggtttttttcaacaagaccatatgtaaattaaatagtgaaatgtgtatgagtttcagtagaactgtaccatcaacaatgtttccataaatatgcagagttctttcttttgtattgttatttacaatattgttaaattgaatgcatttgcaatttctaggattctaaagaattgagtacagaaagtagcaattttattatttgatgataatatgagaattactgtgccaatactgttttgataaataaatagatttttaaaaataaatgtattgtacttattagtgtagt

SEQ ID NO: 321 - DNA, 3131 bp, Homo sapiens
  misc_feature (4)..(5): n equals a,t,g, or c
  misc_feature (10)..(10): n equals a,t,g, or c
  misc_feature (26)..(26): n equals a,t,g, or c
  misc_feature (3128)..(3128): n equals a,t,g, or c
gggnncaaangctggagctccaccgnggtgcgtccgctctagaactagtggatcccccgggctgcaggattcggcacgaggccacttcctggggccgccggcggggccgctggctgcactcagcgccggagccgggagctagcggccgccgccatgtcccaccagaccggcatccaagcaagtgaagatgttaaagagatctttgccagagccagaaatggaaagtacagacttctgaaaatatctattgaaaatgagcaacttgtgattggatcatatagtcagccttcagattcctgggataaggattatgattcctttgttttacccctgttggaggacaaacaaccatgctatatattattcaggttagattctcagaatgcccagggatatgaatggatattcattgcatggtctccagatcattctcatgttcgtcaaaaaatgttgtatgcagcaacaagagcaactctgaagaaggaatttggaggtggccacattaaagatgaagtatttggaacagtaaaggaagatgtatcattacatggatataaaaaatacttgctgtcacaatcttcccctgccccactgactgcagctgaggaagaactacgacagattaaaatcaatgaggtacagactgacgtgggtgtggacactaagcatcaaacactacaaggagtagcatttcccatttctcgagaarcctttcaggctttggaaaaattgaataatagacagctcaactatgtgcagttggaaatagatataaaaaatgaaattataattttggccaacacaacaaatacagaactgaaagatttgccaaagaggattcccaaggattcagctcgttaccatttctttctgtataaacattcccatgaaggagactatttagagtccatagtttttatttattcaatgcctggatacacatgcagtataagagagcggatgctgtattctagctgcaagagccgtctgctagaaattgtagaaagacaactacaaatggatgtaattagaaagatcgagatagacaatggggatgagttgactgcagacttcctttatgaagaagtacatcccaagcagcatgcacacaagcaaagttttgcaaaaccaaaaggtcctgcaggaaaaagaggaattcgaagactaattaggggcccagcggaaactgaagctactactgattaaagtcatcacattaaacattgtaatactagttttttaaaagtccagcttttagtacaggagaactgaaatcattccatgttgatataaagtagggaaaaaaattgtactttttggaaaatagcacttttcacttctgtgtgtttttaaaattaatgttatagaagactcatgatttctatttttgagttaaagctagaaaagggttcaacataatgtttaattttgtcacactgttttcatagcgttgattccacacttcaaatacttcttaaaattttatacagttgggccagttctagaaagtctgatgtctcaaagggtaaacttactactttcttgtgggacagaaagaccttaaaatattcatattacttaatgaatatgttaaggaccaggctagagtattttctaagctggaaacttagtgtgccttggaaaaggccgcaagttgcttactccgagtagctgtgctagctctgtcagactgtaggatcatgtctgcaacttttagaaatagtgctttatattgcagcagtcttttatatttgacttttttttaatagcattaaaattgcagatcagctcactctgaaactttaagggtaccagatattttctatactgcaggatttctgatgacattgaaagactttaaacagccttagtaaattatctttctaatgctctgtgaggccaaacatttatgttcagattgaaatttaaattaatatcattcaaaaggaaacaaaaaatgttgagttttaaaaatcaggattgacttttttctccaaaaccatacatttatgggcaaattgtgttctttatcacttccgagcaaatactcagatttaaaattactttaaagtcctggtacttaacaggctaacgtagataaacaccttaataatctcagttaatactgtatttcaaaacacatttaactgttttctaatgctttgcattatcagttacaacctagagagattttgagcctcatatttctttgatacttgaaatagagggagctagaacacttaatgtttaatctgttaaacctgctgcaagagccataactttgaggcattttctaaatgaactgtggggatccaggatttgtaatttcttgatctaaactttatgctgcataaatcacttatcggaaatgcacatttcatagtgtgaagcactcatttctaaaccttattatctaaggtaatatatgcacctttcagaaatttgtgttcgagtaagtaaagcatattagaataattgtgggttgacagatttttaaaatagaatttagagtatttggggttttgtttgtttacaaataatcagactataatatttaaacatgcaaaataactgacaataatgttgcacttgtttactaaagatataagttgttccatgggtgtacacgtagacagacacacatacacccaaattattgcattaagaatcctggagcagaccatagctgaagctgttattttcagtcaggaagactacctgtcatgaaggtataaaataatttagaagtgaatgtttttctgtaccatctatgtgcaattatactctaaattccactacactacattaaagtaaatggacattccagaatatagatgtgattatagtcttaaactaattattattaaaccaatgattgctgaaaatcagtgatgcatttgttatagagtataactcatcgtttacagtatgttttagttggcagtatcatacctagatggtgaataacatattcccagtaaatttatatagcagtgaagaattacatgccttctggtggacattttataagtgcattttatatcacaataaaaattttttctctttaaaaaaaaaaaaaaaaaaaaaaaaaaaaaaaaaaaaaaaaaaaaaaaaaaaaaaaaaaaaanaaa

SEQ ID NO: 322 - DNA, 940 bp, Homo sapiens
  misc_feature (135)..(135): n equals a,t,g, or c
  misc_feature (890)..(890): n equals a,t,g, or c
  misc_feature (929)..(929): n equals a,t,g, or c
aagcgtgactctggagatggagtccaagttggcggcagaaaagaaacagacggaacaactgtcacttgagctggaagtagcacgactccagctacaaggtctggacttaagttctcggtctttgcttggcatcgncacagaagatgctattcaaggccgaaatgagagctgtgacatatcaaaagaacatacttcagaaactacagaaagaacaccaaagcatgatgttcatcagatttgtgataaagatgctcagcaggacctcaatctagacattgagaaaataactgagactggtgcagtgaaacccacaggagagtgctctggggaacagtccccagataccaattatgagcctccaggggaagataaaacccagggctcttcagaatgcatttctgaattgtcattttctggtcctaatgctttggtacctatggatttcctggggaatcaggaaaatatccaaaatcttcaactgcgggtaaaagagacatcaaatgagaatttgagattacttcatgtgatagaggaccgtgacagaaaagttgaaagtttgctaaatgaaatgaaagaattagactcaaaactccatttacaggaggtacaactaatgaccaaaattgaagcatgcatagaattggaaaaaatagttggggaacttaagaaagaaaactcagatttaagtgaaaaattggaatatttttcttgtgatcaccaggagttactccagagagtagaaacttctgaaggcctcaattctgatttagaaatgcatgcagataaatcatcacgtgaagatattgggagataatgtggccaaggtgaatgacagctgggaaggagagatttcttgatgtgggaaattgagctgagtagggtccagatcnggagaaagctagcctttgagccttgaagccctcttaccnggggaggcttg

SEQ ID NO: 323 - DNA, 850 bp, Homo sapiens
  misc_feature (848)..(848): n equals a,t,g, or c
caaagttgatttttaacgtttgtaaaggtttgaatgtttatagaagtgcatcatgaaattttgtgtaaatccagatgaactgtcattatagtactataaattagagatagtccataaagttgggttgaaggagattgaaaatatttcctttgattaaaagaaaataattaactaacttgggcttgcttgtgattgaagagggagattagatagtcctctgtccccccraaaaagaaactagcagagaaagacmtaaaaaagctctttggtgtctgttcatgtgctgtacattttttccgttttaatgtcttgtgtagataattcaaagtttgaactatttctttcttggaataagtaataatttattcaatatggtgtatctctgagttcaatttaaaacaatccaactcagtaatatttatttttaaatacaaatcctaactaaccaattaattaataaaaaggcaagacttacttgctgtagtattggttctcatctgtagagaactgacattggagcaaattttaagtctcccctttgaaaataagccttgttaactgagggcgtaatacatttcccacagatttatccagaaacattttattagagatcttatagtagtatctcagttcctactacagctttctaaaggatgagacttgcatttaacaaaatgacatatataatatttttctatagttttgcaactgaattaaaggaaggtgatgtattataatgtgtagtgaggtataaagggctagttcattctctcccaacaagaacttagaataaaataacacytttttttcatgagacttacctcatttttggtaggctatggcagttntg

SEQ ID NO: 324 - DNA, 958 bp, Homo sapiens
  misc_feature (930)..(930): n equals a,t,g, or c
  misc_feature (934)..(934): n equals a,t,g, or c
cttgcgtccccgcgtgtgtgcgcctaatctcaggtggtccacccgagaccccttgagcaccaaccctagtcccccgcgcggccccttattcgctccgacaagatgaaagaaacaatcatgaaccaggaaaaactcgccaaactgcaggcacaagtgcgcattggtgggaaaggaactgctcgcagaaagaagaaggtggttcatagaacagccacagcagatgacaaaaaacttcagttctccttaaagaagttaggggtaaacaatatctctggtattgaagaggtgaatatgtttacaaaccaaggaacagtgatccactttaacaaccctaaagttcaggcatctctggcagcgaacactttcaccattacaggccatgctgagacaaagcagctgacagaaatgctacccagcatcttaaaccagcttggtgcggatagtctgactagtttaaggagactggccgaagctctgcccaaacaatctgtggatggaaaagcaccacttgctactggagaggatgatgatgatgaagttccagatcttgtggagaattttgatgaggcttccaagaatgaggcaaactgaattgagtcaacttctgaagataaaacctgaagaagttactgggagctgctattttatattatgactgctttttaagaaatttttgtttatggatctgataaaatctagatctctaatatttttaagcccaagccccttggacactgcagctcttttcagtttttgcttatacacaattcattctttgcagctaattaagccgaagaagcctgggaatcaagtttgaaacaaagattaataaagttctttgcctagtaaaaaaaaaaaaaaaaaaaaaaaaaaaaaaaaaaaaaaaaaaaaaaaaaaaaaaaaaaaaaaaaaaaaaaaaaaaaaaaaaangggnggccgttttaaaggaaccaggttt

SEQ ID NO: 325 - DNA, 500 bp, Homo sapiens
ggcttaattcgagcggccgcttttttttttttttttttttttttttttttaagtttttaaactttttatttgcatattaaaaaaattgtgcattccaataattaaaatcatttgaacaaaaaaaaaaatggcactctgattaaactgcattacagcctgcaggacaccttgggccagcttggttttactctagatttcactgtcgtcccaccccacttcttccaccccacttcttccttcaccaacatgcaagttctttccttccctgccagccagatagatagacagatgggaaaggcaggcgcggccttcgttgtcagtagttctttgatgtgaaaggggcagcacagtcatttaaacttgatccaacctctttgcatcttacaaagttaaacagctaaaagaagtaaaataagaaggcaatgcttgtggaatgtacagtgcatattggcggcgcacgcctcattacgattcgcctgcttgcttctcctgttcaatcg

SEQ ID NO: 326 - DNA, 1228 bp, Homo sapiens
ggcacgagctcgtgccgcttgcaactccacctcagcagtggtctctcagtcctctcaaagcaaggaaagagtactgtgtgctgagagaccatggcaaagaatcctccagagaattgtgaagactgtcacattctaaatgcagaagcttttaaatccaagaaaatatgtaaatcacttaagatttgtggactggtgtttggtatcctggccctaactctaattgtcctgttttgggggagcaagcacttctggccggaggtacccaaaaaagcctatgacatggagcacactttctacagcaatggagagaagaagaagatttacatggaaattgatcctgtgaccagaactgaaatattcagaagcggaaatggcactgatgaaacattggaagtgcacgactttaaaaacggatacactggcatctacttcgtgggtcttcaaaaatgttttatcaaaactcagattaaagtgattcctgaattttctgaaccagaagaggaaatagatgagaatgaagaaattaccacaactttctttgaacagtcagtgatttgggtcccagcagaaaagcctattgaaaaccgagattttcttaaaaattccaaaattctggagatttgtgataacgtgaccatgtattggatcaatcccactctaatatcagtttctgagttacaagactttgaggaggagggagaagatcttcactttcctgccaacgaaaaaaaagggattgaacaaaatgaacagtgggtggtccctcaagtgaaagtagagaagacccgtcacgccagacaagcaagtgaggaagaacttccaataaatgactatactgaaaatggaatagaatttgatcccatgctggatgagagaggttattgttgtatttactgccgtcgaggcaaccgctattgccgccgcgtctgtgaacctttactaggctactacccatatccatactgctaccaaggaggacgagtcatctgtcgtgtcatcatgccttgtaactggtgggtggcccgcatgctggggagggtctaataggaggtttgagctcaaatgcttaaactgctggcaacatataataaatgcatgctattcaatgaatttctgcctatgaggcatctggcccctggtagccagctctccagaattacttgtaggtaattcctctcttcatgttctaataaacttctacattatcaccaaaaaaaaaaaaaaaaaa

SEQ ID NO: 327 - DNA, 1731 bp, Homo sapiens
  misc_feature (1661)..(1661): n equals a,t,g, or c
  misc_feature (1726)..(1726): n equals a,t,g, or c
gcaatctttttctctcctggttaaatggggctgttgatcattttctctacgtaagggaatttattgattaagtttaattaatttgatatagactgtcatgtagtgatgtagtgctatactgtagtcggaagtttttcttaaaagcaaagagcaaaaatgcaaagttttatttgtaaaagctgaggacccttggggatggattaggtttgccgatgatcctaaaagtaagcaaactgtatgacaagactactattgcaaatgaaggatatttatagctaaactgcgcacacaaaagaagttttatattgtgagttatagttggttcagaaaacagtttgtactctccctggcccaggaaggcacacagacaaaaatgtcggccacttttactcaaatacagcccaagcacagacagtcaggttcgtgatcatcaccaacatctgataaaatctcattgaaggcaatgccatcacagctttgctcaattactacgaggaagagacaacaagcatctttcgtgttgtctcgtctgattggaggctgaatagtagatggaatggggggacagtgtgcctggtgtgaggaagacgtaagatccccmatttggaaagcatgcccccctcccttttagtagaagcccatggttgccctttgccaaactggggaggaggcaatgagccttggtggaaggaacctctctgtkgatatttaaagaagtgagggctgtgggtattcattgttagaaatgccaatttcactttgaaaccatagtccaagtctctaggttggtagaagggaaaggaaggaagtggtcccagtgattctagatctggttgggaaacttctgcctcatgactctgtcctttgagcctttggacagcagcacaaaacataacaatttttatttttaaacagacccattctttttgatcccacaggagctgtggttgggtcggccgtagccccgggatgtggtttaagtggattactgcctagctgagccaaaatgtttgcttgtacctgttggaccactacagcaaaccgctgcttacagtgcattgtgtatttctgtagtactgttttgcattttccatagagacagaaaactttgcaagtcaatcactgttgttcccatggtactgtaagaaaaaaaaaaaggaaaaagaaaaaaaaaaagaaaaccagccaatcattgcgtgtacagagctaaaaattgtaattaatagagcctgttgggaaaaaaaagaaaacaactgttgcctttttttcttgtataaaagagaatttatgacaaaatttagctgtgaggaatgtgatacgtgtttatatttctgaatatggracaaattgattcatggggatatattttaatgtaaactaaatcaggtatgtaaagttgttttaaaatgggrgactatataagtaattctctaaagctttagttggtttgaatatcatcatttcctccatggtgagcctgcttgtgrattattaagcacttgtttgcattctctgttcttcactcatttatttcttgcagtgtgctatggacttaatgctctttctgtattgatgaaaagcagtatgtgggccaatctttttataaaacactatgcatatataaatattacattgttcatagctttatttgacttatgggnttatacataacattagaatgagtaagctgtagttgtgtggacattttataaaaacaaaggtcccnttccc

SEQ ID NO: 328 - DNA, 1208 bp, Homo sapiens
  misc_feature (29)..(29): n equals a,t,g, or c
cgggtcgacccacgcgtccggaaagatcntctttaggaataatagatgatggtaagttccactttggttattggaaggcaagtcattattactggtattagttaaaacacatatcaaatgcttgctcttcatcatatatatagttatgcatacatacacacacacacatacagtatattctttcctcaaaagggttaagatgtctaaaatagggacctagaagcttaacactatttaagtaaatacagtagaagctcacaaatagatttctttgcacaatgattttttgcaaaattttacagtaataataatcccaaggcaaatctctcctgaactgctttccattccataatttgtagtataattcttggattccactgttttctttggggaatggaagttctgaattaaaagcccactgtggagatgctgtggttcatggaatctcttccagtgtaattcagaatcattggcctagaaagtctctgatatttggaggggaacaaaaatcactcacaagcaatccatgatctatacacataagcataatttcctttagttctagttagtcatcagagaacagtcatgtatgcaagttttgtgactgagaaatttctgtgcttccaatccacaatgagatgcatgattttgttttcatcccatttcccccaagcccctgtaaatcagggaaaatgcgcaactgatcgcctaggagagggcctcgtagtggcacagctggagatagtttcaaagtctaaaccaccagcccatcctgaggaaagcctcctatggaatgtaaagtgcaatcatttcttcagatataagactttccccaacaatgtgattggattcctttatggcaaaatcgagagaagctgccatccacctgcttatgcatttatctcttttgtggacttgtctgaccaccttctatttgcccagagtttgctcaattccaagacagtgcccatgaatgggacacctgtaatgtaacccacacagcggtttgcagagaatgttagccatgacttgggctttctgaaagttggctataatttctctatccctacccacaaccctgggaagttggagcaagaggggcatactattgggctgggaggatttgacagcatttccccagttgccctttaagttcttctatttcaaacgttaattttgcttctctttctaaaaaaaaaaaaaaaaaa

SEQ ID NO: 329 - DNA, 756 bp, Homo sapiens
  misc_feature (30)..(30): n equals a,t,g, or c
ccccagtcttaccactctagcatgcttgtnataataaacatggtgagtgacttttttctaaagatcccccctctctcagaggtcatgtcctttcgtaaccagcccttgctcttgaacccccakgcagtttggtggttatgccaaggaagcagactacgtagcacaagccacccgtctgcgtgctgccctggagggcacagccacctaccggggggacatctacttctgcacgggttatgaccctcccatgaagccctacggacggcgcaatgagatctggctgttgaagacatgagtgacccactgaaccaagaacttactggaagtgtgcctctgtgtctccttcctcgggggtaaggaggggacagtgcttcccaagttccagctgcaagtccaacttaaccaactttccttcaaagtcagttactgccaattttctgaaaaaagcatgttccatatactaagtctcttttctcacggtaggaaataatacagccaagatatgcagcatccttctcattgatgtagaaaattctgcgatagaccagaaaaatcctggcagcttttctccaggcatctgggtcactaaaaactgattttctaaaattattggatttgtattttgttattaagggggaaaatgtgatttgtgcctgatctttcatctgtgattcttataagagctttgtcttcagaaaaactaaaaataaaaggcattgacttaaacagctgaramaaaaaaaaaaaaaaaaaaaa

SEQ ID NO: 330 - DNA, 1209 bp, Homo sapiens
  misc_feature (1203)..(1203): n equals a,t,g, or c
cttcgccgtcatccgcttcgaaagcatcatccacgagttcgacccgtggtttaactatagatcaacacatcatcttgcatctcatgggttctatgaatttttaaattggtttgatgaaagagcatggtatccactaggaagaatagtaggtggtactgtttacccagggttgatgataaccgctggccttattcattggattttaaatacattgaacataactgttcacataagagacgtatgtgtgttccttgcaccaacttttagcggccttacatctatatctactttcctgcttacaagagaactttggaaccaaggagcaggacttttagctgcttgttttattgctattgtaccaggctacatatctcggtcagtagctggatcctttgataatgaaggcattgctatttttgcacttcagttcacatactatttatgggtaaaatctgtaaaaactgggtcagttttttggacaatgtgctgctgcttatcctatttctatatggtctctgcttggggtggttatgtatttatcatcaatcttattccactgcatgtatttgtgttgttactgatgcagagatacagcaaaagagtctacatagcatatagcactttctacattgtgggtttaatattatcaatgcagataccttttgtgggattccagccaatcagaacaagtgaacacatggcagctgcaggtgtctttgcattgctgcaagcttatgctttcttgcagtatctgagagaccgattaacaaaacaagagttccagacccttttctttttgggtgtatcactagctgcaggtgctgtgttccttagtgtcatctatttgacttatacaggttacattgcaccatggagtggcaggttttattcattgtgggatactgggtatgcaaaaatacacattccaattattgcatcagtgtctgagcatcaacctacgacttgggtgtctttcttctttgatctacatattcttgtatgtaccttcccagcaggcctttggttctgcatcaaaaatatcaacgatgaaagartatttggtaagagaggtttttaatgactactttgatatggaatagttatttttctttttgagattatttactttaaatttttgtttttctatgtttgactctatatattcaagataaattttctcctttattttgcataggtgcttanccaaga

SEQ ID NO: 331 - DNA, 668 bp, Homo sapiens
  misc_feature (653)..(654): n equals a,t,g, or c
aaagcagatgccatctatgatatgattggtttcccagactttatcctggagcccaaagagctggatgatgtttatgacgggtacgtaaatttctgaagrttctttcttccaaaacatgttgaatttgtacaacttctctgccaaggttatggctgaccagctccgcaagcctcccagccgagaccagtggagcatgaccccccagacagtgaatgcctactaccttccaactaagaatgagatcgtcttccccgctggcatcctgcaggcccccttctatgcccgcaaccaccccaaggccctgaacttcggtggcatcggtgtggtcatgggccatgagttgacgsatgcctttgatgaccaagggcgcgagtatgacaaagaagggaacctgcggccctggtggcagaatgagtccctggcagccttccggaaccacacggcctgcatggaggaacagtacaatcaataccaggtcaatggggagaggctcaacggccgccagacgctgggggagaacattgctgacaacggggggctgaagctgcctacaatgcttacaaagcatggctgagaaagcatggggaggagcagcaaytgcagccgtggggsttamcaaccaccastyttcttcgtgggatttgccccaggtnntggtgctcggtccg

SEQ ID NO: 332 - DNA, 809 bp, Homo sapiens
  misc_feature (372)..(372): n equals a,t,g, or c
ggctgcaggaattcggcacgagtgttagggtaaaaagtgaattaaagcaacaggactatttataaaataattagatttagaaagcagtcgtagaaatataagcctggagttgcctctgaattacatatttaacaaacctagaagctaaatcagtttgtcttttatcaaaactgcaactcctctaagttgaaagcacagtgacaagagaaagcattacaaattcttgagaaataatagaaattaaagctcttttcaaacctgtgaacaagtatagtaccagaagtataagattcagataggcccaagttgtagttcttgttatgagtcttacaaccctatggactttggacaaattacttctctgcgtctgtntcctcatctgtaaaatgaaaataatttctgtttcatacaggtatagtctaaatagggataattacacctacttcaaagttgtaaaatacacaattacaactagataggaggtataagttctagtgttctgtagcactgtaggatgactatagttaacaatattgtatagtttcaaatagctagaagaaggatattgcatgttcccaaaacaaagacataagtttttgagatgatagatatgctaattaccctaatcactatatgttatatgtattgcaacatcactatgtacccccataaatatgtacagttattgtgtattaaaatttttttaaactaaaattataagacattaaaaaaaggtatcacatgtaaaaaaaaaaaaaaaaaaaaaaaaaaaaaaaaaaaaaaaaaaaaaaaaaaaaaactcgaggggg

SEQ ID NO: 333 - DNA, 1442 bp, Homo sapiens
ggcacgaggttccctatcctgggccagttctctcgcaggtcccagatgtccagttccagatgcctggacccagagtgtgggggaaatatctctggagaagccctcactccaaaggctgtccaggcgcaatgtggtggctgcttctctggggagtcctccaggcttgcccaacccggggctccgtcctcttggcccaagagctaccccagcagctgacatcccccgggtacccagagccgtatggcaaaggccaagagagcagcacggacatcaaggctccagagggctttgctgtgaggctcgtcttccaggacttcgacctggagccgtcccaggactgtgcaggggactctgtcacagtgagctggggatggggggggtcccgccaggactgtggccagggagattcccggggttgtgggaagtggcggtgccctgaatcccccatctggaggagggatgaattttccatgtaggggcagtcgggcttggcttaccggggagcagtggtggaccccaggacacagcctcccaccagcgcctccggggctgccatctgggccccacagagcaaagagggcagcaagcaggccctgcgtttggaaggcttatgaatggacacacaaatcttgcaaatctatggagccaggggcagggacgcacatattggttgttaaaaatatgtcatcatgtatttgttgagtgcctgctctatcaggtgaggaagctggacacaaataataacaaaagattaagtcaccgttcacacttaccttggaagagctattacaaaacttctaacgccaaagccttattcagaataaggacattttaaaaacagtacttgatggagtgatgcaagcttgcagtcccagcagtatagtcaggagactgaggctggaggatcagagggctggagcccagggttcaaggccagcctaagcaacatagcaagaccccatctcaaaaataagtaaataataaataaaaataaaaagagcacattatcttttgatttaaattttatttatatcaaaatgacataaatttttgaactttattttttaattttaaaatttttaattattatggatacataatagttgtaagactttttgttttttaattaaagttttctaaggctgggcgcagtagctcatgtctgtagtcccagcactttgggaggctgaggcgaaagaagcacttgagcccaggaatttgagaccagcctgggcaacatagcaagaccccatctctacaaaaaaatttaaaaattagccaagtgtggtggcacgcacctgtggtcccagctacaagggacgctgaagtgagaggatcacttgagcctggaaggtagaggctgcagtgagctctgatcatgacaccgtactccagcctgggtgacagagtgagaccctgtctccaaaaaaaaaaaaaaaaaa

SEQ ID NO: 334 - DNA, 2701 bp, Homo sapiens
  misc_feature (1)..(1): n equals a,t,g, or c
  misc_feature (9)..(9): n equals a,t,g, or c
  misc_feature (17)..(17): n equals a,t,g, or c
  misc_feature (2699)..(2699): n equals a,t,g, or c
ncattcatnttttcaangctcgtgatctcacggcccggctgccggcccccgctctgccctgcagcataataaaatggctaatcaggtgaatggtaatgcggtacagttaaaagaagaggaagaaccaatggatacttccagtgtaactcacacagaacactacaagacactgatagaggcaggcctcccacagaaggtggcagaaagacttgatgaaatatttcagacaggattggtagcttatgtcgatcttgatgaaagagcaattgatgctctcagggaatttaatgaagaaggagctctgtctgtactacagcagttcaaggaaagtgacttatcacatgttcagaacaaaagtgcatttttatgtggagttatgaagacctacaggcagagagagaaacaggggagcaaggtgcaagagtccacaaagggacctgatgaagcgaagatcaaggccttgcttgagagaactggttatactctggatgtaaccacaggacagaggaagtatggtggtcctccaccagacagtgtgtactctggcgtgcaacctggaattggaacggaggtatttgtaggcaaaataccaagggatttatatgaggatgagttggtgcccctttttgagaaggccggacccatttgggatctacgtcttatgatggatccactgtccggtcagaatagagggtatgcatttatcaccttctgtggaaaggaagctgcacaggaagccgtgaaactgtgtgacagctatgaaattcgccctggtaaacaccttggagtgtgcatttctgtggcaaacaacagactttttgttggatccattccgargaataagactaaagaaaacattttggaagaattcagtaaagtcacagagggtttggtggacgttattctctatcatcaacccgatgacaaaaagaagaatcgggggttctgcttccttgaatatgaggatcacaagtcagcagcacaagccagacgccggctgatgagtggaaaagtaaaagtgtggggaaatgtagttacagttgaatgggctgaccctgtggaagaaccagatccagaagtcatggctaaggtaaaagttttgtttgtgagaaacttggctactacggtgacagaagaaatattggaaaagtcattttctgaatttggaaaactcgaaagagtaaagaagttgaaagtggakgccgctcmtkagaactagtggatcccccgggctggcaggattwcggcacgagaatgaatggcaaagaaatagaaggggaagaaattgaaatagtcttagccaagccaccagacaagaaaaggaaagagcgccaagctgctagacaggcctccagaagcactgcgtatgaagattattactaccaccctcctcctcgcatgccacctccaattagaggtcggggtcgtggtggggggagaggtggatatggctaccctccagattactacggctatgaagattactatgatgattactatggttatgattatcacgactatcgtggaggctatgaagatccctactacggctatgatgatggctatgcagtaagaggaagaggaggaggaaggggagggcgaggtgctccaccaccaccaagggggaggggagcaccacctccaagaggtagagctggctattcacagaggggggcacctttgggaccaccaagaggctctaggggtggcagagggggtcctgctcaacagcagagaggccgtggttcccgtggatctcggggcaatcgtgggggcaatgtaggaggcaagagaaaggcagatgggtacaaccagcctgattccaagcgtcgtcagaccaacaaccaacagaactggggttcccaacccatcgctcagcagccgcttcagcaaggtggtgactattctggtaactatggttacaataatgacaaccaggaattttatcaggatacttatgggcaacagtggaagtagacaagtaagggcttgaaaatgatactggcaagatacgattggctctagatctacattcttcaaaaaaaaaaaattggcttaactgtttcatctttaagtagcattttgctsccatttgtattgggctgaagaaatcactattgtgtatatactcaagtctttttatttttcctcttttcataaatgctcttggacattattgggcttgcagagttcccttattctggggattacaatgcttttatcgtttcaggcttcattttagcttcaaaacaagctgggcacactgttaaatcatgattttgcagaacctttggttttggacagtttcatttttttggatttgggatagattacataggagtatggagtatgctgtaaataaaaatacaagctagtgctttgtcttagtagttttaagaaattaaagcaaacaaatttaagttttcttgtattgaaaataacctatgattgtatgttttgcattcctagaagtaggttaactgtgtttttaaattgttataacttcacacctttttgaaatctgccctacaaaatttgtttggcttaaacgtcaaaagccgtgacaatttgttctttgatgtgattgtatttccaatttcttgttcatgtaagatttcaataaaactaaaaaatctattcaaaaaaaaaaaaaaaaaatgaccctcgagaaaaaaaaaaaaaaaaaaaaaaaaaaaaanaa

SEQ ID NO: 335 - DNA, 1070 bp, Homo sapiens
  misc_feature (9)..(9): n equals a,t,g, or c
gtgaaaggngcatttgctatacagacctttagaacagcaacatggagtcattcctgatcgggatgcagaattttgtctttttgaccgtgttgtaaatgtgagagaaaacttctcagttccagttggccttcgaggcaccatcataggaataaaaggagctaatagagaagccgatgtactatttgaagtattatttgatkwagaatttcctggagggttaacaataagatgctcacctggtagaggttatcgactgccaacaagtgccttggtgaacctttctcatgggagtcgctctgaaactggaaatcagaagttgacagccatcgtaaaaccacaaccagctgtacatcaacatagytcaagttcatcagtttcctctgggcatttgggarccctcaaccattcccctcaatcactttttgttcctactcaagtacctactaaagatgatgatgaattctgcaacatttggcagtccttacagggatctggaaagatgcaatacttcgagccaactatacaagagaagggtgcagttctacctcaagaaataagccaagtaaatcaacatcataaatctggctttaatgacaacagtgttaaatatcagcaaagaaaacatgaccctcacagaaaatttaaagaagagtgtaagagtcctaaagctgagtgttggtcccaaaaaatgtccaataagcagcctaactctggaattgagaactttttagcatctttgaatatctccaaagaaaatgaartacagtcatctcatcatggggagcctccaagtgaagagcatttgtcaccacagtcatttgccatgaagggaacacggatgcttaaagaaattctaaaaattgatggctctaacactgtggaccataagaatgaaatcaaacagattgctaatgaaatccctgtttcctctaacagaagagatgaatatggattaccctctcagcctaaacaaaataagaaattagcatcttatatgaacaagcctcacagtgctaatgagtaccataatgttcagtctatggacaatatgtgttggcctgcccccagcc

SEQ ID NO: 336 - DNA, 1729 bp, Homo sapiens
  misc_feature (125)..(125): n equals a,t,g, or c
cacagacgctactctgtagcatctcaggttccctctggctgcactctggaggaccacactcgttttctttttggctgccagaggcccccgcatccaccgctgagctgggagaaagatggcggcancgtgcgacaggatttggcccagctcatgaattcgagcggctctcataaagatctggctggcaagtatcgtcagatcctggaaaaagccattcagttatctggagcagaacaactagaagctttgaaagcttttgtggaagcaatggtaaatgagaatgtcagtctcgtgatctcgcggcagttgctgactgatttttgcacacatcttcctaacttgcctgatagcacagccaaagaaatctatcacttcaccttggaaaagatccagcctagagtcatttcatttgaggagcaggttgcttccataagacagcatcttgcatctatatatgagaaagaagaagattggagaaatgcagcccaagtgttggtgggaattcctttggaaacaggacaaaaacagtacaatgtagattataaactggagacttacttgaagattgctaggctatatctggaggatgatgatccagtccaggcagaggcttacataaatcgagcatcgttgcttcagaatgaatcaaccaatgaacaattacagatacattataaggtatgctatgcacgtgttcttgattatagaagaaaattcattgaagctgcacaaaggtacaatgagctctcttacaagacaatagtccacgaaagtgaaagactagaggccttaaaacatgctttgcactgtacgatcttagcatcagcagggcagcagcgttctcggatgctagctactctttttaaggatgaaaggtgccagcaacttgctgcctatgggatcctagagaaaatgtatctagataggatcatcagaggaaatcaacttcaagaatttgctgccatgctgatgcctcaccaaaaagcaactacagctgatggttccagcatcttggacagagctgttattgaacacaatttgttgtctgcaagcaaattatataataatattaccttcgaagaacttggagctcttttagagatccctgcagctaaggcggaaaagatagcatctcaaatgataaccgaagacgtatgaatggatttattgaccagattgatggaatagttcattttgaaacacgagaagccctgccaacgtgggataagcagatccaatcactttgtttccaagtgaataaccttttggagaaaattagtcaaacagcaccagaatggacagcacaagccatggaagcccagatggctcagtgaatccttgcagaacttctgtgcacatgacatctttttccatgttgtgcagatcagtttcactatctccaaagcatttgcatcatgaccttatacatttcaatcccttttatgctggattccgtttaaagaagacattattagagcaggaagtacaagcatttaaaatatgtagttcccatatatttcagggtctctgtgtattaagctaactcagatgttttgaaagctttttctttaaacagaggtgaaatatctgtggctaaaaagtttgagatttgtgataactttgtagtcatgtaaaacttaagtgcttcatgcctctccaaatgtggttattctaataaatggagaaatgagccaaaaaaaaaaaaaaaaaaaaaaaaaaaaaaaaaaaa

SEQ ID NO: 337 - DNA, 686 bp, Homo sapiens
gctgcgctagtggctggtcctgtgagaagagctgcaggagtgggagatggtggcggatggcaggcggtggtggctcttatacccagggtaagggagtggctggcaggggagggtccacagggctcctcttctgggactctcaggctgtcggcttctcctagagcgcaccctagtctcccttcccttgccagcttccctggtgaccagccaggacccaaatcacctgggtcccctcccctacgccctcctgcaaagaggaagtgctcatgaacttcggccctgccagggccttatcagagcccataaaaccctgcccagacttctgttggcagagggagggtgagaccaggcagggcagggcaggctgcaggaatgacccaggacaggtgggcagcggaggaggagaacgcggaggaactgcaaattcctgcctctcccagcaactgtgaagggacctacgttgattgcgtgcccaccacacatctttaccacgtatgttgtattgtagggagagtggtttagattactagtgtgtggagccagaggttctaggttcaaatcctgcctttgccacttctcagctgtatgatcatgggtcagtgccttaccctcaatttgcccatgtgctcatctgtaaaatggggatatagtagtatcggctgggtgcagtggctcatgctcgtgcc

SEQ ID NO: 338 - DNA, 1241 bp, Homo sapiens
agacgagcgtggcggccgcggctgctcggggccgcgctggttgcccattgacagcggcgtctgcagctcgcttcaagatggccgcttgctcgcattcattttctgctgaacgacttttaactttcattgtcttttccgcccgcttcgatcgcctcgsgccggctgctctttccgggattttttatcaagcagaaatgcatcgaacaacgagaatcaagatcactgagctaaatccccacctgatgtgtgtgctttgtggagggtacttcattgatgccacaaccataatagaatgtctacattccttctgtaaaacgtgtattgttcgttacctggagaccagcaagtattgtcctatttgtgatgtccaagttcacaagaccagaccactactgaatataaggtcagataaaactctccaagatattgtatacaaattagttccagggcttttcaaaaatgaaatgaagagaagaagggatttttatgcagctcatccttctgctgatgctgccaatggctctaatgaagatagaggagaggttgcagatgaagataagagaattataactgatgatgagataataagcttatccattgaattctttgaccagaacagattggatcggaaagtaaacaaagacaaagagaaatctaaggaggaggtgaatgataaaagatacttacgatgcccagcagcaatgactgtgatgcacttaagaaagtttctcagaagtaaaatggacatacctaatactttccagattgatgtcatgtatgaggaggaacctttaaaggattattatacactaatggatattgcctacatttatacctggagaaggaatggtccacttccattgaaatacagagttcgacctacttgtaaaagaatgaagatcagtcaccagagagatggactgacaaatgctggagaactggaaagtgactctgggagtgacaaggccaacagcccagcaggaggtattccctccacctcttcttgtttgcctagccccagtactccagtgcagtctcctcatccacagtttcctcacatttccagtactatgaatggaaccagcaacagccccagcggtaaccaccaatcttcttttgccaatagacctcgaaaatcatcagtaaatgggtcatcagcaacttcttctggttgatacctgagactgttaaggaaaaaaaaaaaaaaaaaaccccggccgctcccacttcagattggtaac

SEQ ID NO: 339 - DNA, 1652 bp, Homo sapiens
tttttttttttttttttttttttttttttttttttttttttttttttttttttttttttttatttcaaaaacagggatatctgcatttaatttcattcagtaaatcaattccagttaacttaccatctcttaaaaatgggagaaagcaaacataggacgtgaaaagttaaagatgcgtgacatactggagagtaataagacatactggagagtagtaagtgcacacgtggcaattaagggttgtaatttagatgtaacacaagaaaaaaagtaaaattactgtactttattgctgtatctatgctttcccagtatagctataatactacaaggagccacagagtgccaccttctggtttaaaactgtggcaccttatttcttttgaaatgtcactttataaggtgtatgtagaaagcaacagcagcagttacaaaatgttgtctgagtgattctgagagctcaaaacaaggatccgcgtataggctgaagaaaaagacgttcagttaacagtgcgcgctgtagaactttaacacaagtcttcaggtggaattcctgtgtaaaccttagtagagatgcgactcacggagaccaaaagtaaaaatctctttaccgtttacagtttagtgaggtggtctgcattctcgcaaacgacttacaaagtacaagaaatgttgcgtgtgagtattaggcatagaatatttcattttcttacggaaggagcagcaggggacaggaaacctagtggacgccccgccaccacctttcccgaagatgcacacccccaggaacggcagtgcaagcctggcagcaagccacccttacaattctttttggttgtttaaaatacaagcgctttctgacatctcaccctagcgtgtgagccccactcaacctggcaggatacaacccacgtcctcgtttagttttccccttggaattatttacaggatgcctacagatacggtacaaactagtatgaaattaatgatagtttgcgtttccagacacgctcccgtggttaaatataccacgccaattccaaagaatggttcaaagttaaggtgactcagaagcattggcatccacagccgcagaaacaggcttctcgctgactggggtggagtcgccgactctgtcctcaacggtggtgggggccttggcagtggggggcgtcacatccacagtgagtgaggaggcagcgtctgcctttgcagtagttgtggcagggtcagagggtgcgttgctggtgggcgggagggaagacagcagctctcctgagcttgctgcagaagagctctctggaaccaaggggaatgacgggaggaactcggatggcagggggagaggtgcaatgccaggtaagtttcggggaggcatggaaggaagaggtggcagacctgggtttacaagttctggtaagccaacccctggcatgatgtgtggtgctgggaggttgaggttgaggttggggaggttgggcagtcctgctggtaaaggcatcagacctggtaatgtagtagctggattcattggtggcacagaagtgagggactggtttacttgtggtggcaataacggtactgttggtacacctgtactgagaacactactgacagctggtggagttgagctaatagaaagtccagtcaga

SEQ ID NO: 340 - DNA, 1916 bp, Homo sapiens
  misc_feature (1895)..(1895): n equals a,t,g, or c
  misc_feature (1902)..(1902): n equals a,t,g, or c
gccacggcacgcagccagcaagttgtttttaaatgttaatatagaaaacagtgaaggattagctgaaaatatatgagcaggtgacattgaggtttactgaaatagccaatttgactggtgcttagactattgtgcagtaaacctaaaaggtagtggagaattgcttcctgctagcaggaagccttcatcttcttgagtacccaaaccaggcttcaggtgtcctttgaggatagccaggtttgaaatttttagtttctcaggaagagctcttctatgtggcaggggctgatagggcaaaataaaatgacaatttctttattgctacagagtatcctctataagttattaaacgagtgtaatggtataatgcccttccatcacacaacaggacaccaccccagttttgttttctgggtttcttccccctttgtaggaatcagataccttttgtagaaaaaaatggcttatgccacgtaaaggtgaatttttagaaaccaccttctaggcgtttttggaacccttactgaaatccctccccttgttacagatggcgtagaagtcacaagtctgttaattggactgttgcttctttgcctgttcctgctttctctttctgtctggatagtcaggaaaagatttaatgtttaatatttaaacaaaatatttaatgtctatacagtaaaattattcaaacttcaaaccagtattgaaagcagttggaaaccagctaatagtttcttaatctcagatttcgagatgaatgtaaactgtattcttttgaaatgtgcaagtgtttgattcatgccatttgataaacttctgccttgtagtcattgtttgatgggaccaacttgtaaagtatgagccttaaataaatctccatgctgaaaaatgtgttctaatgcaacacaaaaacatgaagtgactgcccagaggtagagttagtgtttaggtggaaagggagatgacagctttccaaagaaggacctaaaacacaccaagattgtcttctacaggaattgctgggcaggtctccgactaaaggtcttatgatgaaaaggaagaaacaagcccccaacacaaggctctgatactactggtaaatgtaggagagaattaagaatctgttaattaaaatccaaacagagcttatttcagtagtcaagttacctgacatgataattatttctgcaggataattgatgttttatgttcttttttggactttatcttcttgcaaaaatttctacaaaaattgttttcttcatccttgtggtgcttattcatctgagccgtctccacagtcccaatgcctctgctttttgttttacttttgtagcataaggtttttgcttttgctttgccttaagagttccctagggagttaccagggcttttcgttttgtgtagcttttgcagcatggatcaaacattggcttactgtgctaatgtgtgaagagaaaaaattctctaaagcaggtgagctttaatgaacaaatgtgtattttatctgagtttgagtagggtgcgttgtggattttgttttttgggttttttttttttttttgtaattatatgaagaaagtccagttctcataaatattgatcacttaaaaaacttactctttcttgaaaaggtacacatgtaaaatttaggaaaataactaaagtaggggctggaaccataagaagaatgtttatcagcacgttcatttattattttggatttggaacttggctttgtttttcaatagtgacaagaatggttcagttctaggaatgttctggaagatgctgttaattttactttaaaatgagaatctggtgttactgtattttatcgttttcaataaaacttcttaagtgttttggaaaaaaaaaaaaaaaaaaaattnctgcggnccgcaagggaattc

SEQ ID NO: 341 - DNA, 1658 bp, Homo sapiens
gctcgtgccgattcggcacgagatggaggcagcggtagcccagtgtctgagtggttgccgggtctccatggagaagcggctcgccagtgtcccaggctgctgagctctcgccgcccgagaccccgcggcgcggccgcagggccatgctagccttgcgcgtggcgcgcggctcgtggggggccctgcgcggcgccgcttgggctccgggaacgcggccgagtaagcgascgcctgctgggccctgctgccgcccgtgccctgctgcttgggctgcctggccgaacgctggaggctgcgtccggccgctcttggcttgcggctgcccgggatcgkccagcggaaccactgttcgggcgcggggaaggcggctcccaggccagcggyaykgcgggcgccgctgccgaagccccgggcgkccagtggggcccggcgagcacccccagcctgtatgaaaacccatggacaatcccgaatatgttgtcaatgacgagaattggcttggccccagttctgggctatttgattattgaagaagattttaatattgcactaggagtttttgctttagctggactaacagatttgttggatggatttattgctcgaaactgggccaatcaaagatcagctttgggaagtgctcttgatccacttgctgataaaatacttatcagtatcttatatgttagcttgacctatgcagatcttattccagttccacttacttacatgatcatttcgagagatgtaatgttgattgctgctgttttttatgtcagataccgaactcttccaacaccacgaacacttgccaagtatttcaatccttgctatgccactgctaggttaaaaccaacattcatcagcaaggtgaatacagcagtccagttaatcttggtggcagcttctttggcagctccagttttcaactatgctgacagcatttatcttcagatactatggtgttttacagctttcaccacagctgcatcagcttatagttactatcattatggccggaagactgttcaggtgataaaagactgatgaaagtcatccctcactgttagtaaggaagcagtatacatcaatgggaacagggcccatggaaatgtacaggagtttccctattttggtgttcagcttgaaaaaggacttgtcagaatcaactgtgtcatcaaaatttaagtaatgtgcattgaaaataaggttgatcatgggaatatgcagaatttccaatgtatttttaaatacaaataaaattgtaatttagaatttttaaatcttaggtttcttgattaatttataagagatcaattattgtcagtcttttttgtatgttttttaaaaacatagtccagagcatgggcagaattgacacctctcttttaagtgaaatttggattgctcacaaagcactaggaaatgtcatggggttcaaatatatatccyacacaactgggcaatacatttttgtttgatttttaggtctgtgtatacattaacagttcatgtaattaatacckgatcatttgggataatgaaagtgaagttagttgtagatgaagtaaagttataaaagagattaaaaatgatcaggtattaattacatgaactgttaatgaatccaggttccaatatcaacaaacattgctatg

SEQ ID NO: 342 - DNA, 1102 bp, Homo sapiens
tttgcacgtacggtccggaatcccgggtcgacccacgcgtccgggaattcatgtggaggtcagagtggaagcaggtgtgagagggtccagcagaaggaaacatggctgccaaagtgtttgagtccattggcaagtttggcctggccttagctgttgcaggaggcgtggtgaactctgccttatataatgtggatgctgggcacagagctgtcatctttgaccgattccgtggagtgcaggacattgtggtaggggaagggactcattttctcatcccgtgggtacagaaaccaattatctttgactgccgttctcgaccacgtaatgtgccagtcatcactggtagcaaagatttacagaatgtcaacatcacactgcgcatcctcttccggcctgtcgccagccagcttcctcgcatcttcaccagcatcggagaggactatgatgagcgtgtgctgccgtccatcacaactgagatcctcaagtcagtggtggctcgctttgatgctggagaactaatcacccagagagagctggtctccaggcaggtgagcgacgaccttacagagcgagccgccacctttgggctcatcctggatgacgtgtccttgacacatctgaccttcgggaaggagttcacagaagcggtggaagccaaacaggtggctcagcaggaagcagagagggccagatttgtggtggaaaaggctgagcaacagaaaaaggcggccatcatctctgctgagggcgactccaaggcagctgagctgattgccaactcactggccactgcaggggatggcctgatcgagctgcgcaagctggaagctgcagaggacatcgcgtaccagctctcacgctctcggaacatcacctacctgccagcggggcagtccgtgctcctccagctgccccagtgagggcccaccctgcctgcacctccgcgggctgactggccacagccccgatgattcttaacacagccttccttctgctcccaccccagaaatcactgtgaaatttcatgattggcttaaagtgaaggaaataaaggtaaaatcacttcagaaaaaaaaaaaaaaaaaaaaccccgggggggggc

SEQ ID NO: 343 - DNA, 4201 bp, Homo sapiens
  misc_feature (4077)..(4077): n equals a,t,g, or c
  misc_feature (4161)..(4161): n equals a,t,g, or c
  misc_feature (4186)..(4186): n equals a,t,g, or c
gcggacgcgtgggcggacgcgtgggtscggacgcgtgggctcgcggcgccgcctcctgctcctcccgctgctgctgccgctgccgccctgagtcactgcctgcgcagctccggccgcctggctccccatactagtcgccgatatttggagttcttacaacatggcagacattgacaacaaagaacagtctgaacttgatcaagatttggatgatgttgaagaagtagaagaagaggaaactggtgaagaaacaaaactcaaagcacgtcagctaactgttcagatgatgcaaaatcctcagattcttgcagcccttcaagaaagacttgatggtctggtagaaacaccaacaggatacattgaaagcctgcctagggtagttaaaagacgagtgaatgctctcaaaaacctgcaagttaaatgtgcacagatagaagccaaattctatgaggaagttcaygatcttgaaaggaagtatgctgttctctatcagcctctatttgataagcgatttgaaattattaatgcaatttatgaacctacggaagaagaatgtgaatggaaaccagatgaagaagatgagatttcggaggaattgaaagaaaaggccaagattgaagatgagaaaaaggatgaagaaaaagaagaccccaaaggaattcctgaattttggttaactgtttttaagaatgttgacttgctcagtgatatggttcaggaacacgatgaacctattctgaagcacttgaaagatattaaagtgaagttctcagatgctggccagcctatgagttttgtcttagaatttcactttgaacccaatgaatattttacaaatgaagtgctgacaaagacatacaggatgaggtcagaaccagatgattctgatcccttttcttttgatggaccagaaattatgggttgtacagggtgccagatagattggaaaaaaggaaagaatgtcactttgaaaactattaagaagaagcagaaacacaagggacgtgggacagttcgtactgtgactaaaacagtttccaatgactctttctttaacttttttgcccctcctgaagttcctgagagtggagatctggatgatgatgctgaagctatccttgctgcagacttcgaaattggtcactttttacgtgagcgtataatcccaagatcagtgttatattttactggagaagctattgaagatgatgatgatgattatgatgaagaaggtgaagaagcggatgagggttatcagctctttgaagaagtcaaaagctgcagtaaacttttccaacgttggctgcagtaactattttcaataaaagctgtctggatgtctcaagttgtgttgggaaatttttcatattagaagctttcaaattaaattgtattatcatcaaagtctgtaatcatgaaaatctgttgatccgtagagtaacttgtattaaattttccctacattatgagccagtttacctactatgtacatacttcatggatgcattttgaactttaatataggaaggggaagaagaaggagatgaggaaaatgatccagactatgacccaaagaaggatcaaaacccagcagagtgcaagcagcagtgaagcaggatgtatgtggccttgaggataacctgcactggtctaccttctgcttccctggaaaggatgaatttacatcatttgacaagcctattttcaagttatttgttgtttgtttgcttgtttttgtttttgcagctaaaataaaaatttcaaatacaattttagttcttacaagataatgtcttaattttgtaccaattcaggtagaagtagaggcctaccttgaattaagggttatactcagtttttaacacattgttgaagaaaaggtaccagctttggaacgagatgctatactaataagcaagtgtaaaaaaaaaaaaaaaagaggaagaaaatcttaagtgattgatgctgttttcttttaaaaaaaaaaaaataaaattcattttctttgggttagagctagagagaaggccccaagcttctatggtttcttctaattcttattgcttaaagtatgagtatgtcacttacccgtgcttctgtttactgtgtaattaaaatgggtagtactgtttacctaactacctcatggatgtgttaaggcatattgagttaaatctcatataatgtttctcaatcttgttaaaagctcaaaattttgggcctatttgtaatgccagtgtgacactaagcattttgttcacaccacgctttgataactaaactggaaaacaaaggtgttaagtacctctgttctggatctgggcagtcagcactctttttagatctttgtgtggctcctatttttatagaagtggagggatgcactatttcacaaggtccaagatttgttttcagatatttttgatgactgtattgtaaatactacagggatagcactatagtattgtagtcatgagacttaaagtggaaataagactatttttgacaaaagatgccattaaatttcagactgtagagccacatttacaatacctcaggctaattactgttaattttggggttgaacttttttttgacagtgagggtggattattggattgtcattagaggaaggtctagatttcctgctcttaataaaattacattgaattgatttttagaggtaatgaaaacttcctttctgagaagttagtgttaaggtcttggaatgtgaacacattgtttgtagtgctatccattcctctcctgagattttaacttactactggaaatccttaaccaattataatagctttttttctttattttcaaaatgatttcctttgctttgattagacactatgtgctttttttttttaaccatagttcatcgaaatgcagctttttctgaacttcaaagatagaatcccatttttaatgaactgaagtagcaaaatcatctttttcattctttaggaaatagctattgccaaagtgaaggtgtagataatacctagtcttgttacataaaggggatgtggtttgcagaagaattttctttataaaattgaagttttaagggacgtcagtgtttatgccatttttccagttccaaaatgattccattccattctagaaatttgaagtatgtaacctgaaatccttaataaaatttggatttaattttataaaatgtactggtgatattttgggtgtttttttttaaatgaatgtatatactttttttttgaagagtggagagtagtgatgtctagagggagctattttgtgctgaggccactatgttctgtaaatatataattttaagagcaacctcacaatccctgctaagtggagtttattatttgaagactaaaatggaattccatagttcctgataggttatattctgrgttattattctgagttatctacaaacatttttgagatttgtctttacactctgattgtagtttccagcagcccatgcacactgccaagtaagtctcattttttcctgttagaaatggtgaaatatcatataatcacttataaagaaaactgatatgaaaaaattttagagttgtttgctttatggtcactcaagtagggtaagtgttccacaaattccacaagttgatagtttaacatggatgtctgaaagccacatatataatttcttaggattcttaaattagtaaatctagcttactgaagcagtattagcatcactattttagattgcaaaaataccttaattgtgtggaactggcttgtagagtggtacttaagaaaaatgggattctacctctatttctgttttagcacacttaatcaggaaaggatatattaactttcataaaaatatttttgttgtgtgaataggttaatgatatggtaaggcccctaaaataactgaattaattgtttattgtaattgtaggccattcccattattaaaaataaagacaaaacttgaagtaactgaaaatcttatcgtgctatgtagaaatattgaactaatattcaaatatttgaatgctttggtttcagggattggtttaaaattggagtccnttttttatggggttagtcttacaaaaatttaagcctttatatttttgactttaaatcaaaaccaaatgttattttaaatgtacnggaatwggattgggtaggtgcmggnaggartgtwaggttc

SEQ ID NO: 344 - DNA, 1239 bp, Homo sapiens
aattcggcacgagctgaagccctctctctggatgacacagactttgaggtgtagtgaaatctttgctgttcaccagatgtaatgttttagttccttacaaacagggttgggggggggaagggcgtgcaaaaactaacattgaaattttgaaacagcagcagagtgagtggattttatttttcgttattgttggtggtttaaaaaattccccccatgtaattattgtgaacaccttgctttgtggtcactgtaacatttggggggtgggacagggaggaaaagtaacaatagtccacatgtccctggcatctgttcagagcagtgtgcagaatgtaatgctcttttgtaagaaacgttttatgatttttaaaataaatttagtgaacctatttttggtggtcattttttttttaagacagtcattttaaaatggtggctgaatttcccaacccacccccaaactaaacactaagtttaattttcagctcctctgttggacatataagtgcatctcttgttggacataggcaaaataacttggcaaacttagttctggtgatttcttgatggtttggaagtctattgctgggaagaaattccatcatacatattcatgcttataataagctggggattttttgtttgtttttgcaaatgcttgcccctacttttcaacaattttctatgttagttgtgaagaactaaggtggggagcagtactacaagttgagtaatggtatgagtatataccagaattctgattggcagcaagttttattaatcagaataacacttggttatggaagtgactaatgctgaaaaaattgattatttttattagataatttctcacctatagacttaaactgtcaatttgctctagtgtcttattagttaaactttgtaaaatatatatatacttgtttttccattgtatgcaaattgaaagaaaaagatgtaccatttctctgttgtatgttggattatgtaggaaatgtttgtgtacaattcaaaaaaaaaaaagatgaaaaaagttcctgtggatgttttgtgtagtatcttggcatttgtattgatagttaaaattcacttccaaataaataaaacacccatgatgctagatttgatgtgtgcccratttgaacaagggttgattgacacctgtaaaatttgttgaaacgttcctcttaaaaggaaatatagtaatcttatgtaaaaaaaaaaaaaaaaaactcgaga

SEQ ID NO: 345 - DNA, 1249 bp, Homo sapiens
  misc_feature (36)..(36): n equals a,t,g, or c
gcaaggagtccccaatgcaaagacacagcgctgcgnttggcacctccttcctcactccctcaaaattgttaagaaatgttagtggtgggtctgatctgactgcagccatcggtaaataaaagtttttgatcctgttgaacccgcctgagacggtgctgtgaggggaaagccttccgcacccacacaggaattctgctgaggtcccccctccttccggccaatggcagaagtgggggaaaatttttagaagaaaagcaaacatgtgagaccaatcattatcaaatacttttattttttggttgagtatttatctttttattttttatttttttttttgaaagaatgtcttggaatgcgcaagtctccctttagagccgtcttttgcagggagcgggaagtgacaagagctcagatctccctcccgatctccctccccacctccgaagtctcctccgtggaccacaggtggatctttgtgcgaacaacttgcatttcggaagccactgtccgtctttaaacagaaagtcgaaggagccacgaagcaagcggccgtccgggcgtccgyctgccgtccccttccatgttcctcctcttccttcgcttcagcctcttctgttatgttttgtcttgaattttatttagactttttcagtgggtatttttctgtcttccaacctctactgtaaactttctggtccgagaacgagccgaacacagcgcgacgcagggactaggacggcccggtgaccgcgcggattcaggattgcggggacgcagaaaggttaaggcacttttaaaaactatagcaaggctcctgtttatttattctactttctttccctaataatcaaaacaccgcgtaggctcctccgtttatcagtattaatggtgtaactttgttggcaatatttgccgtgtagaattttttttagatatccattgtaaatttgaaacaaagaccgatctgtgtaaaaacaaatttccatatgttttatataaatatatatataatatgaaggactaccctcctttttttttttgtattttggctgctagagtgcagcatttgtgacacgtatttgaaatttgaaatttccttctgcactgtataaaaggaccatttgaggatgttttgccttttgtgtattttttcctaaaaaaagaacaaaaataaaaatgtataacatttgtacatggcctttaaaattgtatcaactagaaataaaattgcatgagtattttaaaaaaa

SEQ ID NO: 346 - DNA, 722 bp, Homo sapiens
  misc_feature (690)..(690): n equals a,t,g, or c
  misc_feature (703)..(703): n equals a,t,g, or c
  misc_feature (718)..(718): n equals a,t,g, or c
ggcttaaatgtgattcttgatactgttttaagtatttaggttgcaattaactttggcaaagtcagtcgacataagccctgtggatatggccttatgtacactgtaatgcagacaggtgcttttcatcattcatgtaacattctcacacagttgaggrtattcatctcctcaccaattccagattgtraatgtacywtcttaaacaactcttgaggtcaccaaacagtagttatttgactgttaataggtgctacttgcttgcaaggatttggagatgtaaacatgaagaaaatatagttactgcctgcaaagaattaacatccgtctagtgggagaaacaaacacaccccactcactaagtatggaaaactgattctgggaggaagcagaaatgtccctagataacagcatgtattgcagatacccaaatgtttattgttttctcagcccttcaattttgcttttctctctcaaatgctacagactcaatttaaatcttacctttgattgttgaaaaaagtcactaagatgtgaatacagaatagacattgagaggttatatatgtccaaaactcatctgtccagcagtcaccgtcctcttcagagtggtcacgttgggcagrtgggcacaggtgctggtgatgcccctcckgggcaaaacgccccatttgtggcacttccagatactanttatttacttttnaagagagagacaggntcac

SEQ ID NO: 347 - DNA, 2210 bp, Homo sapiens
  misc_feature (40)..(40): n equals a,t,g, or c
cgcgcctgcaggttcgacagtagtggatccaaagaattcngcacgaggctgggtgcagcaaccggagcggcggcgcgtctggaggaggctgcagcagcggaagaccccagtccagatccaggactgagatcccagaaccatgaacctggccatcagcatcgctctcctgctaacagtcttgcaggtctcccgagggcagaaggtgaccagcctaacggcctgcctagtggaccagagccttcgtctggactgccgccatgagaataccagcagttcacccatccagtacgagttcagcctgacccgtgagacaaagaagcacgtgctctttggcactgtgggggtgcctgagcacacataccgctcccgaaccaacttcaccagcaaatacaacatgaaggtcctctacttatccgccttcactagcaaggacgagggcacctacacgtgtgcactccaccactctggccattccccacccatctcctcccagaacgtcacagtgctcagagacaaactggtcaagtgtgagggcatcagcctgctggctcagaacacctcgtggctgctgctgctcctgctctccctctccctcctccaggccacggatttcatgtccctgtgactggtggggcccatggaggagacaggaagcctcaagttccagtgcagagatcctacttctctgagtcagctgaccccctccccscaatccctcaaaccttgaggagaagtggggaccccacccctcatcaggagttccagtgctgcatgcgattatctacccacgtccacgcggccacctcaccctctccgcacacctctggctgtctttttgtactttttgttccagagctgcttctgtctggtttatttaggttttatccttccttttctttgagagttcgtgaagagggaagccaggattggggacctgatggagagtgagagcatgtgaggggtagtgggatggtggggtaccagccactggaggggtcatccttgcccatcgggaccagaaacctgggagagacttggatgaggagtggttgggctgtgcctgggcctagcacggacatggtctgtcctgacagcactcctcggcaggcatggctggtgcctgaagaccccagatgtgagggcaccaccaagaatttgtggcctaccttgtgagggagagaactgagcatctccagcattctcagccacaaccaaaaaaaaataaaaagggcagccctccttaccactgtggaagtccctcagaggccttggggcatgacccagtgaagatgcaggtttgaccaggaaagcagcgctagtggagggttggagaaggaggtaaaggatgagggttcatcatccctccctgcctaaggaagctaaaagcatggccctgctgcccctccctgcctccacccacagtggagagggctacaaaggaggacaagaccctctcaggctgtcccaagctcccaagagcttccagagctctgacccacagcctccaagtcaggtggggtggagtcccagagctgcacagggtttggcccaagtttctaagggaggcacttcctcccctcgcccatcagtgccagcccctgctggctggtgcctgagcccctcagacagccccctgccccgcaggcctgccttctcagggacttctgcggggcctgaggcaagccatggagtgagacccaggagccggacacttctcaggaaatggcttttcccaacccccagcccccacccggtggttcttcctgttctgtgactgtgtatagtgccaccacagcttatggcatctcattgaggacaaagaaaactgcacaataaaaccaagcctctggaatctgtcctcgtgtccacctggccttcgctcctccagcagtgcctgcctgccmcgcttcgctggggtctccacgggtgaggctggggaacgccacctcttcctcttccctgacttctccccaaccacttagtagcaacgctaccccaggggctaatgactgcacactgggcttcttttcagaatgaccctaacgagacacatttgcccaaataaacgaacatcccatgtctgctgactcacctggctggaacaacatgcttactgccaacatgtgggccgaaccacatggccctggctttggaatgcacaagtggctttgcgtgaatttgcgctaagctatgcagtttgaaaaaaaaaa

SEQ ID NO: 348 - DNA, 741 bp, Homo sapiens
  misc_feature (581)..(581): n equals a,t,g, or c
  misc_feature (656)..(656): n equals a,t,g, or c
  misc_feature (711)..(711): n equals a,t,g, or c
  misc_feature (719)..(720): n equals a,t,g, or c
  misc_feature (737)..(737): n equals a,t,g, or c
ttcagtatgtggtgctacccatggcgacagggagttattggatacctttatatatacactactcccttcaacaaactgcctggtctataggatcttgctcaaggacctgttccaggaaacctctagattttcccccttgcctagcctctgtgaaggcagaaatcactaatggagtggtttgccttaaatacctttgtacgtgtaacatcctgcaatgtatatgatatttagtaggcattcaataagtatttgctgaataagttaaaaaaattaatatgtatctgatgctgattaatcactctatataaaatataaaatgtgtaaaaaaaaaatggtcactggttttactgttgaagcctgtgttttatagatggaaaatatcacaagcaaattaaaatagaagagaatgcaacaggtttcagttatgagtcactttttcgcgaataccttaatgagacagttacagaagtttggatagaagatccttatattagacatactcatcagggcattgatcaagtgcagcaaagtagaggcctgcaagaaatagaagagtcactcaggagtcacgggagtgctgntggaaggtcaatactcttcttcaatacatgaccgagaaattaggttcaacaatggatgggtgattaaagattggnaaggggacttggttattttaaggaaacccccaggtagggatataatcttaatgangtaaatgnntagcactggtttttggnatca

SEQ ID NO: 349 - DNA, 2045 bp, Homo sapiens
cccgggtcgacccacgcgtccggaaagatccaaaacaagtggctgcggccgtcgcccaggagtcatcggacgccagaatctggccgggttctgagcttgttccgcctccctcccccgggaatggcgctatccgggtcgaccccggccccgtgctgggaggaggatgagtgcctggactactacgggatgctgtcgcttcaccgtatgttcgaggtggtgggcgggcaactgaccgagtgcgagctggagctcctggcctttctgctggatgaggctcctggcgccgccggaggcttagcccgggcccgcagcggcctagagctcctgctggagctggagcgccgcgggcagtgcgacgagagcaacctgcggctgctggggcaactcctgcgcgtgctggcccgccacgacctgctgccgcacctggcgcgcaagcggcgccggccagtgtctccagaacgctatagctatggcacctccagctcttcaaagaggacagagggtagctgccgtcgccgtcggcagtcaagcagttctgcaaattctcagcagggtcagtgggagacaggctcccccccaaccaagcggcagcggcggagtcggggccggcccagtggtggtgccagacggcggcggagaggggccccagccgcaccccagcagcagtcagagcccgccagaccttcctctgaaggcaaagtgacctgtgacatccggctccgggttcgagcagagtactgcgagcatgggccagccttggagcagggcgtggcatcccggcggccccaggcgctggcgcggcagctggacgtgtttgggcaggccaccgcagtgctgcgctcaagggacctgggctctgtggtttgtgacatcaagttctcagagctctcctatctggacgccttctggggcgactacctgagtggcgccctgctgcaggccctgcggggcgtgttcctgactgaggccctgcgagaggctgtgggccgggaggctgttcgcctgctggtcagtgtggatgaggctgactatgaggctggccggcgccgcctgttgctgatggaggaggaaggggggcggcgcccgacagaggcctcctgatccaggactggcaggattgatcccacctccaagtctccgggccaccttctcctgggaggacgaccatctctacccctagaggactgtcactctagcatctttgaggactgcgacaggaccgggacagcaggccccttgacagcccctcccacaggatgtgggctctgaggcctaaaccatttccagctgagtttccttcccagactcctcctacccccaggtgtgcccccttagcctccggaggcgggggctgggcctgtatctcagaagggaggggcacagctacacactcaccaaaggcccccctgcacattgtatctctgatcttgggctgtctgcactgtcacaggtgcacacactcgctcatgctcacactgcccctgctgagatcttccctgggcctctgccctggcctgcttcccagcacacacttctttggcctaagggcttctctctcaggacctctaatttgaccacaaccaacctgggcttcagccacatcagtgggcactggagctggggtgcacatggggcctgctcaccttgcccacacatctccagccagccagggccctgcccagcttcaatttacagacctgactctcctcaccttcccccctgctgtccagagctgaacatagacttgcacttggatgtcacctggagtgtcacatgggagtgttatggcagcatcataccaaggcctactgttgcacatggggccaaaaccagtaaacagccaccttcttggaaagggaatgcaaaggctttgggggtgatggaaaagacctttaacaaatgataccaattaaactgccctggaaagggcataggtgggaaaaaaaaaaaaaaaaaaaaaaaaaaaaaaaaaaaaaaaaaaaaaaaaaaaaaaaaaaaaaaaaaaaaaaaaaaaaaaaaaaaaaaaaaaaaaaaaaaaaaaaaaa

SEQ ID NO: 350 - DNA, 2074 bp, Homo sapiens
cctatggaaaaacgccagcaacgcggcctttttacggttcctggccttttgctggccttttgctcacatgttctttcctgcgttatcccctgattctgtggataaccgtattaccgcctttgagtgagctgataccgctcgccgcagccgaacgaccgagcgcagcgagtcagtgagcgaggaagcggaagagcgcccaatacgcaaaccgcctctccccgcgcgttggccgattcattaatgcagctggcacgacaggtttcccgactggaaagcgggcagtgagcgcaacgcaattaatgtgagttagctcactcattaggcaccccaggctttacactttatgcttccggctcgtatgttgtgtggaattgtgagcggataacaatttcacacaggaaacagctatgaccatgattacgccaagctcgaaattaaccctcactaaagggaacaaaagctggagctccaccgcggtggcggccgctctagaactagtggatcccccgggctgcaggaattcggcacgagcatggttctgcagacgaccaaggggctgcggcttctctttgatggcgatgcccacctcctcatgtccatccccagccccttccgtggacggctctgtggcctctgtgggaacttcaatggcaactggagtgacgactttgtcctgcccaatggctcagcagcgtccagtgtggagaccttcggggctgcatggcgggtgcccggctcctccaagggctgtggcgagggctgcgggccccaaggctgcccagtgtgcttggcagaggagactgcaccctatgagagcaacgaggcctgcgggcagctccggaacccccagggccccttcgcgacctgccaggcggtgctgagtccctctgagtacttccgccaatgcgtatacgacctgtgcgcgcaaaagggtgacaaagccttcctgtgccgcagcctggcagcctacacggcggcctgtcaggcagctggcgtggccgtgaagccctggaggacagacagcttctgcccgctccattgccccgcccacagccactactccatctgcactcgcacctgccagggatcctgtgcggctctctccggcctcacgggctgcaccacccgctgttttgagggctgtgagtgcgacgaccgcttcctgctttcccagggtgtctgcatccctgtccaagattgtggctgcacccataatggccgatacttgccggtaaactcctccctgctgacctcagactgcagcgagcgctgttcctgttcctcaagctctggcctgacatgccaggccgctggctgcccaccaggccgtgtatgtgaggtcaaggctgaagcccggaactgctgggccacccgtggtctctgtgtcctgtctgtgggtgccaacctcaccacctttgatggggcccgtggtgccaccacctctcctggtgtctatgagctctcttcccgctgcccaggactacagaataccatcccctggtaccgtgtagttgccgaagtccagatctgccatggcaaaacggaggctgtgggccaggtccacatcttcttccaggatgggatggtgacgttgactccaaacaagggtgtgtgggtgaatggtctccgagtggatctcccagctgagaagttagcatctgtgtccgtgagtcgtacacctgatggctccctgctagtccgccagaaggcaggggtccaggtgtggcttggagccaatgggaaggtggctgtgattgtcagcaatgaccatgctgggaaactgtgtggggcctgtggaaactttgacggggaccagaccaatgattggcatgactcccaggagaagccagcgatggagaaatggagagcgcaggacttctccccatgttatggctgatcagtcatccaccaggaacgaagatttcctgaagaagacctggtccctctggaggttgcggtggctgaaggatgcatcatgtgctcctaccctgctctaccgcttttctgggtcacagaggccaaatgtgagagcattgaataaatatcttaagctaaaaaaaaaaaaaaaaaaaaa

SEQ ID NO: 351 - DNA, 2867 bp, Homo sapiens
ccacgcgtccggagaaatcacagggagatgtacagcaatggggccatttaagagttctgtgttcatcttgattcttcaccttctagaaggggccctgagtaattcactcattcagctgaacaacaatggctatgaaggcattgtcgttgcaatcgaccccaatgtgccagaagatgaaacactcattcaacaaataaaggacatggtgacccaggcatctctgtatctgtttgaagctacaggaaagcgattttatttcaaaaatgttgccattttgattcctgaaacatggaagacaaaggctgactatgtgagaccaaaacttgagacctacaaaaatgctgatgttctggttgctgagtctactcctccaggtaatgatgaaccctacactgagcagatgggcaactgtggagagaagggtgaaaggatccacctcactcctgatttcattgcaggaaaaaagttagctgaatatggaccacaaggtagggcatttgtccatgagtgggctcatctacgatggggagtatttgacgagtacaataatgatgagaaattctacttatccaatggaagaatacaagcagtaagatgttcagcaggtattactggtacaaatgtagtaaagaagtgtcagggaggcagctgttacaccaaaagatgcacattcaataaagttacaggactctatgaaaaaggatgtgagtttgttctccaatcccgccagacggagaaggcttctataatgtttgcacaacatgttgattctatagttgaattctgtacagaacaaaaccacaacaaagaagctccaaacaagcaaaatcaaaaatgcaatctccgaagcacatgggaagtgatccgtgattctgaggactttaagaaaaccactcctatgacaacacagccaccaaatcccaccttctcattgctgcagattggacaaagaattgtgtgtttagtccttgacaaatctggaagcatggcgactggtaaccgcctcaatcgactgaatcaagcaggccagcttttcctgctgcagacagttgagctggggtcctgggttgggatggtgacatttgacagtgctgcccatgtacaaagtgaactcatacagataaacagtgggcagtgacagggacacactcgccaaaagattacctgcagcagcttcaggagggacgtccatctgcagcgggcttcgatcggcatttactgtgattaggaagaaatatccaactgatggatctgaaattgtgctgctgacggatggggaagacaacactataagtgggtgctttaacgaggtcaaacaaagtggtgccatcatccacacagtcgctttggggccctctgcagctcaagaactagaggagctgtccaaaatgacaggaggtttacagacatatgcttcagatcaagttcagaacaatggcctcattgatgcttttggggccctttcatcaggaaatggagctgtctctcagcgctccatccagcttgagagtaagggattaaccctccagaacagccagtggatgaatggcacagtgatcgtggacagcaccgtgggaaaggacactttgtttcttatcacctggacaacgcagcctccccaaatccttctctgggatcccagtggacagaagcaaggtggctttgtagtggacaaaaacaccaaaatggcctacctccaaatcccaggcattgctaaggttggcacttggaaatacagtctgcaagcaagctcacaaaccttgaccctgactgtcacgtcccgtgcgtccaatgctaccctgcctccaattacagtgacttccaaaacgaacaaggacaccagcaaattccccagccctctggtagtttatgcaaatattcgccaaggagcctccccaattctcagggccagtgtcacagccctgattgaatcagtgaatggaaaaacagttaccttggaactactggataatggagcaggtgctgatgctactaaggatgacggtgtctactcaaggtatttcacaacttatgacacgaatggtagatacagtgtaaaagtgcgggctctgggaggagttaacgcagccagacggagagtgataccccagcagagtggagcactgtacatacctggctggattgagaatgatgaaatacaatggaatccaccaagacctgaaattaataaggatgatgttcaacacaagcaagtgtgtttcagcagaacatcctcgggaggctcatttgtggcttctgatgtcccaaatgctcccatacctgatctcttcccacctggccaaatcaccgacctgaaggcggaaattcacgggggcagtctcattaatctgacttggacagctcctggggatgattatgaccatggaacagctcacaagtatatcattcgaataagtacaagtattcttgatctcagagacaagttcaatgaatctcttcaagtgaatactactgctctcatcccaaaggaagccaactctgaggaagtctttttgtttaaaccagaaaccattacttttgaaaatggcacagatcttttcattgctattcaggctgttgataaggtcgatctgaaatcagaaatatccaacattgcacgagtatctttgtttattcctccacagactccgccagagacacctagtcctgatgaaacgtctgctccttgtcctaatattcatatcaacagcaccattcctggcattcacattttaaaaattatgtggaagtggataggagaactgcagctgtcaatagcctagggctgaatttttgtcagataaataaaataaatcattcatccttttttttgattataaaaaaaaaaaaaaaaaaaaaaaaaaaaa

SEQ ID NO: 352 - DNA, 2131 bp, Homo sapiens
ggcacgagcggaggaggagcgggcgccatggcggttctactggagaccactttaggcgacgtcgtcatcgacttgtacaccgaagaacggccgcgtgcctgcttgaatttcttgaaactgtgcaaaataaaatattacaattattgccttattcacaatgtacagagggattttatcatacaaactggcgatcctacagggactggccgtggaggagagtctatctttggccaactgtatggtgatcaagcaagcttttttgaggcagaaaaagtcccaagaattaagcacaagaagaaaggcacagtgtccatggtgaataatggcagtgatcaacatggatctcagtttcttatcaccacaggagaaaatctagattatcttgatggtgtccatacggtgtttggtgaggtgacagaaggcatggacataattaagaaaattaatgagacctttgttgacaaggactttgtaccatatcaggatatcaggataaatcatacggtgattttagatgatccatttgatgaccctyctgatttattaatccctgatcgatcaccagaacctacaagggaacaattagatagtggtcgaataggagcagatgaagaaattgatgatttcaaaggaagatcagctgaggaagtagaagaaataaaggcagaaaaagaggctaaaactcaggctatacttttggagatggtgggagacctacctgatgcagatattaaacctccagaaaatgtactgtttgtgtgtaaattgaacccagtgaccacagatgaggatctggaaataatattctctagatttgggccaataagaagttgtgaagttatccgagactggaagacaggagagtccctctgttacgcttttattgaatttgaaaaggaagaagattgtgagaaagcattcttcaaaatggacaatgtgcttatagatgacagaagaatacatgtggattttagccagtcggttgcaaaggttaaatggaarggaaaaggtgggaaatacaccaagagtgatttcaaggagtatgaaaaagaacaggataaaccacctaatttggttctgaaagataaagtaaagcccaaacaggatacaaaatacgatcttatattagatgagcaggccgaagactcaaaatcaagtcactcacacacaagtaaaaaacacaagaagaaaacccatcactgttctgaagagaaagaagatgaggactacatgccaatcaaaaatactaatcaggatatctatagagaaatggggtttggtcactatgaagaagaagaaagctgttgggagaaacaaaagagtgaaaagagagaccgaactcagaaccgaagtcgtagccgatctcgagagagggatggscattatagtaatagtcataaatcaaaataccaaacagatctttatgaaagagaaaggagtaaaaagagagaccgaagcagaagtccaaagaagtccaaagataaagaaaaatctaagtatagatgaaagatgaagaggcagaattgagaggctaacatatttactcttgtctaacttaagagtgccaggaaagcagatgcttagattttgtgtcaaagcttgttatttttttcatactaggattatggtctttagattaatactgattatatagagcacggaaagataaagaattgaacattttctttgtatacttttttacactaattttattgttatacataaatggtagtcttcatttttgaagtcttacattttcactctttttttaatgaagtatttcatactacaaaaatacataaacgtatatataaagggataataaatgtaaatatctgtgtactcatcagccagcttaagatacagatgttgtcgacattttagaagttccctaaggccctctccctctcaaataattatttggaattttgtgtttgtcatttgtctattatagttttacaacatacgtatgtatctgtaagtgaaatgttaattttgtatgtttctgaattttatataaatggcaaaatgtttacttctgtgactttctttcatttttattgctatatagtattatataaatatactacaacttattcatycttgatggacaaatttgggttaatgggtt

SEQ ID NO: 353 - DNA, 559 bp, Homo sapiens
  misc_feature (534)..(534): n equals a,t,g, or c
  misc_feature (539)..(539): n equals a,t,g, or c
  misc_feature (556)..(556): n equals a,t,g, or c
  misc_feature (559)..(559): n equals a,t,g, or c
caaaaaataaataaataaaaataaaagagtatactcctggcatgctttttatctgagaagatgtaaaacagggaaaagaacttcaggccgttctctttgtggctgagtttcattctgcctgcgtggtgacagcagccttgagctctctgggaattcacatcctgagcagtgtgctaggaggatgcgagggatgctggtgactctgctgtgagtttgagctgcttctgccaaaaaactcacgctcaggactcacaccttgtctatattttgagttacatayaataaagattttttaaaaaatcacagattcagtgtgtatgaaattttctactcttcaccaattctgatgaaattcaattcttcaggaggttgagttttctggaacaagccacctctcttcccttggagtgtcccatcacttattctagcaccttttcattttgttcgagatgtttgctgaagcggagcggtgctgtggggggttacgcgcacctttcatcatcagtacaatagcaggaccatagtgggttagancaacncacagaggcaaagaaancgn

SEQ ID NO: 354 - DNA, 2623 bp, Homo sapiens
  misc_feature (1)..(1): n equals a,t,g, or c
  misc_feature (2077)..(2077): n equals a,t,g, or c
natttttttattttttttttttttttttttttttttttttggggagaaaattaaaccttatttatttttaaagtcaaaccactaggaaaatatatcacagcctggaaacagcaaacggacaggctatattataatttcaagtaataagttggtgaaaattcaacgaagttgctatcaaaacaataaggtgccatgctggggcaggaacactgccagctgcacaagccccaggcaaaaatggtatttggtaatgggggctgtctctcctttgctctaagggagtcagctcatcctagcccaagttgcttactttttctcccttgaatttcctgttgccaggggtttgtctcaattgggctctgttaattcagggggctaagtaggcaatgctaggtgtaggctttcattccatatgttctaataaaaccaggttttcccaaatccagtacttcatttactctgttgtaatcaagtagccaactgctcctcttttactgttcattcctagatactagtatatatcacaatcaaaacccccttctcttcaaggggaaagtgttactgcaagattgtcctgtcattttgttacacacagcctcaggggccatcagccagtaattctgcttcccataattagtgtgtcatcacctctcatgtttctgcacagtctccaggctgaaagatgcagcatgtaataattttaagaaatgtacatccacatcttgatgaccagaaatggggatccacaaggaacatttcaaagttcttatccaaactagtctacctcccagttccacatcttaaaatcaacttgtatgcccttgtataaattaccccaaatcaagaaaacaaagacccagaaaactttctttcccttctaagttagtgacctcattgattttgtttcacagcttatggaagatggtggggtgacacttttggtaaacaggatgttggcaacaaagagaaaatatctctcctcagactccaccaactctaacctgccagcctgttagtacctgtgtagtaagaagagtctggtaccttggagggctctggcttgttacaggggaragccttactgccaggacaagcactggccacaggaaataataagctctaaaactctcctgtaatatctctgactcgatttagcaccacttttttccatttcattttttagggactgaaacataaaataaccagtgtccagaggcaagtgacatatgccttacgcttgtggccatccttcatttcttcattcgtaaactttgcttaaaagactaaaattcccaattccttataaaaaatatattcttgccctcagccctgatggccactggcaaatacttttattttccaattgataagagagcctccttcatcttcttggtcatagttgggatgaggtgcatgtggtcatccacacacttggtcacacaactgtccagctgctgcttcacctgaagctccttactcccagcatctattgaatctttggctttgtcgttgcaatgcatggtgcaccgggccaggcggtcctggaacttctccagctcactggtgaccaaagcctgggcttgagccagaggcacatggcagcgctcgatgcactggtgcacctgcttcatggaggcctggctgtcctcacaacagctggcgctgcaccggaacatgagaccctgcatcttccggatgttctctctttccagactcttcaccatggactccaccgcctcctgcacccggagctgctgcagctcagccatggcgwccccataccgccctgcaccgtgccaccccggctaatttttgtatctttagtagagaccaggtttggccatgttggccaggctggtctcgaactcctgaccttaggtgatccgtccatcttggcctcccaaagtgctgggattacaggcatgasccatggcgcccagcctctgtctttcaaaaaaaaaaaagggacttactagggcctgctttgcctgggyccctatgcatcctgggattggtcagartgaaccaatgagaagactgagctgctctcaagaagggctaccacaarctggttttnaaagcttcttggttctgagaamaaccagccctagatccttttcawctctgatgccaaatgatgtggcactgagaactgaagaggaaacgtgaacagaaagaagagtgagggctgaataagaagcctcgccagtgggaaatagggcccttggtaccttttgctcctaatagtcacatctgtgtttagaagggccaggaactcccacctcctgcgtcagagcctgtcaagcatgtcaggcctagagtggctttctgatccctgttatacacctatttataagttatctaagctaattctgagctcagagtaattttcctgaaggagcttcaggtaaataaggatgacaaagaactaaaaccaaatttactgtaaatgataacttcagcttctaagaaaagaattactgactccacactgatgtcaatagctggagagcaagggctacgaggaagaaaaccagtgaaataatccatggtcatgccacttgcccaaatatctgaattgcttatcattaaaaaagagcaaatttacgtttaaaaaaaaaaa

SEQ ID NO: 355 - DNA, 1843 bp, Homo sapiens
  misc_feature (1405)..(1405): n equals a,t,g, or c
ggcacgaggtggccttgtggcaaacacaaacgcgttctgatcttcccttcctacatgacaacagtgattgactacgtgaagccctcggatctcaagaaggacatgaacgagaccttcaaggagaagtttcctcacattaagctgacactcagcaaaattaggagtctgaaacgagagatgcggaacttgcgcaggaggactgtggccttgaggagcccacggtggccatggcctcgtctactttgaaaagctcgccctcaaggggaaactcaacaaacagaaccggaagctgtgtgctggggcatgtgtgctgttagcagccagcaaaatttggaagtgacctcaaaaaacacgagtcaagcatttaattgacaaactggaagagaagttccggctgaacaggcgagaactgattgcctttgaattcccggtgttagtggccttggaattcgccctccacttgcccgagcacgaagtcatgccccactacagacggctggtccagagttcctagcactggccccgaggacagccaagggcawtttcttctcagcttggtggagcagcacttacttactactggaaatgaaaaaaagtagaactcagaataccagacttttcttcctctcgacatagtttggggagaagcagtactagaaactttccaaggagtcttgggtgtgtagccaagaggagccatgagctatggactcctcaagcacgggaagaggaggtgtgtgctgagaacagagaggccctgccctctgtccactagcgagaatccctagctgccccagcccagtctttctccccggcattcacaaactttgcaagcgtggtccagggccttctccagatctgttccaacttggagtgtgaagggcttgagcatacgggggaagagagtctgcagaagttgggggaaaacttttaaaagataccctcattgtgtcaaagagtgtgccaatctatttttgtatcagcattggaagtgcactttcccctggggcgtgtgggtgtgtgaatgtgcaagtgtctgagagatactgcatcagccctagacccccagagccagtcccgccctttacagagcagcccttagcctggggccatgggtcaggctgaccttcaacaattatttctagatgatttctggataagaattgctctctcggtaccagacagtttgacatcctccacccttagaaaatgactgacattgttttgttactgctcctacccaccaaggggataaagaaggcgagttctgagtgttggatgagtcagtcgcgtggaaggacgtggagcgtggcgctctgtaacttcctgccgtctgccaccccgccacgtgtatttaaccctcgcactttctccactgtggagatggctggggcggcgccccacnagtgtgtattcctgtcctctatgttagagtgcatcagaagcacatttactgtgctatctatatckctatataaaagtgttttataaaaacccagaataggagcacgacgcatgattggtgtttgaggcgtttgccagctgggacaaactgcgtttggagctgtggttaagctgactaaggaggcggtggctctttcttaacattcccacgtgcccagggctgttcatgcaagattttaatggtgacttgtcctggcttactgggacagtctgtatgaggcatgtcaccacactgtcgcctcatagctgcaagagagaggcaccagctgaagttcccctgactgaagagagcctgtggccatgtaaaaagagaattaaactcttgttgctttttgtaaaaaaaaaaaaaaaaaaaaaaaaaaaaaaaaaaaaaaaaaaa

SEQ ID NO: 356 - DNA, 884 bp, Homo sapiens
ggtgtgagccactgtgcccagcagtttcccagaatatatttaaatgcaaagttacatgaggggaaaacatgtatgtttgctcctgttgttactgggtaggttctgaacagcagaaacccatgtgcagggtgggctggtgaaggcccctctccgcaaggtggtagcaggaaaaggtccttgacttgatgaatttggtctgcctctgagccactggaggaagctgttttgagccagggttttttggcctaaagccagcatttcctcagtctccctttgtggttcgaaggatatggactattgcaatacatttcttccttcaaatcctgccactgttttgttggcccacaactaataggacctcaaaataagccatgctgctttgcacacacactagccttcttttgtacttttcattctggatgggcttggccaaaacaggctcaggccaaagacctcccaagctgtatgtacttccagtatcctgaaacagtgtttggtgacataatgccaagggtaaacaagcctgatttaggcactgctttatccaggggcttcacccatgaaattaataaaacttatctgagtcacttgaaacttggttcccagaaaacacatttctggtttataatctccttttatgctcacctgacattaattatctatccttgatgatgtgtttaaactgagtagcagaaaacagaggccacactttctgggaaattttaaaggaagaaaccatttttaatgagatgaaaatatttaacgaatttaaaaagctaatgacaattttgagaaaaggtttgggatgtatattgctatgtaatttaataaactgattttatggatataaaaaaaaaaaaaaaaaaaacctcggggtcgggggt

SEQ ID NO: 357 - DNA, 391 bp, Homo sapiens
  misc_feature (360)..(360): n equals a,t,g, or c
  misc_feature (381)..(381): n equals a,t,g, or c
ggcacgaggcggcatcctgctccgtctgcaggttgtgcttccggtgcggaggtcagggacaagatggtgccaccggtgcaggtctctccgctcatcaagctcggccgctactccgccctgttcctcggtgtggcctacggagccacgcgctacaattacctaaaacctcgggcagaagaggagaggaggatagcagcagaagagaagaagaagcaggatgaactgaaacggattgccagagaattggcagaagatgacagcatattaaagtgagtgaccctgcgacccactctttggaccagcagcggatgaataaagcttcctgtgttgtgtgataaaaaaaaaaaaaaaaaaaacycngggggggggcccggwacccanttygcccaaa

SEQ ID NO: 358 - DNA, 2540 bp, Homo sapiens
ggcaggcaacaggaggtcctgaactagccagttcagtacttagtcccctattgaataaggacacaattgatttcttaaattatactgtcaatggtgatgaacggcagctgtggatgtcattgggaggaacttggatgaaagccagagcagagtggccaaaagaacagtttattccaccatatgttccacgattccgcaatggctgggagcccccaatgctgaactttatgggagccacaatggaacaagatctttatcaactggcagaatctgtggcaaatgtagcagaacatcagcgcaaacaggaaataaaaagattatccacagagcattccagtgtatcagagtatcatccagccgatggctatgcgttcagtagcaacatttacacaagaggatcccacctggaccaaggggaagctgctgttgcttttaagccaacttctaatcgccatatagatagaaattatgaaccactcaaaacacaacccaagaaatatgccaaatccaagtatgactttgtagcaaggaacaacagtgagctctcggttctaaaggatgatattttagagatacttgatgatcggaagcaatggtggaaagttcgaaatgcaagtggagactctggatttgtgccaaataacattttggatattgtgagacctccagaatctggattggggcgtgctgatccaccttatactcatactatacagaaacaaaggatggagtatggcccaagaccagctgatactccccctgctccatcacctcctccaacaccagctcctgttcctgttccccttcccccttccactccagcacctgttcctgtgtcaaaggtcccagcaaatataacacgtcaaaacagcagctccagtgacagtggtggcagtatcgtgcgagacagccagagacacaaacaacttccggtggaccgaagaaatctcagatggaggaagtgcaagatgaactcatccacagactgaccattggtcggagtgccgctcagaagaaattccatgtgccacggcagaacgtgccakttatcaatatcacttacgactccacaccagaggatgtgaagacgtggttacagtcaaagggattcaaccctgtgactgtcaatagtcttggagtattaaatggtgcacaacttttctctctcaataaggatgaactgaggacagtctgccctgaaggggcgagagtctatagccaaatcactgtacaaaaagctgcattggaggatagcagtggcagctccgagttacaagaaattatgagaagacgacaggaaaaaatcagtgctgccgctagtgattcaggagtggaatcttttgatgaaggaagcagtcactaatttgtttgtttgtatttaaactccattgtttttggcattattccaacatgctttgttttaagaagccttgaagggaatgtcagattcatttttcttgatgtaatttatcaccataaaaaaaaaacccatgcaaacctgagtgagcacaggatttgcttctaggcccattatttttattaaaactgaaaaaatttaaactgaattttttgaccttggaaaatatttttcttactttaccaaggtgaagtttccttaattagactaattattttatccccatcccagggtataaacaggaattgttttgatagtggtggagttattcactgcaacaaagcaacaatgttgtccatgattcaaaatctaagcagtttcgattttgcctgtgaatatggtgtctgtcattcagggcatagctcactgtaggctagcctctgcttacttaagtctcttctctgacatactcaatggaagaatatttagatttatttaaagttcttaatgccaacagtttaaaaaaaaattaaaacatttgaatgaactgtaaagtacagccataccttggacatgcaaatataaatctatggagcattctcaagacagtttgtcatggctctgttgattgcaactccttgtatagcttgtattttgatttagtttatattctgcttattatgtatactgtgttcttatatatgagaaagcacaaatgcgaaagaggtcatgtcttctcaaaatctagcaaaggaagtagtctgcattggtgtgcattacagtattttgcttaatgaaagcctcagttctgaatgttgatatgagtagttaaaaggaagtggggccattttatgtgtttatctgtgtcaagtatttctggtaataagaagcacttaatttacacatattttaatcctgtgaaagattccacatagagaaaagaaagatacctaaccttcaacaaatgttatttttggaaacacaatttttgtcattaaatgttatattatttcacatatataaaacagatgttatgtaagaatgttgtatattttaacataaatcatttagagaaattatctagattcattaattttcatagtgcctttttcacatgagtcagctggaaagtctgcaataaacagtatttgctgtctgttaaaaaaaaaaaaaaaaaaaaaaa

SEQ ID NO: 359 - DNA, 1926 bp, Homo sapiens
  misc_feature (97)..(97): n equals a,t,g, or c
  misc_feature (281)..(281): n equals a,t,g, or c
  misc_feature (302)..(302): n equals a,t,g, or c
  misc_feature (326)..(326): n equals a,t,g, or c
  misc_feature (1879)..(1879): n equals a,t,g, or c
  misc_feature (1885)..(1885): n equals a,t,g, or c
  misc_feature (1891)..(1892): n equals a,t,g, or c
gcgagggggcgkggggagcagcgccgaggccgccgcctccgcctccgccgcctaggactagggggtgggggacggacaagccccgatgccggggganacggaagagccgagacccccggagcagcaggaccaggaagggggagaggcggccaaggcggctccggaggasccscaacaacggccccctgaggcggtcgcggcggcgcctgcagggaccactagcagccgcgtgctgaggggaggtcgggaccgaggccgggccgctgcggcgcgccgccgcngcagctgtgtcccgccggagnaaggccgagtatccccgccggcgnaggagcagccccagcgccaggcctcccgacgtccccgggcagcagcccaggccgcgaagtccccgtctccagttcagggcaagaagagtccgcgactcctatgcatagaaaaagtaacaactgataaagatcccaaggaagaaaaagaggaagaagacgattctgccctccctcaggaagtttccattgctgcatctagacctagccggggctggcgtagtagtaggacatctgtttctcgccatcgtgatacagagaacacccgaagctctcggtccaagaccggttcattgcagctcatttgcaagtcagaaccaaatacagaccaacttgattatgatgttggagaagagcatcagtctccaggtggcattagtagtgaagaggaagaggaggaggaagaagagatgttaatcagtgaagaggagataccattcaaagatgatccaagagatgagacctacaaaccccacttagaaagggaaaccccaaagccacggagaaaatcagggaaggtaaaagaagagaaggagaagaaggaaattaaagtggaagtagaggtggaggtgaaagaagaggagaatgaaattagagaggatgaggaacctccaaggaagagaggaagaagacgaaaagatgacaaaagtccacgtttacccaaaaggagaaaaaagcctccaatccagtatgtccgttgtgagatggaaggatgtggaactgtccttgcccatcctcgctatttgcagcaccacattaaataccagcatttgctgaagaagaaatatgtatgtccccatccctcctgtggacgactcttcaggcttcagaagcaacttctgcgacatgccaaacatcatacagatcaaagggattatatctgtgaatattgtgctcgggccttcaagagttcccacaatctggcagtgcaccggatgattcacactggcgagaagccattacaatgtgagatctgtggatttacttgtcgacaaaaggcatctcttaattggcacatgaagaaacatgatgcagactccttctaccagttttcttgcaatatctgtggcaaaaaatttgagaagaaggacagcgtagtggcacacaaggcaaaaagccaccctgaggtgctgattgcagaagctctggctgccaatgcaggcgccctcatcaccagcacagatatcttgggcactaacccagagtccctgacgcagccttcagatggtcagggtcttcctcttcttcctgagcccttgggaaactcaacctctggagagtgcctactgttagaagctgaagggatgtcaaagtcatactgcagtgggacggaacgggtgagcctgatggctgatgggaagatctttgtgggaagcggcagcagtggaggcactgaagggctggttatgaactcagatatactcggtgctaccacagaggttctgattgaagattcagactctgccggaccttagtggacaggaagacttggggcatgggacagctcagactttgtatttaaaagttaaaaaggacaaaaaaaaaaaaaaggggcnggccgnttctannaggatccaagctttacgtaccccgttgcaatgcc

SEQ ID NO: 360 - DNA, 1233 bp, Homo sapiens
  misc_feature (1222)..(1222): n equals a,t,g, or c
tcctgcatgcacagttgcagttagttattccaggtattatttttgttttcagaaaaagaaaactcagtagaagataatggcaagtccagactggggatatgatgacaaaaatggtcctgaacaatggagcaagctgtatcccattgccaatggaaataaccagtcccctgttgatattaaaaccagtgaaaccaaacatgacacctctctgaaacctattagtgtctcctacaacccagccacagccaaagaaattatcaatgtggggcattccttccatgtaaattttgaggacaacgataaccgatcagtgctgaaaggtggtcctttctctgacagctacaggctctttcagttccattttcactggggcagtacaaatgagcatggttcagaacatacagtggatggagtcaaatattctgccgagcttcacgtagctcactggaattctgcaaagtactccagccttgctgaagctgcctcaaaggctgatggtttggcagttattggtgttttgatgaaggttggtgaggccaacccaaagctgcagaaagtacttgatgccctccaagcaattaaaaccaagggcaaacgagccccattcacaaattttgacccctctactctccttccttcatccctggatttctggacctaccctggctctctgactcatcctcctctttatgagagtgtaacttggatcatctgtaaggagagcatcagtgtcagctcagagcagctggcacaattccgcagccttctatcaaatgttgaaggtgataacgctgtccccatgcagcacaacaaccgcccaacccaacctctgaagggcagaacagtgagagcttcattttgatgattctgagaagaaacttgtccttcctcaagaacacagccctgcttctgacataatccagtaaaataataatttttaagaaataaatttatttcaatattagcaagacagcatgccttcaaatcaatctgtaaaactaagaaacttaaattttagttcttactgcttaattcaaataataattagtaagctagcaaatagtaatctgtaagcataagcttatgcttaaattcaagtttagtttgaggaattctttaaaattacaactaagtgatttgtatgtctatttttttcagtttatttgaaccaataaaataattttatctctttmaaaaaaaaaaaaaaaaccccggggggggncccggtcccca

SEQ ID NO: 361 - DNA, 2510 bp, Homo sapiens
  misc_feature (2503)..(2503): n equals a,t,g, or c
  misc_feature (2509)..(2509): n equals a,t,g, or c
gcggacgcgtggggaaggacagcagagctgacagtcacagcagccctgacaagagagttcctggagcccaagctcttctccacagaggacaagcaggcagcagagaccatggggtccccttcagcctgtccatacagagtgtgcattccctggcaggggctcctgctcacagcctcgcttttaaccttctggaacctgccaaacagtgcccagaccaatattgatgtcgtgccgttcaatgtcgcagaagggaaggaggtccttctagtagtccataatgagtcccagaatctttatggctacaactggtacaaaggggaaagggtgcatgccaactatcgaattataggatatgtaaaaaatataagtcaagaaaatgccccagggcccgcacacaacggtcgagagacaatataccccaatggaaccctgctgatccagaacgtcacccacaatgacgcaggawtctataccctacacgttataaaagaaaatcttgtgaatgaagaagtaaccagacaattctacgtattctcggagccacccaagccctycatyaccagcaacaacttcaatccggtggagaacaaagatattgtggttttaacctgtcaacctgagactcagaacacaacctacctgtggtgggtaaacaatcagagcctcctggtcagtcccaggctgctgctctccactgacaacaggaccctcgttctactcagcgccacaaagaatgacataggaccctatgaatgtgaaatacagaacccagtgggtgccagccgcagtgacccagtcaccctgaatgtccgctatgagtcagtacaagcaagttcacctgacctctcagctgggaccgctgtcagcatcatgattggagtactggctgggatggctctgatatagcagccttggtgtagtttctgcatttcgggaagagtgactggactggattcttctagctccttcaatcccattttctcctgtggcatcactaagtataagacctgctctcttcctgaagacctataagctggaggtggacaactcaatgtaaatttcaaggaaaaaccctcatgcctgagatgtgggccactcagagctaaccaaaatgttcaacaccataactagagacactcaaattgccaaccaggacaagaagttgatgacttcatgctgtggacagtttttcccaagatgtcccaagcctcatcgtgacgaggctcttatcccactccatttttccctgctcatgcctgcctctttaatttggtaagataatgctgtaactagaatttcacaatcagcgccttgtgcaggtaatttgacagagtgttggatgtgtcatgtcatcatgtcaaacccaaatatttgacctaagggatcctttattctgcccagtggctaactttaacaacatccctaatacaactgtttattcaaatgcacggtggtccctgttagagttagacctctagactcacctgttctcacgccctgttttaatttaacccagctatgggatgccagataacagaattgctgcctactagctgaacagggaggagtttgtgcagttgctgacacttcttgttgcacataaataaatacagtgggtactatagagactcagttgcaaaaattaacaaatatgctgcttgattaaaatgggtaggcttctcatgtggctcattctttaatctattctcttttatttggtttggttcatggggtctctgcctatggatcatacttcaaactcttggtgtgatcctcctgattgtcacaatattagttaccctggtgtgctgtattctctaaaacctttaaatgtttgcatgcagccattcgtcaaatgtcaaatattctctctttggctggaatgacaaaaactcaaataaatgtatgattaggaggacatcataacctatgaatgatggaagtccaaaatgatggtaactgacagtagtgttaatgccttatgtttagtcaaactctcatttaggtgacagcctggtgactccagaatggagccagtcatgctaaatgccatatactcacactgaaacatgaggaagcaggtagatcccagaacagacaaaattttcctaaaaacatgagagtccaggctgtctgagtcagcacagtaagaaagtcctttctgctttaactcttagaaaaaagtaatatgaagtattctgaaattaaccaatcagtttatttaaatcaatttatttatattcttctgttcctggattcccattttacaaaacccactgttctactgttgtattgcccagtaggagctatcactatattttgcagaatggaaactgccctgactcatgaatcacaaataaaagccaattgtatctataaaaaaaaaaaaaaaaaaaaaaaaaaaaaaaaaaaaaaaaaaaaaaaaaaaaaaaaaaaaaaaaaaaaaaaaaaaaaaaaaaaaaaaaaaaaaaaaaaaaaaaaaaaaaaaaaaaaaaaaaaaaangggggnc

SEQ ID NO: 362 - DNA, 2765 bp, Homo sapiens
  misc_feature (2758)..(2758): n equals a,t,g, or c
gcggacgcaacagcggggtcccgcgctgtctgggcggccccaggggctgtcggctcacttccgggaacgccggggaaccgcagtagccgcctgctagtggcgctgctagccggccggcgcaggctgccgagcgggtgagcgcgcaggccaggccaaagccctggtacccgcgcggtgcgggcctcagtctgcggccatgggggcgtccgcgcggctgctgcgagcggtgatcatgggggccccgggctcgggcaagggcaccgtgtcgtcgcgcatcactacacacttcgagctgaagcacctctccagcggggacctgctccgggacaacatgctgcggggcacagaaattggcgtgttagccaaggctttcattgaccaagggaaactcatcccagatgatgtcatgactcggctggcccttcatgagctgaaaaatctcacccagtatagctggctgttggatggttttccaaggacacttccacaggcagaagccctagatagagcttatcagatcgacacagtgattaacctgaatgtgccctttgaggtcattaaacaacgccttactgctcgctggattcatcccgccagtggccgagtctataacattgaattcaaccctcccaaaactgtgggcattgatgacctgactggggagcctctcattcagcgtgaggatgataaaccagagacggttatcaagagactaaaggcttatgaagaccaaacaaagccagtcctggaatattaccagaaaaaaggggtgctggaaacattctccggaacagaaaccaacaagatttggccctatgtatatgctttcctacaaactaaagttccacaaagaagccagaaagcttcagttactccatgaggagaaatgtgtgtaactattaatagtaagatgggcaaacctcctagtccttgcatttagaagctgcttttcctaagacttctagtatgtatgaattctttgaaaattatattacttttatttctactgattttattttggatactaaggatgtgccaaatgattcggatactaagatgcatcgtttgaaatcatctagtgtgttgtatgcagttatcctcaaaaacatcagcgatgtctgaacctttaaaacatctgttagagcaaaattaaaagagcatttggtagtaatctaactttttgttcagttaataagtggttgataaagtttccatatttttctggaaaagttaaaaaaagttacatgtcatttggagaaaatacgtaatcagaaatttgtgcatagattgatgccaaaaaagacatttccagcattgtggaacatggtgagacactatataaaattccagaaagaaagcaactggatttacagatttattgtgagacacaaattcactgctgcctttacactaagaaatgtatatgttaaccatatatgctgtatttattttgtcgttaagcatactttcagtttactcagaattttcaatttgctataaagatgtatcaattagcatatagaaaaatattactttaagatgacttgtttcctttgaaaatacctgtgtactgagggttatgatttgtgtcaaaaattgacataagtgcttttacaagcaccaaagttgaatgaattttcaacaaaatgtaattaaagtctatgttttcagttatgactcaggttaagaaatgtgttttaggatctacttgctggtttttctttttgatccaaatgtgtgatctgccctgataaataacaagttatagtaccatctcccccgccaataaaaaagagaagaaaaaagagaaacccgtggcactatgtaaataaagtaagcatactttgttgttagtaaatagatgaggcatgcctgggaaatgctcccttggcataaatagcaatcaattataattagtaaacaggtgtaccaataaaaagaatttacatgataggttaacaaggaccaggaaagtgagtttcctgaaggagttctttgttcctgatcaaagaaattgatacctgttagcattcactgccaccatattttaaggagaaagaactctattggtgtcgtctgagcagccatttaaaaattggaatctaaaggatggttgctgatgtactgtgtggtctggtagaagtggggaaatatgagagatggaggaaaaacttgattatgtcttccatggcatatttactcttactttacttcgtgccaaatcaaatgaaacaagccgtcttacaagtcgttattgcctttaaaaatctgttccgtttttttcccaggtacttaaaatacaagtgccagtaagtggttcttatgtgttttggggggaaaattttatttcccttttcttctgatatttaaaaaattcatcgatctttcaagatgaaccaaggttttttaaaagaawtataggaaacacttcattctttataaaactttctataatgccttatttgaatgttaatcttatgtgctttctaaaaaatgttgtgaaataccaaacttatggattatcactaggttatcaagcatatattagtctttatcagaataaaatgaaatttcataactgtggctattactttgttcttggtccttcacagggcctgctccatcccaccttcctttctgctgcctgatgtctcaatggcttctgaatgactgttctaataaatgatcttaaaacagaaaaaaaaaaaaaaaaaaaaaaaaaaaaaaaaaaaaaaaaaaaaaaaaaaaaaaaaaaaanaaagaga

SEQ ID NO: 363 - DNA, 1755 bp, Homo sapiens
  misc_feature (134)..(134): n equals a,t,g, or c
  misc_feature (140)..(140): n equals a,t,g, or c
ggcttccggtcccctgagactggggcctcgctcgctcccgacccggttgcaagtgttgcggtgggagaaagtcgcgtccgcatcggaggggaagcgccgtcatgcctaagtattatgaggacaagccgcaggcngcgcgntgcgcgggcctgaaggaggacctgggcgcgtgtctgctgcagtcggactgtgtggtccaggaaggaaaatcacctcggcagtgtttgaaggaaggatactgcaactctttgaagtacgcattttttgagtgtaaaagatcagtgttggataacagggcaagattcagaggaagaaaaggatattgatgcattatgttgaagccaacatggaaaacaacaaatattttccctggtcattaacacaaagaagccaaaacaggaaacatactttttactacatctgtttggttggaccagatttcccctccgtggaacactgaagaaagtggatgagttgttttcgaatatgtataaagtaaatgattctcttgatccaagttatttttagaagaaaaacctaattgaacaggtatgggttgggagcataataaatgtgttttgagaattgttctaaagcacagaaaatggaaagactgttatttgcaaacttgactcttcaattgrattacccaattagtacaggccactgatttgactgacacagtcgataacatgcagcctatccagaaggtgtctgttgggaaagtttaggataaaactttttctttagttcagtcttttcctgtctagttctaaaatgaattgtgtttgattccttagagaagaaatacttcatttgtgctctgattcactgaagtaataacctcagcactttaatagcgtccacaggcatagctgatgctaggccccagattgtgttgcccaggctctttaccatcatcttcggactgtttttgtttcctggttacattttcagtctggcccgctctacataatgggccagtgtcagctccaagtccacatccttattatccatgattcaaaagggagagagagaacttcctttttcagggtccacaaatcaaatctataaaaggactctggtcttcccaggatcacctgcccttgcattggaccagtccctgtggaagaggggatgggggcctgtgatcttggccaggcctgggctatctatctgcactgtcattgctaactcctgtcagaatcacatggatgagtagtgggctgaatcccaaaaggaaaggggtttagagcaagtggaaacaacagatgttcactatagaaagcaagaatgaaaaccatgaagtggttgaagattagccttacagtaattttattctgatcacttaatacagtagagtcaaacaggaatccaagtttccaactttattatttttggcactgaagaattacaaagaactctagcgtctttatacctccgtggttcactggagttaaagcaatcggggcgttgtacagctcacttgagtttttaaaggttctactaaaaagtgagaattccacagcaatatgggtcattgttgcagaatatcacaaaggtctgttgtgtatactccttttcaccaggaaagggacaataatagtttttttcaatgtatatatatataagtgatctaactttttattaataaaagtaaacaactctaaaatgtatattataaagccctgtcatctttgttgagtaatagctttattgagctttatttggagaaatacacataccgtaaaattc

SEQ ID NO: 364 - DNA, 1959 bp, Homo sapiens
gcaggccagccccatggggaagcgcagacgccggmgcctgggcgctctgagattgtcactgctgttccaagggcacacgcagagggatttggaattcctggagagttgcctttgtgagaagctggaaatatttctttcaattccatctcttagttttccataggaacatcaagaaatcatgaacaactttggtaatgaagagtttgactgccacttcctcgatgaaggttttactgccaaggacattctggaccagaaaattaatgaagtttcttcttctgatgataaggatgccttctatgtggcagacctgggagacattctaaagaaacatctgaggtggttaaaagctctccctcgtgtcacccccttttatgcagtcaaatgtaatgatagcaaagccatcgtgaagacccttgctgctaccgggacaggatttgactgtgctagcaagactgaaatacagttggtgcagagtctgggggtgcctccagagaggattatctatgcaaatccttgtaaacaagtatctcaaattaagtatgctgctaataatggagtccagatgatgacttttgatagtgaagttgagttgatgaaagttgccagagcacatcccaaagcaaagttggttttgcggattgccactgatgattccaaagcagtctgtcgtctcagtgtgaaattcggtgccacgctcagaaccagcaggctccttttggaacgggcgaaagagctaaatatcgatgttgttggtgtcagcttccatgtaggaagcggctgtaccgatcctgagaccttcgtgcaggcaatctctgatgcccgctgtgtttttgacatgggggctgaggttggtttcagcatgtatctgcttgatattggcggtggctttcctggatctgaggatgtgaaacttaaatttgaagagatcaccggcgtaatcaacccagcgttggacaaatactttccgtcagactctggagtgagaatcatagctgagcccggcagatactatgttgcatcagctttcacgcttgcagttaatatcattgccaagaaaattgtattaaaggaacagacgggctctgatgacgaagatgagtcgagtgagcagacctttatgtattatgtgaatgatggcgtctatggatcatttaattgcatactctatgaccacgcacatgtaaagccccttctgcaaaagagacctaaaccagatgagaagtattattcatccagcatatggggaccaacatgtgatggcctcgatcggattgttgagcgctgtgacctgcctgaaatgcatgtgggtgattggatgctctttgaaaacatgggcgcttacactgttgctgctgcctctacgttcaatggcttccagaggccgacgatctactatgtgatgtcagggcctgcgtggcaactcatgcagcaattccagaaccccgacttcccacccgaagtagaggaacaggatgccagcaccctgcctgtgtcttgtgcctgggagagtgggatgaaacgccacagagcagcctgtgcttcggctagtattaatgtgtagatagcactctggtagctgttaactgcaagtttagcttgaattaagggatttggggggaccatgtaacttaattactgctagttttgaaatgtctttgtaagagtagggtcgccatgatgcagccatatggaagactaggatatgggtcacacttatctgtgttcctatggaaactatttgaatatttgttttatatggatttttattcactcttcagacacgctactcaagagtgcccctcagctgctgaacaagcatttgtagcttgtacaatggcagaatgggccaaaagcttagtgttgtgacctgtttttaaaataaagtatcttgaaataattaaaaaaaaaaaaaggggggccgccctaggggttcccaagtttacgtacgctgcatgg

SEQ ID NO: 365 - DNA, 1067 bp, Homo sapiens
aattcggcacgaggtcactgctggctgaggctgcgctcaggcccgtggatctcatcgaagatggcggcgcgatctgtgtcgggcattaccagaagagtcttcatgtggacagtctcagggacaccatgtagagaattttggtctcgattcagaaaagagaaagagccagtggttgttgagacagtagaagagaaaaaggaacctatcctagtgtgtccacctttacgaagccgagcatacacaccacctgaagatctccagagtcgtttggaatcttacgttaaagaagtttttggttcatctcttcctagtaattggcaagacatctccctggaagatagtcgtctaaagttcaatcttctggctcatttagctgatgacttgggtcatgtagtccctaactccagactccaccagatgtgcagggttagagatgttcttgatttctataatgtccctattcaagatagatctaaatttgatgaactcagtgccagtaatctgccccccaatttgaaaatcacttggagttactaagcaattcggaagagaaacacattgaaatcactgtctttccctgagcaagggggctgctcattagatcttttgatactttaccatgtgaaatactaccagaactgttctctaaacccactttttctgtagaggaatgtatcatctttttttttctcatattacaaatggacaaataacggactttctattttcatatttgctgaaaccattttttaaatgaaattaggtcattatttatgaaaagttttgagagggcactgtcaacttgggtttaagacaggaggacattgcaagttcacacctttcataagcataaagtagttgcaagaaagtattttcatcctgttaggattcatatctaagatagagttatgcattgcacatacacaaataaacttttattagatagatacctataaaagaaacataaaagtatgttgtgtattactgacagttctagattaatttcttttagaattaaagtagatttgttaaaaaaaaaaaaaaaaaaaaaaaaaaaaaaaaaaaaa

SEQ ID NO: 366 - DNA, 1023 bp, Homo sapiens
  misc_feature (996)..(996): n equals a,t,g, or c
  misc_feature (998)..(998): n equals a,t,g, or c
  misc_feature (1003)..(1003): n equals a,t,g, or c
  misc_feature (1016)..(1016): n equals a,t,g, or c
cctagtgcgtagcgcccggctcctgcaggcgctcggcctccgctcattcctgaccccgcagtgggcgcgatggcggaggctgtactgagggtcgcccggcggcagctgagccagcgcggcgggtctggagcccccatcctcctgcggcagatgttcgagcctgtgagctgcaccttcacgtacctgctgggtgacagagagtcccgggaggccgttctgatcgacccagtcctggaaacagcgcctcgggatgcccagctgatcaaggagctggggctgcggctgctctatgctgtgaatacccactgccacgcggaccacattacaggctcggggctgctccgttccctcctccctggctgccagtctgtcatctcccgccttagtggggcccaggctgacttacacattgaggatggagactccatccgcttcgggcgcttcgcgttggagaccagggccagccctggccacaccccaggctgtgtcaccttcgtcctgaatgaccacagcatggccttcactggagatgccctgttgatccgtgggtgtgggcggacagacttccagcaaggctgtgccaagaccttgtaccactcggtccatgaaaagatcttcacacttccaggagactgtctgatctaccctgctcacgattaccatgggttcacagtgtccaccgtggaggaggagaggactctgaaccctcggctcaccctcagctgtgaggagtttgtcaaaatcatgggcaacctgaacttgcctaaacctcagcagatagactttgctgttccagccaacatgcgctgtggggtgcagacacccactgcctgatctcacttctgtcagatgctcccatccactattaatgcactaggtgggaggagagggcggcaatgacactgcacctctcctttcccaccgcattccctggagctccctaaataaaactttttttaacgtgaaaaaaaaaaaaaaaaaaagggggggccgctnanggggntcaaattttaggnacggggg

SEQ ID NO: 367 - DNA, 1953 bp, Homo sapiens
  misc_feature (45)..(45): n equals a,t,g, or c
  misc_feature (47)..(47): n equals a,t,g, or c
  misc_feature (1686)..(1686): n equals a,t,g, or c
  misc_feature (1821)..(1821): n equals a,t,g, or c
  misc_feature (1920)..(1920): n equals a,t,g, or c
  misc_feature (1927)..(1927): n equals a,t,g, or c
  misc_feature (1935)..(1935): n equals a,t,g, or c
  misc_feature (1948)..(1948): n equals a,t,g, or c
  misc_feature (1951)..(1951): n equals a,t,g, or c
gtcacgagcgagggggtgcgtgtgaggtcatcgcgcgggcgggcntncggggtctggcggtttgaacgagacgaagacggaaccggagccggttgcgggcagtggacgcggttctgccgagagccgaagatggcagtgaacgtatactcaacgtcagtgaccagtgataacctaagtcgacatgacatgctggcctggatcaatgagtctctgcagttgaatctgacaaagatcgaacagttgtgctcaggggctgcgtattgtcagtttatggacatgctgttccctggctccattgccttgaagaaagtgaaattccaagctaagctagaacacgagtacatccagaacttcaaaatactacaagcaggttttaagagaatgggtgttgacaaaataattcctgtggacaaattagtaaaaggaaagtttcaggacaattttgaattcgttcagtggttcaagaagtttttcgatgcaaactatgatggaaaagactatgaccctgtggctgccagacaaggtcaagaaactgcagtggctccttcccttgttgctccagctctgaataaaccgaagaaacctctcacttctagcagtgcagctccccagaggcccatctcaacacagagaaccgctgcggctcctaaggctggccctggtgtggtgcgaaagaaccctggtgtgggcaacggagacgacgaggcagctgagttgatgcagcaggtcaacgtattgaaacttactgttgaagacttggagaaagagagggatttctacttcggaaagctacggaacattgaattgatttgccaggagaacgagggggaaaacgaccctgtattgcagaggattgtagacattctgtatgccacagatgaaggctttgtgatacctgatgaagggggcccacaggaggagcaagaagagtattaacagcctggaccagcagagcaacatcggaattcttcactccaaatcatgtgcttaactgtaaaatactcccttttgttatccttagaggactcactggtttcttttcataagcaaaaagtacctcttcttaaagtgcactttgcagacgtttcactccttttccaataagtttgagttaggagcttttaccttgtagcagagcagtattaacayctagttggttcacctggaaaacagagaggctgaccgtggggctcaccatgcggatgcgggtcacactgaatgctggagagatgttatgtaatatgctgaggtggcgacctcagtggagaaatgtaaagactgaattgaattttaagctaatgtgaaatcagagaatgttgtaataagtaaatgccttaagagtatttaaaatatgcttccacatttcaaaatataaaatgtaacatgacaagagattttgcgtttgacattgtgtctgggaaggaagggccagaccttggaacctttggaacctgctgtcaacaggtcttacagggctgcttgaaccctcataggcctaggctttggtctaaaaggaacatttaaaaagttgccctgtaaagttatttggtgtcattgaccaattgcatcccagctaaaaagcaagaggcatcgttgcctggataatagaggatgtgtttcagccctgagatgttacagttgaagagcttggttttcattgrgcatttcycyattttyccagttatncccgaaatttctatgtattatattttttggggaagtgaggtgtgcccagttttttaatctaacaactacttttggggacttgcccacatytctgggatttgaatggggattgtatcccattttactggcttttanggttacatttaccaccttttctcttctctgctcccttgcccactgggggactcctcttttggcctccttggaagtttgctgcttaaaagttggaaagtnccaccangccaggtngattccatgcctngcnaa

SEQ ID NO: 368 - DNA, 2026 bp, Homo sapiens
  misc_feature (1326)..(1326): n equals a,t,g, or c
gtcgacgcaaaacttttttcattttcttcttatttttttttttggcaatgtcaaaaccaagtgcaacaaacgtttattaagcatttaggaaatgttatgtaaagaacctcttatccttgcatgccaggcactctttcaatcacttcagtgacatttttccaaaattctgaacatccacacttagggttttctttgaatttgggggtgccctccccccacccggcagccttctgtgtcagcgggatacgatcttgatatagacaccattttttggacctagggcagatttggattctagctgcagcggtacctgggtctcagggcaggcttggaaccggaacttgtgcagcacgtggagcagtgtcaacttgacctcaagcagccctagacgcaccccgaggcagctccgtgggccggccccgaagggcaggtacgtgaagggccggtgctgctgccgggcctcagccgtgaacctttcagggttgaaggtctccgggcttggccagtgctcagggtcatggtgcagggcacccacggccatctctagcacagcgcctgcggggatgcgctgccccagcacctcgcagtcctgagctgcctcccgtgtgaatctgaaagctggcgggtacatcctcagcgtctctgcaatcaccatgtccagatagggcaggccttcctcgaggctgcagaactcaggggccatgtgtttctccttaaaaacgtctacctctctcagaagcttctcttggcagtcagggttggtggccagtaggtaggtggcaaaagaaagtgtgttggtgatgatttcatagccagcgatgaggaagatgaaggcctggcccacaatctcatccacagtcaaaggcctggccatagggctgggctggtgttgccgggaagggttcggcttgcacccagtagaggagaaaacgtctctgacgatgtcaaagtcttgcacgcccatgggacttgcagaatgtcgggcatccaggaccatttggaggaagtctctccgcctctcttcggcagcttgctggtcccgcaaggcaatcacattcctaatgagtttgttaaaaaagccattcagttcgtctcggttcttattgggcaaaatccgggccagtgggaccattatggatggaaatgataagagtaaaaccaggataggtctggggatgcagaattcgaagaaacgcttgcagtgtttcacaaagggatcctcaggggcctgccaggagtccaccggggtgccaaaggcgacgctggcaaccacatctgtggtgtaattgcagtagcacctctggatgtcaaatgcgtccccagatntccgcatagcgttttaaatgagccaggagaaggtcgcaggcttggctgatgaggggaaccatctcgttcagcttttcaggactgaaagcagacatcagggcacctctgacctcttcccatcttttgtcacgtaaaaacagaacgctgtcggctaccgacttgaactccaaacccgacgccattctgttggtaaagttactgaagttctcaaccaacacctgcttgatcatgtctggctcagaaataacaataaacatccgacgaccaagatagtacccacacagaggtccatacagctttctgagctccatttggctttcccaaaaaccctggcggaaaaatgtcaagtttccaatgaaaggagaaggcttgggatgtctgaggcctaacttctccagtcttgagaatgctgatgtggagtaccatttcaggagggccaagagagccactgacagggccaccgtcaccatggggccattcacttccaattttagaaaccccaaggcttccatcattcctctgagaccccagagtggtggtcttccagatgagacaggaggctgatctcgccgcccttatgggaaccgtgctctgcaggtagaaaagggaacaggcaaccaagcaaacatcacatggagtgggcccccacaatgtgctctttctcagagtgtctccctataaagaggaaggaagaggaggg

SEQ ID NO: 369 - DNA, 1799 bp, Homo sapiens
ggttgtttgtcagtctcggcggcggcggcggcggyggcggcggcggcgatccacagtgattcggccgccgcgccggggggtgggggggctgcgcgggacttttttttttttcagactgaccgcggggcagctgcggagcatgtcgaccccggcccggaggaggctcatgcgggatttcaagcggttacaagaggacccacctgtgggtgtcagtggcgcaccatctgaaaacaacatcatgcagtggaatgcagttatatttggaccagaagggacaccttttgaagatggtacttttaaactagtaatagaattttctgaagaatatccaaataaaccaccaactgttaggtttttatccaaaatgtttcatccaaatgtgtatgctgatggtagcatatgtttagatatccttcagaatcgatggagtccaacatatgatgtatcttctatcttaacatcaattcagtctctgctggatgaaccgaatcctaacagtccagccaatagccaggcagcacagctttatcaggaaaacaaacgagaatatgagaaaagagtttcggccattgttgaacaaagctggaatgattcataatagacaactggtctgttaatctttttcatcattgttgtgtataatttacctctcattagaaaggctaacaaattttaagtgccacaggttttaaggattctgcagaaaaaaaagaaaaaagtccttcagtttagaacctacaaaagcttgtgtatcttgattaatgtactttttattgcatggtgtgaactaagttattgctgcataaatttgtaatatatcctgtttgtatttttttccaagtgtataatgttggtgtggagttttcatgacagaatatacacattttgtaaatctgtacttttttcaaatattgaatgccttatttttgaattctttagatttttaaattggagaaaagcacttaaagttttttatatatgaatattacatgtaaagctgttaaaatacataacttcagtgcaagagactttgtcacttatttccttatgtgtgtaggaggggttaataagtctctagctctccatctattgatagtttcatttacaatttcaaaagaacattcttatattttatcaaggaagtcttcaaatttgattctaaatagcgattataatctccaactttattttgaatgtacctctattagtttcaattgagtaattctagacataactggtttgactctgtccaactctgtatttaggccatttgttacagtttcttcatgcattacttactgttaaaactgtaccttttgcgatttcacagttggcacttctgccatgagcagagaactgatgcgacttgttttgctgcttggtagcactttaaaaaattttttgattaatgaagaaagtaaaaccataaacatttgccaaaaattcatgccccagtattagcaatgaattagttgcattggtttgagaaaggcacatattggagggaaatcttggtgtaacttaaatatttgaaaattacctttaatgcaatgcatatctgtttattctgggaaatgttttaatgccagggcctgctgagttgcttcttcttgtggagattttttttttaatctcctgagttgtataaaagttgtactgcatcttagtttactggataaatttaaaacacagtattgtagaaagctaatacaaaactatcctatgccttcaaatagtatagaaaatggaaaatatacaagtaaattctgttgaaccaaaaaaaaaaaaaaaaaaaaaaa

SEQ ID NO: 370 - DNA, 510 bp, Homo sapiens
  misc_feature (417)..(417): n equals a,t,g, or c
ggtccagaagcctccccgaccccccaagctatttgctcacattaacaaattaaagtgcctgaagcataattyatttttgtatctgtggtaacaaaacattaaccaaaagattttctgtcccagaagcctccccgaccccccaagctatttgctcacattaacaaattaaagtgcctgaagcataattcattctttacctgtatactaaaaaccctgttgtattgatttttttataataagcctttttacctctgtgtaaaaaatatatatacaagtgtatgatgtacattttagttcttaacttttttttatggtttctaatatgtatgaccaatgtagccattgctttaaaatgtaccgtgtaaatataaacacatcctatgcaraaaaaaaaaaaaaaaagggcggccgctctanaggatccaagcttacgtacgcgtgcatgcgacgtcatagctcttctatagtgtcacctaaattcaattcactggccgtcgttttacaacgtcg

SEQ ID NO: 371 - DNA, 1087 bp, Homo sapiens
ccaaagtgctgggattgtgggcatgagctgctgtgcccagcctccatgttttaatatcaactctcactcctgaattcagttgctttgcccaagataggagttctctgatgcagaaattattgggctcttttagggtaagaagtttgtgtctttgtctggccacatcttgactaggtattgtctactctgaagacctttaatggcttccctctttcatctcctgagtatgtaacttgcaatgggcagctatccagtgacttgttctgagtaagtgtgttcattaatgtttatttagctctgaagcaagagtgatatactccaggacttagaatagtgcctaaagtgctgcagccaaagacagagcggaactatgaaaagtgggcttggagatggcaggagagcttgtcattgagcctggcaatttagcaaactgatgctgaggatgattgaggtgggtctacctcatctctgaaaattctggaaggaatggaggagtctcaacatgtgtttctgacacaagatccgtggtttgtactcaaagcccagaatccccaagtgcctgcttttgatgatgtctacagaaaatgctggctgagctgaacacatttgcccaattccaggtgtgcacagaaaaccgagaatattcaaaattccaaatttttttcttaggagcaagaagaaaatgtggccctaaagggggttagttgaggggtagggggtagtgaggatcttgatttggatctctttttatttaaatgtgaatttcaacttttgacaatcaaagaaaagacttttgttgaaatagctttactgtttctcaagtgttttggagaaaaaaatcaaccctgcaatcactttttggaattgtcttgatttttcggcagttcaagctatatcgaatatagttctgtgtagagaatgtcactgtagttttgagtgtatacatgtgtgggtgctgataattgtgtattttctttgggggtggaaaaggaaaacaattcaagctgagaaaagtattctcaaagatgcatttttataaattttattaaacaattttgttaaaccaaaaaaaaaaaaaaaaaaaaaa

SEQ ID NO: 372 - DNA, 2273 bp, Homo sapiens
ggcacgagggagtgtccgctgtgcctggtgcggctgccgcctgagcgggccccgcgcctcctcagctgtccgcaccgctcgtgccgggactgcctccgccactacctgcgcctggagataagcgagagcagggtgcccatcagctgccccgagtgcagcgagcgactcaacccgcacgacatccgcttgctgctcgccgacccgccgcttatgcacaagtacgaggagttcatgctgcgccgctacctagcctcggaccccgactgccgctggtgcccggccccggactgcggttatgctgttattgcctatggctgtgccagctgcccgaagctaacttgtgagagggaaggttgccagactgagttctgctaccactgcaagcagatatggcatccaaatcagacatgcgatatggcccgtcaacagagggcccagactttacgagttcggaccaaacacacttcaggtctcagttatgggcaagaatctggaccagatgacatcaagccatgcccacgatgcagtgcatacattatcaagatgaatgatggaagctgtaatcacatgacctgtgcagtgtgtggctgtgaattctgttggctttgtatgaaagagatctcagacttgcattacctcagcccctctggctgtacattctggggcaagaagccatggagccgtaagaagaaaattctttggcagctgggcacgttgattggtgctccagtggggatttctctcattgctggcattgccattcctgccatggtcattggcattcctgtttatgttggaaggaagattcacagcaggtatgagggaaggaaaacctccaaacacaagaggaatttggctatcactggaggagtgactttgtcggtcattgcatccccagttattgctgcagttagtgttggtattggtgtccccattatgctggcatatgtttatggggttgtgcccatttctctttgtcgtggaggcggctgtggagttagcacagccaacggaaaaggagtgaaaattgaatttgatgaagatgatggtccaatcacagtggcagatgcctggagagccctcaagaatcccagcattggggaaagcagcattgaaggcctgactagtgtattgagcactagtggaagccctacagatggacttagtgttatgcaaggtccttacagcgaaacggccagctttgcagccctctcagggggcacgctgagtggcggcattctctccagtggcaagggaaaatatagcaggttagaagttcaagccgatgtccaaaaggaaattttccccaaagacacagccagtcttggtgcaattagtgacaacgcaagcactcgtgctatggccggttccataatcagttcctacaacccacaggacagagaatgcaacaatatggaaatccaagtggacattgaagccaaaccaagccactatcagctggtgagtggaagcagcacggaggactcgctccatgttcatgctcagatggcagagaatgaagaagaaggtagtggtggcggaggcagtgaagaggatcccccctgcagacaccaaagctgtgaacagaaagactgcctggccagcaaaccttgggacatcagcctggcccagcctgaaagcatccgcagtgacctagagagttctgatgcacagtcagacgatgtgccagacatcacctcagatgagtgtggctccccccgctcccatactgcagcctgcccctcgacccccagagcccaaggtgcaccgagcccaagtgcccatatgaacctctctgccctagccgagggacaaactgtcttgaagccagaaggtggagaagccagagtatgaagtggaatgaatgctcctgttctgagaagcacacttgtaactgcatcttttggaatttttttttttttttttccaaggggtagagatttatgtattttatttcacagattctctggtcacaggtttttgcccagggaaattctgagaaattcacaatttcttaccagataaaacatgaaaagtttgccgttagttcccctcccctcccctccctctttttagttttaatttattggttaaactgatggcagcaatccatgaggtgtgtcaaagagtgtacatatgtatgtgtgtatattgaatgctaaacatattactgaaagacacattttaataaagatttctgtcataattcaaaaaaaaaaaaaaaaaaaaaaaaaaaaaaaaaaaaaaaggggccgctcgcgatctagaactag

SEQ ID NO: 373 - DNA, 1848 bp, Homo sapiens
  misc_feature (976)..(976): n equals a,t,g, or c
  misc_feature (1845)..(1845): n equals a,t,g, or c
gattcccgggtcgacccacgcgtccgcgcggaatctcagttagcggtggagaggcagtatgtccggttcaatggcgactgcggaagctagcggcagcgatgggaaagggcaggaagtcgagacctcagtcacctattaccggttggaggaggtggcaaagcgcaactccttgaaggaactgtggcttgtgatccatgggcgagtctacgatgtcacccgcttcctcaacgagcaccctggaggagaagaggttctgctggaacaagctggtgtagatgcaagtgaaagctttgaagatgtaggacactcttctgatgccagagaaatgctaaagcagtactacattggtgatatccatccgagtgaccttaaacctgaaagtggtagcaaggacccttcaaaaaatgatacatgcaaaagttgctgggcatattggattttacccatcataggcgctgttctcttaggtttcctgtaccgctactacacatcggaaagcaaatcctcctgaggaggccttgctgaagttagaaagtgcatccactttggggcgaaaactagagacttgcttgggggctgcagaagtgccctctcctcgaatcctgccagttgcattcttcccccttggagccaagacgattggccagacatcacctcagatctgagaccagcgtcttccatctctcagagccttactcccaaagtacctgctcactgttccgtgttgaacaattgccggtgtttcctctcttcactggtttccatgagtacccttatatttcacaactttctgttcataagttatagtgacattgctctttggtaaaaatgcctgctttccaatactttgattgcatattagacattcttaacagggcggcagtctagtgttgaaagttttatttttccatttttcttttaagtaaattttttttaaaaaattctgatttagggctaggtgtggtggctcaggccngtaatcckggcactttgggrggccaaggtgggaagatcgsttgaggccaagagttcaagaccagcctgggcaacatagcgagacccctatctgtattaaaaaaaaatctgatttaattcttttatttatcataaggggtttaattcctgaagtaaaggtttgcacctattaaacttaaaactgccaaatgatttttgttcttttatgtgcgtgataaaaatacaaagaatggtgtggccacctcctccctttcaagctagggcagcaggtagctcttcccagcccctgagcccagccccttcccaagtggtgccggacaaaaaactacatggccctttcgtgtcttgggggtggaaagggagggatgaattggggtgatagaaccctggtgaattcagagtaatctttctttagaaaactggtgttttctaaagaaacaggataggagtttagagaaggcaccaaagctttcactttggtttggcaccagtttctaaccatctgttttttctaccctagctatcttttattggtaaaatataaatgtataattatgtttgtagagctttaccaaggagtttccctccttttttgtttgttgattagcaaatttttgattctccattttccaaaagtaagagactccagcatggccttctgtttgccccgcagtaaagtaacttccatataaaatggtatttgaaagtgagagttcatgacaacagaccgttttccatttcatctgtattttatctccgtgactccaacttgtgggtttgttctgtttttccatgagaataaaatactggcggtttttttcaaaaaaaaaaaaaaaaaaaaaaaaaaaaaaaaaaaaaaaaaaaaagggngga

SEQ ID NO: 374 - DNA, 1808 bp, Homo sapiens
  misc_feature (1808)..(1808): n equals a,t,g, or c
cccgggatcgacccacgcgtccgctttacatatcatactttggggttaaaggagattcctcagactcatccagcccttgggtgctgaccagcagagtcactagtggatgctgaagttacatgagctacatgttaaatatttaaagtctccaaaataaaacaccccaacgttgaccttacccggctgatggttagccccttgctgcctgctccatgtgtcttatgagagcccgtagttacagtgtcctctaatttgaaatccataagttaacaagtctatatcaggtgcagctggctttgattaaaggccatttttaaaacttaaaaactcaacacctcacagattataatagaaaaagaaatggcctcagtttgatctcgttcagaatgacccagattgtttctgctttgggtgcagctgtttagttcagagttatattacagagaattattttctgagataatcttaaactagaatgttcaaaactaattgataattgaagtatcaagatacgtagaacacctcagagatttttcttcaggaacttccacaaactttgaatccttgtatctttatttggtattcatactactagtagcaaaatacaggttttttgttttgttttgtttgtggcttcatagagtatctcaaattgaaacttttctgcacaaagaataaaattaaggattttataaactcaaattggcacctactgaattaaaatacataaaatcatttaaatataattcagcatatgggaagtaacattgcactaatatggaaatcactgccagagacagtctattttcttttaatttgttactacttagtcacaaaccccacattattccagtttggaattacttattaaggagaattggaaatacatatgcccatgcttaaattttatagctttaatttgtgttatttctttattgacgggaagaggtacatctttttttccttactgaaaacaaatatggattaattgcctcaaatttgtataagtgattggctagtgattcttgttttcagaagggagagtggtatagatagaaaatgacaaagatggcaatatacacttaatgttgttattgtatgttgttactgaagtacttagatttttaaaatttcaaatcctaaatcacttcttgtaggagggttttcattaactgcagtatatacagttcactacatatgggttgtttgagttttttgtgtgctgtatttctttctgttttttaatacctggttttgtacatatctaactctgttctcttttggttgttcagaaactggattttttttttcttaagcagtgcttaatttgtgttttttaattttgattcagaagtagtcccagctcataggtgttcatactgttacatccagaacatttgtcaggctctctgtcagctttcatgtacatatggtatagaaaccatggagttaggcacttcctggattttttttttatgagaaaaatactgtatttaaaatgtaaaataaacttttaaaaagcaggcactaatatatatttcttccagcctttgattacaaatttgtccttgcacatgttaagatgaattatctcctaaaaatatcattgttcttgggagcagtgtatgttactttacatagcagcggttcctgtcatgtgttcatgtcagaatatttttggttttaaactttcttattgcctttggctgttgattagtacagtacaagtgcgatttcaaaaagatcttgaaagtaatatatttaatcaattaaaatgtttatctgtaaaaaaaaaaaaaaaaaaaaan

SEQ ID NO: 375 - DNA, 1280 bp, Homo sapiens
ctggaaggaagacgaacctacgaagcagagtgccaagcccccagcacagacgttgagtggaatggaatagactctttgctgggctgcttgaggaacagaggcagagatctgaagacagcatgtacacagccattccccagagtggctctccattcccaggctcagtgcaggatccaggcctgcatgtgtggcgggtggagaagctgaagccggtgcctgtggcgcaagagaaccagggcgtcttcttctcgggggactcctacctagtgctgcacaatggcccagaagaggtttcccatctgcacctcaacacrctgctgggagagcggcctgtgcagcaccgcgaggtgmagggcaatgagtctgacctcttcatgagctacttcccacggggcctcaagtaccaggaaggtggtgtggagtcagcatttcacaagacctccacaggagccccagctgccatcaagaaactctaccaggtgaaggggaagaagaacatccgtgccaccgagcgggcactgaactgggacagcttcaacactggggactgcttcatcctggacctgggccagaacatcttcgcctggtgtggtggaaagtccaacatcctggaacgcaacaaggcgagggacctggccctggccatccgggacagtgagcgacagggcaaggcccaggtggagattgtcactgatggggaggagcctgctgagatgatccaggtcctgggccccaagcctgctctgaaggagggcaaccctgaggaagacctcacagctgacaaggcaaatgcccaggccgcagctctgtataaggtctctgatgccactggacagatgaacctgaccaaggtggctgactccagcccatttgcccttgaactgctgatatctgatgactgctttgtgctggacaacgggctctgtggcaagatctatatctggaaggggcgaaaagcgaatgagaaggagcggcaggcagccctgcaggtggccgagggcttcatctcgcgcatgcagtacgccccgaacactcaggtggagattctgcctcagggccrtgagagtcccatcttcaagcaatttttcaaggactggaaatgagggtgggcgtcttcctgccccatgctcccctgccccccaccacctgcctgcttgcttctctggctgcctggtcagtgcagaggtgccccctgcagatgttcaataaaggagacaagtgctttcccaaaaaaaaaaaaaaaaaaaaaaaaaaaaaaaaaaagaaaaaaaaaaaaaaag

SEQ ID NO: 376 - DNA, 2138 bp, Homo sapiens
gatttcaggggaagattgatgctgcttattttgagaccagcaaatacctgttggatgttctcaataaaaagtacagcttgctggaccacatgcaggcaatgaggcggtacctgcttcttggtcaaggwgactttataaggcacttaatggacttgctaaaaccagaacttgtccgtccagctacgactttgtatcagcataacttgactggaattctagaaaccgctgtcagagccaccaacgcacagtttgacagtcctgagatcctgcgaaggctggacgtgcggctgctggaggtctctccaggtgacactggatgggatgtcttcagcctcgattatcatgttgacggaccaattgcaactgtgtttactcgagaatgtatgagccactacctaagagtatttaacttcctctggagggcgaagcggatggaatacatcctcactgacatacggaagggacacatgtgcaatgcaaagctcctgagaaacatgccagagttctccggggtgctgcaccagtgtcacattttggcctctgagatggtccatttcattcatcagatgcagtattacatcacatttgaggtgcttgaatgttcttgggatgagctttggaacaaagtccagcaggcccaggatttggatcacatcattgctgcacacgaggtgttcttagacaccatcatctcccgctgcctgctggacagtgactccagggcacttttaaatcaacttagagctgtgtttgatcaaattattgaacttcagaatgctcaagatgcaatatacagagctgctctggaagaattgcagagacgattacagtttgaagagaaaaagaaacagcgtgaaattgagggccagtggggagtgacggcagcagaggaagaggaggaaaataagaggattggagaatttaaagaatctataccaaaaatgtgctcacagttgcgaatattgacccatttctaccagggtatcgtgcagcagtttttggtgttactgacgaccagctctgacgagagtcttcggtttcttagcttcaggctggacttcaacgagcattacaaagccagggagcccaggctccgctgtgtctctgggtaccagggggcggcgcagytcccacacgtgaagctcgcggtcctcccagggagctgcgggtgatgttcgttgcactgctagacacgaaattcccattgacgtcctgcaggaactgcatgctgcaggtgtcctgcccttccgcccacgagtgcgccatgtttcagcggaggccgtgtgggagaagccacgtcgtgtttcacatgtcggagtcgaatgcatttgtaaatccctaagtcaagtaggctggctgcactgttcacatttgtctctaaaagtcttcatcgctaaaagataccataatttgctgaggcttcttaagctttctatgttataatttatatttgtcactttaaaaaatccatttcttttagaaaaaattagggtgataggatattcattagttaagatggtaacgtcattgctatttttttaacatcctctttagaggtaatttttgttaacataaccaaaaattaaattgaaacaaaatgtcccaactaagaaaatatatagagcattttatttttttttagtgttgtaaaatattaacctctgtgagatcctttgtatcttaatgcattacctttacacatatttattcttattttctctcctttcagagtttacatttttatatttaatttactatttcagatttttaaaatagtatagaaaaaagtaggagtgatagagaacaaaaatactcttatacagtgcaacccaaataccgcgaatgcatcagctaaagcagcgtgtaaataggagtgaygagaaagttaatggagtattttattttcaaagttcctgataagcattggaaagaaatcgacatggataatgaagatttcctttttccttgcctattttttcattgtaaatatttatatactactgaccaagatgttggggtgggggggattgttttttgtaaaaatgtcattatcaggtcacataaatctgcctttatgttgcataagtgaaaatttagaaaattaaaagcaattatctttcagatgcaaaaaaaaaaaa

SEQ ID NO: 377 - DNA, 3179 bp, Homo sapiens
  misc_feature (475)..(475): n equals a,t,g, or c
  misc_feature (2488)..(2488): n equals a,t,g, or c
  misc_feature (3178)..(3179): n equals a,t,g, or c
gcttcccagtgagatcccatcgggacatgtttctagtgctcttcagttcctagcattccccggggagctgcggaagcattttctcatggacacactgtctcttgtgaataggttccaggtcagcccasgagagccatagcagctgctggtgccaccgttcagcaggggtgagtgccctgcctgcagtcaggaggcttgtgcccgagctctggaacaaatcatcacttaggatacagcttccctggaaagaaattaagtgtcaggacttttagaccataagttgcttgaaagtcgagaatggcagacatagggttgtggtgttgccagtccactgcaggtgctccagcccgcggcgcggcctgcgctgctgtctttgaggctgtagcacaagcatgagctcgggccccctccctgtgcaccggagacccagccaggtccagccggtctgtccatggtgccccaccagcagcatcgngctgggcagtgccgcctgcagagtcatggagccttagttactgagcaggtgcacgtggggggcttggaaggccccactgcattaccatgccagctatcrcacaccccgtgccagaggactgcatgtgacacggcttgattacgtggcactcgctgctgcaaagcaaagtcagatgtcatcatggaaactcaagcaccagtctttttctctgaattggaatatagctgtaagaatgtggtatgattctgttcctaaatgtgaattgattattatgttgaaacaggtaaaaaccccaaaattttcttgtcacgtgttcctgtgtctctttcgaagtgtgtcaccttaggtcactgtgtggacacagcaagggtggaggacgctaacttggcctttgcagtgatggtggggtgggacaggtgttctggggcacgaggggccctgagaatcccctgcctgggtgtgtttcttctgattctgtccctcacgtctctgttttctcccttttctgtgctccagagcagccatcagcagggaccctttctacgaaatgctcgcagcacggaaaaagaaggtctcctccacgaagcgacactgagcgtgcagccaagggcgttggtctgcgggggccttggagctcctgctcttctcccgcacctccatggatgcactgctgccgagcagagcgtcctctgccaggccccgccctggattcctagagactagcttcagcttttgctattttttttaagtgggagaagggtgggcrgttatcactggggaagagaggaccggccacctgtccagcatgggctccagagccttcctctctcacagggcagagctcttgtcggcagggcagcctcctggccagtttctctgctcagtgttctggtagcagagctcagagccaactgtttacctcttggttgtccccgtgaagaagccttcaaaccctgcaccataaatacatgtgtccatatattattatatgttaagagaaaaaggtggaaaggaagagaagccacatactataaagatctatttttttttttttaagagagaacgtagggctgttcaggtgcattctgccctggctgcgctggggagcttctccctggagaagagcacctggggctgcggccaaggggcatcagcctgggcccgcggcagggcctggcctgcctctcctgtgctgtgggagctcgctgcctggtgcttgtctgggcgagatggacaggtgaggtcgaggacgcagagggcagaggcccagtggagcctcagacggcacagtcagagtcgggggcctgccctggccggggtcgcagtcggcagcagcgtgcagtccggcatctcccgcggatgcttttccatcccaagtgcctgcggacgccgaggagaggagagagctgactggacgcttacgttattttcctccttcagaatccaagttcttgttgggctttaaagtagaaagtcagcattttccttgagctaaatacctaataaccaaaactgtgaggaaggttatcgggacagaggttccggataacctgtttcattttgggttttcttcctcttccccagactccagtcctcgttctagaggaaggagtaggacttccccgatccccgtaggcttcagctttttctgcctcaaaaccagccctaactggactactctggatgcattttgtggtgggccccctagaggggaagatgggcctttatctgctccgtggggtgcactggagtgaggggggtggccgggctgcctctcgcatctctgtcttcccctgcaggcgctgtgtgagctggccctgcccctcctcattacagtatgaagggagccgtgacacgcagcattttcctgccgttctctcagggactctcagggcagctcctgccactccgccagggccagcatgccagtccaggcagagcaggtggctggctgkctggccgtctcgccccgcccctccacaggaccctggaccagggcggtgcagggcgcanccctgaggaggcaggtggaggagctgcgggttttcacagggccgcgtcgccacggctcctctgatcctttagggttggcgagcatctctggaaatagcttttgcagaggagtggtgggaggaatagagggggacagtctgtcacctccctccccgccactttgtgtagatcctacctggagggaatggctttaggcacttttgtgccagagcttgtgagggtgacagaagagggtccaggctggaaacctgaactttctgggtgggagaaccaggtggtgcctgccgaggtctgggcgtgtttgggccggtgctggagcctgtccagctggcccgggccctggcctggttctcaagtgtttcctagacagagaggcacctgggtcagtattagtctatttatcagaggtgtaaataatctatgtatagtttttctccttttagattattttgtatttgtttaaaagaagttttgtcaaaatacaaaaatataaagaaatgactgaaagttgttgacagggtttttaagaaataattattctaattgtttttgtttgtttgtttttgccttgtaaactagcgccaaggaactgcagcaaataaactccaactctgcccaagcmaaaaaaaaaaaaaaaaaaaaaaaaaaaaaaaaaaaaaaaaaaaaaaaaaaaaaaaaaaaaaaaaaaann

SEQ ID NO: 378 - DNA, 1826 bp, Homo sapiens
  misc_feature (1799)..(1799): n equals a,t,g, or c
tcccccgggctgcaggaattcggcacgaggtggattcttgtccatagtgcatctgctttaagaattaacgaaagcagtgtcaagacagtaaggattcaaaccatttgccaaaaatgagtctaagtgcatttactctcttcctggcattgattggtggtaccagtggccagtactatgattatgattttcccctatcaatttatgggcaatcatcaccaaactgtgcaccagaatgtaactgccctgaaagctacccaagtgccatgtactgtgatgagctgaaattgaaaagtgtaccaatggtgcctcctggaatcaagtatctttaccttaggaataaccagattgaccatattgatgaaaaggcctttgagaatgtaactgatctgcagtggctcattctagatcacaaccttctagaaaactccaagataaaagggagagttttctctaaattgaaacaactgaagaagctgcatataaaccacaacaacctgacagagtctgtgggcccacttcccaaatctctggaggatctgcagcttactcataacaagatcacaaagctgggctcttttgaaggattggtaaacctgaccttcatccatctccagcacaatcggctgaaagaggatgctgtttcagctgcttttaaaggtcttaaatcactcgaataccttgacttgagcttcaatcagatagccagactgccttctggtctccctgtctctcttctaactctctacttagacaacaataagatcagcaacatccctgatgagtatttcaagcgttttaatgcattgcagtatctgcgtttatctcacaacgaactggctgatagtggaatacctggaaattctttcaatgtgtcatccctggttgagctggatctgtcctataacaagcttaaaaacataccaactgtcaatgaaaaccttgaaaactattacctggaggtcaatcaacttgagaagtttgacataaagagcttctgcaagatcctggggccattatcctactccaagatcaagcatttgcgtttggatggcaatcgcatctcagaaaccagtcttccaccggatatgtatgaatgtctacgtgttgctaacgaagtcactcttaattaatatctgtatcctggaacaatattttatggttatgtttttctgtgtgtcagttttcatagtatccatattttattactgtttattacttccatgaattttaaaatctgagggaaatgttttgtaaacatttattttttttaaagaaaagatgaaaggcaggcctatttcatcacaagaacacacacatatacacgaatagacatcaaactcaatgctttatttgtaaatttagtgtttttttatttctactgtcaaatgatgtgcaaaaccttttactggttgcatggaaatcagccaagttttataatccttaaatcttaatgttcctcaaagcttggattaaatacatatggatgttactctcttgcaccaaattatcttgatacattcaaatttgtctggttaaaaaataggtggtagatattgaggccaagaatattgcaaaatacatgaagcttcatgcacttaaagaagtatttttagaataagaatttgcatacttacctagtgaaacttttctagaattatttttcactctaagtcatgtatgtttctctttgattatttgcatgttatgtttaataagctactagcaaaataaaacatagcaaatggcaaaaaaaaaaaaaaaaaaaaaaaaaaaaaaaaaaaaaaaaaaaaaaaaaaaancccccgggggggggccccccccccctt

SEQ ID NO: 379 - DNA, 839 bp, Homo sapiens
  misc_feature (112)..(112): n equals a,t,g, or c
  misc_feature (179)..(179): n equals a,t,g, or c
  misc_feature (809)..(809): n equals a,t,g, or c
  misc_feature (829)..(829): n equals a,t,g, or c
  misc_feature (831)..(831): n equals a,t,g, or c
  misc_feature (837)..(837): n equals a,t,g, or c
tagtcatggaggatttggtatgacttgaccacaggtttagaccaaggctgagaagaacagaagggagaaattaatggcaaaacaaaaaatacacaaatctgcggttttgganttaatgaaacaagattcatctatttaaagaaatgttggtgttctaatacaaagcattattttcactnagagaaaattacttacttgctcccttctgtattgtaatattttgtattaagacatgatttaaaatgtctttctacccttatctcctctaaactgcaactraagttcaattcttcatcattagtattttaactctggcaaaggttatagaaagaaaaatggraatatggtaggcctgtggtattcttaaaagctaagtcattagaactatgcagatccccaagtttaaaagtacaawtacagcaccagtagttagctttctagctgggggagaagacaggagatttttcttccacagatgtttattttgcttcctgataggtactgcagcaaagccatgttgatgtgtagatgcatgacttcctcactaagctgctgcacaccagctttgcctgcatgattcaaatttgtgcctcagtaaaattataaattattgcatgtcataccttgaataatggaaacggcaaacattaaacctgtgattacccataatgtactttaataataaaaaacatggcagccaggtgcagtagagtgcacctgtggtcaggaggctgaagtgggaagattgcttcaacctgtgagtttgagtcccgcctggtcaacagcgagaccccatgtgtctgctgctntctctttttttaaaggacanangcttanct

SEQ ID NO: 380 - DNA, 2315 bp, Homo sapiens
  misc_feature (1259)..(1259): n equals a,t,g, or c
  misc_feature (1261)..(1261): n equals a,t,g, or c
  misc_feature (1299)..(1299): n equals a,t,g, or c
  misc_feature (2300)..(2300): n equals a,t,g, or c
  misc_feature (2304)..(2304): n equals a,t,g, or c
tcagcactcaaaaagttttggattttggggtatttcagattttagatttttgtatgaggaatgttcaacctgtatttgaacaagcattaccaaatatcattgaatattaatatcttttgcgtaaaaactgctattatcagcatcatagtttctctaaaaagaaaacttggggatcatagccgatagagagacttgctaaaatataaatcagcctctgcaaaactgtttacatatttattggtttacatattttattggtttatttctatcccctgttcactttttctcttccacttccaattatgaagagaaaatatttgttcagggttgtccccccgccccccgtcactgcataatttctcctcttacaagctgcttttggctttcattaataacagcttccttttagaaggtctgataaggrtatttaaggaagragagratgactctgttattaaaggtggctggrgactgtggrgggatattttttwaagcactactcatatcctttaactaaattttgccaagccsgasacaacattaaggagaaattgtaccttaagttagtaattccaaatctatctgagttgtatacccatcaaagacaatacagttattaacatagatgaaggtatgctataggcatcattcattatctctatattgaataggtgaaagataactgtagtcaggtgaaaggcattcattatttttaagctgaaaaggggatccttgaaaacactgaaaacctctacaacaatcttcaggaagcctgctatcttgggattcactaataataggccaagaacaaaggcaagcatccattcctcactccaccacttttctatttcagtgggtgtcrttgctacgatgaagactttggaaatttcctttctcttttaggacagggtcaggatttaggactcatagcctgaaagctcattacatactccttgtaaccatcagtccaaggttcagttcactaaagtgcatgttctaaaacaagagctatcctcattccaaattttaaaatatgtactctggtcggttgcagtggctcacgcctgtaatcccagcactttggcaggccgagatgggcggatcttttgaggtcaggagtttgagaccagcctggccaacatggtgaaaccccgtctctactaaaaatacaaaaattagccaggcatggtggcatttgcctgtaatcccaagctactcgggaggctgaggcaggagaatcacttgaacctgggaggcanangtttgcagtgagctgagattacaccacttgcacttcancctgggtgacagagtgagactycatctcaaaaactgaaaataaaaataaaaatatgtattctcctaactgaaatatttacttaatctggaaaacaatgtaactatttttaaagtggttacatctattcttgctgaagaacaataaacagaattttttgactaagcataaccaaatttcagaacagtctaatcaatgccaagtatccaaggcaaactctaatacccatccattgtgcaaaaccacaagcacgcaagtattaaataagagcaagctgtcctgagcccatacctaatgaatttgtgtcttaaatattgtacattgtgtttgaggcttgtcaaaactgggattatggcaagaaaggttgcctaactcatacctttctgcctcaaattccaggtgctaaaggctaatggcattttaaacatcttacatttttaaaaatttatattgcctctgccaaacaggcctaatagttaaaagcaagttgagacaaaccaggcagattcagtgtgtggaacaggaaggatgtgctttaaaaaaaggtggaatccctcaaaaaattctatagggagacagcagccttaatctacataattcttcatctcgccaattcagccgcagcctttaaagagttagtgttaatggctttctggtttgaaaacaaaaatgcatctatgtggttgaaagtttgggaggagattcaccaatatctgaggagaagatggagtgaagggaattcttactttttgctttatacctttctataatatttagatttttttttactgtaagtatggatcaaattgcaaaataaagaaaaatgccaaccttagaaaagacaataaatgcacaaaagatataaacaggaacagcaaatatttatattttttccattttgctctttttaaatctatgtttagaactttatatcttgggacttatgtatatatataccttttaaataaaataaattttctaaataaaaagttaaaaaaaaaangggnggccgccctag

SEQ ID NO: 381 - DNA, 3007 bp, Homo sapiens
  misc_feature (2984)..(2984): n equals a,t,g, or c
  misc_feature (2988)..(2988): n equals a,t,g, or c
  misc_feature (3002)..(3002): n equals a,t,g, or c
gccactcccccatcgtggggcagctgcggctgagggctgtggctttggcagctgcgacggggagcggcggagaccgcctctgctcccgcctggggttgctgcttttgctcagaggacatccatgaccctaatggtctttttgttcaagataaagtgattttttgcctttgttgattaactggrcaaattmagcatgtagagcrcatgaagtacaggacaataaagcttcctacacatatcaccaggaggatctctttgaaagattcactgcaggactaccagagagaataatttgtctgaagcatcatgtgttgaaacaacagaagtctattcacctgtgcactaactagaaacagagttacaatgttttcaattctttgagctccaggactycagggaagtgagttgaaaatctgaaaatgcggccatggactggttcctggcgttggawtatgctcattctttttgcctgggggaccttgctgttttatataggtggtcacttggtacgagataatgaccatcctgatcactctagccgagaactgtccaagattctggcaaagcttgaacgcttaaaacagcagaatgaagacttgaggcgaatggccgaaatctctccggataccagaaggccctattgatcaggggccagctataggaagagtacgcgttttagaagagcagcttgttaaggccaaagaacagattgaaaattacaagaaacagaccagaaatggtctggggaaggatcatgaaatcctgaggaggaggattgaaaatggagctaaagagctctggtttttcctacagagtgaattgaagaaattaaagaacttagaaggaaatgaactccaaagacatgcagatgaatttcttttggatttaggacatcatgaaaggtctataatgacggatctatactacctcagtcagacagatggagcaggtgattggcgggaaaaagaggccaaagatctgacagaactggttcagcggagaataacatatcttcagaatcccaaggactgcagcaaagccaaaaagctggtgtgtaatatcaacaaaggctgtggctatggctgtcagctccatcatgtggtctactgcttcatgattgcatatggcacccagcgaacactcatcttggaatctcagaattggcgctatgctactggtggatgggagactgtatttaggcctgtaagtgagacatgcacagacagatctggcatctccactggacactggtcaggtgaagtgaaggacaaaaatgttcaagtggtcgagcttcccattgtagacagtcttcatccccgtcctccatatttacccttggctgtaccagaagacctcgcagatcgacttgtacgagtgcatggtgaccctgcagtgtggtgggtgtctcagtttgtcaaatacttgatccgcccacagccttggctagaaaaagaaatagaagaagccaccaagaagcttggcttcaaacatccagttattggagtccatgtcagacgcacagacaaagtgggaacagaagctgccttccatcccattgaagagtacatggtgcatgttgaagaacattttcagcttcttgcacgcagaatgcaagtggacaaaaaaagagtgtatttggccacagatgacccttctttattaaaggaggcaaaaacaaagtaccccaattatgaatttattagtgataactctatttcctggtcagctggactgcacaatcgatacacagaaaattcacttcgtggagtgatcctggatatacattttctctctcaggcagacttcctagtgtgtactttttcatcccaggtctgtcgagttgcttatgaaattatgcaaacactacatcctgatgcctctgcaaacttccattctttagatgacatctactattttgggggccagaatgcccacaatcaaattgccatttatgctcaccaaccccgaactgcagatgaaattcccatggaacctggagatatcattggtgtggctggaaatcattgggatggctattctaaaggtgtcaacaggaaattgggaaggacgggcctatatccctcctacaaagttcgagagaagatagaaacggtcaagtaccccacatatcctgaggctgagaaataaagctcagatggaagagataaacgaccaaactcagttcgaccaaactcagttcaaaccatttcagccaaactgtagatgaagagggctctgatctaacaaaataaggttatatgagtagatactctcagcaccaagagcagctgggaactgacataggcttcaattggtggaattcctctttaacaagggctgcaatgccctcatacccatgcacagtacaataatgtactcacatataacatgcaaacaggttgttttctactttgcccctttcagtatgtccccataagacaaacactgccatattgtgtaatttaagtgacacagacattttgtgtgagacttaaaacatggtgcctatatctgagagacctgtgtgaactattgagaagatcggaacagctccttactctgaggaagttgattcttatttgatggtggtattgtgaccactgaattcactccagtcaacagattcagaatgagaatggacgtttggtttttttttgtttttgtttttgttttttcctttataaggttgtctgtttttttttttttaaataattgcatcagttcattgacctcatcattaataagtgaagaatacatcagaaaataaaatattcactctccattagaaaattttgtaaaacaatgccatgaacaaattctttagtactcaatgtttctggacattctctttgataacaaaaaataaattttaaaaaggaattttgtaaagtttctagaattttatatcattggatgatatgttgatcagccttatgtggaagaactgtgataaaaagaggagctttttagtttttcagcttatntacnttgttttttgtccnggttc

SEQ ID NO: 382 - DNA, 752 bp, Homo sapiens
  misc_feature (521)..(521): n equals a,t,g, or c
gttgacttgtactgaaggtgattttaaatttaagtatgtagtgtttgaatttcttccatccatgtcgttttaatgagatgtttccatgtcagctcctttacagccttggctccyggcttacagatttttgaatagttgtttgcttgccagttgttttacatctttcattggccaccaaaatattagccatttgagatgagatgagactacttgttgtaccttcatctttcatttaattttctggcgtaaattaacattttaatttcatatatatctgtaaagagtctacccaaaggcttcacggaaatttgcaaaatgaactaattcccttttaagcagcaggtgtgcctgtttttgacttttcagtaaatatgttgtttgtgcacatatctacatggtggagaccatattcattatttcatcttccaaataatgggaaaaatataaaagtgaatcagtgtgctttgggaattcagtgaaatcatgttaactcatatagagggggccttagtttatctctnctttactgaattaattagttttggaaattcttttaccattaaaaaaaattaaggaccatacagagaatgatttaagaaaaaacaagtcacttaaaaatcatcacctatttataaactgtattaattacacataatgcttattgattcaatgaggtttctctaaagacttctgcttaataaatatggctggacttcatttaaattagtttaggactattgtagggatgggag

SEQ ID NO: 383 - DNA, 712 bp, Homo sapiens
  misc_feature (11)..(11): n equals a,t,g, or c
  misc_feature (560)..(560): n equals a,t,g, or c
  misc_feature (638)..(638): n equals a,t,g, or c
  misc_feature (682)..(683): n equals a,t,g, or c
  misc_feature (708)..(708): n equals a,t,g, or c
  misc_feature (711)..(711): n equals a,t,g, or c
gagagcctatntcctagtttctcccaatgttatatttaattttaaaaaattgatatgaaaatgtctaatgtatagtaataatttatgacagatctagtcatttcttcctattaaaaaagattaccttatctccagtaggaaatggaattttatgggcctttaaaagaaagttttatgaaacttgatgctataattttattggtatttcaaggggaaaaaagcactggggttcaaaaatggtagcagaactgctttgaaatgctgcaaggtggccactagatgatgcaaaatacaaccaaaagattgactgagaataaaattaggtgacaagggtttttaaagaataaccttttaaagtgtgggggcaggggttgcttttttttattttatttaaagtcaattatattttacatcttacatttctaaaagcattttataattatttttagtaagatttttcttaaaatttcatatactggtttctacaatttatatttgaaatttctcagtgttatgtaaagagtgatggaaaagcattgatttctttaaaaccgtaatgnttttagaacttaagcctatagggcctttcttacaatggtgatgtacccattatcttagaaaatctagtttaaacctgntttctttccccgcaaaagaattaaatggggaaaatccatttggnnatcctcttaagttattcctaattangtng

SEQ ID NO: 384 - DNA, 1807 bp, Homo sapiens
ggcacgagttatggattacctagatatcggtggcttactcatgcttggaatttttttcagagagagtttaagtgctgtggagtagtatatttcactgactggttggaaatgacagagatggactggcccccagattcctgctgtgttagagaattcccaggatgttccaaacaggcccaccaggaagatctcagtgacctttatcaagagggttgtgggaagaaaatgtattcctttttgagaggaaccaaacaactgcaggtgctgaggtttctgggaatctccattggggtgacacaaatcctggccatgattctcaccattactctgctctgggctctgtattatgatagaagggagcctgggacagaccaaatgatgtccttgaagaatgacaactctcagcacctgtcatgtccctcagtagaactgttgaaaccaagcctgtcaagaatctttgaacacacatccatggcaaacagctttaatacacactttgagatggaggagttataaaaagaaatgtcacagaagaaaaccacaaacttgttttattggacttgtgaatttttgagtacatactatgtgtttcagaaatatgtagaaataaaaatgttgccataaaataacacctaagcatatactattctatgctttaaaatgaggatggaaaagtttcatgtcataagtcaccacctggacaataattgatgcccttaaaatgctgaagacagatgtcatacccactgtgtagcctgtgtatgacttttactgaacacagttatgttttgaggcagcatggtttgattagcatttccgcatccatgcaaacgagtcacatatggtgggactggagccatagtaaaggttgatttacttctaccaactagtatataaagtactaattaaatgctaacataggaagttagaaaatactaataacttttattactcagcgatctattcttctgatgctaaataaattatatatcagaaaactttcaatattggtgactacctaaatgtgatttttgctggttactaaaatattcttaccacttaaaagagcaagctaacacattgtcttaagctgatcagggattttttgtatataagtctgtgttaaatctgtataattcagtcgatttcagttctgataatgttaagaataaccattatgaaaaggaaaatttgtcctgtatagcatcattatttttagcctttcctgttaataaagctttactattctgtcctgggcttatattacacatataactgttatttaaatacttaaccactaattttgaaaattaccagtgtgatacataggaatcattattcagaatgtagtctggtctttaggaagtattaataagaaaatttgcacataacttagttgattcagaaaggacttgtatgctgtttttctcccaaatgaagactctttttgacactaaacactttttaaaaagcttatctttgccttctccaaacaagaagcaatagtctccaagtcaatataaattctacagaaaatagtgttctttttctccagaaaaatgcttgtgagaatcattaaaacatgtgacaatttagagattctttgttttatttcactgattaatatactgtggcaaattacacagattattaaatttttttacaagagtatagtatatttatttgaaatgggaaaagtgcattttactgtattttgtgtattttgtttatttctcagaatatggaaagaaaattaaaatgtgtcaataaatattttctagagagtaaaaaaaaaaaaaaaaaaaaa

SEQ ID NO: 385 - DNA, 1815 bp, Homo sapiens
  misc_feature (201)..(201): n equals a,t,g, or c
gagatcacccgctacccactgctcatcagaagtattctggagaacaccccggagagccatgcagaccattcctccctaaagctggccctcgagcgggcagaggagctgtgctctcaagtgaatgagggagttcgggagaaggaaaactcggaccgactggagtggatccaggcgcacgtgcagtgtgaaggcctcgcgganaacttattttcaactctctcaccaactgcctggggccccggaagctcttacacagtgggaaattatacaagaccaagagcaacaaggaactgcacggattcctcttcaatgacttcctgcttcttacctacatggtcaagcagtttgctgtttcctctggctctgagaaacttttcagctcgaagtccaatgctcaattcaaaatgtataaaacgcccattttcctgaatgaagtcttggtgaactgcccacagacccttccagcgatgagcctgtcttccacatttcccacattgatcgggtctacaccctccgaacagacaacattaatgagaggaccacctgggtgcagaagatcaaggcggcgtctgagcagtacatcgacaccgagaagaagaagcgtgagaaagcttaccaagcccgctcccaaaagacttcaggcattgggcgcctgatggtgcatgtcattgaagctacagaattaaaagcctgcaaaccaaatggaaagagcaacccatactgtgaaatcagcatgggctcccagagctacaccaccaggaccatccaggacacactcaatcccaagtggaattttaactgccagttctttattaaggatctctaccaagacgtgctgtgtctcaccctgtttgacagagaccagttttcaccagatgatttcctgggtcgtactgaaattccagtggcaaaaattcgaacagaacaggaaagcaaaggccctatgacccgccgactgctgctgcatgaggtccccaccggggaggtctgggtccgttttgacctgcagctttttgagcaaaaaactctcctgtaggggttctaaaggacagcaccagcgggacagcccacaaggctggggctggagaatgagagactgcgctctcttggggctgagggagcaccatgcagcttcacccctcacaaagccatgcacgctgggggctctgttttcctgcacactaaatagctagcaatctatgcaaacacctttcccataaagaaaccaaaccccatagtacagtgccttgtcctagtgttcacatgttcagctctgtttgtttagatgccaaggtttccattttcagggctataaaaagtattacttggaaatgaggcatcagaccaccagatgttaccgctcggttgaatgtgtccaccgtggagtggtttggtgacgctgtaaccattccacgccagtgacctctgctgggtcacagccactcaggaggggaagggtcaggatgagagctgcagcctcgacacttgcgcggcctgatactgaaatagcgtctactcgtgcactgaataaaaacagaaacttgatcattttattcctgattagattttatcactctctgctaagacaatatagtctggagtataagtgggaaagcttgatttaaatactgtgaactctaataatgtggaaaatatttttcaactttaattttctgaagtataaattatttatgtaaattcattgtttttgcatatttcttaggacatgcatctttaagctttatcattgcccatatgtacagaaagagaataaagacatatgtttatggatggaamaaaaaaaaaaaaaaaaaa

SEQ ID NO: 386 - DNA, 550 bp, Homo sapiens
  misc_feature (483)..(483): n equals a,t,g, or c
gtatccccaggaggtcaacaggggcttcatttttctgagggactagagggtcttgtggagctcctgggacagagatctagatccagagagaacattcgtccttccgatctcagctcagctctgagagccctcccagagagcagctcccgagggctccagagcctccgaaagccctcccagagagcagcccccacctcccaggctgtctgcacttctccttgctatgctttgctctgtaacattttgcaacagtctgcagtacacggggtttgttaatctgagtattcattgtttctcttgctgggcagtgaacttgaggagggcagggattttgtctgttcactgctggrgycccagcacccaraatacttaaatctgagttggatgaatggcggccagccactgggattccagggctttgggccccctgccataacatatggcccarggcargcgccacatgctgggtcagtccccarcctnctgtycacaratccttctctgttctactccygggctgtktccttccaccctcaactcggttctcagg

SEQ ID NO: 387 - DNA, 3202 bp, Homo sapiens
  misc_feature (2957)..(2957): n equals a,t,g, or c
  misc_feature (3119)..(3119): n equals a,t,g, or c
  misc_feature (3192)..(3192): n equals a,t,g, or c
ctgctgaagaccttgtgagaagatctgagaaagatactgcagctgttgtctccagacagggcagctccctgaacctctttgaagatgtgcagatcacagaaccagaagctgagccagagtccaagtctgaaccgagacctccaatttcctctccgagggctccccagaccagagctgtcaagccccgacttcatcctgtgaagccaatgaatgccacggccaccaaggttgctaactgcagcttgggaactgccaccatcatcagtgagaacttgaacaatgaggtcatgatgaagaaatacagcccctcggaccctgcatttgcatatgcgcagctgacccacgatgagctgattcagctggtcctcaaacagaaggaaacgataagcaagaaggagttccaggtccgcgagctggaagactacattgacaacctgcttgtcagggtcatggaagaaacccccaatatcctccgcatcccgactcaggttggcaaaaaagcaggaaagatgtaaatcagcagaaaaaaaacaccgagacgtttctgtgacttcactttcacctgctccaggggtcaaggacttgccttgcctgataaccagccagcaggctccgaatcaccatctccctcacatgttatccggcaagagtgaattctaccaatggaagccaggttaatgattacaattaatcttttactgtacattcccaaggctttagttttaaatgccactgtgcctttaacaaggttgtaaatattttatgcccaccagagatgtggtcataagatctgatcctgagccagagattcagatggcacaggaagtattcatgtattttaacactggggttttctttctttcatactgagattttttttcagtatgtatcctccagctcttaaagcttacctgagaaagctttaaatgagaaaaggaccatgcgattggtgctgtgttacatacacatactttcttggcttctgagtagctcaggtgtggcttttggctgcagatgttaaattttgataccatgtaaacctacccagcttctcagacttgggtcttgttttttgatgggaacagaggtgtttagagaaagcctctgagtatgcctttcagattttgaacaagcggccttttctaaacatcgacttctactactctctagccttaaaataccttctgcttagatccagggcccttctactggagataggaaaagtagaattcaggaattaaaagaattactctttattcaatttgaggaacttggtgaaagcccctcctcttatgacagccaggttcctgctggctagaccagcctattcagcgctttgctaggggattgggtggtccacgcactcgctaatacagttctccaggtgtggaatgatgtcaatacgattgcttggccttttccccctgtgcctttgctcggtgctctggtttcctcagcaacactccttgtaaggggcagagacagggtccaccaactccccaagatgaagaagccccttcaggccagtcgtggtggctcatgcctgtaatcccagcactttgcaaggccgaggagggtggatcacttgaggtcaggagttcgagaccagcctgaccaacatggcgaaaccccatctctactaaaaatacaaaaattagcttggcatggtggtgcgtgcctgtaatcccagctactcgggaggctggggcaggagaattgcttgaacttgggagatggaggctgcagcgagccaagatcgtgccactgcactccagcctgggcaagagtttttttaagactcttaaaaaaagagcctgggcaatttttttaagactctgtcttaaaaaaaactaaaaagaaaaaaagaagccccttcactctacaggggacaggagaccatggattggaccccaaagggattgaactgcatctgcatgtctgtcctttgaacactttctctccctgcccaaaaggaaacccaaattatttgtgggatactggggaaattgtagtgaagggcttaatgtagttaataaaagttaaaagtcagtagaaaacaggtgcctcagccttcaaatggttgctttttttccattttccctcatgaatagactcaccagcattttacccccttgttataaaactgtgcagagcaagaagatgatacttatttttgaatttgtatttttaaaactagatttatagactttttttttttttaactagggcacttgcttccttcttagctaaaagcaccagctgagatttttcaggtaattttgttgttactcacttaagactggaattagaatgtttctggtatttctcatttttttccctggctatgatagaatctcatctaatcttgacatctctcctaggggaagaatatcacaggctaatagcgtggttgggggtgaagatgatagcagttattaaatcaggaatctcttttatgtatgtccttgttacattgaggttaagagacaaaatcattggcagtgcaatctctttccaggatttcgtttgctgtggcattggttatatcagagcactttaatctgaaggatgatactgtaacttgatttatctaattagcttttaattatctacagctattttattttatttaattctctcctacagtactgggaccactgtaaacttctcagatgacttgtatttttgtagtgctatgaaatttatttacatacttataaagaaaactgtatgttcacttgaactctgaaaatgtacatgtatggctggacgcggtggctcacgcctgtaatcccagcactttgggaggctgaggcgggtgaatcacttgattgaggtcaggagttcgagaccagcctggccaacatggcaaaaccccgtctctactaaaaaatacagaaattagctgggtgtggtggcagacagctgtaatctcagctgctcgggaggctgaggcncaagaatcgcttgagccagggaggtggaggttgcagtgagctgagatcacatcattgcactccagcctgggcaacgggcgagactctgtctcaaaaaaaagaaagaaagaaaaggtacatgtatatatttgtcctgcattatgttttttacttgatataaangtatttttactgtgatagtcaaaaaaaaaaaaaaaaaaaaaaactcgagggggggcccggtacccaattcgcnctatagtgaa

SEQ ID NO: 388 - DNA, 2401 bp, Homo sapiens
  misc_feature (179)..(179): n equals a,t,g, or c
aatatctcatgaatgagtttgaagtttgcttggattttgaaatgaatgggactttgtctttattactaattcaccaaatttgttgagcgcaaaagcaattaatgtagtttaagtatttagtatgtacagttctctgtgttaacagctgagaagtaagcaaccttttctgactgcatatnggtgtattcctcttttgagtccccataatattttataaattgtaatgccccatcttgtactacagttgtcttattcgtattgtttataaactttgagggttaggactgggtcttactcatctttatgtgccttccttatgcttcaaagaatttaccatctaatggaagagaacatttgcaagttggctccataccaagctccttccacatactctactcatctgaactttgaatgcagaatctttaaattgcaaccccacatactaaggtcaagaaagaacttaatgggaattaatctccacccattagctttaccctgacatcaggattgccaaatccaatggactcttgtctattcttacgtgacttctgctggaaaatgcgaatgttgaccatcctgccacttggaactctcttcccactcctcacattgcttttgctaccactggaagttccttctgtttcttgtggagtaccttttgctgtctgggacttgtagataatggtgtttcctagggctccctccagggccctctgcctcactaactggatatacttttcctgagcaaatcccaggaaacttgcgtcagaccgtgacttcaaatacaggttgataaatgctaaactgtctccaaaccagacttcatcctagcctccacacccagacacccaactgctatggatcaactttttagaatatcctcacttcaaactgaccttacctaaaataatgactttttcccccaataattgcccctgctatattccttatttctgaatggtacctcctagctatatagattatctgaggagcttactgaaatgctgattctgaagataaggggcatggctttaagattctgtatttctggcgagtacccaactggtgctcatgctgctgattgagaaccacttctgaatatagcaaggctgtaaattatccactacgtgccctcgtaattgtcttagttcaagcccagattattgtagtagacttagtatttctttgccttagttgatctgtgacccctccaatatctattccacactgttgcctaagtggccttagtaaaattcaagtctggttattttattcccctgcttggaatttctcaatgtagaatgaaactcattcagcattaacacataggcccttcttgatctgacatcgtgtttctctagttagactaaagaatccccactatgaagttgtttcatccgtaagtacctttgaacccagaagccccctttctcatatgtttctcattcctgtttgcccttcagagttcagctttagttgctaaaacattcagacatccctctgacttagatcccccactactgtttttctgtgagaagcagctatgcataattcctcttcaacacagtagttcttgaaattttgcaggcctctcctggaaaggaggaaatgacttctctgactttgtatgatgcttatttgtggatgaatgggcaagggaaaaaatgaaggaacaagtgaatgaacagtatgggagtatgagaaaaggtataaattgggtatagttgagaaaaggattcaaattgatctttggttcgagagacaatttcatctttctgatgaatttaaagtgtagtctttgaaccagctgggcttaattatgtaaagttttgagcctgagataagcacacaatcacaaaacctacccaaacaagttttttgtttcacttcatctcttataaaacaatgttctaaagtaagtgatagggatgctcatcattctgctacctattatcacaatgaaaacaatcataaatagtacacaggaaaggtgagaaatagcggatagttcttatttcatagtactgtatatggaaataaaccaaatttgctcatagagatactattttattacctcaaaaatatataaaaatgaaaacgttatgaaaatattttaaaatgggatttaaaaataattgagaacatcacagcaatttagaatactaaagagcatagctttaaaatgatagtgctgagaactccccacctctaccccaccacctgtaggcttctttgacaacttacaaatgttctctagtttgtatctagaatcacttatatctttcaaataaaccaactttgtgaacaaaaaaaaaaaaaaaaaagggcgggccgctctagaggatccaagcttacgkaaacgcgtgcatgcgacgtcatagctcttctatagtgtcaccta

SEQ ID NO: 389 - DNA, 852 bp, Homo sapiens
gcccacgcgtcgacccacgcgtccgggtcggtctcgccttgtcgccagctccattttcctctctttctcttcccctttccttcgcgcccaagagcgcctcccagcctcgtagggtggtcacggagcccctgcgccttttccttgctcgggtcctgcgtccgcgcctgccccgccatgaatgaggagtacgacgtgatcgtgctgggcaccggcctgacggaatgtatcctgtcaggtataatgtcagtgaatggcaagaaagttcttcatatggatcgaaacccttactacggaggagagagtgcatctataacaccattggaagatttatacaaaagatttaaaataccaggatcaccacccgagtcaatggggagaggaagagactggaatgttgacttgattcccaagttccttatggctaatggtcagctggttaagatgctgctttatacagaggtaactcgctatctggattttaaagtgactgaagggagctttgtctataagggtggaaaaatctacaaggttccttccactgaagcagaagccctggcatctagcctaatgggattgtttgaaaaacgtcgcttcaggaaattcctagtgtatgttgccaacttcgatgaaaaagatccaagaacttttgaaggcattgatcctaagaagaccacaatgcgagatgtgtataagaaatttgatttgggtcaagacgttatagattttactggtcatgctcttgcactttacagaactgatgattacttagatcaaccgtgttatgaaaccattaatagaattaaactttactactgtggaaagacaactgttttaataaaagatttacattcc

SEQ ID NO: 390 - DNA, 2014 bp, Homo sapiens
ggcatgttagtagacgactgaatatggaaaggatatcgagttatctattttgttaattttatttttgttttttatcatctagatttttatcatggattagtctgaaatttaaagttctggccagtcggttttctttcatcttgtagtttttacagtatttccactgtgcatatgcaaaatgggtattacataactgtatcatatttggtattgataattttttttttttttgagacggagtcttgctgttgcccaggctggagtggagtgcgtggtgtgatctcggctcactgcaaactccgcctcctgggttcaagcgattctcctggcccagcctyctgagtagctgggattacaggtgtgtgccaccrtgcccagctaatttttgtgtttttagtagagacggggtttcaccatgttggccggctggtcttgaactcctgacctcaggctatatgcccacttccacctcccaaagtgctgggattacaggcatgagccactgtgcccagcctggtattgataatttatattcagataatttgttatggctctttaatatcccacaaggggctctaaaaagcaaacattcaagagtatgtagtttttagacattaagttaattattttaaacagtgacagcaaaacacaagtgattaaatatagtttatttgttccaatgactaaattttacctcatttattaatctggtcattaaggaatatatttaataatattatgtaattattctttttatgcatgatacacctagaaaaatgccttttgtttctattgatggctttgttgtttggagctacttttgattacttattgcagtttcccaatttagtctttactttatctaactcacaaagtaaaattaactgatcacatggcaactactgtatttaaatagttctggaaaaatgaaagtgctttttgctgcttggtaaatgggtaatgcccttgattccttgactgtaggacatagctgatctaaagtactctgtcagttttaccttcacccatgactgtcattagttgtcaaagttgaaaagtactttagctgtgagaaatccttgtatgtttttattataagaggtataatcatcctcaaagcctgtttttattacatgatgtggactgattattttttctatcacagtgttaacagatggattttattgtaaatacaaagaaaacatattgattattgtagtattcttatgtcacctggccttttgcgtgagattatttattatttctagcaaggctttcttcctttcttattgcccagagactgactgatacatcttttgttatttttacacataaattaaacatagcctttttggacaaattcactaaatattaatgtataaaatgtaattgagtaaatttttatcagaattttaaaaataaaagagcttagactcagtagaactcagtagaagcttcactatttactccagcgtgtgtaaattgtacttactctattctcagagtatatttactgtccttaccattgattctttccctttgctaatttttttttttgttaatggtagctgcgactttaggtggggtatattttcttctcctaagagaatagacagtttttccagattcatcatcattgactgtcaagaaaggacccttcagcaaggctgtaccctcaatgcagttgatggcctgtcttcacggatttacagacttggcctgatgcccatgtaaattcaagctttggcttgtggtaacaaccacaagaagacaagcatctgtggtgcggaggcaagcaggctaactaggagttgacaagctaagaaagtgaaactgttctttcttagttaactgtctttctctggagctctgttattttgagtataatatttccacgacacttagtaaatgcaagctaaaatgtaataataataaattgtattggagaaacctaaaaaaaaaaaaaaaaaaaaaaaaaaaaaaaaaaaaaaaaaaaaaaaaaaaaaaaaaaaaa

SEQ ID NO: 391 - DNA, 565 bp, Homo sapiens
  misc_feature (1)..(1): n equals a,t,g, or c
  misc_feature (557)..(557): n equals a,t,g, or c
nggggtggggggccctaatggagaggtgtgggtttsgcragaaaraaagaaaattccccacttggaaagaaagaggaggaacactggattctwactttctggatcttracactgggctgcaaaacctaccttcctctctcccgcctcccctcaccctcaactctcaatgtcttgctgtcattttctgtctcggctccctcctcccccttcccccttcccccaccccacacccttcaccctctgtgtcctggtccttctgagggccactgcagatgactctcctttgaaatgagaaaaagaaaagaaagcaagaacagaaaacgaagccacaggaagggaagtagacattgtatgcttatggtttctcattatgaaggtgcagcttgtaggaggtttgtacggatgtgctttgaagttatgtatattacatataacaggaaaaaatattaaaataaacagtgctggtaagtatgaagctgacattctaaaattataattatctgactgtgattgatgtatcctgaggttcctagatcttactgaactggcccagcttnggagacct

SEQ ID NO: 392 - DNA, 131 bp, Homo sapiens
gtcgacccacgcgtccgcccacgcgtccgcccacgcgtccgcccacgcgtccgaaaaaaaaaaaaaaaaaaaaaaaaaaaaaaaaaaaaaaaaaaaaaaaaaaaaaaaaaaaaaaaaaaaaagggcggccg

SEQ ID NO: 393 - DNA, 2026 bp, Homo sapiens
  misc_feature (2026)..(2026): n equals a,t,g, or c
gggcgcgcggcctcgaggccttccggtgcgggagaaactactactcccataatgccccgcggtcccggagcttgccagtctcgtcgcgagaagcagcggcccggggcgactgagcggacaaacggaagtgtaggttacggtctgagacatcaccgccaagctgggcatcggggagatggccgagactgaccccaagaccgtgcaggacctcacctcggtggtgcagacactcctgcagcagatgcaagataaatttcagaccatgtctgaccagatcattgggagaattgatgatatgagtagtcgcattgatgatctggaaaagaatatcgcggacctcatgacacaggctggggtggaagaactggaaagtgaaaacaagatacctgccacgcaaaagagttgaaggttgctaataatttatactggaatctggcatttttccaagccaagagaagatcgaatggctttttgcagctaactactatgtgtagacaggttttatattataaagtatgcattcttatcacctagtatatagttagtttgtagagtgatttccccccagtttcttgaacatggtatcttcacatcttggaccttggtcagttgtgctattcattattaaacactaaaactttggcggttcttgcataacattgtcagattttttagtgtatttctgtgaagtcattttttttcttgtcattccttttgtagtagttgctgtttggataaaagttgatgtgtgattttttattaaacaaatagtaaacccttcaattatagttagtcttggtgaagtaagatgtttgtagactttagagttctttaattcttggcacaacgtgactgttgagctaacaccaaatagtgtgttggcaatacttttcaaatggctgaaaacacctaaaaattgttcattcagaaatatctgtcactgctctgttgccaaaactcagaatagaacttagacgtatgtctgagtccctgagatcacatgctaaagtcgatgaaaagtaaccactgccactgtcttgtgtcagaacttttacagtacagaaaataacagaatagccttctgtaatgaggcgtttgttagagttttgcatgagattctaatacttcagtaggaccctacctacgtggttcatctacaatggttaccataaaaaatctggcaggattttaaaactcaatcagtctttcctttgagctagtgacttgaaaagaaagagagaaggaaaagagaccatattaagtccatgccagttgcttggctagaatatgatcaacgacttgtagtagactcaagtttttaaaaaacactattttacttaaactgtttcttatctaaattcttgcagagtgtcaatgttatcattgattatagaagacagggataatacctttatctctggccactcaaaaatgcagtgccaggagtgctaaacctagaggccaatactgatgacctggaaggtgatccatatgattgtcaccacaaagtgcttttacacaaaaacttgaaaatttgaaaaacatgatttttttaagtttctcatctcaccagtcttggtrtttatattgcaaatctatcaaagtaagaaataatttgtgctgtatacaaattacatggggaacataaaggagtgagatccttctgtgataaaatgaattcaccactctggttacccaactacagaacctcctttgatcaggccagtaggttgtgatgcaggctggagcccccgaatgccccacacacactgcagcattgaccagaccatccgaaacctgcgtccctggtgatgttctcaagcctcggaagtggcaaatggaaatgatatggccggttgcggttgtaggagagttgtgacttaggcaggagtcgacctcctcaagtaatggaacgatttcaaaggcaggctgccctgaccaaaaatatctgccatgaataaaggtgcctgaaatcctgctaaaaaaaaaaaaaaaaaaaaaaaaaaaaaaaaaaaaaaaaaaaaan

SEQ ID NO: 394 - DNA, 1346 bp, Homo sapiens
  misc_feature (249)..(249): n equals a,t,g, or c
  misc_feature (251)..(251): n equals a,t,g, or c
  misc_feature (1334)..(1334): n equals a,t,g, or c
  misc_feature (1342)..(1342): n equals a,t,g, or c
tcgaccacgcgtccgcgcgcgcggcggcggcgaggcgaagaaggaggagtgtgtgcggcggggccgcgcgggtaaaggcgagaaggctgcaggagaccgagggggagccgggccggtggggccgccgccgccgccatgcaggaaatcatcgccagcgtggaccacatcaagtttgacttggagatcgcggtggagcagcagctgggggcgcagccmctkccscrgcagacacagcctccagcaaagcananaaccccgcaggtcatcggggtcatgcagagtcaaaacagcagcgcgggcaaccggggaccccggccactggagcaggtcacctgttacaagtgtggcgagaaaggacactacgccaacagatgcaccaaagggcacttggcctttctcagtggacagtgacagcagctggagccagctccgagcagcccgggggccccgctgttgggagtgtgcatttaactgtttcatgcgcttgttggcgcgactgtggctcgagctggcccgcagacacgtgggtttcatcactctgaggggccacgtctgttagtttcctatcattttgccttagtattttttgaaaaagggacatgtgtcctgtgggtccctgcagtcgacatcatgtttggctgggcatcgatgcctcctttctgggactcccggcacaactcccctcatccagggagggaggcagctgctggggaggggcttggctaggtagttctgtgtggcggtggtcattcccctcattaaacaccagttcttggtgacgccaggggctggtaggtcattcaaagctgtggccagctcacgcctgcttcctccctccctgccctgctgaatcctaaagctgtgcctatatctgtgatttgaatgagggagccctttggggcaaattcaggtgcccccattgcctcaggctggccctggtcccaggtggcagcggttgaggaggggtacagggctctcaagcctgaggttttcttctctgggcttaattttctcttggggtacgtgcctgacagtgtttaaggtgtccgttgaactggagttgcagacttttaaatagatgaccccttcagatcatctgtgcctacctcctgcccatcaggcgtctacactgtcactcagacacctgtggcatgtggaggagactgccctgtcctgagcctggaaaatgtgaaactgtctcctgcaacctgctgggcatgtgggcctggctgtgttcaattgcaagaacaatttttatgaaatggattaaagcttgttttttaaaaaaaaaaaaaaaaaaytcggggggggscccgtacccattggcccttggnggggggtnttaa

SEQ ID NO: 395 - DNA, 637 bp, Homo sapiens
  misc_feature (637)..(637): n equals a,t,g, or c
gcccacgcgttcgcccacgcgtccgcccacgcgtccgaatttcacgtttttatgtaagcatgaaacacaggcagtatgagagaaagcaaggcccgtcatgctgtccgtacactacgtatgctgtagagccattttgtatgttgtgtaaaacaaaaagcattgatgaaaaagcaaaaggtgatgtatgtatatgagaaaattaattgtacgatatcattccagtacgttttgttgtacattttagtcttgtttactttctcttcattgttaagaggatgcgaactgtacagtttccagctagttacccatattagagaagaaataagagagtattagaagaaaacaggagagaaagaacatttgtgaattgcagttgtcaaaaaaaaaaaatagcctagctggccttatttgtgaagcataattgcttttagcatatggaagtattttttcacattttctttgtataaaatttgtattaaacttaaatatctttttgatggtggtgtttctttgtgactgagccagtagactcacactatatgcttttttgggtttgcccgttccttcccccacccccccagttttttcagatttytttacctttttttaattaaactgttttggaaaaaaaaaaaan

SEQ ID NO: 396 - DNA, 862 bp, Homo sapiens
  misc_feature (723)..(723): n equals a,t,g, or c
  misc_feature (760)..(760): n equals a,t,g, or c
  misc_feature (780)..(780): n equals a,t,g, or c
  misc_feature (809)..(809): n equals a,t,g, or c
ggggcagttgccgcggcgcgcgcgatccggctgacgcatctggccccggttccccaagaccagagcggggccgggagggagggggaagaggcgagagcgcggagggcgcgcgtgcgcattggcgcggggaggagcagggatcttggcagcgggcgaggaggctgcgagcgagccgcgaaccgagcgggcggcgggcgcgcgcaccatgggggagaaacccgggaccagctcaccgtgtacttgggcaagcgggacttcgtagatcacctggacaaagtggaccctgtagatggcgtggtgcttgtggaccctgactacctgaaggaccgcaaagtgtttgtgaccctcacctgcgccttccgctatggccgtgaagacctggatgtgctgggcttgtccttccgcaaagacctgttcatcgccacctaccaggccttccccccggtgcccaacccaccccggccccccacccgcctgcargaccggctgctgaggaagctgggccagcatgcccamcccttcttcttcaccataccccagaatcttccatgctccgtcacactgcagccaggcccagaggatacaggaaaggcctgcggsgtrgactttgagwtcgagccttctgtrctaaatcactagaagagaaaagccacaaaaggaactctgtgcggctggtgatccgaaagtgcattcgccccggagaaaaccgggccccagctttanccgaaaacaaaaggcattccttcatgtctgaacggtncctggaacttcgaaggtttnccttggaaaaaggagctgtacttaccatnggggagccccttcaatggtaaaatgttccaagttaaccaaaaaaatttcaacc

SEQ ID NO: 397 - DNA, 585 bp, Homo sapiens
  misc_feature (375)..(375): n equals a,t,g, or c
  misc_feature (474)..(474): n equals a,t,g, or c
  misc_feature (573)..(573): n equals a,t,g, or c
gctgcaaacaaaaagaatgaagctcgactgagaattgtaaaaactcttgaagacattgatctgggccctactgaaaaatgtgtgagagtcaactcagtttccagtggtctggcggaagaagacctagagacccttttgcaatcccgggtccttccttccagcctgatgctaccaaaggtggaaagtcctgaagaaatccagtggtttgcagacaaattttcattccacttaaaaggccgaaaacttgaacaaccaatgaatttaatcccttttgtggaaactgcaatgggtttgctcaattttaaggcagtgtgtgaagaaaccctgaaggtcgggcctcaagtaggtctctttctagatgcagtcgtttttggnaggagaagactttcgagccagcataggtgcaacaagtagtaaagaaaccctgggatattctytacgcccggcaaaagwttkttgtcatagcgaaacctnttgggtctccaagccgtagatctgggtgtacattgactttcgagatgggagctggggcttgcttaggacagttcacggaggaagggagccgccatgggnttttcactgggt

SEQ ID NO: 398 - DNA, 591 bp, Homo sapiens
gtgatctgcatgtggcagggctgcgcagtggagcggccagtgggcaggatgacgagccagacccctctgccccagtccccccggcccaggcggccgacgatgtctactgttgtggagctgaacgtcgggggtgagttccacaccaccaccctgggtaccctgaggaagtttccgggctcaaagctggcagagatgttctctagcttagccaaggcctccacggacgcggagggccgcttcttcatcgaccgccccagcacctatttcagacccatcctggactacctgcgcactgggcaagtgcccacacagcacatccctgaagtgtaccgtgaggctcagttctacgaaatcaagcctttggtcaagctgctggaggacatgccacagatctttggtgagcaggtgtctcggaagcagtttttgctgcaagtgccgggctacagcgagaacctggagctcatggtgcgcctggcacgtgcagaagccataacagcacggaaktccagcgtgyttgtgtgcctggtkgaaactgaggagcaggatgcatattattcagaggtcctgtgtttttcttgcaggataagaagg

SEQ ID NO: 399 - DNA, 1096 bp, Homo sapiens
ggcagagcaagatgggggcttaccacaccatcgagctggagcccaaccgccagttcaccctggccaagaagcagtgggatagtgtggtactggagcgcatcgagcaggcctgtracccagcctggagcgctgatgtggcggctgtggtcatgcaggaaggcctcgcccatatctgcttagtcactcccagcatgaccctcactcgggccaaggtggaggtgaacatccctaggaaaaggaaaggcaattgctctcagcatgaccgggccttggagcggttctatgaacaggtggtccaggctatccagcgccacatacactttgatgttgtaaagtgcatcctggtggccagcccaggatttgtgagggagcagttctgcgactacatgtttcaacaagcagtgaagaccgacaacaaactgctcctggaaaaccggtccaaatttcttcaggtacatgcctcctccggacacaagtactccctgaaagaggccctttgtgaccctactgtggctagccgcctttcagacactaaagctgctggggaagtcaaagccttggatgacttctataaaatgttacagcatgaaccggatcgagctttctatggactcaagcaggtggagaaggccaatgaagccatggcaattgacacattgctcatcagcgatgagctcttcaggcatcaggatgtagccacacggagccggtatgtgaggctggtggacagtgtgaaagagaatgcaggcaccgttaggatattctctagtcttcacgtttctggggaacagctcagccagttgactggggtagctgccattctccgcttccctgttcccgaactttctgaccaagagggtgattccagttctgaagaggattaatgattgaaacttaaaattgagacaatcttgtgtttcctaaactgttacagtacatttctcagcatccttgtgacagaaagctgcaagaakggcactttttgattcatacagggatttcttatgtctttggctacactagatattttgtgattggcaagacatgtatttaaacaataaactaaaaggaaataatcwmmamrtaaaaaaaatgc

SEQ ID NO: 400 - DNA, 448 bp, Homo sapiens
  misc_feature (76)..(76): n equals a,t,g, or c
  misc_feature (132)..(132): n equals a,t,g, or c
  misc_feature (394)..(394): n equals a,t,g, or c
  misc_feature (439)..(439): n equals a,t,g, or c
  misc_feature (447)..(447): n equals a,t,g, or c
tcggaggacgcgaaccggcacgctgcgcctttaaggagtccggctgggctgggcgccggagctgggagccgcgcgngtaggagcccggcgcagggtcccagcccggggctagagaccgagggccggggtccnggcccggcggcgggacccaggcggttgaggctggtcaggagtcagccagcctgaaagagcaggatggatcttgatgtggttaacatgtttgtgattgcgggcggcacgtggccatcccaatcctggcatttgtggcttcatttcttctgtggccttcagcactgataagaatctattattggtactggcggaggacattgggcatgcaagtccgctatgttcaccatgaagactatcagttctgttattccttccggggcangcctgggcamaaamcctccatcctcatgctccacggattctcttnccacaagnt

SEQ ID NO: 401 - DNA, 1451 bp, Homo sapiens
  misc_feature (17)..(18): n equals a,t,g, or c
  misc_feature (1429)..(1429): n equals a,t,g, or c
  misc_feature (1440)..(1440): n equals a,t,g, or c
gtcgacccacgcgtccnnccacggtccggtggggagaagccgggaggactgggtgcgcctgcagggatcggaagccggttggggtgtgagaggttttctcgctctagggagattcttcaagcaatcactatgtcaacagacacaggtgtttcccttccttcatatgaggaagatcagggatcaaaactcattcgaaaagctaaagaggcaccattcgtacccgttggaatagcgggttttgcagcaattgttgcatatggattatataaactgaagagcaggggaaatactaaaatgtccattcatctgatccacatgcgtgtggcagcccaaggctttgttgtaggagcaatgactgttggtatgggctattccatgtatcgggaattctgggcaaaacctaagccttagaagaagagatgctgtcttggtcttgttggaggagcttgctttagttagatgtcttattattaaagttacctattattgttggaaataaactaatttgtatgggtttagatggtaacatggcattttgaatattggcttcctttcttgcaggcttgatttgcttggtgaccgaattactagtgactagtttactaactaggtcattcaaggaagtcaagttaacttaaacatgtcacctaaatgcacttgatggtgttgaaatgtccaccttcttaaatttttaagatgaacttagttctaaagaagataacaggccaatcctgaaggtactccctgtttgctgcagaatgtcagatattttggatgttgcataagagtcctatttgccccagttaattcaacttttgtctgcctgttttgtggactggctggctctgttagaactctgtccaaaaagtgcatggaatataacttgtaaagcttcccacaattgacaatatatatgcatgtgtttaaaccaaatccagaaagcttaaacaatagagctgcataatagtatttattaaagaatcacaactgtaaacatgagaataacttaaggattctagtttagttttttgtaattgcaaattatatttttgctgctgatatattagaataatttttaaatgtcatcttgaaatagaaatatgtattttaagcactcacgcaaaggtaaatgaacacgttttaaatgtgtgtgttgctaattttttccataagaattgtaaacattgaactgaacaaattacctataatggatttggttaatgacttatgagcaagctggtttggccagacagtatacccaaacttttatataatatacagaaggctatcacacttgtgaaattctcttgtctaatctgaatttgcattccatggtgttaacatggtatatgtattgttattaaagtaagtgacccatgtcaaaaaaaaaaaaaaaaaaaaaaaaaaaaaaaaaaaaaaaaaaaaaaanaaaaaaaaaanaaaaaaaaaaa

SEQ ID NO: 402 - DNA, 1425 bp, Homo sapiens
  misc_feature (45)..(45): n equals a,t,g, or c
  misc_feature (94)..(94): n equals a,t,g, or c
  misc_feature (1378)..(1378): n equals a,t,g, or c
atctaagggaacttctacggaagtccctaacaccatatttgcggntatatgcgatttcaggttggataaacgagtcatgttgaatgacaaaaanttagactgttgagatttatggagagaagcaagcacctgtgatttgttggtttggcgttacaataaacactgtaagtgaaaatgagtcacaggcagttagaatggcgttaaggaaaccatttaggtctaaaaatcaggactgaagcgatcmacagttaacagatgaagccatgagaactggcacgctctggaaaggctggtgcagagagcaggacggtgagcctgagtgagcctggagttagtcaacagattcytcaacagaaaaggagtgaggagcagggtcaaagaaatgaaggtgaatttgggggktggtggtcaatgggttaaacgtacaagttgaggccgaggaactgaggctgaagaaggttctggcaagtggagaaccatgagatcctgacagagcaggcttttgtgggcagaagccatattagaagaagagctaaaggaaagctgaaaacctggcgamgaaaaggaagccaagaacataggagatattttgacaaaacggaaaaacaacagaacaggaagtgaggcaggagaaccacagagatggaagccaggaggtgtccaattagacgggcacaagagaaaaacagccagagaccgagaaaacggcgggaaggaaaggttccatctggagaaaaaagcctctcaagactggaagggacaggagctggtgaccatgaagcagttcagactcagctctgagccccttgtgtggaccacaagcagcactgcaaagtcctcgctgtagagagaagaccatagatgcacacagacggggttatcccttgaaaccagatccgggaagccatcagtcaaaaagcctgtgtggtcacagatgcttactggtggttcctgaaatgagtatttctaggcagggggcttcagtataaaccagatgtgtgctagctgggtggacttcaagtaaggagtcaagacaaaacacttagagtgaccttttggccactgctgtgtctgcaggctcagcctgctctagatctgattcccacagtggagggacaaagggccagcagcttgtaggaccaaatgagaaaaatacataatcattatgttttagccagaaaaaggcaacttgattatgaactggatgacatatcaaatgcaaggccttaaaatgcattcactctaataaactgctctgtagaattcaagggaatgaaatccgcttctcatacgtaccaaggaccaactgctttgaatcttccactgtggatgatggcaactggtccttttaggagagccattttccagacagtcttgnctttatttatttattttttaattgttagtagcttttacttattaact

SEQ ID NO: 403 - DNA, 4755 bp, Homo sapiens
  misc_feature (124)..(124): n equals a,t,g, or c
  misc_feature (2562)..(2562): n equals a,t,g, or c
agcggcggccagtggaaccacatgcttggctacctggcggcgctggccaaggcctgcttcggcggcaacatcgagctcttcgtcttcttcaacggcgcgctcgagaaaggcccggctgcacgantgggtcaagcggcagggcaacgagcgccaracggcacagcagatcgtmagccatgtccagaacaagggcaccccgccgccaaaggtctggttcctgccgcccgtytgcatggcccactgcatccgcctggcgctcatccgcttccacgtcaaggttgcacagagcattgaggatcaccatcaggaagtgattggtttctgcagagagaatggtttccatggcttggttgcgtatgactctgattatgcactgtgcaacatcccctactatttcagtgcccatgccctaaaactgagccggaacgggaaaagtctcaccacaagccaatatctgatgcatgaagttgccaagcaactggacctgaatccaaatcgttttcctatttttgctgctctcttaggaaatcacattctgcctgatgaagatctggcttcctttcattggagtttacttggtccasaacatccactagcctcactaaaggtccgggcccaccagctggtcttgccaccttgcgacgtagtgatcaaagccgttgmtgactatgkacgcaacattyaggacacctctgacttggatgccatagctaaagatgttttccagcattcacagtctagaacagatgacaaagttattcgatttaagagagcaattggatattattcagcgactagtaagcctatgtcatttcatccaccacattacttagcagccagacccggtccgtttggaatgcctgggatggtgccgccgcatgttcctcctcagatgctcaacattccgcagacctctctgcaagcaaagcccgtggccccacaggtgcccagcccaggggggcgcccgggccagggtccatacccgtacagcctctctgagccagcacctctcactttggacacgagcgggaagaatctgacggagcagaacagctacagcaacattcctcacgaaggaagcacacgccgctgtatgagcggtcctcgcccatcaacccggcccagagcggcaccccaaccacgtggattccgcctrcttccctggctcttctacatcgtcatcttccgacaacgacgagggcagcggaggggcgacaaaccatatcagcgggaacaagattggctgggagaagacgggaagccactcagagcctcaggcacgaggagacccaggagaccaaacaaaggcagaaggctcgtccactgcctcttcaggaagccaactagccgaagcaagggaagccagatgggcactgtccagccaatcccgtgcctcctgtcgatgcccaccaggaaccacatggacatcaccacacctcccctgccccccgtcgcacctgaggtgctgagagtggccgagcacaggcacaagaaggggctgatgtacccctacatcttccatgtcctgacgaagggtgaaatcaaaattgctgtttctattgaagatgaagccaacaaggacctgcctccggccgctctgctctataggccagttcgtcagtatgtttacggagtcctgtttagtttggcagaaagcagaaagaaaactgagagacttgcttttagaaagaacagacttccaccagaattttcaccagtgatcattaaagaatgggcagcttacaaaggaaagtctcctcaaaccccggaactggttgaagctcttgccttcagggagtggacctgccccaacctgaagaggctgtggttgggtaaggcggtagaggacaagaaccgcagatgagggccttcctggcctgcatgaggtcggacaccccagccatgctcaaccctgccaacgtgcccactcacctcatggtgctctgctgcgtcttacggtacatggtgcagtggccgggagcacgcatccttcggcgtcaggagctagatgccttcctggctcaggcgctgtcccccaaactctacgagcctgatcagctccaggagctcaagattgagaacctagatccccgaggaattcagctatcagctctcttcatgagtggagtagacatggccttgtttgcaaatgatgcatgcggacagccaatcccctgggaacactgttgtccttggatgtattttgatgggaagctcttccaatccaaactcctcaaagccagccgggaaaagaccccactcattgacctctgtgatggtcaggctgatcaggctgccaaggtagagaagatgcgccagagcgtcctcgaggggctcagcttctccaggcagagccacacgctccctttcccgccgccacctgccctgcccttctaccctgcctctgcgtacccccggcactttgggcctgtcccaccctctcagggcaggggcagaggctttgcaggcgtctgtggctttggaggcccctatggggaaacggtagcaacaggcccttaccgtgccttccgtgtggcggcagcatcgggacactgcggagcnttctcaggcagtgacagcagcaggactagcaagtcccagggcggagtccaacctataccttctcagggaggcaaactagaaatagctggcactgtggttggccattgggctgggagcaggcggggccgtgggggccgggggcctttccccctgcaggtggtttctgtcggaggaccagctagagggcgtccaagaggagttatttccaccccagtgattagaacatttggaagaggtggaaggtactatggcagaggttacaaaaaccaggcagcaattcagggcagacctccttatgctgcttcagcagaagaagtggccaaagaacttaagtcaaaatctggggaatcgaagtcctctgctatgtcttcagacgggtccctggctgaaaacggagtgatggccgaggagaagccggctccccagatgaacgggagcacgggtgacgccagggcccccagccactctgaaagtgccttgaataatgactctaaaacgtgcaatacaaatcctcatttaaatgcactaagtacagacagcgcttgccgcagagaagctgctctggaggcagctgtcttaaataaagaagagtaaacttattttttatagagggtgaaggatgctggaagggtaaggatttaggaatatctggagagaaagagagcctgcagttatgtacattttgtcctttccgtaagagaaaaatgaggactttggaaattcagatccctctttgatatcagagatttaaacaacacatttttagttttaaccagttgtagtcaaaatgctacaataaaacaaaaaagagaaagaaaatgaagagcatttgactcccgcacttaaaatgaagtacacataaagtttaaactggttatgacaaaagcctatagttgtgtttcttgaactataaagaaaacaaattttggcagtctttaagtatatatagcttaaaatataatttttagcatttggcaccatatgtatgccattatatttgattttgcattactgtttcacaatgaagctttctttaaggctttgatttttatgattatgaaagaaataaggcacaaccacagtttttctttcttaaatttcatcactgttgatgtggttcttttgtgttaaaaaaaaaaagtgcaactatcaaaactaaaaaattatagagtaatattgccgttctgctgattttaaatatacaatacatcatacatactttacaagcaagttaaatggagataaagttgaaatcatagaagatgcaaatgacctttcaaaatcaacacaatgtgttctgaaactttcgtgactaataccatgcatctgtgatcaatgaactatgtggttttgaatcggatgtagaccattagtactactacttgagctaaacttctgcatggttcataatttttaaagtgtgtagttaatatgcatgttatcgtcctttcttccattcttaacagtatgtgcccatttgcaaaacaaaaatgctaataatcagtaatagtcctataaaagatgttaactctgtttagtcattgactgatcttgctctaaccttaaaattttgtgattattgacctctgttgcatttattctaaagccccccaaaaattatctagccgtttcgaatatcaacattaccctggtgtattcactgctgtatgcattattgttctttgttgctgttttatgccttcatattagcaaatatgaaattctgtgaaaaaaaaccctttgatcttaaaaaaaaaaaaaccaccccccccttctgtagcaggaaacaaattgcttgttcttgagaactttcccatcaagaatttagtagaagcaggtatacttctatcattttgatgtttttgttaatgtttccaaacaatgtactttgaaatcagaatcacttcttatcgttttcatatacttctgatgctcttcatcacattagtgatcagaaatgaggtgtaattccccaacccctgcccgcaagagctaagtaggatcttactgtaagttgaagggagttttgccctaactcatggattgtgcaagaatgaactgctgttgggtttgattgactgtcgatggattgtggtgtggtgtatctgaaggctattgaatgcaacttacaatgcttaataaaaatctttattcttttagtataaaaaaaaaaaaaaaaaaaaaaaaaaaaaa

SEQ ID NO: 404 - DNA, 3039 bp, Homo sapiens
aaaccggaaagtttgtaggaaaattgctgcacatggcctttgcagaaaagagagccttcaaaacctcttacattccagtagaaaactctctctgcaagtccttaactttgttcactcattccaggaaggtgcttcaatattggatattcacacagagcccagtttttcaagtttgctttcacagtcatcgtatgctgacatgggtgttccacttcctgcaaaaaacttaatatttaaagatggtgtcttatcagaatggagtggacggtcaccttcctcacttcttattgctaatctccatttgcaataatttggttacaccatttgttgctcacactttctgccttttttctttcttaacgttagctttatagtgtcagccactaaaaagcatcctgctgctgcagtgcaattcttgcttaactaatattaaaagttggggaacatattcatgttttctgaagttttgctcattattgcacatcttattgcgacaaagtgctttttagcagccagcactgtattttttaccttgagacaatctgcatttcttttataaaactaagtatatactttataggctttatgatgactgttatgtttataagcagtcactatgaaaattgcaatggtaattttatatgttagtttatcaaacataaatcttgtttaattttatattttgttacctatactttgggggatcaagggaagagatggaactcttcctctgaaaaggcttcttggtacttaaagtagtaaaactataaaacaataaacatccagtattgagagatgatatgatagggcattatgaattcctatgggtgtctgtaaattatgtatgtcagttggacattgtagaaggtatgtaaatcagcatagttgtgtataacttaaccttgatttataaggtcttaagattatgactattcattgacatctcatgagaagctttagaagactttctatttttaaacaccatttatatgtggacttctgttgtcactgactttgggctttatattttcatagagtctttatggaaaaaatagaatttattttccactcttgtagctatagctgctgcacactttcaccctgatttatttttttgtttcttagctttgatgttttcaaaccaaggattgtgattttaggttagaattacatattagaagcattaagactatgtctttggatcagaatgctttagtgataaacctactttgaagacatactcttaagcaatctggatcttaaatttatgtgaatacttttttagaaaatgataaagaaaaatggaattacttcaaagtgtttcttgagtcattgattcttttagcatctcaaatgttaattagaataattggaatcactttttagacttttcaagttaccttccttgggaagtttgtgcagtgttatagtttagtttagctcctcttacagggtaatggtttgctagtttaaaactgtaaccaaacgaactggtcagacaacatatatctaaaacacttaaaatgttaggaagtttgggaatgttataacctaaacgtttttgctggtaactttttgttatttatagatatttgtgtatttaacatacatacttcaggaaatatatgcctttcctaaaacttaaccatgcattcaataccatggcctatctatagaattgaatattttggaccatgttatctgtggcacagtcagtgctgtgtttgaggtaaatgcagtaacggttagttttctactttgtcttatagaaggtagaaaccatgtgtatgttatgtttgtctataaaagaaaaaatactaatattaaataatttcttacgactctgagtcactcacttatttttccaataattgatattgtacattcctagtgccattaggtatgtatgtatgtaacttttacagtttttcagctgaaagttgtaagtattttttttttttgatcggggctctttaatctcattttaatttcctttgtttgaactgtagttatttattcctatattaaccatctaaaccaactgtaatgacatgtacactaatacagaattgaacatttgtagttgttggcagtgaacccagttgttggtgaatttaaagcttaaaatatgggaatgatttgctgctatatttcctttgagagagaaaggaggaagaaatagaacctaatagtgatcatgaattttagggaaagtaccgaagaaccatggggtcccctctggtttcttgtgttgaatgaggcaagggtaatcatctgattccgagctgaagacctctggtcctcttaaggagggagagtgcatttttagagcttttagcaaaatgtgaaaagctgatgtttgcgccttgctttgtgaatttggctttgttttacttatacattaactcatgtaatctcttaaatcttacaagcattgatccatttcaacaaaaaggtaaatttaaaatgcagactttgttatttgccaaagaagattcatgaaaaatttacgtccaattattttgcaaatagttaatttcatttggctttttaccatgttccttcctttctttttcccgcttccttaatgtaatttaaaccctggcaaacattctttagaaaccaagaggaaagaaagaacaaatatcaaaaaagacatagaatttaatattgatacaatttcacctctaaaatggatttgaagaaatgcaactttatatcaaaaaatgtcatctgatttcctttgtttcttttttaaattatgtaatcagatgattttatgtttttttttcaggggagcggaatattggtttcttttacttgttgttttcagttttctctgccattcakgtttcttttttgtgttcagtgtttcaaatacaatttgtatttaaggattttaaaataccaaactgtaactgagtacagtggatcgtwttctgttaggatgttaatattatacaatgaaatctataaagtgwtgtcaatwwgattattgacacatataacatgtwtacaaataaamtgtggtawtgatca

SEQ ID NO: 405 - DNA, 3276 bp, Homo sapiens
  misc_feature (3258)..(3258): n equals a,t,g, or c
  misc_feature (3260)..(3260): n equals a,t,g, or c
  misc_feature (3262)..(3263): n equals a,t,g, or c
  misc_feature (3270)..(3270): n equals a,t,g, or c
aaaggatgaagaggaagagcctcccagcatgactcagctacttcgaagagwagrgctgtcttgccacagacccggtatgtggagtgttcattgtcgtagcaaggaarggtrtgacatgatgggaagaaatcagactgctgtgagagaagagatgwttctcctggcaaactacttggatagtatgtatatkatgttaaatattcgaattgtgctagttggactggagatttggaccaatggaaacctgatcaacatagttgggggtgctggtgatgtgctggggaactkcgtgcagtggcgggaaaagtttcttatcacacgtcggagacatgacagtgcacagctagttctaaagaaaggttttggtggaactgcaggaatggcatttgtgggaacagtgtgttcaaggagccacgcaggcgggattaatgtgtttggacaaatcactgtggagacatttgcttccattgttgctcatgaattgggtcataatcttggaatgaatcacgatgatgggagagattgttcctgtggagcaaagagctgcatcatgaattcaggagcatcgggttccagaaactttagcagttgcagtgcagaggactttgagaagttaactttaaataaaggaggaaactgccttcttaatattccaaagcctgatgaagcctatagtgctccctcctgtggtaataagttggtggacgctggggaagagtgtgactgtggtactccaaaggaatgtgaattggacccttgctgcgaaggaagtacctgtaagcttaaatcatttgctgagtgtgcatatggtgactgttgtaaagactgtcggttccttccaggaggtactttatgccgaggaaaaaccagtgagtgtgatgttccagagtactgcaatggttcttctcagttctgtcagccagatgtttttattcagaatggatatccttgccaraataacaaagcctattgctacaacggcatgtgccagtattatgatgctcaatgtcaagtcatctttkgctcaaaagccaaggctgcccccaaagattgtttcattgaagtgaatyctaaaggtgacagatttggcaattgtggtttctctggcaatgaatacaagaagtgtgccactgggaatgctttgtgtggaaagcttcagtgtgagaatgtacaagagatacctgtatttggaattgtgcctgctattattcaaacgcctagtcgaggcaccaaatgttggggtgtggatttccagctaggatcagatgttccagatcctgggatggttaacgaaggcacaaaatgtggtgctggaaagatctgtagaaacttccagtgtgtagatgcttctgttctgaattatgactgtgatgttcagaaaaagtgtcatggacatggggtatgtaatagcaataagaattgtcactgtgaaaatggctgggctcccccaaattgtgagactaaaggatacggaggaagtgtggacagtggacctacatacaatgaaatgaatactgcattgagggacggacttctggtcttcttcttcctaattgttccccttattgtctgtgctatttttatcttcatcaagagggatcaactgtggagaagctacttcagaaagaagagatcacaaacatatgagtcagatggcaaaaatcaagcaaacccttctagacagccggggagtgttcctcgacatgtttctccagtgacacctcccagagaagttcctatatatgcaaacagatttgcagtaccaacctatgcagccaagcaacctcagcagttcccatcaaggccacctccaccacaaccgaaagtatcatctcagggaaacttaattcctgcccgtcctgctcctgcacctcctttatatagttccctcacttgatttttttaaccttctttttgcaaatgtcttcagggaactgagctaatactttttttttttcttgatgttttcttgaaaagcctttctgttgcaactatgaatgaaaacaaaacaccacaaaacagacttcactaacacagaaaaacagaaactgagtgtgagagttgtgaaatacaaggaaatgcagtaaagccagggaatttacaataacatttccgtttccatcattgaataagtcttattcagtcatcggtgaggttaatgcactaatcatggattttttgaacatgttattgcagtgattctcaaattaactgtattggtgtaagatttttgtcattaagtgtttaagtgttattctgaattttctaccttagttatcattaatgtagttcctcattgaacatgtgataatctaatacctgtgaaaactgactaatcagctgccaataatatctaatatttttcatcatgcacgaattaataatcatcatactctagaatcttgtctgtcactcactacatgaataagcaaatattgtcttcaaaagaatgcacaagaaccacaattaagatgtcatattattttgaaagtacaaaatatactaaaagagtgtgtgtgtattcacgcagttactcgcttccatttttatgacctttcaactataggtaataactcttagagaaattaatttaatattagaatttctattatgaatcatgtgaaagcatgacattcgttcacaatagcactattttaaataaattataagctttaaggtacgaagtatttaatagatctaatcaaatatgttgattcatggctataataaagcaggagcaattataaaatcttcaatcaattgaacttttacaaaaccacttgagaatttcatgagcactttaaaatctgaactttcaaagcttgctattaaatcatttagaatgtttacatttactaaggtgtgctgggtcatgtaaaatattagacactaatattttcatagaaattaggctggagaaagaaggaagaaatggttttcttaaatacctacaaaaaagttactgtggtatctatgagttatcatcttagctgtgttaaaaatgaatttttactatggcagatatggtatggatcgtaaaattttaagcactaaaaattttttcataacctttcataataaagtttaataataggtttattaactgaatttcattagttttttaaaagtgtttttggtttgtgtatatatacatatacaaatacaacatttacaataaataaaatacttgaaattctmaaaaaaaaaaaaaaagggggggccgttttaaagggacccaggtttacgaccccggctgcnangnnaaacctnttttat

SEQ ID NO: 406 - DNA, 1632 bp, Homo sapiens
ggcagagtggaagaggggccttatgtgaatgattgccacatactgtttctgttgctgctttttttccgattcctttttgtcattggatttgtttgttttgtcatgtggtgaatggtgttttagttattgtgttgctgccagaatcagaatccagttcttgttcttactgccttatagttattgtgttgccaccagaatcagaatccagttcttgttcatactgccttgtagtgagggcagtttaatatctacaaagaagcttttagaagctgaaaaagtcaatgtgattgtgcattctgcttttaagaagctgtttcagctatgaactgtgtatgtgctataagtgtgaggtaccataagttatttaatttttaaaagaggaaactcctgagtgagctgtttaagaaatctgagtgtgatctattgttacgttatttataactaggtaaaatgtctgtcgtgatagatttcttttaacgttcagatactgtggttgggttgtctatatttaatatgcagatttgcctgctggaatcataatccatttttaagtgaatgtaagaaatgaaaactactgcatttgtgtcttttgaaggcaaggatccttggattttaaaggaagagtatgtgctttgaaggcactcagagactagtaatagcatatggtttgaagggaaacccattctctttcaattacaagagagcatcacttagcgtgcagtacttctgttacagcatccgatgtgtcctttattttaaattgtaaccataacagccattaatggctttatttcttgtattgctctcatctgggaaaagtctctacttcttcaaacgtaacataaatctattatgaagcttgtcccctagtatgccattataaagaaaaaattcttcgatggtatgcagtgtatctattctgtttgtaaaagatcatgtcaaaatgttctgcctctataatgataatagatggttttgtctttcaggatatttatccacctactgtcttctttgccttaaagggacacttggccatcatttttaggctcgaacttaacactgttaagaaataactgaaatatgatggtatttacattaatttttgaaattcaatggtgggatagaattaggtcaggaaatggaagttgttccaatggtgtgagaactaggagacaagatgattcactttattatttaaaccaagcttcatttttagtttttgttgtttaaatggactggaaagttaagtttttgcagggattgttttgaaataaagagatatgctaactcacagatgaactttgttaagacccctttatttttatataaagtctaatatttgaaaagcgattgttataaagtaaaattctctcttcctattctaatatatatcatatatttcaggcttctatttgaaaacaggtataagagatgatatgatacaaccctatagataatgttttttgcttgattgacttatataatcactgtttcatgattactgcttttggaataataggaagttttgtgaaatgctggccttgtgtatatcttagaatgcaaatttaataaagtgtgtatacatgcataaaaaaaaaaaaaacctcggccgcgaccacgctaagccgaatt

SEQ ID NO: 407 - DNA, 808 bp, Homo sapiens
gaacaaaagctggagctccaccgcggtggcggccgctctagaactagtggatcccccgggctgcaggaattcggcacgaggtgtcatgaatagaaacttccaaatgtaaccatggaagctaagtttggcctgctttgctttttagtctccacaccatgggcagaactgctgtctttactacttcatctcacccaagtcccgttcccaggcagccaggggcctgggtttgaataattgcagggccagcctgccatgatctttctcacttactcctctcccattcagcaatcaaccagactaaggagttttgatccctagtgattacagccctgaagaaaattaaatctgaattaattttacatggccttcgtgatctttctgctgttcttactttttcgaatgtagttggggggtgggagggacaggttatggtatttaaagagaataaacattttgcacatacatgtattgtacaacagtaagatcctctgttaaaaccagctgtcctgttctccatctccatttcttcccatgctgtaaccccaggctccaccagctgttccccagtgatgttacctagcttccctctaccgttgtctactgaccatttccactacatgcctttcctaccttcccttcacaaccaatcaagtgaatacttgattattatctcttccttactgtgctttatcttttttgtttggattggttctaattaatgaaaataaaagtttctaaatttacatttttatagggtattgtaaataaaaacaaattgtatacttaaaaaaaaaaaaaaaaaaaaaaa

SEQ ID NO: 408 - DNA, 2428 bp, Homo sapiens
  misc_feature (1025)..(1025): n equals a,t,g, or c
aattttcagaggttcagattgcacttaatgaagctaagcttagtgaagagaaggtgaagtctgaatgccatcgggttcaagaagaaaatgctaggcttaagaagaaaaaagagcagttgcagcaggaaatcgaagactggagtaaattacatgctgagctcagtgagcaaatcaaatcatttgagaagtctcagaaagatttggaagtagctcttactcacaaggatgataatattaatgctttgactaactgcattacacagttgaatctgttagagtgtgaatctgaatctgagggtcaaaataaaggtggaaatgattcagatgaattagcaaatggagaagtgggaggtgaccggaatgagaagatgaaaaatcaaattaagcagatgatggatgtctctcggacacagactgcaatatcggtagttgaagaggatctaaagcttttacagcttaagctaagagcctccgtgtccactaaatgtaacctggaagaccaggtaaagaaattggaagatgaccgcaactcactacaagctgccaaagctggactggaagatgaatgcaaaaccttgaggcagaaagtggagattctgaatgagctctatcagcagaaggagatggctttgcaaaagaaactgagtcaagaagagtatgaacggcaagaaagagagcacaggctgtcagctgcagatgaaaaggcagtttcggctgcagaggaagtaaaaacttacaagcggagaattgaagaaatggaggatgaattacagaagacagagcggtcatttaaaaaccagatcgctacccatgagaagaaagctcatgaaaactggctcaaagctcgtgctgcagaaagagctatagctgaagagaaaagggaagctgccaatttragacacaaattattagaattaacacaaaagatggcaatgctgcaagaagaacctgtgattgtaaaaccaatgccaggaaaaccaaatacacaaaaccctccacggagaggtcctctgagccagaatggntcttttggcccatcccctgtgagtggtggagaatgctcccctccattgacagtggagccacccgtgagacctctctctgctactctcaatcgaagagatatgcctagaagtgaatttggatcagtggacgggcctctacctcatcctcgatggtcagctgaggcatctgggaaaccctctccttctgatccaggatctggtacagctaccatgatgaacagcagctcaagaggctcttcccctaccagggtactcgatgaaggcaaggttaatatggctccaaaagggccccctcctttcccaggagtccctctcatgagcacccccatgggaggccctgtaccaccacccattcgatatggaccaccacctcagctctgcggaccttttgggcctcggcacttcctccaccctttggccctggtatgcgtccaccactaggcttaagagaatttgcaccaggcgttccaccaggaagacgggacctgcctctccaccctcggggatttttacctggacacgcaccatttagacctttaggttcacttggcccaagagagtactttattcctggtacccgattaccacccccaacccatggtccccaggaatacccaccaccacctgctgtaagagacttactgccgtcaggctctagagatgagcctccacctgcctctcagagcactagccaggactgttcacaggctttaaaacagagcccataaaactatgacctctgaggtttcattggaaagaaagtgtactgtgcattatccattacagtaaaggatttcattggcttcaaaatccaaaagtttattttaaaaggtttgttgttagaactaagctgccttggcagtgtgcatttttgagccaaacaattcaaaaatgtcatttcttccctaaataaaaatcaccttttaagctagagcgtccttacaactttgaaatgtgcaataaagaatacctgtgttttagctaatgtagcatatgtaattgcaaaatgatttagaatgtcatgaaaaatatgaacatttcctgtggaaatgctttaagaacatgtatttccattatcctatttttagtgtacaccagctgaatacggagcaatggtgtttataagcgtttttttaaactatctggtcacaaagactgttacgctaaaaatgtttactaaaagatcactaaactatctcccctcttgctgaagttctttgtagtaatagctcataaaaatttgtttattaatatttcccaagtgtctgttgactcattgggactgttatgaggcttgtgccatttgggggaacatgtaaactcaggctcccrgaactgaagrtggtggctggtgggcacattccggctgctcctccgtcacctgtggaactctacaagtgatt

SEQ ID NO: 409 - DNA, 2732 bp, Homo sapiens
  misc_feature (699)..(699): n equals a,t,g, or c
gtgtaaatatgccttatacttctgctggaaacagctaacagacagggtaataatagcctaggttcccccaaagtactgtacaagaagataagttatattcacctagcgggaaaaaaagtgggctaaactagctccagagaacttgtgaattctttgctaaaggctctttgttttaggcatttgatgaagcaattgctgaattggatacgctgaatgaagagtcttataaagacagcactctgrtcatgcagttacttagggacaatctcactgtaagtactacttccacagggtttatagtctctttcctattcacctacttaataattcactgttatcttcaagaggggatttgtaccattaaatgtagttacagttttaagttgttaaatttgttataaatgactgctgaagttttgacctttgcaatcatccctatctgcagtgacacaggaataattttaaactgtcgagtgagataagattatacatactgggccacttacctagggaacttttagtagccctgctttgattatacttcctttctcttgcagctgtggacatcggaaaaccagggagacgaaggagacgctggggagggagagaactaatgtttctcgtgctttgtgatctgttcagtgtcactctgtaccctcaacatatatcccttgtgcgataaaaaaaaaaaaaaaaaanagaatcgtacgtcgactttcgatttttcacagcctcagcctaggaaaaatggttcatgggataaacagctggtatttgtatctaaaactcagattggtcacataaatgccacggcattccgaagttttgattttgattaacattgacaggattactgtgtgtttaattttttaaaaactgaacactgtgattatggggttttgtaatttagcagaactcttactggtagaaaaaatagacctgaattatgtgtaactttttggaaggtttaatctgatatcaaaataatcattgaaatacaattccattgtaaagttgtacagaaagttatagagattatattgtgatgctggaacttggagtgagacacacatcatttggcatttgagttgaatggtaattcacagtaatgctgccgttgttcgggacttaaagacacttgacctgtttgggctgttgccacttaaaagttcatgaccacaaatgtccacagtgtcttcctctgaggaaactcgaatcctgaaatggaaattctttgtggcagataactggcttatgacaccttgaaaagttcaagtgctcatataacacaccacactgaaccccctttcctacagcaatatgttcactatgttaccaatttgcaacttgtgcttcaatagtggaatctactttcattgttaacactgagctaaagaaaaaaagccgtgtgttttatgaatgaccttatctgtttcctggataatacctttaagaataatgtcctgagtcaggcgtggtggtgcgtgcatctagtcccaactatttgggaggctgaggcaggaggatcgcttgagcccaggagtttaaagctgcagtgccctgtggttgcacctgtgaataactgcactccagcctgggcaacatagcgagacctcatctccaaaaaagaaaacaaaaaacaaaaaaaggaatgatgttctgtagagatggcctttcacttgaggagtactcagttttcaggttcttcctagctcggggcttttaaattttgaaatctaaacattctttcccaccatcctttttgactgttgaccttggttttctcttctaagtttctgtccctctgcttccttactttttttcctttttgaattctatctttatctgtcttttgttcactttttaatgctatatatgggcaggggtgagagacattactgagcaccttggtgagcaagcctggctttaaagattggagaagagcttctggcaccagaaccctgtcttcctccagttctcaacayggtgttgctcttcagtcataccggaatctgaatcaaaaaagtatttttaaatatccatgatttctccctgtattgaggctagccctgatcatgctttttgtgcctgtcaccaggtctcccaagtgcactcatccaggtcagtgctcagatgtgtttaaggagaccctatattcagggaagttgcgtgaacactgcagtggggagaattgagaatagtcaggcctatcagtctcacagaatcacccctctacctttgatattccacttagctgtagagtccatctgtttgtccatctgctgaaatgagaaaagaaaaatttatgcactgatttaaaacaaaccaaaaaaaagaaaaaaacaaaaaaaaaaatccctcctttctagctgaacaaaaatgtgcagttaatacttggcgcttgaaaatgcagtagtgaatgtggaaccaagcctgtctgtatatctggtagctcttttcttgctttgttttttcttaccagtattctgcctaacgtttgcttctgtgatggttatattgcctagcaagcacacccgtggttgtgaaaatagtatagcaaaaaagaaaaatccccggttattgatgtactagatttgtgtatgtcttttaaacagttctagtttcaccttacacagaataatcaggaaaagtgtaaaaattcaaaagtgaaataaaaattttatcagttaaaaaaaaaaaaaaaaagggccgctcgcgatctagactagtcc

SEQ ID NO: 410 - DNA, 1362 bp, Homo sapiens
  misc_feature (1175)..(1175): n equals a,t,g, or c
  misc_feature (1250)..(1250): n equals a,t,g, or c
  misc_feature (1263)..(1263): n equals a,t,g, or c
  misc_feature (1285)..(1285): n equals a,t,g, or c
  misc_feature (1343)..(1343): n equals a,t,g, or c
cagtaattggagaattcagagattgcatttctagcagagaattccttcagccttcttccaaagctagcttggaatctacaagcgacttgggagcttctgggaaacatggtggcaacgtctctttggatgttttaccagtcaaaggtcctcagggttctcctcttctctcacgggcggctcgccctccggatcagctggcctccgaagagccgtggactgtcctacccgagcacttgattctggtagctccttctccttgtgacatggcaaaaactggacgtttccagattgtgaataactctgtgaggttactgagatttgagctgtgctggccagcgcattgcctcacagtcacgccgcagcatggatgtgtcgcgccagagagtaaactacaaattcttgtgagtcctaattcctccttatccacaaaacagtcaatgttcccgtggagtggtttgatctatatacactgtgacgatggacagaagaaaattgtgaaagttcaaattcgagaagatttaactcaagtggaacttttaactcgtttgacctccaaaccatttggaattctttccccagtatctgagccttcagttagtcatttggtcaaaccaatgacaaaaccgccttccacaaaagttgaaataagaaacaagagtattacttttcctacaacagaacctggtgaaacttcagagagctgtctagaactcgagaatcatggcaccacagacgtgaaatggcatctgtcatctttagcgccaccttatgtcaagggagttgatgaaagtggagatgtttttagagctacctatgcagcattcagatgttctcctatttctggtctgctggaaagccatgggatccaaaaagtctccatcacatttttgcccagaggtaggggggattatgcccagttttgggatgttgaatgtcaccctcttaaggagcctcacatgaaacacacgttgagattccaactctctggacaaagcatcgaagcagaaaatgagcctgaaaacgcatgcctttccacggattccctcattaaaatagatcatttagttaagccccgaagacaagctgtgtcagaggcttctgctcgcatacctgacaggcagcttgatgtgactgctcgtggagtttatgccccagaggatgtgtaccgttcctgncgactagtgtgggggaatcacggacacttaaaggcaatctgcgaaataattcttttattacacactcactgaagnttttgagtcccanagagccattctatgtcaaacanttcaggactctttgaggaaggttatcgcagatcacagtggtctcatcagcgtgcagantttggcttttggagtgggg

SEQ ID NO: 411 - DNA, 1403 bp, Homo sapiens
ttttgaaattaatattaatatttttgttggttaactttaaagctagctcccctaactttatatattttttgggaaaaaatacctaaaaacctcagcctacaaagactctcagaaatgccaaagattttcaaggaaattcatattatatatttcaaaaatgatttatcaatgttatctaccaaaagaaataattttatttttcccctttggggagatattatcctctaatatgagaatcagatccctagattctatttctacctatactattaaactcaaccttgaacctgagcttggttgttctgtgccttagtttctccactcgtaaacaatttcctataaaaattgtttaaacaccaaccaaaatttaccatatgtattcattctcttgccttaaagatcacttcttaacttacatttggctctcaccctctaaaaatttgtagtttggagagtaactgaagccacaattttaagaaacatgttttcctcacaaaatatattgtaatctgattttcctatcttgtattcatgcagaaaattggagaaaatgtgtattgtcttgtgccattctgcaatatgaatttctcaggaaaaagatgtttcaatggcaatactttcttaaataattcaagatgggtgtgaggacytatcttattagtttagtgctgtgttaaccatttgtgaattacttcttgtttaaaggaagttgtcaaaaaattttaagattctaaatggaatacacgaataaagtaagccttagaatagaaacctcacaaaaagttgtcatttgcggttgataattaacataggtgttttattctctcaactccttagtaccagagccaaatacaatttagttttcagaaatcttatcaatattgttctatttacctacttataaatctgcagataaccacttgaaccaggcaaatacactgaagataaaggttatttctttttttagctttgaatttgtcatgaccattttagtcttgcagatagcagggcagcccttggggcaaggatttactctgggaggtaccgttaagagccttctttccccctttgaaagatccttttacaatgttaaagtatactagttgcaagaacaagcaggatttgcaggttgctttaccagcatgagtctcatttttctggcttaaaatctgggactgtgaaattattccataggaaagtgaatrttattttgcagaattagcctcttacataaaagtatttgttgaagtgtctttaaaattgctatcatgagcaaaactggttgctgtaatgcttgtttttctgtatttatttacacattaaattcttacaaaayaaaatgtgttcgtttgttttatagtaagatgttttattttgaacttatttaaatgtttatttgttag

SEQ ID NO: 412 - DNA, 2387 bp, Homo sapiens
  misc_feature (1257)..(1257): n equals a,t,g, or c
  misc_feature (1316)..(1316): n equals a,t,g, or c
tcagcagggccacgctccctcctaaggcttcagggagaatcattttttgcctcctccagcttctagtaggtccaggtgtccttggcttatggcctcatcactccagcttctgcctctgtcttcacatttccttctgccctctctgtatctctgtgtgtcctctcctcttcttctaaggtcattgggttttaggggtccgcctggataatccaagatgatcccatctyaaaattcctaattatactggcaaagaccctttttacaaagaaggacatgaacatggttttggcagccagtgttcaccctgttgtgatcagtaacgcgctccgtgtgtctctctctcctcccaggtgcatagcgggctgctgcttcatccccttctgcgtggatgccctgcaggacgtggaccattactgtcccaactgcagagctctcctgggcacctacaagcgtttgtaggactcagccagacgtggagggagccgggtgccgcaggaagtcctttccacctctcatccagcttcacgcctggtggaggttctgccctggtggtctcacctctccagggggcccaccttcatgtcttcttttggggggaatacgtcgcaaaactaacaaatctccaaaccccagaaattgctgcttggagtcgtgcataggacttgcaaagacattccccttgagtgtcagttccacggtttcctgcctccctgagaccctgagtcctgccatctaactgtgatcattgccctatccgaatatcttcctgtgatctgccatcagtggctcttttttcctgcttccatgggcctttctggtggcagtctcaaactgagaagccacagttgccttatttttgaggctgttctgcccagagctcggctgaaccagcctttagtgcctaccattatcttatccgtctcttcccgtccctgatgacaaagatcttgccttacagactttacaggcttggctttgagattctgtaactgcagacttcattagcacacagattcactttaatttcttaattttttttttaaatacaaggagggggctattaacacccagtacagacatatccacaaggtcgtaaatgcatgctagaaaaatagggctggatcttatcactgccctgtctccccttgtttctctgtgccagatcttcagtgcccctttccatacagggatttttttctcatagagtaattatatgaacagtttttatgacctccttttggtctgaaatacttttgnaacagaatttcttttttttaaaaaaaaacagagatggggtcttactatgttgcccaggntggtgtcgaactcctgggctcaagcgatccttctgccttggcctcccgaagtgctgggattgcaggcataagctaccatgctgggcctgaacataatttcaagaggaggatttataaaaccattttctgtaatcaaatgattggtgtcattttcccatttgccaatgtagtctcacttaaaaaaaaaaaaaagaaaaagaaatggataatttcatctactgcctttacttggggttaatgtgattcttaaacaccttcatcatggaactctcagagtggggtccgttttggtttcctggtggtgggttttgaaagataagggaaagcacattttgagcatgtctgggtaccatggtgcggatgcttgggaaccagaactgtttcagaggaatctaaagtctgattttagttttcagagacacagcttgttgtaaaacatgagaagacatgatttctaggactcaagcagcaagccaggattctaggttggctgctgtgtcatctttgaagtcaagacaaagctgggctcgaccttcaagggtcctcgttttgataatacttcagaatagggaactcatgtgaatactactatgtagaaataaaacctagaccttgagcgaacatctgtatattggttgaaaacgatagtggtaaccattgatcccccttcatttgatgtttggaaaattccagtaattatcatttttgcaacgaatatggataccacatagtactttggtgttacctgcttttgaaaaataaagtctttggttcacccggtgaactatttatgagttcttttggtgtgaagaaagggctcatgttgcatttccagccattgctacaaagaacctttatttgttcagtaacggtagaaaatccttcccgattaaaaacttcagacttgctgaatatcctgcaatgtcaagatgaccgatgttgagttgggtggatttgctaacgagtcagatttgaacatgaggctattggaacccaataggcgtcattgatggcggcaagccatagctttcaagttttaataaaatgcacaaaagaraaaaaaaaaaaaaa

SEQ ID NO: 413 - DNA, 4062 bp, Homo sapiens
  misc_feature (111)..(111): n equals a,t,g, or c
  misc_feature (4061)..(4061): n equals a,t,g, or c
caaacccaagtgaacgggcacgtgttcattgtggacgactttgaatcttttgagaagattcgaagacaatcttattacatttgttygtgaaactgccacttcaagttgtcntctcattatttggatggctacacctcaccaggttttaaaatgcttgaagcatacaacctgacagaaaagaattttgcttctgtacaaggagtatctttggagtcagggtctttccccagctactcagcatacaggattcagaagaatgcgtttgtgaatcagcctacagcagacctacaccaaaatggactccctccttcatacacgattatattattattcagacttctcccagaaactcccagtgacccttttgcaatttggcaaatcacagacagagactacaaaccacaagttggagtgattgcagatcyttctagcaagacgttatcattctttaacaaggatacaagaggcgaggtgcaaactgttacatttgacacagaagaagtaaagacattattttatggaagttttcacaaggttcatattgtagtgacctcaaaaagtgttaagatttacattgactgctatgaaattatagrwaaagrcatcaaggaagctggaaatataacaactgatggttatgaaattcttggaaaactccttaaaggggaaaggaaatcagccgcattccaaatccagagttttgacattgtctgcagtccagtgtggaccagtagagacagatgctgtgatattccctctaggagagatgagggaaaatgccctgcttttccaaattcttgcacatgtacacaggacagcgttggacctccaggacctccaggccctgcaggaggacctggtgctaaaggtcccagaggtgaaagaggtatcagtggggcaattgggccccctggtcctcgtggagacataggtcctccaggcccccagggtcctccaggccctcagggacccaatggactctctattccgggagagcaaggtcgccaagggatgaaaggtgatgctggagagccaggacttccaggccgaacaggaaccccaggattacctggcccaccaggaccaatgggacctccaggagacagaggcttcactggaaaagacggtgcaatgggacccaggggcccaccagggccgccgggaagcccaggctccccaggagtcacaggaccaagtgggaagccaggaaaacctggagatcatggcagaccaggtccatctgggttgaaaggagaaaaaggtgataggggagacattgcttcccagaacatgatgcgagcagttgcaagacaagtctgtgaacaattgataagtggtcagatgaacagattcaatcagatgctgaatcagattccaaatgattaccagtccagtcgcaaccagccaggcccgccgggtccaccgggacctcctggtagcgcaggagccagaggagaacctgggcctggggggcggccaggcttcccgggcacaccagggatgcagggaccccctggggaacgaggtttgccaggagagaaaggtgaaaggggtactggatcttcaggacctcgggggctgcctggccccccaggtccacaaggagaatccagaacaggtccaccagggtccacaggttcaagaggtccccctggcccccctggccgtcctggaaactcaggtatccgaggacccccaggtcctcctggatactgtgattcttctcagtgtgccagcatcccatacaacgggcaaagctatccaggttccggctaacacattttctaagtcgccagtgctgcttacagtttgaatacatgaaaatcctgtttctgagatgtttgcgcacgtgcttattaggaaatgagtctgtatggaaatctcaccacagataatggttaacgaaccgggtcgacatcacaaaggagggtggagactctttttactaacttgaatgagacaaaagcagtggtgtcagtttataatcctgatgcatttcagtaataatgtagaaaaacattattttaaaaaagttccaacacacagccatgaggagcctcagttttgaaagaggtgcataataaaactactaaccagaggagtctatgccattttaagaaaaacaattaacctggttaaagagaaatgtcttatgtaaataataaactaattgtggcttgtaaatgatttgtatgtgatcctgtcgactaaaatcacttaacaattctacaataagcttctgcatcaaagcctgccgcttgctctatgccggaataacaccaaatggaatctcctcatctcttgcttgttagcgatgtgtctgattcagggcatctgtctttttgttacttttttgtccgtgtcctctcatttgggttttgtaactgcaattttcaaaccaaagtttaaaatcaccttttcttcctgttttgctgtagtcactggtgttcctcacccaccagctgtaactcagtttgtgtgaggtacagccacagaagatgtcatgtactgtatattacctggtgatagttgcttttcaccccccgagttcagtttctaggagccaatgaaacttcccctcacctcctcatctttccaagttgttctttgaattgaggagtttgaaggcataaacagttacttggggatttgcgaaaatcctacttagttactgcgtttacagttctttggcccagtctctgacccttcccaagtatttgtgcaatgattgtgtttactgctggatttttgaaggtttttttttttaagaaagtgccatttcattatttgattatcaccaaattatctggaaataattgggacattgtaacttatctatttatagttatgagattaagactggagtgccatcaccgcgggtgatgatttagcttttgctgtgtgtgtgtgtgtgtgtgtgccttccaaatcatgccataattgtaatgttgaatcggacagagccttacgtgcccgagggcggggcctacctgcctgagcgcgagcccttcatcgtgccggtggagcccgagcggacagcggaatacgaggactacggcgcagacgagcctgcagaggagcctcctgagccccaccggcgctggcggcgcgccctgccccacggacccgggcagtgaaccagagatcacgcgccgcgccgcgaggcttgggggaggtgttgaaattctcatttacaggtcagatagagcagtgtacgtcttttctgaggtgtttcttccagcgttgctcatccaggagtaccctttctgattgtagagaaccttgtttctgcaggaagcctagctccaagcacgcagtctgtagacatttttgcctttgcccttgaaatgcttgcaaaatactttgttaacaaaagctgcaaagagagaacatgccgtgtgcctttagttagcacagcgggcagcctcagtgaaactcttaggttaagcagttaagtcctggaacccagagctgctgtgtatttcgagcgggcagtttatcttttgctatacttattttcaattcaattacaccacgattcaaataattcccctcctaaaaccaaaaaggagggaaacgtcaactccattgcaattacttatcttcctcttctatctctgttatacgccggggcatagaatgctcgtatacatctctttaacaaccacaaaccttaagccatgtagatgaagttagtgcatcaacgggatacagttccatattgccttaaacctccttgttttagacacactaacatttataccaaattgcagattattctgcagagagggaattgcatgtttgtgttgtatatttagtatgaacttttttcagaatataatatttcttagttatcaaaagtagttggaaaacatttgcaagactatgaacatagaattgctgcttttatattttaactgcagattgtgaatttcactgccttatattatttatttctgaaacaaaagaggcatttttcaataaaactactgaaaatttgaaaaaaaaaaaaaaaaaaaaaaaaaaaaaaaaaaaaaaaaaaaaaaaaaaaaaacaaaaana

SEQ ID NO: 414 - DNA, 861 bp, Homo sapiens
  misc_feature (11)..(11): n equals a,t,g, or c
  misc_feature (25)..(25): n equals a,t,g, or c
  misc_feature (734)..(734): n equals a,t,g, or c
  misc_feature (746)..(746): n equals a,t,g, or c
  misc_feature (767)..(767): n equals a,t,g, or c
  misc_feature (769)..(769): n equals a,t,g, or c
  misc_feature (820)..(820): n equals a,t,g, or c
  misc_feature (849)..(849): n equals a,t,g, or c
  misc_feature (854)..(854): n equals a,t,g, or c
ccctcactaanggaacaaagctggngctccaccgcggtggcggccgctctagaactagtggatcccccgggctgcaggaattcggcacgagtgaaagatgagtggttggagaagtttaatggttttcaaatgctttttttttcagtcttcaaataagtgtttacgtagaagcaccatatctgaaacaggtgacagtggaccagtctgaatgaaatgagggttggcaggcctgagctccaaaaccttctgattgcccaagccctccttgtcttgcttggattatctccacacaaatggagaaactggacaaggtggtcatggaggtccctgaaagctcaaagactttctcattccaggattccccatgttcatatgccagcatggcatgggggtgctctgtagtcaagcagggtcctttggggggcttagggatggagccaggaaatggctctgggactcagcgggtgtccagagtctcatcagcagggtttctttactttcactgagtggctggtgcctgcacactgagttttgcaggcttactctcacagagtgagcttcctgcaggccccccactgcaacccctttccttcctggagctgtgtgctgactggtgccgtgagcaccccaggccctctccccatgctgctgatggtcagctttctctgcacgctcgtggttgccacagtcaacgctgataaaaatgctgatgcagattgcctgcccaacttgcnagtgctggcacnggacccagcaagcccaaaacngncaccttggaaagtgggttggggcttgaattaattggcaatcaatcttccanttgggccctaactcgggttcctttaaaanggccnttattgg

SEQ ID NO: 415 - DNA, 1030 bp, Homo sapiens
cgcgtcctgcctgcagagagccaggccggagaagccgagcggcgcagaggacgccagggcgcgcgccgcagccacccaccctccggaccgcggcactgctgacccgccatcgccatggcccgcgggaaagccaaggaggagggcagctggaagaaattcatctggaactcagagaagaaggagtttctgggcaggaccggtggcagttggtttaagatccttctattctacgtaatattttatggctgcctggctggcatcttcatcggaaccatccaagtgatgctgctcaccatcagtgaatttaagcccacatatcaggaccgagtggccccgccaggattaacacagattcctcagatccagaagactgaaatttcctttcgtcctaatgatcccaagagctatgaggcatatgtactgaacatagttaggttcctggaaaagtacaaagattcagcccagagggatgacatgatttttgaagattgtggcgatgtgcccagtgaaccgaaagaacgaggagactttaatcatgaacgaggagagcgaaaggtctgcagattcaagcttgaatggctgggaaattgctctggattaaatgatgaaacttatggctacaaagagggcaaaccgtgcattattataaagctcaaccgagttctaggcttcaaacctaagcctcccaagaatgagtccttggagacttacccagtgatgaagtataacccaaatgtccttcccgttcagtgcactggcaagcgagatgaagataaggataaagttggaaatgtggagtattttggactgggcaactcccctggttttcctctgcagtattatccgtactatggcaaactcctgcagcccaaatacctgcagcccctgctggccgtacagttcaccaatcttaccatggacactgaaattcgcatagagtgtaaggcgtacggtgagaacattgggtacagtgagaaagaccgttttcagggacgttttgatgtaaaaattgaagttaagagtgattcca

SEQ ID NO: 416 - DNA, 2428 bp, Homo sapiens
ctcgtgccgaattcggcacgaggagagaactagtctcgagttttttttttttttttttgtatgaaacttggaggcttacaggtatagacagctttcagctacagcacattctaattttttattttgtttagttcttttgtattcacttctggtctctttaagactgttttaaaagaaatcaatttagggaaccccagttatataatataaactttgtaatctgagagaaaaaatgtatagtaaatctaagtcttgatttttaactttctattgtaaaaaataataatatacagagtttaatagaaggtgatgttttggttttgttttcccagaggctgccatatggtctttgagtacggggatgtcccaaactggcccaccaatgagcatggcggctccggccaggaatgccagagttagcctcccaggcttgcgggtggacatgcctgctccctgccagcctccagtggcctggccaggccytcccgagcctgtctgccctccccaggggtggaggagtctctgggccccaggaggattccctcccggagactcgcacggtgctccctgctcacgcgttgtcacagttagtccggaaatgactgaaaccaggcattctcccggacctcagcgtgggggagcctccaggcagacgctgggtatggagctgtggtgtggtctgtcctgtatggtggccagtgctttctgccagcatttctggatggatatagggactatcattagtatcctaatacacggtgattttaaaacaaccataaaattgattcagagtccactgacccttacagatgtaggtatacccttactggagagggaactctgatgaggagatgctggtaaattatcattttttaaattgctggtgagtctgacacttggtgagttttcagccagtttgttaaacttttaattaagttttgtttataataaaaatataaatggatttgaaagtttccattttttaaagttaccctcgttttcaaaggtattttctaaacagatctttaatggactatttaaaccgaatttaaggaattcacacacgacagttgacaggtcttcacgcaggctggttggtaacgtgctgccagcacagggctgggtgatacgtacaccctaagccgggggtgcctggggctggggggcgctccttgcaatgcccctccagccacagggcagtgaggtgctgcctgtgtgagccgtcgggggagcggccggctgtgggggcagcgcacaggagcatcgtggggcctttccttctcggctggttctctgtgacggtggcgtcggctcgcctctgctcctttcatctagaaagaagccactgaccctgacagcccacggcgggtacactgagcagctgcattggtgctgtcacttttttaaggctttctgtccagacttcaacactggtttcttttcagagtttcgaaggattaatgacttcctcagcgcccttgctggcgggctgagggtgacagtcacgtccgtttcttctgtattagaaggctgcggtgattcaattagattgtcccactgctgagacctgtagggcagcttctaacatgcttttttcaaggggagaggagtagtgacaagtcgtgtgtcggaattggatttgagaacactctgaatgacccctggaggccgagggggcaggcttcgggcgtgaactgaactccagacccctctttgtgttgggcagtgtcatcttgcttacaaactgtaagacacatttttttgtgtgtttgtttttgttgttgttcttttgcagcactcacgcctctgacagtcttttgggaaagagtaacacccacatacagaatttgtcacatccagagtagcactgttccttaatactggcataatgcttccaggaagtttttcttttttatatttaaaatgttacttttctgtatgatgtgcatgcaagtttaccgtaacttttcttaaactttttagtgccgtttctagtatattcctgtaaatgtcagttactgaaaatgagtccaatgtaagtagtttagcttgtttattgcaatgctggcctcaacacaacagaataaaaatggtagaaagtactctttgatgtttctggtaatcatggacccttctcctggggcatttgttttgttttcataataaaaagcaaaaaaaaaaaaaagactgttttttttttgcattttcctgtgctttctgtgggggctcccagcctctctcctggagcctggaaatgtctggaagcacctggtctggaacagccttcactggtccacagcaagggtgctgagctccccacacttgacatcctgtaactcttggcaaaaacacccagagcatccaaaaggggccccaaaaaaccatttaaaggcaggatgcagtggctcgtgcctgtgatcacagcacc

SEQ ID NO: 417 - DNA, 2047 bp, Homo sapiens
ggcacgagatgaaatgggccacaactttggaatgtttcatgacgactattcttgcaagtgtccttctacaatatgtgtgatggacaaagcactgagcttctatatacccacagacttcagttcctgcagccgtctcagctatgacaagttttttgaagataaattatcaaattgcctctttaatgctccattgcctacagatatcatatccactccaatttgtgggaaccagttggtggaaatgggagaggactgtgattgtgggacatctgaggaatgtaccaatatttgctgtgatgctaagacatgtaaaatcaaagcaacttttcaatgtgcattaggagaatgttgtgaaaaatgccaatttaaaaaggctgggatggtgtgcagaccagcaaaagatgagtgcgacctgcctgaaatgtgtaatggtaaatctggtaattgtcctgatgatagattccaagtcaatggcttcccttgccatcacgggaagggccactgcttgatggggacatgccccacactgcaggagcagtgcacagagctgtggggaccaggaactgaggttgcagataagtcatgttacaacaggaatgaaggtgggtcaaagtacgggtactgtcgcagagtggatgacacactcattccctgcaaagcaaatgataccatgtgtgggaagttgttctgtcaaggtgggtcggataatttgccctggaaaggacggatagtgactttcctgacatgtaaaacatttgatcctgaagacacaagtcaagaaataggcatggtggccaatggaactaagtgtggcgataacaaggtttgcattaatgcagaatgtgtggatattgagaaagcctacaaatcaaccaattgctcatctaagtgcaaaggacatgctgtgtgtgaccatgagctccagtgtcaatgtgaggaaggatggatccctcccgactgcgatgactcctcagtggtcttccacttctccattgtggttggggtgctgttcccaatggcggtcatttttgtggtggttgctatggtaatccggcaccagagctccagagaaaagcagaagaaagatcagaggccactatctaccactggcaccaggccacacaaacagaagaggaaaccccagatggtaaaggctgttcaaccccaagagatgagtcagatgaagccccatgtgtatgatctgccagtagaaggcaatgagcccccagcctcttttcataaagacacaaacgcacttccccctactgttttcaaggataatccaatgtctacacctaaggactcaaatccaaaagcatgaagcaacagctaagcaagaactaatggctaaattatcaacttggaaaactggaaaatctggatggcagagaaatatactatctcaccagtatttgctctcgactcaagaaggttaacattttctgattcatgttagactttgaagagactaaagaaaattttcaagaggaacatatgcctgagaacctttgcatgaatttaaaatttcaattatccattcttataagaaggaagatgattgtaaagaaatatctccgaagttaaaatctgtaataggaattgattcattctctaatgaaaacaaaacataaaaacatcacactaatcttggaggaataagaaaaattgtacatccattaaatgtacaattgattgcaacatcttgattgttttaaccattaacttgtcaaattacaatcacagttaagaaaatgatgtaaaattctgttttgtggatctctttcctagattagcttctgaaatcattattagctatatcatttgaggttttctacaatttggtataactaagaatttaaaaatgttttatcatatatatttgtataattaattactggcatggttaaagtggttttcactttttaaatggagaaaatttcagttaaattaataggataaaccaggttgcgaactggtgacctgtaggccatgtttgcactgcaaatatatttggtctgaatgatattgaaaaaaaaaaaaaaaaaaa

SEQ ID NO: 418 - DNA, 892 bp, Homo sapiens
  misc_feature (21)..(21): n equals a,t,g, or c
  misc_feature (33)..(33): n equals a,t,g, or c
  misc_feature (855)..(855): n equals a,t,g, or c
  misc_feature (868)..(868): n equals a,t,g, or c
  misc_feature (891)..(891): n equals a,t,g, or c
gaatatccctttaagctggtncgcctgcaggtnccggtccggaattcccgggtcgacccacgcgtccggatgactgtaattctccttgttaccgacgagagatcattggaagctgccttctaacactttgtgtagctctgtggagttggattttcttaaggtttaaaaagaatcacagcttcggaacttttaactgaaaatgagagacagaagccacaggggaagcaaagcaaataggattttcaatataaatatcagtgtggaaaaataacctattctgttgaatttagtgttcatgcacttgagaacaacattatttccatttactccgaaaatccttctgtgggggtttgagaaagtgaatgttgcagacatgttctgttgtgttgcactttatcctgtgtttatgtgtatgtgtttttagattaattcaagttgtgtgctatatttcttgtataatttacaaagttacacaaaatataaagagcagtaaacttgtctgaaagtttttggcaaaggaaggtaacttcaatgtaatagcttcctttaagagtacaggaaaatgcattctgtaatgaagtggggcccatgtaattgtttatattttcagttttaagcaggtatagtgcaggcttgttaggaatgtgtggaagggaagattggaagtgatttttcctcttttaaaagtaaacaaaattcttcaaatatgccctagttaactatttcagcataccatttttacttggttaacagtgtacattttgataacctatcaggaatgaataaagtatttttatttaaaggtgaaaaaaaaaaaaaaagggcggccgytytagaggatccaagcttgcgtangcgtgcaaacganatcaggagtcgatgagtagcttnt

SEQ ID NO: 419 - DNA, 696 bp, Homo sapiens
  misc_feature (675)..(676): n equals a,t,g, or c
ggagtagtttacagctatttttttttcttactggtaatcttaactaatatgattcccttgttagagagcctctcactcccccacccccaaaaatgtctactattcatgacagtaaccaattattctggacaaattgcttctttttaatttgagctatctgccatggactttctaaaatggaaacacagcctgagtgtatcttagggagagtttgattgaaaaaatccaaatcactatccatatagatcatggatataaagagatacctgatttttattaaaaagatactttttcaaatttaagagttaatcttggaaatttggaacaagtaaaggggcaagtaaaccttttgatgaaatataaaaggaactcattgcatgaagttgactatcaaattctgtgatgtgtggcttcttaaaaatattctcagtgtcttttgtgtgcgtgcagcatgtacatttgatgttatgtgaatgttgagttttttcttctaattttcacttcagcagtgtttagggcttcagatgccttattccagtgtgaacagaaaaagttcatattttatgtggttaatgctttgatgtgtcacataaagagtagtttgtagaaaatgttggcacaattttaacttcttagtggctgtgacattatatattatatatataraaactatannaaaaaaacaaacccgggatt

SEQ ID NO: 420 - DNA, 1885 bp, Homo sapiens
  misc_feature (741)..(741): n equals a,t,g, or c
agcaagggaatgaccctcttcatcgcctctcctaattcagtcctcacaacagtccttttacaaatgggacaacaggttagaggaagtcaggcagatttccagcatcatagagagtaaaggaccagggaaggatcaggattcaaggactgcacccaggctctgcttccakcttgctgtgtgactttgggtaattttgttcccttagggaactgagctttctcatttgtaaatgcaaacaggctgttgggaggatcaaatgagatccaggggtgaaaacagcttagtttactttcaggaatttacccacgcggtatataaaggcaaaatattattatagtcaggtgattgtagattgaggaacccatttcctcattctgcaaattgcaaacctgagggcccaaagagggacaggggcttgcccaggtctcagcaggctgtgagcaagagctaaagcctaatcctcctgcctttgggcctggagccttccttgtaccccaggggtcagtgtctttgttggatacaggcttagattgactgactgtaccctgagaacctaggggagtccctgttcccaattcttctcctacccccaccttggcctgatggaggaagaccctgctgtgttgagatgagcaccagagccaagaagctgaggaggatctggagaattctggaggaagaggagagtgttgctggagctgtacagaccctgcttctcaggtcccaggaaggtggcgtcancatctgcagccgcgtcgacgttgtcggagcctccgcggaggacccaggagagccggactaggaccagggccctgggcctccccacactccccatggagaagctggcggcctctacagagccccaagggcctcggccggtcctgggccgtgagagtgtccaggtgcccgatgaccaagactttcgcagcttccggtcagagtgtgaggctgaggtgggctggaacctgacctatagcagggctggggtgtctgtctgggtgcaggctgtggagatggatcggacgctgcacaagatcaagtgccggatggagtgctgtgatgtgccagccgagacactctacgacgtcctacacgacattgagtaccgcaagaaatgggacagcaacgtcattgagacttttgacatcgcccgcttgacagtcaacgctgacgtgggctattactcctggaggtgtcccaagcccctgaagaaccgtgatgtcatcaccctccgctcctggctccccatgggcgctgattacatcattatgaactactcagtcaaacatcccaaatacccacctcggaaagacttggtccgagctgtgtccatccagacgggctacctcatccagagcacagggcccaagagctgcgtcatcacctacctggcccaggtggaccccaaaggctccttacccaagtgggtggtgaataaatcttctcagttcctggctcccaaggccatgaagaagatgtacaaggcgtgcctcaagtaccccgagtggaaacagaagcacctgcctcacttcaagccgtggctgcacccggagcagagcccgttgccgagcctggcgctgtcggagctgtcggtgcagcatgcggactcactggagaacatcgacgagagcgcggtggccgagagcagagaggagcggatgggcggcgcgggcggcgagggcagcgacgacgacacctcgctcacctgagcgccgcaccgcttcagggacggagacaggaccggcgagccctggggcggcggccgctcctgcactttctcccctcccccacccggcacctggtggcaccgggccaggcccaggcgggtgctgcagcctggctggacagagccccaataaacgatcccacagcctcaaaaaaaaaa

SEQ ID NO: 421 - DNA, 584 bp, Homo sapiens
gcacccgcctcggcctcccagggtgttgggattacaggtgtgagccactgcgcctggcctaaacaaactttttgaaaagctgtttctaaaagattccttaaattcagatatgacagctaattacctcatcataaattacttttatactaattgtttccagggttttagagtagttgaatgtttatttcacaaggcaccctaaattctatagaaataaaacctcagatgagtctccttcttagagtgttacaatgaatgggagtttacaacttttatgtgtcatgtttccaacagctgtgtttggggtggtcactggcaggaggggaccgtatctcagaatggcacattatttctattttacacatgagcaaattgaggcatagagagttagataacttgcccaggttacacagattgtaagttgatgaagctgggatttgaatcttcacatgtgtgtacttataaatacaaatgtaaggaaaactctagtgagtccacctcttatattgagttattactgtgtgagtgccaagtwctgttttagatgctttacatatactattttgtttaatatcctttttaaa

SEQ ID NO: 422 - DNA, 1412 bp, Homo sapiens
ttctgtctcaaaaaaaaaaaaaaaaaggtgtgcccaggcccctagccattgccatgtgcccagccagagagccaaattagagggctggcttccctatcacacagaataaatgctagtgctagccaatgatccctttgcttttaatgtatagaaaatactgttgttccttttgtcatttccagtgacatctgttttctaagcagctcttttctagggaggaaaccaaaggggctaggttaagaccctaatagaaatgttttttctaatctctggtgagtctggaagtgtcacattcacagtccacccttgggagtggcttggtggagctggggacaaggttttgtttactacatagtgcacatgataaatggccttaaactgtgattctttctggtaggataagttataataaactgaccctaaagaatgcaatggcttttaaactgcagttactgtgttcttaatgaagcaatacccaaagctctgttcttttggagcacttgaggggagcttgaatgaaaggtgcagataagagcagtaccttgatcttatgctttctgagtgtcctgccttgttgccatctgcatggatgagtgaatgcttctatgcacgaggagactcaagccaactcagagtctgctttttccaacgctcttcccaggtttcttttgcaaagcttggtcatttggcccaggtcttcctggaaagtggagtacatgtcactgactagggtggcgtggtgtctttacccttaacattaagtcttgttacctcagtgatgtgaagccaatggttggaattataaaaagcatccttgctggttcttcacaggacactggaacccaccctgtcaattcagctagcatgtccacacagtcttgatgatccctctctgtaacaggcagctaacattaagagaagggggaaagagaagaagagagcaatagcttatgggagagctgagatcttacttcgttgacccatatttttcccctgaccaagttacctgtaaactggaatttgcaaggggatgctgtgatgataacccctttctattgctgtaatgttcatataacctgggaaactgagagaaggggatgtgtaaataaaagcttaaacattttagtaatgtgttaaaatgtcactctctcttaccctgtttcccttttttgccagatgatgatttttttatttttattttgtactttactggatgactgtgaagcgatgagtattgggttggggtaggtgtgttgattttgagagtgcatgttaagaactgaaggggaactacttgagatgacttaagaagcatcccatgcaaatatcttgttttgccctaataaaatattcagaaagataaaaaaaaaaaaaaaaaaaaaaactcgagggggggcccggtamccaatkcg

SEQ ID NO: 423 - DNA, 364 bp, Homo sapiens
  misc_feature (363)..(363): n equals a,t,g, or c
agctctgtttctgatagaggtggttggggctctcatccctagatcctaaccctttagtatgctggaattctactcttcacttactgcattgactgttgttgattagttattattgcaaagcactgtcaccggcctcagggagtttatgtgtaatagaattaaaaataatagctgtgtataacacttagctcaagccacgcatgtgtgaggcatttggtatgtatctgaattaattctcactaaaattcagcaaaggacttgatagcctctccccgccttttcaataaaggatgaatgaaggttgaaaaaaaaaaaaaaaaaaaaaaaaaaaaaaaaaaaaaaaaaaccccggggggggccccnt

SEQ ID NO: 424 - DNA, 1333 bp, Homo sapiens
  misc_feature (1140)..(1140): n equals a,t,g, or c
  misc_feature (1196)..(1196): n equals a,t,g, or c
  misc_feature (1210)..(1210): n equals a,t,g, or c
  misc_feature (1246)..(1246): n equals a,t,g, or c
  misc_feature (1285)..(1285): n equals a,t,g, or c
  misc_feature (1287)..(1287): n equals a,t,g, or c
  misc_feature (1306)..(1306): n equals a,t,g, or c
cagggcaggaaagtgacatggctaggtggctcttaccctgccttccgcctctccacagtgtgacaagctggctgctgactgtgcccacgagctgcggcgccatggggtcagctgtgtgtctctgtggccggggattgtgcagacagaactgctgaaggagcatatggcaaaggaggaggtcctgcaggatcctgtgttgaagcaggttggcaaggggagggcgaaggaagcagagaacaggggagtcggcctctgcatcctcaataacaagatcagatactcccactcaccaggtgcttactgtggcaggtgcagggctgagcatgggacacacattatttcctttaatcctgtaagggagataccagctccattctacagatggcaaaactgaaacccagagaggtttagaaacttgttgaaggtcacatatgtcctaagtggaaaggctgtctagctccaaagaccatgcacttgacccccacaccagctagcttagaaggtccaaacactatttggcactaccagatccttccacttagcaaagacagcagatcctggtgccagggcacagggctcacctggatgtggggaggagtggctctggcacctgccaatactttgggtcctacaggccctgcttgaggtctttggcctctttggtctttggtctttttctcctggaacagaagttgaaatggggaggagacctgggcagtgctcttggaaattaacccttcacttctctgcccctgtgtttcagttcaaatcagccttctcatctgcggaaaccacagaattgagtggcaaatgtgtggtggctttggcaacaggtgaagtttgggggcagctggtaataagaaagggcatggaggatgtgtagtgcggtagcatccagtgcccagatctggctcgggagttggttgaggaacatgtcattcttttctctgctttttgaggcccaaggggtcagcattcccagtttgaggtctgagagccttaggagcaggctcctgggaagtgtggaaaaagtccaaggcccaagagaaagagctctccagggatcctgagctccagggctctcarcagtgccctgtccaactgggcccaaaccttgtcactctgcatactcccctgcyngccatmwccacctgtmtgtgtgcccgcagatcccaatatcctgarcctgartgggnaaggtgctggcatnctggggaccttgcttcgacgctatgggccttcgggnatgtgggaccgggccgccccggtccaagaactatttggncntttgaacctctgggtcctntttaacaacgtggttcccgggccctgg

SEQ ID NO: 425 - DNA, 3146 bp, Homo sapiens
tctcttacaagttgaagctgcatggggcttagaaactttgcatcttgaactttcgaacaacctcaagaagtagttcagtccacatgtgtggccactttccctgaggcttttccaattaccccaattcgaattgcctgtggcaaggagtgttggccattgggaaatatcataggtgttggcccccagtgtagagttatgttcataagtctttgagttggaaacctttactttccttcataagtccatctattcctataacattcttaagaaatgttacttgggttatggtcaacttatgtcgccacaaagacccaccaccaccaatggaaaccattcaggagattcttccagccctttgtgttttaattcatcacacagatgtaaatatactggtagacacagtctgggccctctcttaccttactgatgctggcaatgaacaaatacagatggtaatagactctggaatagttcctcatttggttcctctgctcagccaccaggaagttaaagttcagactgctgcacttagagctgtgggcaacattgttactggaactgatgagcaaacacaagtagttttgaactgtgatgctctttcacacttcccagcactcctgacacatcccaaagagaaaattaataaagaagcagtgtggttcctctccaacatcactgcaggaaatcagcagcaggtacaggcagtaattgatgccaatcttgtaccaatgataatacaccttttggataagggggattttggcactcaaaaagaagctgcttgggccataagtaacttaacaattagtggaaggaaagatcaagtggcttaccttatccaacaaaatgttatcccacctttttgcaacttgctgactgtaaaagatgcacaagttgtgcaagtagtactcgatggactaagtaatatattaaaaatggctgaagatgaggcagaaaccataggcaatcttatagaagaatgtggagggctggagaaaattgaacaacttcaaaatcatgaaaatgaagacatctacaaattggcctatgagatcattgatcagttcttctcttcagatgatattgatgaagaccctagccttgttccagaggcaattcaaggcggaacatttggtttcaattcatctgccaatgtaccaacagaagggttccagttttagaaagatgttgtggaagttaggtacaatgcagcactgagatatatatatatatatgtgtgtgtgtatatatatatatatatacatatatataaaaaggtttgatccatcaagcttggctcatgggatctgctgctgcattaaatcgggaaagaaaatgtgaagatttcatttggaatcacagaaaatgcccaaatgaggtcaagatggcgagtgggtgcgagtgagaatgagtggcaaaatgtaatgaaaactttacatgaatgcttatttaggttgttcaaagtaaaaagggctacaggtcacagatcgtcagtgcctgagaaagaacattgacttactctatatcaattgaggggaaagtgcagtaccgtcatcttcaagccttgtaagcataaaagagaataggctgcccatataagtcaaaggaaaatgagcccaggccttgctatgaagcagtgtgtgaatggacaatgttgaatgaatgtctggctcagtgatggagagccaggttcatctttgaaatctagggctcttcactcatgaagcagactcctagtcctggagtgactgtgtacgagagcgtggttgtggtgctgtatgtgaacgcatgcaagcttgattcaccttcagggggctgataacctagtaaatcatcaaaatgagatcataagtgttaatgtacactggacatgaaaacaaagactggtttagcagcagacattggtttactctgcagcctgtgttttctgtttccccctttcccacctccttccccccacccaatccttttttttttcttttttgcttttcttttctttttttttagtttttatttactttacctagtatgcctttttttagttgcttctcaagtcagaaaacttttcaggaaggtttccctgtgcatttgcaccagatgaatgtttgatgctatgaaaagctttccatatcatcaaaactaatttgtgtagatttttgcatgaaaaaaatcataaatttccctcaaaatagactgtgttgcagtacacaagttgccataatagtataaaacagtaaaatgtgcttaaaaggccatccttttcattttcagagataacataaagatctttgcatgaggtaaatctacagcatagttcatttttagattttgttgagtcctgtaaagaagaagaagaaaaaagtttcagttgtggtagaataccgtgctgtgtttaaatgttacttgttttcaaactttgttttctatgaaaatgatatggaaacttctaaaatggaatttggtgcatatgtactgctgaataaagaccgatgaagaggtttgagtagatgtacaaatcaagtaatggtttgaacacctttaataatatgcctaatctgttcaattgttttagaatctttttatcttagatgtaggcagccatgaacaatctattttgagccactttagggagaaaactttgtatttttaaaacttgcataaaagttatgcaagtggtttttataaattggaataatacctcagttttgaggttatgcacactaaattaaatgtgacataaattaatttgtacaaaaagaactctttataaggtggctcattgtaggaaatcctgtgccttcccctttgagcacaagtgttgcatgaacaacagtttgctataagaaacataccagattagccaccattagcatctatatctactttgtgtttaaaaatcaactggtaattctgaaacactgtagaatggataaaaattattttgtgatcataactctttgttgaactagagtatttttgcagcattccttgtcatcagaaacatggttaaagtttaaaactagaagcagcagaaaactagcttgtaaaatttatccaagtagagtgcaggctaggctgtcttggggaaataaacattaaaacttaaagcaaaaaaaaaaaaaaaaaactcgagggggggcccgtac

SEQ ID NO: 426 - DNA, 594 bp, Homo sapiens
acatacgaaatttgacaggtattgtataccctttggatctttaggaattaatttttgcctctgtcactcagctttgtatattttgaaatggagataagtatagggaggtcttggaaggaaaattgccagaattcccaaaccatgtaacactcattgagaattccagatccattatatctaaagggcaagtgaaggaaacagtattgtgaactgggtataactccttggttcttaactagtacattcttaatctgtgagacccaaaggttgataaacaataatttaagattgtacagtactctaaacgtctgcaaaggtctagatgttatcagtatcactagtttttatttctgccagtagctcccttttaggttacattgttgtcctctttccagtgtsgcatctgtcattggtttttcactatggcaagttcattaaaaagcttgctccattgttatcttcaagtaatgcccataaggagatggaagatatctgagacaattaaggctttagcttctaggcaagagaaataacgttgcattaaatttcaagtttctttctgctagacttgaatgtgtctagccactctaattt

SEQ ID NO: 427 - DNA, 562 bp, Homo sapiens
gggaagggttccaagcctctaaaaatgtgctttgtgatcaggagtgcgctccaaaccaaatacgcgcgctgccctttcgaggccagtgagctcagcctccaaggctttaaagccacatttcagcaagagaaagcgctgagagctcgcaggttcattaaagaaggcaaagcactggtttctctccttagaaaagtaggtttcttggcttgatgtagactggcttgctttgatttttagtgaagggaatgtacgtaaaacaaaatagggcttggctggtcaaaggagacaagcaggatggatggatggatggatggatggatgtatggatgaatagatagatggtgtttgcatgtaaattgcagagaaaacaaaaccaaagctgattggaaacaattaattgtgggtgtctgagggggaaggtcgcagctttgggcagctttgagaagcggtacaagagttctgtgcctgtgtgtccagccctggagccagccagtgcatttattttaagctcttagaagcaactccttggcccaggaatgcgtgacccctgagatgggtccac

SEQ ID NO: 428 - DNA, 1412 bp, Homo sapiens
  misc_feature (1218)..(1218): n equals a,t,g, or c
gggggagcccgcggctgctgggagctgcggcgctggccctggggggagccctggggctgtaccacacggcgcggtggcacctgcgcgcccaggacctccacgcagagcgctcagccgcgcagctctccctgtccagccgcctgcagctgaccctgtaccagtacaagacgtgtcccttctgcagcaaggtccgagccttcctcgacttccatgccctgccctaccaggtggtggaggtgaaccctgtgcgcagggctgagatcaagttctcctcctacagaaaggtgcccatcctggtggcccaggaaggagaaagctcgcaacaactaaatgactcctctgtcatcatcagcgccctcaagacctacctggtgtcggggcagcccctggaagagatcatcacctactacccagccatgaaggctgtgaacgagcagggcaaggaggtgaccgagttcggcaataagtactggctcatgctcaacgagaaggaggcccagcaagtgtatggtgggaaggaggccaggacggaggagatgaagtggcggcagtgggcggacgactggctggtgcacctgatctcccccaatgtgtaccgcacgcccaccgaggctctggcgtcctttgactacattgtccgcgagggcaagttcggagccgtggagggtgccgtggccaagtacatgggtgcagcggccatgtacctcatcagcaagcgactcaagagcaggcaccgcctccaggacaacgtgcgcgaggacctctatgaggctgctgacaagtgggtggctgctgtgggcaaggaccggcccttcatggggggccagaagccgaatctcgctgatttggcggtgtatggcgtgctgcgtgtgatggaggggctggatgcattcgatgacctgatgcagcacacgcacatccagccctggtacctgcsggtggagagggccatcaccgaggctccccagcgcactgaatgtcccccgcgcagagcagagggaaggcaagcggaagacgccagctgcccaaggcctgggccactggggccagcgcctggcgatactggttgggggcaggatcattctgccccttgtccacgcacccccaccagccctctcgcttctaacacagggcacctgctggggctcagggatgttagggacgagttccagccctgccactgccctggggcgacccctccctgtccctgcctccctntctgccgcccctcttcctggaccctcagtggctgtcccatggctacatcctgtgggtgggggccctcgacaggacagcaggacggtttgttttcagtggaatcccatccctgggttcccctggttcccactcttcccaagcctcccgggactgggacatgtttgcaataaaggaaaggtttgtggcgccaaaaa

SEQ ID NO: 429 - DNA, 1939 bp, Homo sapiens
  misc_feature (11)..(11): n equals a,t,g, or c
  misc_feature (16)..(16): n equals a,t,g, or c
  misc_feature (51)..(51): n equals a,t,g, or c
  misc_feature (56)..(56): n equals a,t,g, or c
  misc_feature (68)..(68): n equals a,t,g, or c
cggcaactgcnatacnccttctaagttggggccagcttccaccctttatgnctggngctttcaakgtngtgraatattycyatattcacattaaataycttttaakgtaaagtttttttttttttaaccatcacttcctctgggacgtatctgtctttattgcaaccactttgcttatttgtgttggtaagtttgccttcactaagctcctatgaatacacagcagcaagaacaacattcccatggtcagtgacttcttctacaaattcatttatgtttgattaaaatttcacttccagtgttatcatttttcattgctttgctgcactttcatctttgttgaccagttctttcgagtgttcacttctatagaatgtcaagtagatgacagagagacagcataactacatgctctgctgtacgtgaactgaattaacagatgcacagggacaaaccactggaagaatttgaaagaaataacatgactggtcacaatcatgaagcatatctgttatttacatagcgatttgtagactgaagagctagcagagaggtttgtacttcatgtaattactcagttacaatgtgctaactaaaattttaacctagattttaacaacaacagtttccttaccagttttctttccttcctggtaaggaaactggtatttaaactaaatctaggtcactgaaatttgtgcccatgggaaacatgcaaatagaggactgcctacaccctacttgtttatattgatccagacaggcttaacgctgactactgaaaaatagcctatctgaatttatatcaaatagtgaatcttaaagcacccaagatgaaaaattagggcacactgagatggttttaaaatctttgtcatatgataatcaagcttaaaatgtatcttagagtaacagatttttagaaataaagacctttaaaggctccatagtttggtaccgcagattatccagcatgtttattatgaattatttctcctccttcaatttcaatttgctcatacagccacttgcggtcacagcggcattcagctccacacttggtagaaccacaggcaggacaagcatagaaacatcctaagcagtcttcatccaggcagtcacagaggtccatcccactaaaaatcaggagaccctggctatcatagaccttactctttgctggtatcacttgtctgtctgaaccagcggttgcattttttgtaagccttcttttttctcttttaccagtttctggagcaaattcagtttgccttcctggattcgtaaattgtaatgacctcaaagctttagcagttcttccatctgactcaggtttccttttctggcggtcttcagtatcaacatccacacttccattgattatctgtgtgcattttggacaaagcttccaaccaggtacaagctgtcttccaaatttagcactcagaaaagtggcatcatctaagtcaattacatgcaaattttttttggctaatttcttgtgtatgttaaatgggtcacaacatgacttctgtaaatcctcaaatctgtcaatgtaaatttttacatgatgaaagcaaattgtattgttcccagaaagtgtcattccagttctaagttgaagtaaaagcatatcatttgatgacaattcttgcaaagtcttaaaacctgtgtgacgagtatagtaggttttatggcactcatttgtagtacgaagctggactccaactgaacatggatccatcattcttgattctagcaaattttccgttttattttgtctggaggtttaggtcatgggctgatcacccttagcttgagctctcctccgcccggcttcgggcaagatgcgagtccacacaggccacactcgaccgaccgcttcccagccagtccccgcgctaccactgagaggacggcccccttctgtcgtcttctc

SEQ ID NO: 430 - DNA, 576 bp, Homo sapiens
  misc_feature (545)..(545): n equals a,t,g, or c
  misc_feature (550)..(550): n equals a,t,g, or c
ggaaggctgaggtgtgcgccttttttttttttccttcttagtcgtgtgtacatcattgggaatggagggaaataaatgactggatggtcgctgctttttaagtttcaaattgacattccagacaagcggtgcctgagcccgtgcctgtcttcagatcttcacagcacagttcctgggaaggtggagccaccagcctctccytgaataactgggagatgaaacaggaagctctatgacacacttgatcgaatatgacagacacygaaaatcacgactcakccccctccagcacctctacctgttgcccgccgatcacagccggaatgcagctgaaagattccctggggcctggttccaacygcccactgtggactctgaggcctctgcatttgcgggtggtctgcctgtgatattttggtcatgggctggtctggtcggtttcccatttgtctggccagtctctrtgtgtcttaatcccttgtccttcattaaaagcaaaactaaagaaaaaaaaaaaaaaaaaaaaaaaaaatttgggggggggncccgntacccaattgggcctttagggggggg

SEQ ID NO: 431 - DNA, 951 bp, Homo sapiens
gttttctttcttttcaaatttgatattgtcattattttaaaatagtaagttttctttaatagtcttttgggacctaacataccctttctcatacaattcctaatgctctgtttatggcagataatctgtaatgttatgaagacctatcaaaaagttttaaaagtatttctgtcttcaaaggtagtaagacaggattaaatttttattagaatagacaaatcagtgaatggtatgcatgtatctagtggttactagaactcaggrtcacacaatatagtagcatcacgrtctgwgyatatttttgatcaagatgatrrtaatggccttacttgggtttttatcgtttatcaaatcttacatacaaaagagtggaagtattcctttacaaaatttctaaggaaaatatttcttccaatctatcacaattatagaatggatatatgtttctgaaaagtttttgaaagaaagcaaaagttctagaactaaagtaagctggtatttaatatcccgttgatatttagaaaagattgttaataagaaatggaggatgcatttagtactatttttatccactagttcactttcagtacagttatgtatacttgttttgattgagagtgtgacatacatgttaaatcagattagcttgtttcttttaaatatacatatacacaaatacatataattttttcyccyttttgttgtgcatatcyctatgcatttttaaacttttagatttgtgaatgacctatgtgtaaatttttgtttttataaaccagaaattatacaagttttaatgtgtgtcaagaacttgttccatacaactgtggtatcgagcaataatgttaataacttttggaattatataaactatgcttaataatttgtattgagaattggtaccactatacaatacttttttcctgtattaaatcttttaaataccaaaaa

SEQ ID NO: 432 - DNA, 673 bp, Homo sapiens
  misc_feature (12)..(12): n equals a,t,g, or c
  misc_feature (76)..(76): n equals a,t,g, or c
gccgaaatgaantaaacggggtaaacactcccctgctgcccctccctctctctccctctctctccctctctctttnaccctccccagggctccatctccgcctcaggggcttctccaccccaartctggctccattcctggycwtctgttggtgacagacccccccctaaggtgctcgtttgggggctcttcaggcagcacctcagcctggcacccccactcccctgcgcagcccccaggcctcaggaccccacccctctgaggcccaggggagccctgttcacgctggtttctccccaggacccatgagcttcctggctggcctgggccttgctgtgggactggccctgctcctgtactgctatccgccagaccccaagggcctgccagggacccggcgcgtcytsggtttytsgcytgtcatcatcgacagacatgtcagccgctacctgctggccttcctggcagatgacctaggggggctctgacagaccctggacccagggcctcacctgccactcaaccaaagagtcctcgagccggcccgccaaggggactgctgcttctttttctaaatgcatatttttcattatttataatttgtgtaaaaaacacaccttcaccttacaaggtgctgaccatattaaatgttcaggttctctcaaaaaaaaaa

SEQ ID NO: 433 - DNA, 2073 bp, Homo sapiens
ggtgccatcggcacttcctcccccgccctcctcgagtgccaagaaggtgttggaccagcccgcccttccctactggtgccccctcctccccggcmaaggcgcctggacctggcgaggacgctgcccgccgagcggactgattcgcagagtctgtacatagtgtatattgctctacccggccgcacaccacgtcctgctctggcttttgccttcttgatgccagcctgctgcaacagaccctccccgcgcccctccccagcccatcttactgcaagcagcgtcctgaggagacagcggcacgttctagctgcgtctgcggccagcccgtgccagtggagtgggctccgcgttgctcattctctccgacaggttgtcagcctctgtccccgctgcacagggtcttgccccttctccggggcctgtgccagctcccttccctccccgttstcctgtccccacagccattctgggagctggggaacctggtctcaaggcaggccctgcagttccacagaggtggcaggtcttgccctttggccaacagatttcttgtcctgccttctagatgcctctgagctccaaacccagggcagccatggcttctcatttacaccaacaggtttcagttccaacagaaaggtcggggtaggttcgtgcagagatggggctggcaggggggctatgggaggattattttaacagatcaagaaaatgaagccaaatcaagtgaattaaattcctcacaattattttctttccctgaggtttgattggcacagcagcaaaagttgaggccaccccacttgtgtccactgtttttagaaaaaaatgaatggcttcctgccattgtggggctggactcttgggctttcttggtgggagcggagaaggggcctcccacccttgtccgagttgcctcccactggaggtcaggagtctacactgcagcctcgggcactgtggggagtgcatgcctggggcctctgggtggggaccatggacaggccctggtcactgtcctaacctttgtcaggacaaaggtagcaagaggatttcctggcgggtgggaaggaatggctggggcggccagttttgacacgccccagtgccctggagaacaaccagggtcatctgcacttgatgactgctccccgacccccagcccggacacctcattcccctcccactacagggatcaagtgacctgggaagaaccgagtttaacaccaggatgtgtttccttagatttcctttcctaggcgatttccagggagagccctgattggacaatcacatcacagatcacactgcagtttccatgttagcactgtggatgggtttttaatcaataaaaactgggggtttcttctcaccgactctccacttgcccaaactgccaaaagctggtgattctgggacaggccttcactttggagccacgggatggggtgggggagccccatgggcctgggaaggagggtgctgtggagggggctgcagggctgaccagcaggcagcctcatctggtcgggggcgggggcggcaggagcagaagcggggtctccgtccttgggactgtcctggttggccacgggccctgaggatgcacggtgcctggggctcctgtgccggtgggcggggggcatgctggcctctgagcgatcaggcgaggccagcgagggtgtgcttgcaaattcaagcaataagaggggggttcctgggggcttccagcccaggctagaagcccccatggcttctggcagctggacatcagccccaggtattggggtgattttggtcatgacagtgtgcctgtcccactgttacacgcatgaatgggggttatggggtgggggtggggactcarggctggaccgacgtcctagtggacctgatgtgaaattcctgtcaaacaaacaccacttttcaatggtttgctaggagtatttctgtattgaaagtttctaattatgctttttaaaaaaatactaaaaataaaggttcaagctgccaaaaaaaaaaaaaaaaaaaaaaaaaaaaaaaaaaaaaaaaaaaaaaaaaaagggcggccgc

SEQ ID NO: 434 - DNA, 2609 bp, Homo sapiens
  misc_feature (31)..(31): n equals a,t,g, or c
  misc_feature (2585)..(2585): n equals a,t,g, or c
  misc_feature (2602)..(2602): n equals a,t,g, or c
  misc_feature (2609)..(2609): n equals a,t,g, or c
cccacgcgtccggcctcccccgcggtggcgncggcggcggcggtggctgcctggcggctgagagtccagagccggacgttccgccgcttcgggctggcggctggagagcgctcgggtcatgtctgcccagggggactgcgagttcctggtgcagcgagcccgggagttggtgccgcaagacctgtgggcagccaaggcgtggctgatcacggcccgcagcctctacccggcagactttaacatccagtatgagatgtacaccatcgagcggaatgcagagcggaccgccaccgccgggagstgctgtacgacatgtttgtgaatttcccagaccagccggtggtgtggagagaaatcagcattattacatcagcattaaggaacgattcacaggacaaacaaacccaatttttaagaagtttatttgaaactcttcctggtcgggtccagtgtgaaatgttactaaaggtcacggaacaatgcttcaacacgttagaacgatcagaaatgttgcttctacttttgaggcgcttccctgaaacggtggtgcagcatggggttggccttgggswggcactattagwggctgaaactattgawgaacaagaatctccagtgaactgctttagaaaattatttgtttgtgatgtccttcctctaataattaacaaccatgatgttcgattacctgccaatttattgtataagtacttgaacaaagcagctgaattttatatcaattatgtcactaggtctactcaaatagaaaatcagcatcaaggcgcccaggatacatctgatttaatgtcacctagcaaacgtagctctcagaagtacataatagaagggctgacggaaaaatcatcccagatcgtggacccttgggagaggttgtttaagattttgaatgttgttggaatgagatgtgaatggcagatggataaaggaagacgaagctatggagatattttgcatagaatgaaggatctctgcagatacatgaacaactttgatagtgaagcacatgcaaaatataaaaaccaagtggtgtattccaccatgctggtcttctttaagaatgcattccagtatgtcaacagcatacagccatctctcttccaaggtcctaatgccccgagccaagttccactggttcttcttgaagatgtatcgaatgtgtatggtgatgtagaaattgatcgtaataaacacatccataaaaagaggaaactagctgaaggaagagaaaaaaccatgagttcagacgatgaagactgttcggcgaaaggaagaaatcgtcacattgtagtcaataaagccgaacttgctaactccactgaagtgttagaaagctttaaattggccagggagagctgggagttgctctattccctagaattccttgacaaagaatttacaaggatttgcttggcctggaagacggatacttggctttggttaagaatcttcctcactgatatgatcatctatcagggtcaatataaaaaggcgatagccagcctgcatcacttagcagctctccagggatccatttctcagccacagatcacagggcaggggaccctggagcatcagagggcgctcatccagctggcgacgtgccactttgcgctaggggagtacagaatgacatgtgaaaaagtccttgatttgatgtgctacatggtactccccattcaagatggaggcaaatcccaggaggaaccctcgaaagtaaagcccaaatttagaaaaggttcggatctgaagctcctgccttgtaccagcaaggctatcatgccatactgcctccatttaatgttagcctgttttaagcttagagctttcacagacaacagagacgacatggcattggggcatgtgattgtgttgcttcagcaagagtggccacggggcgagaatcttttcctgaaagctgtcaataaaatttgccaacaaggaaatttccaatatgagaattttttcaattacgttacaaatattgatatgctggaggaatttgcctacttgagaactcaggaaggtgggaaaattcatctggaattactacccaatcaaggaatgctgatcaagcaccacactgtaactcgaggcatcaccaaaggcgtgaaggaggactttcgcctggccatggagcgccaggtctcccgctgtggagagaatctgatggtggttctgcacaggttctgcattaatgagaagatcttgctccttcagactctgacctgagtggagacctttccaccagacacagctcgggcctgtgtaattgtaggagaagacactcagcagtgattgccatggcacagagccgtggtcattgttgctgttacaaagaagaaaaccatctgagttctaactccttggttgcttaaaagtagttcccaagagtctgagaagctatttctatttttaagagtcattttttgtaatttttgtaaaacaaaagtaccaatctgttttgtaaataaaaatcatcctaaaattygaaaaaaaaaaaaaaaaaaaaaaaaaaaaaaaaaaaaaaaaaaaaaaaaaaaaaaaaaaaaaaaaaaaaaaaaaanaaaaaaagaaaaagaanaagaaan

SEQ ID NO: 435 - DNA, 987 bp, Homo sapiens
cagtgtcacatgcctgtaaacccagctattcaggaggctgaggtgggaggatcggttgaggccaggagtttgaggctgcagtgagctatgattgcacagctgcactccagcctgttcctgagacctcatctcttaaaaaataaaaaataaaaagtctaagaggatacacagaaatttttaagtggttacctccacggaatgggattaggggatcagaggtgagggaactcatggtttggctatttctcgttctttctgcactgtttcaaatttttacaagtgtatgttattgtacttttaaaaagattagcttggcaacaagtctagcctgaaatgggtgctattttgactagtctgagtgaaaagtgaggatttaaatgaagtaacccctaaactcagccagtcccatgtttttttaacacttggaatatctaattccatttacactgcattcttcaaatgtaattttcaaagatgccttttgcctcatcccttgcttttaagtattattatagacttttggagactcacgaaacaagcaatccctaaattctcgcccaggaaagtatcttggattaaatggtttttgagaaccttgagagtgtatattctatgaaatggaagaaacaagaactagacagagtcacaaatgctgttgatcacagacaatctctgccatccataaggtaaatgtaatacatctggcgacctgctgagtgtgaacttgcagcaggtgaggaaggaactctgaactctcacaatcttgtttcttcatttcccagagagaaactcggcaaagagaaaaaggacatttccctccaggttatctgaaagaatttcaatgcttacctttaatcatgtgacattgtttatcttggattaaaagaaaagaaaatgtatttattttgtgcatattttcaataaaatatataaaatcgagttggtatatagtgccaaataccattaattaaaaatattttaacctga

SEQ ID NO: 436 - DNA, 1726 bp, Homo sapiens
  misc_feature (15)..(15): n equals a,t,g, or c
  misc_feature (21)..(21): n equals a,t,g, or c
tggtagtctcccaantcctgnggtccagtaagtagcttagaacttcctggaaacatttcatctgagcaggtttcccacgtgtgggatgctccttttgcctcatctgtctcagggatgcaggctcccccgcatgcatggggatttctccccagaccagcatacttgtgacctgagagttcaatgygtaaagatgcccctggtcagccatatccatcttctcttgcctggtccttgattctctggccgctccctgaccttcctccttccactgccttgactttcttcctttttattcctggtgccatctgtccaggcagctagacaagaacttgttcaccagcagccggattcaggccttcccaggggcataataagtgaccagcccctcctctccggacatcagatccaacacataaggaccctggcctaccctccagcccaacagccagttctgggtcagctgccaacttaggggtggtttgattatcccattgaaattcaccagtgcctttgccaaagaccctctcatttggacatacccagattcattccctggctccaactgaaaagactcagtttcaatcgttaaaagttcctttagggccagaagaataaatgaattataatcccattttgaagaaccgatttataaccaatgaaaaggttataatgtaatttatattcttggaggaacaagattttcatttgggattatttccttcaaccattcaacaaacatttgttgtatgccactaagcgccaggcacggcgttgggctctgcaaacacagtggttagtagcagtctggacctggtccctactggcatggaacccatcactccccaacatgcaaagcccacatttaaaggccagcctctgccccttcagtgatgcgctctttagaaatgccwgyccactatattcagaaatccgcaggcacaaaacttccagcaagtcactgttgtggtgaaatgggcagtgggggtggggggtcttctttaaacaggcccccttcccatctacctagccagtacccatccaatgagtccccagagcctccagaagctgttgtctcctctctggggacagcagctcctgcctttggaggccaaagccccagatctctccagccccagagctgaaaacaccaagtgcctatttgagggtgtctgtctggagacttagagtttgtcatgtgtgtgtgtgtttggttaatgtgggtttatgggttttctttctttttttttttttttttttttagtctacattagggggaagtgagcgcctcccatgtgcagacagtgtgtctttatagatttttctaaggctttccccaatgatgtcggtaatttctgatgtttctgaagttcccaggactcacacacccgttcccatctcacttgcccacccagtgtgacaaccctcggtgtggatatacccccgtggactcatggctcttccccacccccactttctataaatgtaggcctagaatacgcttctctgttgcaaaactcagctaagttcctgcttccaccttgatgttgaaatatcttatgtaagagggcaggggatgtcgtgaagatggcaagaagaacacagtttcaaatttctggaaaagagcctgtggtggagatctaaagatgtttagggaagagctcgactaaagaacaatgaaataaatggtccaaggggaagtcaaaaaaaaaaaaaaaaaaaaaaaaaa

SEQ ID NO: 437 - DNA, 1528 bp, Homo sapiens
  misc_feature (22)..(22): n equals a,t,g, or c
gcctgggcgccgtgggcgcggnactgcgcgggctgcgcgggtgccgaggagcgcgaggcgcgggggggaaggcgcacctggggtggccctggcgtgcgggcggcgacatggaggacggcgtgctcaaggagggcttcctggtcaagaggggccacattgtccacaactggaaggcgcgatggttcatccttcggcagaacacgctggtgtactacaagcttgaggggggtcggagagtgacccctcccaagggccggatcctcctggatggctgcaccatcacctgcccctgcctggagtatgaaaaccgaccgctcctcattaagctgaagactcaaacatccacggagtacttcctggaggcctgttctcgagaggagcgggatgcctgggcctttgagatcaccggggctattcatgcagggcagccggggaaggtccagcagctgcacagcctgagaaactccttcaagctgcccccgcacatcagcctgcatcgcattgtggacaagatgcacgatagcaacaccggaatccgttcaagccccaacatggagcagggaagcacctataaaaagaccttcctcggctcctcctggtggactggttcatctccaacagcttcacgggcagccgtctggaggcggtgaccctggcctccatgctcatagaggagaacttcctcaggtctgtggctgtacgatgcatgggaggcattcggtctggggatctggccgagcagttcctggatgactccacagccctgtacacttttgctgagagctacaaaagaagataagccccaaggaagaaattagcctgagcactgtggagttaagtggcacggtggtgaaacaaggctacctggccaagcagggacacaagaggaaaaactggaaggtgcgtcgctttgttctaaggaaggatccagctttcctgcattactatgacccttccaaagaagagaacaggccagtgggtgggttttctcttcgtggttcactcgtgtctgctctggaagataatggcgttcccactggggttaaagggaatgtccagggaaacctcttcaaagtgattactaaggatgacacacactattacattcaggccagcagcaaggctgagcgagccgagtggattgaagctatcaaaaagctaacatgacaaggacctgagggaaccaggattcctccctcctaccagatgacacagacaagagttcctggagaatgggagtgttaagacttttgacttctttgtaagttttgtactgctttggagagtgaatgctgccaagagttcctcagattacaaacagcagtggtgccatttccttccccatcttcatgttacaaacctggaaaggctagaacagccattaggcgtcagcatcttgacttttccccagcatcacaaacagccatttcctcgggcaccaaagtaggttccctttgttggaacaattacactggccatgccataatgttgaataaaactctcttcttaaaaaaaaaaaaaaaaaaaa

SEQ ID NO: 438 - DNA, 2055 bp, Homo sapiens
aagaggacagtgatagatgcatttkccccaggctgtctcagaaaggtcgctaaatgtatactgttgtcagaattgctgagatctccccccacttttrgtttttrsagcagtaaaaactctttccactgtgacttattttctctctcaggcagccagccacctggtcccttgtgctgactctagcacagtggccaggatccaatacgagtccaggggtgaccgcaggatggtgggggcagcgggcttctccacctaccccagccaccaaggscctgacgcactgyctcctgcaccttcagcacatccctgtgcacagctggaagggtgcatggcccgctcacctttgttcagatgggtggaaacgctgatgataccagctcctccctkccgtgcccctgccacggagcaggcattgtgaactggctggtgtttgcagtcccacgtggcatggcctccagcccaacccacagtggagactggagacagggcaatgagtctggtcgggggcacgtggacatgccccataggggccccacccagacttaacaggcaaggtcctgggcattgcgcgacgcaggactcaatgctaaagcaagcctgcctggctctgtgccagggcccctcttctgatttacacatcccatttttacacagacccttccttcttaataaaggctgacagttctgttggcagccaagaacccacaccatgaagacagggagtgaggggcctttgtgcccaactccagcacagctgcgttctggggtgtgtgagaggcatgttcgtgtctgtgcgctggtggtctcgtgagacagttccgaggacggggaaattgcagggtggtgggggcgtgaggcttatatgtggaactgatgcagagttcgcctgcagacggatctggatatacactatgtataattgttacgtgtaatttaaaatatatctgtttgccatcgtcatgagaagattatatgtaaggctctgaagggagagggagatgtacattctgccaggctcctggggaccttatccgagtcatgaaattgatgactgttgatccagtggtgcaagaagctacactccatgtgtcatcacgcttatgactcctaatgtatttttaaggcaaaaaatgtcagccgactccatcttcacccctcgattcctcgagtccagcctttctgtgccagtgcttcactgagccacaacgctctcgccatcgggacccggctgggcctggagtctcggggcacagttgccatggagccctcctgggtcattctacaaatgtgctgagtgccagctgaaaaccccacaggagatggagtaccttggccaagcttaaagagaagattttctcagggtatttattagtgtgtccagcagggtcaggaagcaggatggaaagatgcattcagactgttaatttattaacaaggcaaatgattttgtgtttcttgatgacagactattaagtttgggacttattttcccatttgagaagttataatatatatttaagatgataagtttcctgcttaagttgtgcctttcagcttcaatgagtttaaggagcactaagggtaatgataccaatgagggttggtttattatcaaacctgaatagctgtggtttctccagtaaatattttcttctactgaacatggagccattattaagagttgtgtgttttttattatgtacatttgtatatttttttgcttgtttgatgttctatttttctaatagttttcttttagtttcttaaagttgtgatactagatttagattctgatgctaactgcaaatcaggttggtctctgctgggtctctcctgcttttattttactttaaggacaagtgtagttgtcgtccaccacctttcaaaaaatgtgaaactgccctgcctcccctttttgctgacaacactgtgtacattgaccacttcctaccatactttatgttgtaaaatcaaactcttttgtggtacattatctcatgcttctgcaaattcgaataaattctatggcttccaaaaaaaaaaaaaaaaaaaaat

SEQ ID NO: 439 - DNA, 355 bp, Homo sapiens
  misc_feature (348)..(348): n equals a,t,g, or c
ggcagagcaggcaccagctcgcatggctgctgggcatggccattggcgggtctragtgtgggccgctcctcgctaactgcatgcagcctcccactctgcgcatgtttgcttgggcagaaaatgctgagacactgtggccggacctgacagtcagcacttggcagtgggctctgtggacccagcatttctcatagcgtcaacccacctcttgccttgttgaggctttttcctttcagatgagctgtccttgacattctgatgtggtgaaatggttagcagcatggactttggaaccagatagacctagatacaaaccacagtctaacattgctwaccctgtgaaccttnggggcaa

SEQ ID NO: 440 - DNA, 2834 bp, Homo sapiens
  misc_feature (2)..(2): n equals a,t,g, or c
  misc_feature (18)..(18): n equals a,t,g, or c
  misc_feature (2828)..(2828): n equals a,t,g, or c
  misc_feature (2834)..(2834): n equals a,t,g, or c
cngacggtggggtgaccnaccgcgtccgccggtgcacgttggagtcataagacggcgtcggtgttgcagtctgtgtccttggaggtgaccagggccactgcaggcatggtgctagcagagctgtacgtctctgaccgagagggaagcgatgccacgggagatggaaccaaggagaaaccatttaaaacaggtctaaaggctttgatgacagtagggaaagaaccatttcctaccatttacgtagattcacaaaaagaaaatgagaggtggaatgttatttctaaatcacagttgaagaacattaaaaagatgtggcatagggaacaaatgaagagtgaatcccgggaaaagaaagaggcagaagatagtttacgaagagaaaagaacctggaagaagcaaagaagattaccattaaaaatgatccaagtctcccagagccaaaatgtgtgaagattggtgcgttagaaggatatagaggccaaagagtaaaggtgtttggctgggtccacaggctgcgcaggcaaggaaagaatttaatgtttctggtgttgcgagatggtacaggttatcttcagtgtgtcttggcggatgagttgtgtcagtgctacaatggagttctcttgtccacggagagcagtgttgcagtgtatggaatgctaaatcttaccccaaagggcaagcaggctccaggtggccatgagctgagttgtgacttctgggaactaattgggttggcccctgctggaggagctgacaacctgatcaatgaggagtctgacgttgatgtccagctcaacaacagacacatgatgatccgaggagaaaacatgtccaaaatcctaaaagcacgatccatggtcaccaggtgctttagagatcacttctttgatagggggtactatgaagttactcctccaacattagtgcaaacacaagtagaaggtggtgccacactcttcaagcttgactattttggggaagaggcatttttgactcaatcctctcagttgtacttggagacctgcctcccagccctgggagatgttttttgtattgctcagtcataccgggcagagcagtccagaacacgaaggcacctggctgagtacactcacgtggaagctgagtgtcctttcctgacttttgacgacctcctgaaccggttggaggacttggtttgtgatgtggtagatcgaatattgaagtcacctgcagggagcatagtgcatgagctcaacccgaactttcagccccccaaacggcctttcaaacggatgaactattcagatgctatcgtttggctaaaagaacatgatgtaaagaaagaagatggaactttctatgaatttggagaagatatcccagaagctcctgagagactgatgacagacaccattaatgaaccaatcttgctgtgtcgatttcctgtggagatcaagtccttctacatgcagcgatgtcctgaggattcccgtcttactgaatctgtcgacgtgttgatgcccaatgttggtgagattgtgggaggctcaatgcgtatctttgatagtgaagaaatactggcaggttataaaagggaagggattgaccccactccctattactggtatacggatcagagaaaatacggtacatgtccccatggaggatatggcttgggcttggaacgattcttaacgtggattctgaataggtatcacatccgagacgtgtgcttataccctcgatttgtccagcgttgcacgccataaccattttctccagaagcgtggaggaaagattatgaaaggaacaggctctttaaaaaagaaaacaaaaagccagaatcttcctttttttgtttcattggggtttctctttctgtttttctttctactaccataaaaactatctcaaatcacctgaacatcaagtgatattaaggttgtcatcttaagaaaaaatatccatttttttcttaagttcgggaaacaaagttcggggaaaatacctggcatgaaactgtagttagggatacatttcagcattttactcactttatccaagttattcattttattcaagttatatgtatgtataattcaacaattttagattatggtgtaagatactccagtaacttatctttctgtccttttaagtgtacctggaattctttgatttattttattgcatcaatgaattaaaacaaaaatcttgggggaagaaattggcaatatcgtataaaaatctgctcatattagaacacagtataattcagcagtaaacactagaatcaaatgaatagccttttgtatcagttattaatcttttctaactctgcttagctgctaataatcctgaggcatagaaattgaagaatttgtaaaaatagaattgccttaaaggatttgaagtaagaacataattttggggagagttttttagtgattcacagtatccctcttagcattaatttaaggtaaagaggcagattgattttccctctttcctggtaattcctaagtaattaagaataaataagttccaaaagaaattgtagctggaatcttaataacaattgtgagtggctgtttgagttgcccccaccatgtccttagatctaatctgtgctaccttattaactcacagcaggcttactgaatggcttcatttcagatttagttgatttctccaccaaatgcatgtcatgtattctcaataggctgtattcccagcagtcaataaatgaacacccgtaaaaactcaaaaaaaaaaaaaaaaaaaaaaaaaaaaaaaaaaaaaaaaaaaaaaaaaaaaaaaaaaaaaaaaaaaaaaaaaaaaaaangggggn

SEQ ID NO: 441 - DNA, 2709 bp, Homo sapiens
  misc_feature (402)..(402): n equals a,t,g, or c
  misc_feature (2677)..(2677): n equals a,t,g, or c
  misc_feature (2691)..(2691): n equals a,t,g, or c
  misc_feature (2699)..(2699): n equals a,t,g, or c
ggcccctcaatgggctccttggggggttgaatggggccgctgcccccaaccccgcaagcttgagccaggctggcggggcccccacgctgcagctgccaggctgtctcaacagccttacagagcagcagagacatctccttcagcagcaagagcagcagctccagcaactccagcagctcctggcctccccgcagctgaccccggaacaccagactgttgtctaccagatgatccagcagatccagcagaaacgggagctgcagcgcctgcagatggctgggggctcccagctgcccatggccagcctgctggcargaarmtccaccccgctgctgtctgcgggtacccctggcctgctgcccacagsgtctgctccacccctgctgcccgctggagccctantggctccctcgcttggcaacaacacaagtctcatggccgcagcagctgcagctcagcagtagcagcagcaggcggacctccagtcctcactgcccagaccaaccccttcctcagcctgtcgggagcagagggcagtggcggtggccccaaaggagggaccgctgacaaaggagcctcagccaaccaggaaaaaggctaaatccacccttacccctcctgacccccccaagtggagggaacagatcctggcctgaggggtcctagcctggagcaggcgcctgcgcccagaccctggagagccttgacccagagcctgtgctgaggtccagggagtgtggagagctcctggtgtcgaggactgaractgaraggggagccccctccatctggcccccttccctttccgcactgtccgctttgtgaggctcagaggaaggacagtctgcaagcccgcctaggaggtccatccccagcaaatgttttggaggtccccccagagagcagagtgggccatggcagaagtagggggttggttggacctgtcacatgaaatggatcagcacttgaatggggagaagtggagggagaggccctgggcctgtccctgcggggaaatcttttatggaagaagggctggacccactttacctgcagtttcttcccagctcgggcagatggcagaagggaccccttggactttttctcgccatccctccccccagcgcaggggcacaagctgagcttgtaaaagcccacagatgttgggggctggagaaggggcaggagagcatcacactcagccccagcctcctcaacctcttggggccccgtgatgkggaggagagggcaggtgcggggaggctctggccttccttggtgccccgccctttgtttgcactattggacttaggagtgccgagggtggggagatggagctgcccgactcagtgtgtgagtgtgtgtgtgcgtgcatgtgtgtgtgtgtgtgtgtgtgtgtgtgtgtctgtctgcctgtctctctcctcctggacccagggcagccaagggcagggataggcgcagtggtcagatgaagcagcgccagagaggggacctcccagctcttatttgcaccctccccacctcaccaactttggtccctctctgggggcatgaatggttaacaaacaccagagcagtactccaatattggagagtcgctgggggcacagggctttgaatcagggtagtatcctgccttccctcccctgaccccacatggtctcagggcccccttagggccccctaccccactgatagcttcctccttctctggcacaaggggagccccagggcttgggggagggcgtaaggtggggggaaatgccactgcttttagcaaaagcctccctcccagaattagccagcttgcctcctgcaccccacccccaccaaccaggggagccactaagctgactaacaactgtcccctcacccaccagctatttccccagggtagagtgggcaattctcaccttcaaagagtccccgcctgcccaggcctttggcacagaggctgagtggacagtcaggagagaggcgagaggcaaggcgaagcctgtgtccctgtttcagttgcactggggttggagcccagggtaggggtttccagcttccccaggctccggccttgtcagtctctttgcatgtgtggatttttctgtgtgtgtttctgtttgggtttttgttgttgggttttttttttttttttaataaagaaaagaagatgtgtatatttttggcaacgacagaaacgtagtgcagatatatttttgcctgtgctgctcaactgttttttttttctgatactgaaaataatattaatattcctgttgataagactttgtaagatgttagggagctgataatggaggggggtgggaatccttcaaaggcaatttcttaggcacttgcaagggcttgggggagggggaggcagttgtgatgacctcagaaatactcactttttattaatgctaaatatgttagaaagaaatgatagcattcagcattttattcttcttaatctattaagctgtgtaactccctgccccaaaccactgaaaagaaaagtaaccttcaggccaggsgcggtggcttcacgccttgtaatccccaacactttggggaggcttgaggcggggcgggatcactttaaggtccaggagtttccaagaccagcctggggccaacatgggtggaaccccgtcttcttatccaaaatttagccggggcntggttgggcagtgnccgtaatncccagctaat

SEQ ID NO: 442 - DNA, 739 bp, Homo sapiens
tttttttgagcagacaaatctttattcctgaggctaaaatatgcaccagttccctccctgtaccgcgccactgccagcctgactgcatgcaggccctgtcccagacctggagcgctgaacttggagtcccaggacctccttccctgagttgtgtgtgtgtacatggaggggactcctgggtagcacctggaggcggcctaggggtgaggggcttctcaagggtgccctgcactccagaggtgcagtcttgggcaggatgtagcatgttcagagtctggtgaccgaaacagggctgtcggggacaggcctcgggtgttggagggcaaaggtgacagcatcatggacagaggcaaagagatgcttcttggtgatggatgcatcgaagaagtgcccagcctcaagctggctgaccacagggctgtggcaggccgccatgtacacctccacctcaatctcccggaagtcatggaaaatattcttcaggctcttgaggcacacagtgtccacaaaggagagggcacccaggtccaggatgaggctgtggaagtctggctgaggcaggcccagggccttcagtgtggacccatctggggccttggagtcttcttgaccattggctgttgcatcttccatcttatctcctgagctcaccatcatcttgcagtcctcaacgttgttgstcgacgttaacttgtcgtcgtcaatgaattcctgcagcccgggggatccgcccgggctc

SEQ ID NO: 443 - DNA, 853 bp, Homo sapiens
  misc_feature (734)..(734): n equals a,t,g, or c
  misc_feature (758)..(758): n equals a,t,g, or c
  misc_feature (767)..(767): n equals a,t,g, or c
  misc_feature (833)..(833): n equals a,t,g, or c
  misc_feature (851)..(851): n equals a,t,g, or c
gagggcactggatttggagggaatcccatctccatggggaagggcctccctgaacggaagcagctgggttaatcaccagcaccccacccaactcagagttgacccaggcggtgacactgcagaggggaatgtggtgactcaccctgcgtggtggggggagggcagggccatgccaggcgctctggtgccctgtccatgaatccttgccgcagccctgcaargaaagagctggagatgcctcctgtgtacaggttarararccaagggccagatggttttgccgartcgcccctgctagtgtgggggagcagcactttctgcttgtkaarccctgactggaaccacttggcctggagtctgggaggggcctcccttcccagcccttgtccttcctcccccgcccacaggaactcctgcagacccaggacttcagcaagttccaggcgctgaagcccaagctgctggacacggtggatgacatgctggccaacgacatcgcgcggctgatggtgatggtgcggcaggaggagtccctgatgccttyccargtggtcaarggcggcgcctttkacggsaccatgaacgggccgttcgggcacggctacggcgagggggccggcgagggcatcgacgacgtggagtgggtggtgggcaaggacaagcccacctacgacgagatcttctacacgctgtcccctgtcaacggcaagatcacgggcgccaacgccaagaangagatggtgaaagtccaagcttcncaacaccgngctaagggaaagatctggaagctggccgactggacaaggaccggcttgttggacgacaaggagttngcgctgggcaaccacctnat

SEQ ID NO: 444 - DNA, 1098 bp, Homo sapiens
ggaacttgctattggtcaggacgtttcctatgctaataaaggggtggcccgtagaagattccagcaccctcccctaactccaggccagactcctttcagctaaaggggagatctggatggcatctacttcgtatgactattgcagagtgcccatggaagacggggataagcgctgtaagcttctgctggggataggaattctggtgctcctgatcatcgtgattctgggggtgcccttgattatcttcaccatcaaggccaacagcgaggcctgccgggacggccttcgggcagtgatggagtgtcgcaatgtcacccatctcctgcaacaagagctgaccgaggcccagaagggctttcaggatgtggaggcccaggccgccacctgcaaccacactgtgatggccctaatggcttccctggatgcagagaaggcccaaggacaaaagaaagtggaggagcttgagggagagatcactacattaaaccataagcttcaggacgcgtctgcagaggtggagcgactgagaagagaaaaccaggtcttaagcgtgagaatcgcggacaagaagtactaccccagctcccaggactccagctccgctgcggcgccccagctgctgattgtgctgctgggcctcagcgctctgctgcagtgagatcccaggaagctggcacatcttggaaggtccgtcctgctcggcttttcgcttgaacattcccttgatctcatcagttctgagcgggtcatggggcaacacggttagcggggagagcacggggtagccggagaagggcctctggagcaggtctggaggggccatggggcagtcctgggtgtggggacacagtcgggttgacccagggctgtctccctccagagcctccctccggacaatgagtcccccctcttgtctcccaccctgagattgggcatggggtgcggtgtggggggcatgtgctgcctgttgttatgggttttttttgcggggggggttgcttttttctggggtctttgagctccaaaaaataaacacttcctttgagggagagcacaccttaaaaaaaaaaaaaaaaaaaaaaaaaaaaaaggacggg

SEQ ID NO: 445 - DNA, 1178 bp, Homo sapiens
  misc_feature (917)..(917): n equals a,t,g, or c
  misc_feature (1176)..(1176): n equals a,t,g, or c
accagattccctcttgtgggtgactctacacaagatggcatttactcgccaggtgtccggctcccttcaaaagacagagaatgatggctggtttcgttgtagcttgactcagtggcacaccctgtgcctgacacccagttgacagatgtgtagggaacaaaattatgacgggatggccacacagttggctgtttgtactcattgctgccagctgtctcccagaacagtcatctgctctgtagggggagaaacagggacatgaaaagccctggaaggttgtcaggaagcaattttaaatttctaatatgtaaacatcggggctttggcatattttgaaccattttgatgataggaatggaggtggtaggagccaccctgattaagttcttgttgagaataaactggtgcaccagacatttacataggctgaatcaatgttgatggcagccgtgtttttaatccatgggcctaaaacagtgtccctcatacctgtctcttgctgaggcccctgtcgcaggtgagccatgtctgacttccgagccttccatcgactgctcagtccacgtcttcagccctatttcccaagcttacctagtgagtcctccttgactcaggctggttcctccattgtttctgccacctgcaggccattggtgctccttgaataccctgtggtgtcatcgctgactcgtgcctccagggctttcccgctctgacggctctgtgtttcctattgcttcatatagcttgcttctgaattagcatgcgatatgtgacactcatatgttatgtatcttggtttagtttttacagaaagatgaaagactcttaaaagggatcttggagttgttcttgtacatcttttatatctcctaagcctttgatgggcacttgttccaawtggaaagaaaaaaaanaaaaaaagtcttaatagcgccgcagctactcctagggggtattagcttgaaggcgcgttaacgcggactgaacactggtccaataaccttgcaacctttccatggaaacgaagcgcccgctcccaaatccggagggatgcgcctgcgggtaagggaggtgggtgcaaaacccgcgcggtttctctgggccgcaaagcggtcgtttccccacaaggtgtccaactttgcggtactcacacttaccgtagcaaatagctancc

SEQ ID NO: 446 - DNA, 686 bp, Homo sapiens
  misc_feature (364)..(364): n equals a,t,g, or c
gtgaaaacaccacctcgtgtacttacgctgagtgaaagaccactagattttctggatttagaaagacctcctacaacccctcaaaatgaagaaatccgagcagttggcagactaaaaagagagcggtctatgagtgaaaatgctgttcgccaaaatggacagctggtcagaaatgattctcttgtgacaccatcgccacaacaggctcgggtctgtcctccccatatgttacctgaagatggagctaatctttcctctgctcgtggcattttgtcgcttatccagtcttctactcgtagggcataccagcagatcttggatgtgctggatgaaaatcgcagacctgtgttgcgtggtgggtctnctgccgccacttctaatcctcatcatgacaacgtcaggtatggcatttcaaatatagatacaaccattgaaggaacgtcagatgacctgactgttgtagatgcagcttcactaagacgacagataatcaaactaaatagacgtctacaacttctggaagaggagaacaaagaacgtgctaaaagagaaatggtcatgtattcaattactgtagctttctggctgcttaatagctggctctggtttcgccgctagaggtaacatcagccctcaaaaatactgtctcaacagctggaaatataaaagatttgcaaacttaaaaa

SEQ ID NO: 447 - DNA, 2588 bp, Homo sapiens
  misc_feature (2481)..(2481): n equals a,t,g, or c
  misc_feature (2505)..(2505): n equals a,t,g, or c
  misc_feature (2542)..(2542): n equals a,t,g, or c
  misc_feature (2544)..(2544): n equals a,t,g, or c
aattccgcttccgtttggaaagccgcagcctcagtcccgccgccgcccgctgcgtccgcccagcgccagctccgcgtcccgaccggcccgcggcagcctgcgccgcgccatggccacctccccgcagaagtcgccttctgtccccaagtctcccactcccaagtcgcccccgtcccgcaagaaagatgattccttcttggggaaactcggagggaccctggcccggaggaagaaagccaaggaggtgtccgagctgcaggaggagggaatgaacgccatcaacctgcccctcagcccaattccctttgagctggaccccgaggacacgatgctggaggagaatgaggtgcgaacaatggtggatccaaactcacgcagtacgcccaagcttcaagaactgatgaaggtattaattgactggattaatgatgtgttggttggagaaagaatcattgtgaaagacctagctgaagatttgtatgatggacaagtcctgcagaagcttttcgagaaactggagagtgagaagctaaatgtggctgaggtcacccagtcagagattgctcagaagcaaaaactgcagactgtcctggagaagatcaatgaaaccctgaaacttcctcccaggagcatcaagtggaatgtggattctgttcatgccaagagcctggtggccatcttacacctgctcgttgctctgtctcagtatttccgygcaccaattcgactcccagaccatgtttccatccaagtggttgtggtccagaaacgagaaggaatcctccagtctcggcaaatccaagaggaaataactggtaacacagaggctctttccgggaggcatgaacgtgatgcctttgacaccttgttcgaccatgccccagacaagctgaatgtggtgaaaaagacactcatcactttcgtgaacaagcacctgaataaactgaacctggaggtcacagaactggaaacccagtttgcagatggggtgtacctggtgctgctcatggggctcctggagggctactttgtgcccctgcacagcttcttcctgaccccggacagctttgaacagaaggtcttgaatgtctcctttgcctttgagctcatgcaagatggagggttggaaaagccaaaaccgcggccagaagacatagtcaactgtgacctgaaatctacactacgagtgttgtacaacctcttcaccaagtaccgtaacgtggagtgaggggctgccctgggcccaccactgcccaagagttcttgctgttggcgtactggaccctcctccgaactgccttaccctgcttattcctgtctcttgcactgtgctctcccacaagtccagctgcaacccagagatagtggaaactgaaattaggaaggaaatcatcaataactcagtgggctgacccatccctcccaggcgctggggaccaacctagcaatgaaggttgggaaggttgttcccttcccggtgccaggtccagatttccctccatgatttgggaaccagsttaggcaaaagagtccccacaagatgaaaataaagatcctagttaccattcaaaggatgctaactgtgtgtcaggccccacactaagtgctctgctctgatatactcaaggccattaatcttcaggactcccattgacgtaggtgtttcattccccttttacagatgaggaaactaaggcttggaggttaaatgacttgccagaagttggaatttttttcctctttgaacataacctctcccttctccctaaaggtaaccactattctgagtccaatcatcaaggttttgcttttctttttagctaagtatgcattcctcaatagtagacagtacaacatgtttataacaagccaattacattatgttctttgcatgttctaaagttgtgtatgtgtgtgcacatctgagcacgtgcacatgtacacctgagccaaaaacacgagaacccactgatctcaccactggggcaagctaggtcagagcttagtgattcacactgaaattggcaaattggatttaacccaattaatagtgtgtgtgtggcaggagtcatgtccctcacatcctttgtacaaatgaaaattactcttaattccttcagatttataataactctgtactttggtttcagggtgacatttgggaaggattttgtttagaattaatggagtggcacattttgcagcctttttgcttgattgcatgtaatggaaatgccctatattttcctgcaaaataagtactaaattcattatcgttaagcaaatgtacaatatgctcaggcaccgcagagagctgggcacgggcccatgtgagcatcactttggaagtagggctcttcaacagggacccttgaactttaaagaaaggaacttctttttgccttctaattgatcatttagactattctggctaagtctgcccacatgtaattaccggctaattcaagccaagaaaaatgnaaagtcatttagacccaaacccancaagtttctttggctggggtacttcaagggctttggngntaccttggaatttctttattgggaactttgacttttaaaagaca

SEQ ID NO: 448 - DNA, 3609 bp, Homo sapiens
  misc_feature (32)..(32): n equals a,t,g, or c
ctggtaatcgaaaatgttaacatgcctgaggngattgttattcacgcactgcagtgtactcactatgtaatcctttggcaacttgctaagataactgaaagcagctctacaaaggaggacttgctgcgtttaaagaaacaaatgagagtattttgtcagatatgtcaacattacctgaccaacgtgaatactactgttaaggaacaggccttcactattctgtgtgatattttgatgatcttcagccatcagattatgtcaggagggcgtgacatgttagagccattagtgtatacccctgattcttcattgcagtctgagttgctcagctttattttggatcatgtcttcattgaacaggatgatgataataatagtgcagatggtcagcaagaggatgaagccagtaaaattgaagctctgcacaagagaagaaatttacttgcagcattttgtaagctaattgtatatactgtggtggagatgaatacagctgcagatatcttcaaacagtatatgaagtattataatgactatggagatatcatcaaagaaacaatgagtaaaacaaggcagatagacaaaattcagtgtgctaagacccttattctcagtctgcaacagcttttaatgaaatgatacaagaaaatggctataattttgatagatcatcctctacatttagtggcataaaagaacttgctcgacgttttgctttaacttttggacttgatcagttgaaaacaagagaagccattgccatgctacacaaagatggcatagaatttgcttttaaagagcctaatccgcaaggggagagccatccacctttaaatttggcatttcttgatattctgagtgaattttcttctaaactacttcgacaagacaaaagaacagtgtatgtttacttggaaaagttcatgacctttcagatgtcactccgaagagaggatgtgtggcttccactgatgtcttaccgaaattctttgctagctggtggtgatgatgacaccatgtcagtcattagtggaatcagcagccgggggtcaacagtacggagtaaaaaatcaaaaccatctacaggaaaacggaaagtggttgagggcatgcagctttcactcactgaagaaagtagtagtagtgacagtatgtggttaagcagagaacaaacactgcacacccctgttatgatgcagacaccacaactcacctccactattatgagagagcccaaaagattacggcctgaggatagcttcatgagtgtttatccaatgcagactgaacatcatcaaacacctcttgattataatcggcgtggcacaagcctaatggaagatgatgaagagccaattgtggaagatgttatgatgtcctcagaagggaggattgaggatcttaatgagggaatggattttgacaccatggatatagatttgccaccatcaaagaacagacgagagagaacagaactgaagcctgatttctttgatccagcttcaattatggatgaatcagttcttggagtgtcaatgttttaataccagtacacaattaaatctgtggtgaagtcattttctaagtggaagaggaaattttaaagtgtggtagatacagtgaaattctgtacagatttttctctaaggagaatatgacatgcttatgcttaccaagatcaagtgcattgaggggcagttttgtttgcctgaataaacgtaaaggacaagtaaacaatttgatgataagctacagtttttcttagaaagtaaatattttatttatgcgctgttagttggcttttgaatcgattatttcatgcttttttttaaaaaaaaaaaaaacaaaataacaatctgaagaggcatttggtacagatatgaattctcttacatttatttactggttgtactaaataatgatgacctctgctggatttctgtttacatccagaaaacaatgttaaggatgtatttattcccctaccctgaagaaagtgtaggatagaattgtttttagcattctaaatttaaatgcttaaaacgtcaatcaacaaaactttgttttaaatattgtaattgtggagaaaagtaaacttataagcagaacttttacaattttttcatctaaaagtattttaagatatttttaaaatccaagagcttctctatacttttcagaaatatccagatgcagtgaactgccagaaggtaaccagtctcaaacatgcttatcccattatcaaccctgaaagtttgcttgtcctttaagataaaaatgtaatgttgtgatattccttccagtaatgccactgtattttgtctccaaataaaagaagcttattgtagtatgtttgcagaaaaattctaaacaaaaattatacagcttattagagtgtgggaatagggatctaaattttaaataaaattatatatatatataaattggtgctgattttataattgcgcagtttgtttagttttttcttacttttaaattccaacttaaaattatgaggtttcagaaatatattgaaagtttaacaatgtttaaaaatagaaaagcatgagtgttcatgctttaaaatgatttttaaatttgtattttatattgttttatctatctgtctttgcaagcagtcttcaggttaaagatacttctaacaggttacagtacatttcctctgtatgtaaattagatgggataatagaattcataacccataatattctttgaaagctaagctttaaacttcattttatgtcctttcacaaataaattagtttaaaacagaaagtggctacttgccattttgacatcaactcattttgcgaggcttaggcagctagacatcgtttaaaacaaaatattaacttatattacatgtgtatctatctattgtcagtcgtctctcagttcttgaggtatattattttaatcattccatgccttaatatgcttgcaatacaagaatatcttcagatgggtgaataccaaaaggctttcagtttttagtcagaaatcaagcattgggctgtggtagccaaaaaccataggttagctaaaaagatcatgatacaattattttattaagtcatggttaataacaaatgaatccagacttgtctaacagattttccatcaacaaatattgttatgtgcaaaagtattgcctatgttgttttacacaccactgcattaactagaactgctgagaggactgtatatatgattttaaacctaagttgattttttttctcactcttgaaaggagtacttctttgtgaaagcagttcttacagctttgttttcaaccagctaaaaatgttttatatattactctaacctgttgtcctccacattctattgtcctaattgtactgttttctgatttgtatttatgtcttgagacagtaactttttgaataaaaataaacctacagtatgttgtatgttttctcttgtactcaaagggggagggtggctataaatggtttgcaaatttatatctattatcacatcttttaatgtgtttggggaataatttatagagaataccatcagtttatatttttaataaatcatatgtatttacaatgaaaaaaaaaa

SEQ ID NO: 449 - DNA, 2643 bp, Homo sapiens
  misc_feature (11)..(11): n equals a,t,g, or c
  misc_feature (14)..(14): n equals a,t,g, or c
tttcttggggngancccccccgggctgcaggaattcggcacgagctggcatggtcctgtcctgagctgttactcaaaaaaccctgaaactctcatgtgagccttggtcagtcacctgaagccctcagtacagggcatggtggacgctcagggcatttgtggcatcagccccctagaggtggcccctgggtccactggtaccaggccccgcccttgggggctggcaggtggggtaggggctgcgtttccccacaagtgcactctgctcccctcgtccgatccggcgggtgcgcctagagcggatccgccrggctgagaccctggagcaagtgcgcagcatcatggatgargcgccactcacggacgtcagggacatcaaggacacctgaggggtcaggatatccccacccccaccctgggaaagacgcctttccccactcctgaaccatgaggcctcgctctggggtcttggatggcttttccaccgtccctgagactggggttgaggggactgacgggggccaccaccgccccgccctccagcgcctcctcccagggtggctgggcctcctgttctcagggatcacacctgggtgaggggcccaagcccctcccggaaccaaaggtgcaggctcaggcstgcggctttctggctgctgtgctgcctcctgggctccagccctcccctgcccccagcccgtcccctgcccagggcacagcggagccatgggggctgggagtccccatcagaggcagtgaggtgggccccggccctgggacaggcagctgccttctggtctgcatgacactaagacgcttgtccacagcggcgacccaggcctccaagcttgcacagaggcaaggccagacttttccgtcgtttattttcaataaataagcagctcagcgcagtcggtcgccttgtccctgcaagcccctcggggttgggaaggggaatttacaaggttgagagggaggcgggtggccgagggggaaggaaagggaaggggacatgtttataaacagacacatgacacgggtgtgggggacaggacgggggtctgtgccacagctctgcctgaagatgtgtcactatcggggtggggaggacagagcaaaaggatgytcacttccttctttcatcttctggatctgtgacacgggctcagagatggaggagggggaacagttatccctctaggtagttccgagcaacgaacttgaggatttcgtcgagcccaatgactggcagtgagatcttgaggaccatgagccactgggtgaggtccagggcccggagcttgaagatcatcggcagggggtcaacatagaggatgaggaagtgcagggacatggagaggcagatggagcccagcagccagatgttcacccagggtggcatccgcagcagggactggttctcggacaggctgttcagtgcattgcacatctcgatggtcaccagcacggacagggccatggtcatgggctcgggggcctcgaagacctcacagtmtatgccctcaaagtgggtgttgtcctcggtgcactgcatgaagtgagtcagctggctgtagttgacatgaggcccatcctcagcgtacaggaaccaccaggcagctgctcccacggtggctgcacccacatagcccccgattgccatgtagcggaagaagagccagccactgatgaggggctccttggggctccggggggggcggtccatgatgtccaggtctggtgggttgaagcccagggctgtggctgggagcccgtcggtcaccaagttcacccatagcagctgcaccgggatcagggcctcaggcagccccagggcagcggtcaggaagatacagaccacctcgcccacgttggaggaaatgaggtagcggatgaactgcttcatgttgttgtagatggcgcggccytcctccacagcagctacgatggtggagaagttgtcgtcagccagcaccatctcagaggcagtcttggccacggcagtgccagatcccatggcaatgccaatctcagcttcttcagggcaggggcgtcattgacgccatcacctgtcatggctgtgatctcatcgtaggactgcaggtactccacaatcttggacttgtgcgagggctccamacgggcgaagcagcaggcacgtcggcaggcttcccgctgttcagccaggggcaggtcgtcgaactctcggcccgtgtaggcgcgatcggccacctcctcgttctccccaaagatgccaattcgccggcagatggcaatggctgtgcccttgttgtccccagtgatcatgatcacccggatcccggcgtcacggcacagctggatggagcccgtgacctccttgcgcggagggtccagcatgcccactacacccacgaatgtcaggtccgtctcatactccaggaacctggcagagtcatccaggaccatttcctctcgcttcgggggggtgtcccgggtggccagggccaagcagcgcagggtgtcccggccagtgccccactccttgatcaccgccatgatcttttccttcaccggccccgtcagtgcacccgggtggtgccaactcgcacatagttacagcggtcgcccacgcgtccgcccacgcgtccgcccacgcgtccgc

SEQ ID NO: 450 - DNA, 637 bp, Homo sapiens
  misc_feature (564)..(564): n equals a,t,g, or c
gaattcggcacgagggcatgtgccaccccatctggctaattttgtattttttgtggtgacaaggtattgccatattgctcaggctggtctcaagctcctgggctcaagtgatccgcccacttcagcctgccaaagtgctaggactataggcgtgaaccactacacctggcctataatattttcttacggaaatgagatctcactgtgttgctcaggcttgtcttcaactcctgggctcaagcaatcctcctgcctcggcctcccaagatgctgggattacaggcgtaaggcactgggcctggacccataaataaagttttattggaagacagtcattctcatttaatgtattttgttcacatttgccctacagtggcagagttgagaagctgtaacagagaccatgtggcctgcaaggcccaaaatatttgttatctggtcttttgttgaaaaagtttagccaggcatggtggtgggcgcctgtaatcccagctactcgggagtctgaggcaggagaatcgcttgaacccgggaggtagaggttgcagtgagccgagatagtgnccatgcgctccagcctgggcaacagagtgagactccatctcaggaaaaaaaaaaaaaaaaaaaaaaactcgta

SEQ ID NO: 451 - DNA, 2595 bp, Homo sapiens
  misc_feature (198)..(198): n equals a,t,g, or c
  misc_feature (1374)..(1374): n equals a,t,g, or c
  misc_feature (2514)..(2514): n equals a,t,g, or c
  misc_feature (2532)..(2532): n equals a,t,g, or c
ttttttttttttytttktttttttttkttttyttttttttttttttttgcctttgcaaagcttttatttcatgtctgcggcatggaatccacctgcacatggcatcttagctgtgaaggagaaagcagtgcacgagaaggaatgagtgggcggaaccaacggcctccacaagctgccttccagcagcctgccaaggcnatggcagagagagactgcaaacaaacacaagcaaacagagtctcttcacagctggagtctgaaagctcatagtggcatgtgtgaatctgacaaaattaaaagtgtgcatagtccattacatgcataaaacactaataataatcctgtttacacgtgactgcagcaggcaggtccagctccaccactgccctcctgccacatcacatcaagtgccatggtttagagggtttttcatatgtaattcttttattctgtaaaaggtaacaaaatatacagaacaaaactttccctttttaaaactaatgttacaaatctgtattatcacttgtatataaatagtatatagctgatcattaataaggtgtataagtacaatgtattctaaaactgttaagccaaaaaaaaaaaaactaaaaaaatatccaagtgtcctcctccaccactcacgctggtgatcactgtgctctctgccagctgcgtggagtgacgggaggagggaatcactgtgtgtgcgagagtgcttcagactcaatttccaaaataattttcacccctctaagcatgtaaatatacaaagatggatccttcatagaaattaaaaaatcaatttgagctcatttcgaatacagaacaagtatggcacagatggaagtcctgccacgtttcctttaatgatgctgactcttgtatcacacaggccagcatgaagtttcttactcagactttacaggcattttccgtaattcaatcagtcctgctcccagcacaacacaggaggtgattcgagaataatcgcgagaatcaggcctgcttggcactattacaactggggaaaacaaaccagggcgcctccctggttcccagcccagaatgtttctgttgggtaactgctttctaaaggaactgggatctgagggagttcctagacttggagcactaaagacaagcgtggcggggctggcagcgcccgctatgagcacccctctgcccttggtcctggcctggctgttacagggcctcgaactcgtcgatgcgctgcttggtgttgccctgccggatctgccgcagcgtcttgtacttgtcccggccttgcctcatgttctcgttgtggatgatgtcattgtgggtcctcttattctcatctcgggcctgggacagctcgctgctcagcgtcancagctgccgctgcacacgctcgttcttctctgcctcagtgatgcgcttctcctcattgcggtcatcccggatgccctcactagacagctccgcgctgtagcccgtgggctctgcgccctcatcctgcaagctctcctggacatggtagctcaccggctcgtacacggggggtggtgggggcgggggtgctgtcatcaccaggtgcagctcctccttggtcttcaccaggtcatcctgggcttctttggccctgtgctgccactcttcaacttcatcctccttgcgcctccgcgcctcttccaggagggcaatcttggcagtgtattctgcaagctccgcagccagctgctcctggctctttatctgatccaccgcctgtctctccagctcctccttagcccgcagtgcagccatacggtcagcctctaggcgctcggcctcctcctgtgcccgcttcctctcctcctccagctgcagggccctctgaatctgctccgagagctctctctctgccttctttgtcttctcctcatagtcctgcagccgcagcatcaactcctccttctcgcgcatcatctgctctttctctctctccacggtttctctccttttcttctctgtttccagctgttgccgctccagctgcttctgatgcttctcctcccgggcctgggccttcatctgctgcacctcgatggtgtcaggcttcctgcggcgcatatacaactcatggttgcccatgcagagctgcaggatccgcttgttgattctcagacgtggggcataaaacacaaagtcaggtgccttcttgtcgatgggtttaatgacaaactttttgtcattgaaagagatgttcctgatttcactccaaggaaagccaatctttggggttaacttatcatctttctcataaatattcagtccaagggcatcaactccaagccaaaggtctgttcctttcttgttttttatctcgaaatagttgattccatacatttccaggtcctgagcaatcttcaggtattccaacatagcattatctttgagcatcccacggtgttccgcatgccacacctggatccggtcctcccactggtccctggtaagtttgtgctggtccatcactcttgagggatcagncgctcagarctgaggtanccagacttgtgcactwcttttgtagtccccaacttgggctgcacagcgtagaaccaagagcac

SEQ ID NO: 452 - DNA, 1301 bp, Homo sapiens
gctagttctagatcgcgagcggccgccctttttttttttttttaacggtttaacattttactaaatcaactcacacaaattccaaattgcaaatataattaaggacaacagattctgctttgccttattaaatctttcattttcaaatccatcaataagacaaaaagtaaccaaaaattaggtctgttgcaaattcatgattcttctgaggggggaaaccaaaagaacattagagtaaaaagaacgccactggaggatgtacaataaagcaccacaacacacgcttacaaacggggcttcctggcttcggtgacaggtaaaagacgctgttctccccactgctgtgcgtcaatcagggtttcattaaaataaaactataaaatctcctaggttacactaagtcagacacggtctggaacacagtgcttaacaacagtaatgccaactatcagtgctaacataaaaacattttagaaggtcaaaaacaattaaactggaaaccaaagccttattttccctagatgagcaaaactgaaaatgaaaggggtcccacctcccagtaggagtgaaggggattttttttttcttttaaactgaaggtggggtacatggtgcagctggttctgtcattgctcagcctagttggcgtccagcttggccatttcctgcacatagatgcctatactctcgctgtcaaaaagcacgaagtacaccgttttgatggaagaggacattgtagacacgaagtaactggagatggccttcagaatcagctgagctgctgtctgctttggaaaaccgttcctgccgctgccgatggatggaaatgcaatggatttcagcttcttatcatcagccagggccaagcagtttttcactgtcttttccagaagttcttcacacttgtctgcaccccaaactggactattacagtggatcacaaacttggcaggcaggccatggcctgcgctgacagcagctccagctacttccaagggcccgttctttttccggagttccaggacagcttccacaaactccttgccacctttcttctccagcgtgtttcctacttcaccaccgatgtagaagtcagtgtttgtcgggtgaacgacagcatcactgtcgatcgaggcaatgtcagcctgtacaacttgcaactataacaggtaaacaaatgtatatcaactgtgttggaccgagacccacgcacaggcacatttactaatgccccaatggcagggctggcctacctggtcgattccaacatatgagcccaaggggcaatcagtcctcgtgcc

SEQ ID NO: 453 - DNA, 689 bp, Homo sapiens
  misc_feature (678)..(678): n equals a,t,g, or c
ttctgctacgcctgtacagacgtatcttcccagagtgaaagttgatgtttagccgttccgaagttggtgctttgtgggaaggagaacagcgggagagccgtaagkaacgcagcgtcctgacgtgaggaacgcctcttaacacgccccgtggcatggagtttgacagggccctggatccctgcgttcacccctcctggagtcctggacgcccacctgggagcagcgtcagggccgtgccactttgacccacgttaaacgcattgcatcctcatttctgtgtcccatctagatgcttgactcagtgatgcagaacctttcagagttagctggaagccacagccctgcctcttgatgcagcctggatccagccggtgtgaagaggagaccccttccctcttgtggggtttggatcctgtgtttctagcctttgcaaaactctacatcagggatatcctggacatgaaggagtcccgccagtgccagtgtatttttgtacaaggacatccaataaaacaggtagatgtcttgggaactgtcatggagtgagagaaagagatgctttctacagttawggagtggatgacarcactkgagttataaactgcatctgctgggaaaaagttgaatactgagtctgtaatcagctgctccaagtggcaagcaagagagctcagcttnaacctcacaac

SEQ ID NO: 454 - DNA, 395 bp, Homo sapiens
  misc_feature (380)..(380): n equals a,t,g, or c
  misc_feature (384)..(384): n equals a,t,g, or c
cttgaacctgaagaggcggaggttgcagtgagccaagatcgcgccattgcactccagcctgggggacaagagtgagacttagtctcaaaaaaaaaaaaaaagaaaaaaaaatcagggatatagttcatatcccacttctttgtttacaccgatgtccctgaatatcagcctgtagctaatggacttgggatttctggtctaagtgggcctcctggggatggggtggtacactgagcttctgagcctcattgtagagtagaaaggtactggggcctgtgtggtaagccttgttgaaatgctctggtattcagtattgccttaataaacttcacccacaactgcaaaaaaaaaaaaaaaaaaaaaaaaaaaaaaaaaaaaancccnggggggggccc

SEQ ID NO: 455 - DNA, 1558 bp, Homo sapiens
  misc_feature (420)..(420): n equals a,t,g, or c
caataatcttaacagtgtcctggctgarcgactggagaagtggctgcaactgatgctgatgtggcacccccgacagaggggcacggatcccacgtatgggcccaatggctgcttcaaggccctggatgacatcttaaacttaaagctggttcatatcttgaacatggtcacgggcaccatccacacctaccctgtgacagaggatgagagtctgcagagcttgaaggccagaatccaacaggacacgggcatcccagaggarkaccaggmgctgctgcaggaascgggcctggcgttgatccccgataagcctgccactcagtgtatttcagacggcaagttaaatgarggccacacattggacatggatcttgtttttctctttgacaacagtaaaatcacctatgagactcagatctncccacggccccaacctgaaagtgtcagctgtatccttcaagagcccaagaggaatctcgccttcytccarctgargaargtgtggggccaggtctggsacagcatccagaccctgaaggaagattgcaaccggctgcagcagggacagcgagccgccatgatgaatctcctccgaaacaacagctgcctctccaaaatgaagaattccatggcttccatgtctcagcagctcaaggccaagttggatttcttcaaaaccagcatccagattgacctggagaagtacagcgagcaaaccgagtttgggatcacatcagataaactgctgctggcctggagggaaatggagcaggctgtggagctctgtgggcgggagaacgaatgaaactcctggtagaacggatgatggctctgcagaccgacattgtggacttacagaggagccccatgggccggaagcaggggggaacgctggacgacctagaggagcaagcaagggagctgtacaggagactaagggaaaaacctcgagaccagcgaactgagggtgacagtcaggaaatggtacggctgctgcttcaggcaattcagagcttcgagaagaaagtgcgagtgatctatacgcagctcagtaaaactgtggtttgcaagcagaaggcgctggaactgttgcccaaggtggaagaggtggtgagcttaatgaatgaggatgagaagactgttgtccggctgcaggagaagcggcagaaggagctctggaatctcctgaagattgcttgtagcaaggtccgtggtcctgtcagtggaagcccggatagcatgaatgcctctcgacttagccagcctgggcagctgatgtctcagccctccacggcctccaacagcttacctgagccagccaagaagagtgaagaactggtggctgaagcacataacctctgcaccctgctagaaaatgccatacaggacactgtgagggaacaagaccagagtttcacggtaacagcttgtgtgagactcctgcgattccatgtcctttctttctatggcaaaatagaagagaaaatggaaatgcaatctggcattatcctcaaccccaaaaaaaaaaaaaaaaaaaaaaaaaaagtcgtatcgatgt

SEQ ID NO: 456 - DNA, 3085 bp, Homo sapiens
  misc_feature (62)..(62): n equals a,t,g, or c
  misc_feature (3077)..(3077): n equals a,t,g, or c
ttttttccttctactataccattttaagttctgacctcaggcctccatttgggccgatggcntcttggaggcttaaagttttctgtaccttgtgatgaatgttaataggtgtttttattatacaaagctgaatgtcatttctcgtttgtagctttctgtcactcattccatcttccttcagacatcaccacgtttctctaaagtcagaaaacattccgttttggtctttttcaaaaaggtcccaaatgctgcactctacacatgaaggccctctcacacagacgtgacgtcctgccagaaagagaatgaatgacagaaaaaaaaaagagagacaaactctaggaacaatgccgattcattccacgcagcagtattgggggtggttcgggggaggggtgtttcggattttctttttttyttttcttttmtttttttttttttgcagcaaccattaataaatgccaccacattctaccagcacaaggaaacataggcagcactgaaaaaaaaaaaaaaagctcatattaattagactgacaatatggccttggaaggctctcccttgtggaaccaagttgccatgggccttgggtgctctgcgataacgggtgtgggttggttttgtttgcaaaatggccaaaaaaaaaaaccggcttccccgagcagctgccctgaaagtaggggtggcggcggcggcgctgagtttatacattagttcagacctacttggtggcattaaactgtttgaatgcaaattcgatttcagattgaacttgttaagggagttaacgagggctgagttcagcaaatgctaaagtgttaatttcaaatatgcaaatttggtactgcagtttgttatgcaatattatatcaccaacccagtatcacaaaaactcatagaagatatcatgtaggccctgggctttgggggggtcccaaacatggtatgcagaaatgtgatggttacaggtcagtacaacctcagtccttagaacccctccacacttcagctctgcacccactttcctgtcatttatttatataggactgtagttttttttagttcgagagcctttcgaagcttaatttatattctttctttgtaccttttttctaaaattaccaaagatattacacaaaggtaaattatgttctctgttttatgctttatctgatgaagccaaatatcctcttattgttgatcaaaggaggcaaaagaatttagaggcaaatgacaagcgataggctattgcaacctgagaaagagaactgctccttcatcgtaaatttagaagaccaagtagataatggaaccaaagttgttacttttttctagtagttatttttcctttttctttttgtgtacctctacagagaccaaaactcattctcttaaagagattttatggggctactgcagataaaaataggacacaatattaaaggagctacagaaggaagggagtcccatctcaaaaaaaaaatgaatgtatgccactgcaattagagtatccaataaaggagacagtttagagtcaggacagaaaagcttccataattgaactagattacataatagtatttctagaaaaagagatatttttagattgtatgccacttttgtttaagaactgtgctgtgatcactgtattaattttggtttatcttggcatatatccttcagtttgtttttatttttaatttttcctttttttccgattaggctttggtcagcatttttcatttaaagaaaagtaacactcccatccactcataagcttggtacaaaaacttctctggcagttacttttgaagcttcactctgctttctgtataaagggcagtctgtggtcacgcaagactttaaaaaaaaaaaaaaaaaaaaaaaaaaaaaaaaaaaaaaacttttccaggcagcttcatgatgtgcaggcagtagccagacagggtcatgggaagggggccctgtgcttctaaactgagtggttgctggttagtttggtattcaaaagaggataaaaatctggtagattagttcattctcagcatgtgtagctagacatgagtaaagataacagcatgagaaactgttagtacgcatacctcagttcaaacctttagggaatgattaaaatttaaaaaaaaaacatttcactcagttgcacttagtcgtatgtcttgcatgcttagtctaaagactgtagcaaaaaaaaaaaaaaaagaaaaattagattttacatatctttgcaggtatcacagccttgcagaagaaccaactgaaaaaaaaattctcaggctttacagcaagcaaacttcactatgatttttacaattctgattctgtatcccctgggggttatcccagttgcttctttaggatggggtttattacgttgtacatatatcccgatgtgtctgtgtgaatctttgtcttttttgggggagggcagagggcggttctttttttagatattgttcctaaaaaggaataaatgcatacacctgtttgtcaaaacacctttgctttttgtgcaactgctttatattaacgatactaaaaaaaaatagctttggaaaaaaaactactgtatgtaacggaattgcagaatatgctgcacatgtattttatttagttatccttgctttaagaatattggatgacatttcctgacatgtgggagggagaaactccctaactttttttttctgcttttaaactgtaacatagttgaagatttcttttttctgttctcattgattggagcattttgtacaggttttgtgtgtgtgtgtgtgtgtgtgtgcgcgcgtgcgtgtgtgttaatctgttttttgatacattcctatcccttgtgtttatcctaccactgccttcctggctatcttaaacaagttcatacatttgaaaagaaaaaaaaatgttgtttaaaaaatgttttctcctgctgcagtaaatattttgcatgatgaaattccagggtcacacttttccaagtttatcagtgaagtagtgattaacaatggggagtgtcaaaactattgaacttttgtataaaaaaaaaaaaactttacaaggngccaagat

SEQ ID NO: 457 - DNA, 1917 bp, Homo sapiens
  misc_feature (1915)..(1915): n equals a,t,g, or c
ccttaatcccgagacgtcccgttaaaacgccccgtctggaagcggtttcccactttgaattacgaagtgcaagcatttgcgagcagccatgattcccggcgcacgcagccgtcacgcgcaccgtacagcccagtccacgaagggcgccacgggccgtgacgtcacctatgcccgacggcgcgctttcgtgacgcagcccgggtctcagggaacatggcggcgctggtgagacccgcgaggtttgtcgtgcgaccgttgctgcaggtggtccaggcttgggaccttgacgcgaggcgctgggtccgggcgctgcggcggagccagtgaaagtggtgtttccttccgragaggtggtggaacagaagcgcgctcctgggaagcagccccgcaaggcaccatctgaggccagtgcccaggagcaacgagagaaacaaccgctcgaggagtccgcatcccgcgctcccagcacctgggaagagtctgggcttcgctacgataaagcttatcccggggacaggaggctgagcagtgtaatgacaatagtaaagtccaggccatttcgggaaaaacaagggaagatcctgctggaaggtcgcaggctcatttcagacgctctcaaggctggagctgtgccaaaaatgttcttctttagccgtctagaatacctaaaggagttgccagtcgataagctgaaaggtgtcagcctcattaaggtgaaatttgaggatatcaaggattggtccgacctcgtaacgccacaaggaataatggggatttttgccaagcctgaccatgttaagatgacatatccaaagactcagcttcagcattcactgcctttattattgatttgtgacaatctccgtgaccctgggaacctggggacaattctgagatctgcagctggggcaggctgcagcaaagtgttactcaccaaaggctgtgtggatgcctgggagcccaaagtgctccgggcgggtatgggcgcacatttccggatgcccattatcaataatctggaatgggaaaccgtgcccaattacctgccccctgacactcgggtctatgtggctgacaactgtggcctttatgcccaggctgagatgtctaataaagctagtgaccatggctgggtgtgtgatcaacgagtgatgaagtttcacaagtatgaggaagaggaagatgtagaaaccggagccagtcaagattggctgcctcatgttgaggttcagagttacgactcggactggacagaggcgccggcagctgtggtgattggcggggagacctacggcgtgagctggagtccctgcagctggccgagagcactggtggcaagaggctgctgatccccgttgtgcctggtgtggacagcctcaactcggccatggcggcaagcatcctgcttttcgaagggaaaagacagctgcgggggagggcggaggacttgagcagggacaggagttaccactgaggacgcagaagtgacttctgcttgaggacgtctgcagctcctcctacaccagcacactggtgggaggctggcggagtcagtgactatggcccccacgttcaggaggaaggtgtgatgccgtcatacagttacaggaaaaataagaacttcctcagaaagaacaggtccgaattcttcctgtcgcgtcactgattttgaggttcttttttctcttggtgacaataggtgacccacgtggctctgtgtgtttttaaaaattgtccaccaagaagcactttgtgcccagaaagttcctgaagcatcatcctggcagggaggcgcctgctccaccagctggtgggtgtttgtaatcgccaagcaccagctataggtcacagccacatcactcacagctgatcactggttggtggaaaataaactatgagcagcaaaaactcgtgncc

SEQ ID NO: 458 - DNA, 946 bp, Homo sapiens
ggcacgagcggcacgagtcggcacgagaacactgctatgggcgttggtccatgatcaaacggctggcatgactcatcatagtcacgaacagttattagccagccatggctgtggttgcttgccttagcagtcctgtgttagcattgctttactctgggcacatttttcttattctctattctgggatagaagtagtttctgacttctagccacgttcagtccaggctggagagatctacacctgtttctaggattctcgttttcaaggtttctgaatatcccctactcccacttacccccaaaataagctttttacckggataggagagggaaagaggtatttttcatcaattctccccttctctgctcttctccctttctaataccataaggcagttcttcgtgacttttacagaaacatatgtacacgtccttacagagtttaggagagcctgtgggctttttgccttagtctgctagaaagactggcctgctgctctctgctttatccagaggtctgcctctgggacttcagccctgtagctgtagagaccagaagaccaaccctctttgagacccagatgctactttcccttgcgtccccctctctttcctctcccaatgagccaaccttttgcacttccactagaatgccaggcaggctgggcccccaaaggctcctttttcaaaacctctggaagccgcggttgaatgtgccatgaccctctccctctctggatggcaccatcattgaagctggcgtcatcggagtctcttgttctgttggcgtgctacctggaagatccttctgtcctggacaagaggaattggaagagcattttatgttttaagaacaggctgacacgcagcagctacaacaacagctgagatcacttaataaatggtgctaaactaaaaaaaaaaaaaaaaaaaaaaaaaaaaaaaa

SEQ ID NO: 459 - DNA, 1190 bp, Homo sapiens
ggttctagctaaatataagtgcgactgtaaacgcagccaatttttttaagcagaatatgagaacacctaagtattctcttcatagcagttcctataaagggattaaacacttatttctgtgttatggttcttattcatatatttttatagcacctttttttggaacctatatttgtgcttgaaggtgtttttgatatttggaaacagtataagccatttggagtcatgattggtggtcaagtggattcaagctaaaatactaagaccagcattcttagtggcgcttataaattagctctcacctggtttccaaactgcttttaacaatggtagtgctcctggaacaatccttccaagctcctctaaggacaatatttaattcagatactaaaggtaagactggttgttacttttgttttgttgtacaattagtactttatagtcacatgttgtatatattaaatagcccagttttattcagacttgtaaatagaactatttcaatgtagttaatctaaaaacaaaaaagaaaaccccagtcacgatttgcatgttctctgtaagcttcatccatgctggttattgcactgaatgatrtattattagggcatgttaacagtataccagtaacagcactttatctcatttatatgaacacctttgaggtgctacttaagtccaagctctgatgtattattcatttgtaaagataaggtacaggaatgaaccttggtttaaaggtatttttatatgaaaatggtgtgttattggaagatgttaaaatgctaatttgagagaagtaggagtgtatctgttttatatgttgggatgtgaaatttattttctaaaattgaggagaaggaagttatatatttgcagaatgttttaaagtgaattgttgtaatgaagttcctgtgaacatcattatggttttgtacaaataggaacctctgatgtcattcttcaacgtttgttcctgtgtgtacaattgtactttgtatgaacagctttatcatttttataggctttccatgagttttgctgtaactactatggcttatttattttctttaatatttgtgaaagtcttactcctttgttagttttgtttctgcacaactactgtacttttccatatggaataaagactattaatagaaaaaaaaaaaaaaaaaactcgagactagcct

SEQ ID NO: 460 - DNA, 915 bp, Homo sapiens
  misc_feature (915)..(915): n equals a,t,g, or c
gggtcgacccacgcgtccgcccacgctccgcccacgcgtccgagactatctttctagacaaggcagttgaggaggagggagcgcttgagggggactggcctggcgtgcactccgcacctcggggacattattgcgcgtggaacggctgcttttggaagactattgcccagaagaaaagatgtttggttttcacaagccaaagatgtaccgaagtatagagggctgctgtatttgcagagctaagtcctccagttctcgattcactgacagtaaacgctatgaaaaggacttccagagctgttttggattgcatgagactcgttcaggagacatctgcaatgcctgtgtcctgcttgtgaaaagatggaagaagttgccagcaggatcaaaaaaaaactggaatcatgtggtagatgcaagggctggacccagtctaaagactacattgaaaccaaagaaagtgaaaactctatctgggaacaggataaaaagcaaccagatcagtaaactgcagaaggaatttaaacgtcataattctgatgctcacagtaccacctcaagtgcctccccagctcaatctccttgttacagtaaccagtcagatgacggctcagatacagagatggcttctggttctaacagaacaccagttttttcctttttagatctcacttactggaaaagacagaagatatgttgtgggatcatctataaaggccgttttggggaagtcctcattgacacacatctcttcaagccttgctgcagcaataagaaagcagctgctgagaagccagaggagcaggggccagagcctctgcccatctccactcaggagtggtgactgaggtttttatgtagaaggggaacaaaaaaaaawawctgaattttgaaaaccacaaagstacaaaatgn

SEQ ID NO: 461 - DNA, 1862 bp, Homo sapiens
ggcacgagctcgtgccgaattcggcaccaaatttctgaagcattaatctgttctgttactttccagctaaaaaccaacaagtgtctgaggacacagtttaaactccaagatgatagggtccggcacgagtgggctcccacctaccctcatgacctccttttgtgaaatgctgaagggctctgcagctggttgtctggtactgctggcctttgctttctatttagcatgttccttctcccacaaaacaaaatcacattctcactatgccctgttcattcttcaggactatcttctgggaaacttttactacatacccctctccccctaatctgagtgtctgctttgctcaggtagcatgtgttcactggataaatccttgattcctggcactgaggcagggtttctgttcccaggaagcagaggcatactattctgtgaaggattgactgagtttctcctaataccaagcagtatctgagggaacagatgtctagcttaaaatcctccctagcacttgtcatagcagtgctacgtattgcctgtgaaggaagtttaataactgctgaaaggttcgattagctttatttcatcaggatttgtttgactttacaaattgatttgggttatttcaacttttaggtctagtcttaagtataactggtacatattccttcaagcagccattacacctctcataaatttattatacacctgcatttttataactattatgctttttaattgttggccaccatttttagtgcttctgaattgttatggttctcaagcagcagttgtcaccttggttttgaattaatgctgtgacgcttgcttccaggacccctatggtgtagccgtgggtggaactgtggggcactgcctgtgcacgggattggcagtaattggaggaagaatgatagcacagaaaatctctgtcagaactggtaagtcttgaaaattacaaatcagataacattttagaatcactgagagattaaagggtgttagctttgattatttaaatttctgctgctgaagtatacttggtttttctaattacctaccatctcttatagaggtattaatcctggtattgcaaatacggacttttttcacctgtgtagaagttagcaaaatacaaagtcatttttatcgaattcatagtagcttcttgttaacatattatcttagtaaaacaattgtcatttggaagtatgagaagtttttggctctaaaaatgtgtcttacaagactggaatcatgtggagaccatatgtactgattctgctgaatatgtcctgtgaagccacagttaggtctagagatggaagaatcgtctctttgctagtcagaagacctgaacattttcttttataactggattttaagatgagttatagttctactgttgcttgccagcactgtctggatttaatacaatcctgtcatttctcaaaacagtgctggagaaaacctgattcttagtgttcacagtcaagcatgttaagtattgttccttgttatgtaaaaggggttgaagtgattctaatttgttttcaaggttagtttaatagattggaagaataattggccgcctcatcggctcccttttcattttgtacagtatcaaggtataggaattttactgtatttgactttttttctctctcttccagtgacaatcataggaggcatcgtttttttggcgtttgcattttctgcactatttataagccctgattctggtttttaacaagctgtttgttcatctatatttagtttaaaataggtagtattatctttctgtacatagtgtacattacaactaaaagtgatggaaaaataaaaaaaaaaaaaaaaaa

SEQ ID NO: 462 - DNA, 800 bp, Homo sapiens
  misc_feature (303)..(303): n equals a,t,g, or c
  misc_feature (756)..(756): n equals a,t,g, or c
  misc_feature (794)..(794): n equals a,t,g, or c
gcttccagcaggaatgagtgctaaaatgctgggaggtgtctttaaaattgactggatttgcaggcgtgaattacccttcactaagtcggctcatctcaccaatccttggaatgaacataaaccagtaaagatcggacgtgatggacaggaaattgaacttgaatgtggaacccagctttgtcttctgtttccccccgatgaaagtattgacttgtatcaggtcattcataaaatgcgtcacaagagaagaatgcattctcagccccgatcacgaggacgtccatcccgcgagaaccagtccgngawgkgggaaggcgtcgaccagaagattatgatattcataacagcagaaagaaaccaaggattgactatccccctgagtttcaccagagaccagggtatttaaaggatccacgataccaggaagtggacagacgattttcaggagttcgccgagatgtgtttttaaatgggtcctacaatgattatgtgagggaatttcataacatgggaccaccaccaccttggcaaggaatgcccccttacccaggaatggaacaacctccacaccatccttactatcagcaccatgctccacctcctcaagctcatccccctttacttcagggacatcatccagttaccacatggaagcaaggttacagagatwaaacggagttacatggattatgatwttgaggggtgggatggattttcctttcgttcggcacacaaggttgtttgttcagtgggccnggagaagttaggacccccgtgaaaaggaggacccgggnacgggg

SEQ ID NO: 463 - DNA, 2106 bp, Homo sapiens
  misc_feature (2093)..(2094): n equals a,t,g, or c
  misc_feature (2096)..(2096): n equals a,t,g, or c
gcgtccgctgatagctcgatgtgacggagtctcggattgcaaagacggggaggacgagtaccgctgtgtccgggtgggtggtcagaatgccgtgctccaggtgttcacagctgcttcgtggaagaccatgtgctccgatgactggaagggtcactacgcaaatgttgcctgtgcccaactgggtttcccaagctatgtgagttcagataacctcagagtgagctcgctggaggggcagttccgggaggagtttgtgtccatcgatcacctcttgccagatgacaaggtgactgcattacaccactcagtatatgtgagggagggatgtgcctctggccacgtggttaccttgcagtgcacagcctgcgtccgatagaaggggctacagctcacgcatcgtgggtggaaacatgtccttgctctcgcagtggccctggcaggccagccttcagttccagggctaccacctgtgcgggggctctgtcatcacgcccctgtggatcatcactgctgcacactgtgtttatgacttgtacctcccaagtcatggaccatccaggtgggtctagtttccctgttggacaatccagccccatcccacttggtggagaagattgtctaccacagcaagtacaagccaaagaggctgggcaatgacatcgcccttatgaagctggccgggccactcacgttcaatgaaatgatccagcctgtgtgcctgcccaactctgaagagaacttccccgatggaaaagtgtgctggacgtcaggatggggggccacagaggatggagcaggtgacgcctcccctgtcctgaaccacgcggccgtccctttgatttccaacaagatctgcaaccacagggacgtgtacggtggcatcatctccccctccatgctctgcgcgggctacctgacgggtggcgtggacagctgccagggggacagcggggggcccctggtgtgtcaagagaggaggctgtggaagttagtgggagcgaccagctttggcatcggctgcgcagaggtgaacaagcctggggtgtacacccgtgtcacctccttcctggactggatccacgagcagatggagagagacctaaaaacctgaaaaggaaggggacaagtagccacctgagttcctgaggtgatgaagacagcccgatcctcccctggactcccgtgtaggaacctgcacacgagcagacacccttggagctctgagttccggcaccagtagcaggcccgaaagaggcacccttccatctgattccagcacaaccttcaagctgctttttgttttttgtttttttgagatggagtctcgctctgttgcccaggctggagtgcagtggcgaaatccctgctcactgcagcctccgcttccctggttcaagcgattctcttgcctcagcttccccagtagctgggaccacaggtgcccgccaccacacccaactaatttttgtatttttagtagagacagggtttcaccatgttggccaggctgctctcaaacccctgacctcaaatgatgtgcctgcttcagcctcccacagtgctgggattacaggcatgggccaccacgcctagcctcacgctcctttctgatcttcactaagaacaaaagaagcagcaacttgcaagggcggcctttcccactggtccatctggttttctctccaggggtcttgcaaaattcctgacgagataagcagttatgtgacctcacgtgcaaagccaccaacagccactcagaaaagacgcaccagcccagaagtgcagaactgcagtcactgcacgttttcatctctagggaccagaaccaaacccaccctttctacttccaagacttattttcacatgtggggaggttaatctaggaatgactcgtttaaggcctattttcatgatttctttgtagcatttggtgcttgacgtattattgtcctttgattccaaataatatgtttccttccctcataaaaaaaaaaaaaaaaaaaaaaaaaaaaaaaaaaaaaaaaaaaaaaaaaaaaaaaaaaaaaaaaaaaaaaaaaaaaattaataaaaaaaataaaaaaaaaaaaaaaaannanaaaaaaaaaa

SEQ ID NO: 464 - DNA, 2288 bp, Homo sapiens
ccacgcgtccgggggctgcaaggacctgagctcagcttccgccccagccagggaagcggcaggggaaagcaccggctccaggccagcgtgggccgctctctcgctcggtgcccgccgccatgtgggccgtcctgaggttagccctgcggccgtgtgcccgcgcctctcccgccgggccgcgcgcctatcacggggactcggtggcctcgctgggcacccagccggacttgggctctgccctctaccaggagaactacaagcagatgaaagcactagtaaatcagctccatgaacgagtggagcatataaaactaggaggtggtgagaaagcccgagcacttcacatatcaagaggaaaactattgcccagagaaagaattgacaatctcatagacccagggtctccatttctggaattatcccagtttgcaggttaccagttatatgacaatgaggaggtgccaggaggtggcattattacaggcattggaagagtatcaggagtagaatgcatgattattgccaatgatgccaccgtcaaaggaggtgcctactacccagtgactgtgaaaaaacaattacgggcccaagaaattgccatgcaaacaggctcccctgcatctacttagttgattcgggaggagcatacttacctcgacaagcagatgtgtttccagatcgagaccactttggccgtacattctataatcaggcaattatgtcttctaaaaatattgcacagatcgcagtggtcatgggctcctgcaccgcaggaggagcctatgtgcctgccatggctgatgaaaacatcattgtacgcaagcagggtaccattttcttggcaggaccccccttggttaaagcggcaactggggaagaagtatctgctgaggatcttggaggtgctgatcttcattgcagaaagtctggagtaagtgaccactgggctttggatgatcatcatgcccttcacttaactaggaaggttgtgaggaatctaaattatcagaagaaattggatgtcaccattgaaccttctgaagagcctttatttcctgctgatgaattgtatggaatagttggtgctaaccttaagaggagctttgatgtccgagaggtcattgctagaatcgtggatggaagcagattcactgagttcaaagccttttatggagacacattagttacaggatttgctcgaatatttgggtacccagtaggtatcgttggaaacaacggagttctcttttctgaatctgcaaaaaagggtactcactttgtccagttatgctgccaaagaaatattcctctgctgttccttcaaaacattactggatttatggttggtagagagtatgaagctgaaggaattgccaaggatggtgccaagatggtggccgctgtggcctgtgcccaagtgcctaagataaccctcatcattgggggctcctatggagccggaaactatgggatgtgtggcagagcgtatagcccaagatttctctacatttggccaaatgctcgtatctcagtgatgggaggagagcaggcagccaatgtgttggccacgataacaaaggaccaaagagcccgggaaggaaagcagttctccagtgctgatgaagcggctttaaaagagcccatcattaagaagtttgaagaggaaggaaacccttactattccagcgcaagggtatgggatgatgggatcattgatccagcagacaccagactggtcttgggtctcagttttagtgcagccctcaacgcaccaatagagaagactgacttcggtatcttcaggatgtaactggaataaaggatgttttctgttggacatgtactgaaaattaacacatgtagtagccttaaaattttagacttctcgaacatgaggctgttacagtaatttttttaacactgtgcattgtacttttctaccttaaaaaaatcagtgaggatatttatttaatgaacatcaattccttttaaattttcttagagaaatttctctgtggctcagttttaccacccataaagcggagacagtaatttatggtatcctttctgacccacaaagtatgaaaagttctgtaatctgtaaactcagttctgtaatctgtattattgagatgattaatataaagttgtattttcactgaaaaaaaaaaaaaaaaaaaaaaaaaaaaaaaaaaaaaaaaaaaaaaaaaaaaaaaaaaaaaaaaaaaaaaaaaaaaaaaaaaaaaaaaaaaaaaaaaaaaaaaaaaaaaaaaaaaaaaaaaaaaaaa

SEQ ID NO: 465 - DNA, 2361 bp, Homo sapiens
  misc_feature (2256)..(2256): n equals a,t,g, or c
  misc_feature (2260)..(2260): n equals a,t,g, or c
  misc_feature (2288)..(2288): n equals a,t,g, or c
atactttacaaatgagactgatgacatcgctaatttagaagcaagtgtgcttgaaaatccttctcatgtacaactttggctcaagcttgcgtacaagtacttgaatcaaaatgagggggagtgctcagaatccttggattctgctttaaatgttctggcgcgagcattggaaaataacaaagacaatccagaaatttggtgccattacctcagattgttctcaaaaagaggaaccaaggacgaggtgcaggaaatgtgtgaaacagctgttgaatatgctccagattatcaaagcttttggacttttctacacctagaaagtacctttgaagaaaaggattacgtatgtgagagaatgttggagtttctgatgggagcagccaagcaggaaacatccaatattttgtcctttcagcttttagaggctcttttgtttagagttcagctgcacatatttactggaagatgccaaagtgcactggcaattttacagaatgcattgaaatctgctaatgatggaatagtagctgaataccttaaaaccagtgatcgatgtttggcatggttggcctacatacatcttattgaattcaacattctcccttcaaaattttatgatccatctaatgataatccttcaagaattgttaacactgaatcatttgtaatgccatggcaagctgttcaagatgtaaagactaatcctgacatgttgttagcagtttttgaagatgcagtgaaagcttgcacagatgagagccttgctgttgaggaaagaatagaggcctgccttccactttacacaaacatgattgctctgcaccaactcctggagaggtatgaggctgcaatggagctttgtaaatctttattggaatcatgtcctattaactgccagttgctggaagcccttgttgcattatatttgcaaacaaatcagcatgacaaagccagagcagtgtggcttactgcatttgaaaaaaatcctcagaatgcagaggttttttatcatatgtgcaaattcttcatcttacagaatcgaggcgataatcttcttccatttttgcggaaatttattgcatccttctttaaaccggggtttgagaagtataataacttggatctgtttcggtatctcttaaatattccaggaccaattgacattccatctcgtttatgtaaagggaattttgatgatgatatgtttaaccaccaagttccttatttgtggctgatttactgcctttgtcatcctcttcaatcaagtattaaagaaacagtggaggcatatgaggcagcattaggggtggctatgagatgtgatatagtacagaagatatggatggattatcttgtctttgcaaataatagagctgctggatccagaaacaaagttcaagaattcaaattttttactgatttagtgaatagatgtttggttacagtccctgcccgataccccattccttttagcagtgctgattactggtccaactatgaatttcataatagggttattttcttttatttgagctgtgttccaaagacccagcattccaaaaccttggaacggttttgttcagttatgccagctaattctggacttgcattgaggttacttcaacatgaatgggaagaaagcaatgttcagattctgaaacttcaagccaagatgtttacatataatatcccaacatgcctggccacctggaaaatagccattgctgctgagattgttctaaagggacaaagagaggtccaccgtttatatcagagagccttacagaagttacctctttgtgcatcactgtggaaagatcaactcttgtttgaagcatcagaaggaggtaaaactgataacctgagaaaactagtttccaagtgccaagagattggagtcagcctaaatgagctcttaaatttaaacagtaacaaaacagaaagcaagaatcactgaacactgggtgcagtcagttctaagtccttataataattgccaaaattatttgaatgattcttcaagattaggctgatccctggctaaggtctgtgtaaggcagacaagcgttattgatcatatcaagttccctacaatatcctgtcctcaaaaccggaagcaatgaacatgatcctcttcggttggataaatgaacttcctgtttggcctgcttctaggccctgccagattctcataacatcatatacgtaagtatagttcctcaaagtgactgacatttattttaattttgctttgtntttntttawtttctcccccattccyttatttngggttattcctgactcacttgacactctctgatgcctgagagattcctgtttgggatttaatatccagggctg

SEQ ID NO: 466 - DNA, 957 bp, Homo sapiens
  misc_feature (26)..(26): n equals a,t,g, or c
  misc_feature (32)..(32): n equals a,t,g, or c
  misc_feature (41)..(41): n equals a,t,g, or c
  misc_feature (47)..(47): n equals a,t,g, or c
  misc_feature (49)..(50): n equals a,t,g, or c
  misc_feature (61)..(61): n equals a,t,g, or c
  misc_feature (64)..(64): n equals a,t,g, or c
  misc_feature (67)..(67): n equals a,t,g, or c
  misc_feature (70)..(70): n equals a,t,g, or c
  misc_feature (73)..(73): n equals a,t,g, or c
  misc_feature (75)..(75): n equals a,t,g, or c
gcgcgccccctcttttaaaaaacttngggggnacccccccngggggntnncaagggaaatntcnggncancgnangcggccccaatcggcacgagcggccatggcgctcctgctttcggtgctgcgtgtactgctgggcggcttcttcgcgctcgtggggttggccaagctctcggaggagatctcggctccagtttcggagcggatgaatgccctgttcgtgcagtttgctgaggtgttcccgctgaaggtatttggctaccagccagatcccctgaaactaccaaatagctgtgggctttctggaactgctggctgggttgctgctggtcatgggcccaccgatgctgcaagagatcagtaacttgttcttgattctgctcatgatgggggctatcttcaccttggcagctctgaaagagtcactaagcacctgtatcccagccattgtctgcctggggttcctgctgctgctgaatgtcggccagctcttagcccagactaagaaggtggtcagacccactaggaagaagactctaagtacattcaaggaatcctggaagtagagcatctctgtctctttatgccatgcagctgtcacagcaggaacatggtagaacacagagtctatcatcttgttaccagtataatatccagggtcaaccagtgttgaaagagacattttgtctacctggcactgcttcctctttttagctttactactcttttgtgaggagtacatgttatgcatattaacattcctcatgtcatatgaaaatacaaaataagcagaaaagaaatttaaatcaaccaaaattctgatgccccaaataaccacttttaatgccttggtgtaagtatacctctgaacttttttctgtgcctttaaacagatatatattttttttaaatgaaaataaaaccatatatcctaaaaaaaaaaaaaaaaaaaaaaaa

SEQ ID NO: 467 - DNA, 923 bp, Homo sapiens
  misc_feature (886)..(886): n equals a,t,g, or c
aattcggcacgagggcaatccgggcttgcagacgaggtaaggtcgattccatttggcccggggatggtcacacgcgcgggggccggaactgccgtcgccggcgcggtcgttgtcgcattgctctcggccgcactcgcgctgtacgggccgccactggacgcagttttagaaagagcgttttcgctacgtaaagcacattcgataaaggatatggaaaatactttgcagctggtgagaaatatcatacctcctctgtcttccacaaagcacaaagggcaagatggaagaataggcgtagttggaggctgtcaggagtacactggagccccatattttgcagaatctcagctctcaaagtgggcgcagacttgtcccacgtgttctgtgccagtgcggccgcacctgtgattaaggcctacagcccggagctgatcgtccacccagttcttgacagccccaatgctgttcatgaggtggagaagtggctgccccggctgcatgctcttgtcgtaggacctggcttgggtagagatgatgcgcttctcagaaatgtccagggcattttggaagtgtcaaaggccagggacatccctgttgtcatcgacgcggatggcctgtggtkggtcgctcagcagccggccctcatccatggctaccggaaggctgtgctcactcccaaccacgtggagttcagcagactgtatgacgctgtgctcagaggccctatggacagcgatgacagccatggatctgtgctaagactcagccaagccctgggcaacgtgacggtggtccagaaaggagagcgcgacatcctctccaacggccagcaggtgcttgtgtgcagccaggaaggcagcagcgcaggtgtggagggcaagggganctcctgtcgggctccctgggcgtcctggtacactggg

SEQ ID NO: 468 - DNA, 3058 bp, Homo sapiens
  misc_feature (2)..(3): n equals a,t,g, or c
  misc_feature (6)..(6): n equals a,t,g, or c
  misc_feature (14)..(14): n equals a,t,g, or c
  misc_feature (2641)..(2641): n equals a,t,g, or c
  misc_feature (3032)..(3032): n equals a,t,g, or c
  misc_feature (3035)..(3035): n equals a,t,g, or c
  misc_feature (3044)..(3045): n equals a,t,g, or c
gnntangatacatnacaggcgattgggtacgggccccccctcgagttttttttttttttttttaatatcaaaatatattttattctggacctctttcagatctgattcaaattacagttgtcaaagcaatacaatgcaaaggggaactgcaacaacaacaacaacaagaaatgtgcctagaaaggataaaagggtcactggggacaaatcattgtgatgtggaactaaaatacgtcgtaagtgtaattaacatggtccaggacagcacagaacatctacatcagtcttccttacacaataatcatgaaaactgaacaatgaagttctttaacatgtacaaaaacctgtcatgggctggtttacacttttacaacagttttaaagttaactggataactaaagaaatgatgcagacattttaatccagtgctataggtaggctcacagaattagacccaaaggatttgtaaaaacaaaaatggaaacagtatagctacaatgtcaaagtcaggaaagaagaaaatttacttccgtattcaaggattacagagctacaaatgcagtctgtgtgtttttgtttgtaatgagatggataagtacatcagactagatacaacatgcagaatgttttcctgaacttatccggaaattccaaagaaaacatcatgaaacagcttacaaaaaaaaaaaaaatatatgccctagttattcaccctgcttcaacactgtcaacgtaaaggcagaaataaagcaagctatcaatacctcagaactactgatataagacatcaaatttctaaatcagtgtattaaaaaagtgaacacttcctctttcttctctcttctacatttaactagaatcatgtttaaaaaaaactgatattaaatgtgacacttcagagctactactggaaggagtaattcataacttccctaccctccttccatccctgctgattcaggagaagggggaaaaaacaaagaaaacaaaacgaaaaaccaaccagggtctcttgtagatttgctgctattccacaaaatgttggcatttgctgccatgccacaatgttggtccactgaaataggatttctgcggaaactgtcaacagtagtaattcaccatatgcaagtaccatccttatcatgcgagaataatcacaggttctgtagaaatgtacaatgtacttaagataatgaaaattgtagcgctgcatttgagatttatttctctacttagctagtaaaacttgtcatttttgctcacttaagtatgatcatttgtgattcctttaaatagcaaaaatgcacagtcctctttaggcctctactcaataatagtttacattactcttaacaaaatcattctacataaacagatagctccttaaaaatagtactctctcattaaatctaatttgacagaaagaagtttaagggaaaaaggagtgctttgtaagtgaaaaagtacaaatctttggcctttctcttgacattttcgtatgtcaaaaagcaaaaaaccttcatgtatttcaatctagtgattactttttgcaccataatttgttttttacaccacaaaaggaggcactttcagtatctgtaaaaggtatttaatcctaaaacatacttacctagagaataattaaaacagaattcaatacaatctagtatctattaggaaattaagagttatcacttctaaaagtcatttgaaagtcaatgatgttatctggtcaatggcaggaaatgggaactggaacaaatataagaacttatgggatttcctacacggagacaaaaaaagatattcctttatgttgtttaaaagtggcagctgctctttctttattccattttaatcaatgagtattgattcaagttttcctttctatttttccttatgataagtttcttacagtagcttatacaacaacaaatagcatagaaaaactactggattcaattgatcatcaggaataagttctcagaaaaacacaggcggaaaaataagcaagaatcccaaatacagaactttacaagctgtgaaacttggtctcttgcaatcatgttactgctcaaattagagacaatcttattgctgtctattggagcagcatcgtggcacatcagcaggcaatgatgatgttgagaacagcagcaaaaataaacaatcgtatgctcatgaagaacccaagcctacaaaatggatacctttcagaaaagtatatacttaaaagacccaagacgtcaggataataaagctctgtatttataatcttttatatgtcctattgtggctattatgcttaagtaaaatagctaaagaaaaaaaagaaaaaaraaacagaaaagatgacaatatcataaaaatgtagctgtctattttggcagctatattgcagaatttcttgactatcttttaatcagctgggaaaaagtcaataactgtatgcaaatgaataaactgtccatatcaaaatacaaaagtactatcaataatcacctctgactttcagatttaaattcagtgcaattgacaaatgcatcactaaaggaaaatgcagcttaaaagatactgcaaaacatttgtgtctattcctgggagcacattttaaaattattgcacagatttttttaattnttatttattttttttaaacaataacagaggtcaaccacagatgtggacctccagcaataaaagcaggaattcaagtgccagatactcagcatattaggtttcctacgtaagtcacagggtaatatgttctaaatatctctaatgtgatccaaaaccctaaaaagagctggcacaaaaccatcgtgaatgactgcctctcttgatgtaaatttttaaaaatattattacagtatcatagtccccactaacaacaactggggtacatataacaatgtattgtgaaattaagtgtatttattctctttaccaatagcaaatgctaccctaccttagtaaaaccaagacttgcttcaatcaatgctgttttgtaaaaatagcaaagcaasgaatntcngtagaagcnntgcttattagaga

SEQ ID NO: 469 - DNA, 555 bp, Homo sapiens
tttttttttggaaaaccaaacatgctttatttcatttttttcacaatttatttaaacatctcacatatacaaaataggtacaatttaatttttctgcttgcccaagaaacaaagcttctgtggaaccatggaagaagatgaaaatgagactggcaaagaacaaatgctgaatctgaagaagaggacaactttgggcaaataatctgcatacttttaattgggaataagatggaaaatatgaatgctaaatcaaattttttaaaaaatacaccacacgatacaactcaatacaggagtatttcttctcaaattcttctagcaccatcaacattcttcaagtatctgaaatactattaattagcacctttgtatatgaacaaaacaaaacaaggacctcagttcatytctgtctaggtcagcacctaacaatgtgrgtcacactcaaggggaaggkgtttgrggtattaaacctttggragttkggttaacytcccyytgtgagaaatcaaaagcccaaagtgtggtgaaagtgtttgggtttcattgttccagttt

SEQ ID NO: 470 - DNA, 612 bp, Homo sapiens
  misc_feature (595)..(595): n equals a,t,g, or c
  misc_feature (599)..(600): n equals a,t,g, or c
  misc_feature (606)..(606): n equals a,t,g, or c
  misc_feature (612)..(612): n equals a,t,g, or c
ggccactcagagtgggtgtcttgtgtccgcttctcgcccaacagcagcaaccctatcatcgtctcctgtggctgggacaagctggtcaaggtatggaacctggctaactgcaagctgaagaccaaccacattggccacacaggctatctgaacacggtgactgtctctccagatggatccctctgtgcttctggaggcaaggatggccaggccatgttatgggatctcaacgaaggcaaacacctttacacgctagatggtggggacatcatcaacgccctgtgcttcagccctaaccgctactggctgtgtgctgccacaggccccagcatcaagatctgggatttagagggaaagatcattgtagatgaactgaagcaagaagttatcagtaccagcagcaaggcagaaccaccccagtgcacctccctggcctggtctgctgatggccagactctgtttgctggctacacggacaacctggtgcgatktggcagtgaccattggacacgctagaagttatggcagacttacaaataaaaaaaaactggctttttgaaaaaaaaaaaaaaaggcggccgtttaaagaccaacntacnnccctgnttcaan

SEQ ID NO: 471 - DNA, 882 bp, Homo sapiens
  misc_feature (852)..(852): n equals a,t,g, or c
  misc_feature (877)..(877): n equals a,t,g, or c
tttccttctccctttcttggccctcctctgctcctccccacaccctgcaggcaaaacaaggaagagatcatcaattatgaaatttgaacaccaagggacctggtgtgcctgggcctgagcagcatcgttggcgtctggtacctgctgaggaagcactggattgccaacaacctttttggcctggccttctcccttaatggagtagagctcctgcacctcaacaatgtcagcactggctgcatcctgctgggcggactcttcatctacgatgtcttctgggtatttggcaccaatgtgatggtgacagtggccaagtccttcgaggcaccaataaaattggtgtttccccaggatctgctggagaaaggcctcgaagcaaacaactttgccatgctgggacttggagatgtcgtcattccagggatcttcattgccttgctgctgcgctttgacatcagcttgaagaagaatacccacacctacttctacaccagctttgcagcctacatcttcggcctgggccttaccatcttcatcatgcacatcttcaagcatgctcagttatgaggagtcaaatcctaaggatccagcggcagtgacagaatccaaagagggaacagaggcatcagcatcgaaggggctggagaagaaagagaaatgatgcagctggtgcccgagcctctcagggccagaccagacagatgggggctgggcccacacaggcgtgcaccggtagaggcacaggaggccaaggcakctccaggacarggcagggggcagcaggatacctccagccaggcctctgtggcctctgttttccttctccctttcttggccctcctctgctcctcnccacaccctgcaggcaaaagaaaancccca

SEQ ID NO: 472 - DNA, 733 bp, Homo sapiens
  misc_feature (640)..(640): n equals a,t,g, or c
  misc_feature (660)..(660): n equals a,t,g, or c
  misc_feature (677)..(677): n equals a,t,g, or c
  misc_feature (687)..(687): n equals a,t,g, or c
  misc_feature (711)..(711): n equals a,t,g, or c
tccccatggttctcctacctaaatgattggtttccctatggctatttctccaagagttaagggatagctgcttaactatgcacctttacagaacattcttagcagtaatgctcaaatttaaaaggcacactcaagatacttccatgtcatggatccttccccaggtcccagtartataaatatagggaagaggttagcatgaacttacwaattgttttaagtaatcctcttgaatgccagtcattaaaggactttgcccttctacatcaaattacatccttttcacaaatccccatttctgtaataactggtgcaaacctaaaggtgctttatagttttactactttgcagatttgcaatgctgcatataatgcagaagagcattaaaaacttttgtaaaaactcatgattttgataaacttttaaagtagcgtttatatgtaaatagaactacacatgggcacacacacttgcacargggcttcagaaaaacgtgcaatataggtgaggaaaaatgtctattgaaactttctcacaggctgcccttattaattaaaactagtgttgggggcaagcaacatctgtttccaagtaggttcaggggactaggcaaaccttaaagggcggcaggcggcctgcngtttgcttcattccttaggnttactgggttcctacanctggttttanttgtcttaggtgtggactttgganggtacagtgtttgtggcttttt

SEQ ID NO: 473 - DNA, 574 bp, Homo sapiens
  misc_feature (1)..(1): n equals a,t,g, or c
  misc_feature (18)..(18): n equals a,t,g, or c
ntctcaattaaacaaaanaaaaaagtggagaactggcagtgacctctactgggggccatggcagggaggggagccttctggaagggctgccttggagattggaatggggactcccagggagacctgcgttccatccctgcctgcctcacccctgccacagactctgcacaccactggatggtgggtccaagcctggcacagtccctgtgcttgtcagagtcattattatgattaatatcaattacgatgccaaaaattgctgggcaaactttgaagacctcaacttgttacaatgacgatgatgatgattcttggcggttacacaatccttcctcctgggggggaggcagctaggaggcccagcaggggggcttctatgctgctgggctcccctagggagttggggtagtctgtgccaactccaggcagctgctgtggcctcacccctgggccccccaattttgggtcatccatcctcaaatacactatttttgcttgtatgcctgtgtcatttgttggttgtacagaggggatatagggagagtggtaggcttcccacacagaaactaggaca

SEQ ID NO: 474 - DNA, 691 bp, Homo sapiens
  misc_feature (5)..(5): n equals a,t,g, or c
  misc_feature (7)..(7): n equals a,t,g, or c
  misc_feature (9)..(9): n equals a,t,g, or c
gtacngnantcccgggtcgacccacgcgtccgcggaaggtccttctgaatcccttccctgttccttaggttgcactagtcgggggttccatgctggggggcagaaggaatgctctctaccgtctgaaaccgttcatcaggaaggccttgatttgtgatgtgctaggagagcacaggatctgcaaatagaaggcacctgtctcccttctgcaggccgaggagaggccgccatggactgtgtgcttcttcatggcttgtttactcttctttcacagaccctacagcttggggcctgggctcctctgaccatcctcattgagaaaggaaagtgagtccagagaagttgatgcttcctacctgttggagcggcccagcagtgtaagcgtggttgttactgccccatccgccatgtccttcagtgccaccattctcttctcccctcccagtggcagcgaggccagatgctgctgctgcgcctgtaagagtgagactaatggaggcaacacaggctcccagggtgggaatcctcctcccagcacccccatcacagtgactggacatggcttggctgttcagagctcagagcagctcctgcatgttatctaccagcgggtcgataaggcagtgggtttggctgaagctgctctgggtcttgccagggccaacaatgagttgttaaaacgtcttcaggg

SEQ ID NO: 475 - DNA, 260 bp, Homo sapiens
atgagtcacatttattgatttgcatwtgttgaatcaaccttgcatcctggggacaaagccaactccattgttgcrgatgaactttttaatrtgctgctggatttggcttgccagtattttattgaggatttttgcacagtgtttaccaaagacattggcatgatgtgttgttgttgttgttgttgttgtagtatctatgataggttttggtatctggatgatgctggcctgataggaatgagttagagagaacttcctta

SEQ ID NO: 476 - DNA, 851 bp, Homo sapiens
  misc_feature (584)..(584): n equals a,t,g, or c
  misc_feature (727)..(727): n equals a,t,g, or c
  misc_feature (755)..(755): n equals a,t,g, or c
  misc_feature (761)..(761): n equals a,t,g, or c
  misc_feature (793)..(793): n equals a,t,g, or c
  misc_feature (825)..(825): n equals a,t,g, or c
  misc_feature (842)..(842): n equals a,t,g, or c
gcgttcgcgtgggtcccgcccccacactccgcccagaggggcctcagcttttccaccactgctttctagtcctttaactcctagaggcaaacttttgggggataagaaagcctgggaggggcctgtgccaaaaccctctctgcctggggactgggcggtgattccgcttctgcctgggctcctgccatggcccccgagaggggctgacactttagctcccggtgcaggtgagaacccgcccggaggaagaaggaaggcgcgggccggggattaggagacggaggcggactcggagccagggaaccaggggtccgggctagagctggagtcgtgagcgcgcgcccgccccgctctgggaggaccgcgagatgcccgtgctgaagcagctgggccccgcgcagcccaagaagcggcctgatcgcggcgccctgtccatctccgcgccgctcggcgacttccggcacacgctgcacgtggggcgcggcggcgacgccttcggggacacctcgttcctgagccgccacggcggcgggccgcccccgagccccgggcgccccccgcgggggccccgckctccccgccgncgccgccgtccgcagtccgcagcgcctcgcctgcgacccgctgtgccttcacctggatctggggcctcatgctggacgcggtgctggcgtatggacgcggcgcgccgaagcggctgcgcaagccacgcgaacccgcccggacnagccccagccgtgcgccacgcgactcantacacnatggcttagtctatccggctccgccgaccatntgtctaacgcagggggcgaaaaaaaaaaactngggccgaccatcgcttnggcatcatt

SEQ ID NO: 477 - DNA, 503 bp, Homo sapiens
  misc_feature (498)..(498): n equals a,t,g, or c
ggcgcagaccccgatcccggctgcgggtcactagtgtctcagaccagaatgacagagtggttgagtgccagctacagacccataacagcaagatggtgaccttccgatttgatctggatggggacagcccggaagagattgcagctgccatggtatataacgagttcattctgccttcggagcgagatggatttctcagacggattcgggagattatccagcgagtggagaccctgttgaagagagacactggccccatggaggctgctgaagacaccctaagcccccaggaggagccagcaccattacctgccctgcccgtccccctcccagacccatccaatgaagagctccagagcagcacctccctggagcacaggagctggacagccttctccacctccttcattctttcttcctgggaactcctttgtctcctgggaaacccattttcccctggaacccccattttccccagggtcccatktttccccatcnatttt

SEQ ID NO: 478 - DNA, 1905 bp, Homo sapiens
  misc_feature (933)..(933): n equals a,t,g, or c
  misc_feature (940)..(940): n equals a,t,g, or c
ggcacaggaccagtggagtgagctgttcatggatgcgctagggcccttcaacttcgtgctggtgagttcggtgaggatgcagggtgtcatcctgctgctgttcgccaagtactaccacctgcccttcctgcgagacgtgcagaccgactgcacgcgcactggcctgggcggctactggggtaacaagggtggcgtgagcgtgcgcctggcggccttcgggcacatgctctgcttcctgaactgccacttgcctgcgcatatggacaaggcggagcagcgcaaagacaacttccagaccatcctcagcctccagcagttccaagggccgggcgcacagggcatcctggatcatgacctcgtgttctggttcggggacctgaacttccgcattgagagctatgacctgcactttgtcaagtttgccatcgacagtgaccagctccatcagctctgggagaaggaccagctcaacatggccaagaacacctggcccattctgaagggctttcaggaggggcccctcaacttcgctcccaccttcaagtttgatgtgggtaccaacaaatacgataccagtgccaagaaacggaagccagcttggacagaccgtatcctatggaaggtcaaggctccaggtgggggtcccagcccctcaggacggaagagccaccgactccaggtgacgcagcacagctaccgcagccacatggaatacacagtcagcgaccacaagcctgtggytgcccagttcctcctgcagtttgcctttcagggacgacatgccactggtgcggctggaggtgggcagatgagtgggtgcggcccgagcaggcggtggtgaggttaccgcwtggaaacaktkttcgsccgcagytcctgggactggatcggcttataccgggtgggtttccgccattgcaaggactatgtggnttatgtntgggccaaacatgaagatgtggatgggaatacataccaggtaacattcagtgaggaatcactgcccaagggccatggaracytcwtcctgggctacyatagtcacaaccacagcatcctcatcggcatcactgaacccttccagatctcgctgccttcctcggagttggccagcagcagcacagacagctcaggcaccagctcagagggagaggatgacagcacactggagctccttgcacccaagtcccgcagccccagtcctggcaagtccaagcgacaccgcagccgcagcccgggactggccaggttccctgggcttgccctacggccctcatcccgtgaacgccgtggtgccagccgtagcccctcaccccagagccgccgcctgtcccgagtggctcctgacaggagcagtaatggcagcagccggggcagtagtgaagaggggccctctgggttgcctggcccctgggccttcccaccagctgtgcctcgaagcctgggcctgttgcccgccttgcgcctagagactgtagaccctggtggtggtggctcctggggacctgatcgggaggccctggcgcccaacagcctgtctcctagtccccagggccatcgggggctggaggaagggggcctggggccctgagggtggggtaggcagatgggccaaggtgaccaccattctgcctcaatcttttgcaagcccacctgcctctctcctgctgctcctccagctgtatctgcacctgcctctctgtcctggccaggggtggacaactggggtcccccaaaactcagtcctggcacctcaactgtgacaatcagcaaagccccacccaggcccccatctgggatgatgggagagctctggcagatgtcccaatcctggaggtcatccattaggaattaaattctccagcctcaaaaaaaaaaaaaaaaaaaaaaaaaaaaaaaaaaaaa

SEQ ID NO: 479 - DNA, 775 bp, Homo sapiens
ggaagaaagtacactaacacttctaggagcctcttctcagaattgtagttattccaaaatagcaaatagttggcataaagggaaggattatgtcagcaaaacctttttaaaaatccttatttgattaatgatggtaaaaactaaaaaaaaacagagttttctattaaaatagcctatggccttggctaagacagctatcctagtaagattatcttattttctatttatagacacatccactyaaactgcatttttatccagcgttgatcttcacactcactgttcctatcaactcatgttgccagaggccattgccattgtttgctcaccaaagcataaagacactggcatcttcaggctcaccaatgctggcatgcttgaggtttctgcttgtaaaaaaaagggctttcatccacacaccaaggagcccaggctgttcagtatatgcaaacatgtgttggtaaaagacataaaaataattgtgttggatctgaggtgatatgttctgaatgtaagcaccgtcaacatcagacacctactcatggacatgtggttgccggattttcttaagatgtttccagaaatgactgatattttatatttatacattttagatgacaaagcttgatatttattgctgttgcacattttaaagttttctttttgggttgctctgtgtcaagagaggttacatggtgttaaatcggtacctgataatgtacccaaatactatggccagataataaattgtgctgcaaamaaaaaaaaaaaaaaa

SEQ ID NO: 480 - DNA, 1297 bp, Homo sapiens
  misc_feature (5)..(5): n equals a,t,g, or c
  misc_feature (26)..(26): n equals a,t,g, or c
  misc_feature (31)..(31): n equals a,t,g, or c
tccgnaattcccgggtcgacccacgngtccnaatcaagctctaagtctttggaccctctgtggaaacatttctaacccgaattttaatttggccttttcaaccaaaggcttagagtggtagcaagggatttcttccaataggaaacctgatgtttctgatttaaagagaaggtgatattttaattgtttgaattaagctccttgcaaagttcgggtgtgtttacccacttagggctttctttcccagtcaacgctaacacattttgttaaatgatccctttccctgctcacattgtgtgtcatttctcatcatcagtagtcctccagcctgggcagctgtccccaccctttttcatgtaggtgcaggaagttaaatctcatttccaggatgcatgtgaacatttacaaagttgaactttgagtgcattctgctcatatgaattattgggattgttgatatatattgtattatgctaccaaagaaatattggttttattagaaggaaatggtcatcctctggaccatggagactagctcagaatacgctgatttccctctcctgactttgccaagcctttggctgcttttgcctgataaagggcagggccatctgaagacacttcccccagtcggctttggagtcacgggagctagtgcctgctcacacatttttcaaaagggcagtgcactcagaacttcactgtacctgggatttttaattcctcttgcagtgttgaccagcagagagacttgaggctactttaagcctccactatgtgtttgtagataaaattctccattcaaacattttaaaggactttgaacattatctgcttatggaagttgtgcccttcacttggttagtaaccacctcagccataatacttaccatcataggtttcttaaaatgctttttttttttccctaaacttgagtttccttagtgatttcaaaatgaagtataagaatatcagatccagttagcaaaagcctaggacttgtttctccaaacattgtactaacattcaacttgttttaaaattatgactcaagaattttaaaaaattattctggacatgaattaaaacttttttataatataagtatttttctgattgaaaaaaggatataattgacttcactctaattgtcatgtatatttccataagtaaatggattttgaagtatttttattttttgaactttatttaaagcatttgtgatgacatgttcaacttttgcatgtatgtagcctttgaagtaaaaataaataggaatgttaggctcacgttaaaa

SEQ ID NO: 481 - DNA, 2155 bp, Homo sapiens
aatatagtaatttttaaatttgttaataatgaaaacccttaagcatgcaggatgaggtatttgggttttttttttagatcgatcacatctacagaaaatggctaaaccaagttaacttttattatagacagtgaataaaacaccaaaaacccaaaaatgctttaaccacagtataaataatagattatacacatcatcttaataactatttttaagttatttaccatagcctctgtatagaccttaggaacagtgtttcagtgatctggcaccagtttattttgttctgctgaaattctgtatcacaaatgtgctacctggtttttgtccattagataattactctttataaggaaaggaaagagaagcagagttagttccagctctaatagggatcttcaaagttattttgtcttgatgtatgtaacagtaattctttacatcttttgatttttctcttcctttttattcactcttcccacgaatttaaatgtttaagttatattcatcactagcaaggatgrtaaacacttgtgcactgaaagctaacagggagagggtacacaatattttacagkttcttaaacataatttartgcatcaccttccacttgctaacataccaagtcagttattttcaagggaagaaccttttaaattatggtcctccatttactacttccactgagagtatgctctcattcctcaggtgttttgagaaacatgactaataaccacacaattaagtagagtcattccaagtcctatggcctggaaattgtattccctataatatacaaattttcctgtaataaagtcaacttagaaactccaaggaggttacatgttttccaacatatcctaaaaactgtgatataagctaacatataatttgccttacgtcaaaagaatatgttttgttgcagctgattccagtttataatagatccctagtaaaaagctttgattcaacacaattgttcatcttcacatcccaaacagaatcactgtttcttgaatatatatttttgaagtttttttgtgcaatatattactaaatcagttattattttacttttccaaattcagagaaagaaaacagattacctgaattcatggaaaaggtggatcacctccctttttccaccttcaagcctttcctgtcctcatagccagcatgacttcttttaacttggattcctttgtatatagtaaagtttagtatatatatatttttttctttttgctactttctgaggcattatgtaaagggctcatactagatgttcagttaaatatactttagcacaaagtcaaactagagaatgtgttaaggagggaatgtatatgtcttggtagaccaggaggcctttgccagcaatttaagcaacagatgtgaatacttcacaaagctgtaaagaccattgtcttaaatactacaacaacttaacacccttttgtgaagatcacagcatttatctaagaaactgtgaggctttctggtttacatatatcttacaggtgtttttttgtatttttttttttttttagtttgaaatgtgtaagctttgatttaaaccaagtttacttcagtatgttaatgatgtagtaaaaatatttattgaaaggtgaattcgagtattttaatgttatacctgccattttttttcttaaagcatattctttgcatctaactgccagtgccattgtcaaaacttattttttaaatcgttgtacatttcttattaaactaagtgcttaattttaaagtattatgttgccatcatatagtgtataaaaatgtataattgccaattgattgtaactattatttatttttaaatgaaagtgtaagaatgctttctgattcaacaaatttgttatcaaactgtttccttatcctcttttctgatgtagcataaaaattgtcccggtttgagttataactgccagtagatgaccagtcacaagtgaaccacttctcagttgccaatctttgctcatattaaaaacaacttacaaatacttagtttttgtatctaatctctgattattaaaatgtttataaagtttatttttaccaaagagatgcaattcattatgagaaagtattgcataataaattttgttttataactttaaaacctgtgccgaa

SEQ ID NO: 482 - DNA, 459 bp, Homo sapiens
  misc_feature (368)..(368): n equals a,t,g, or c
  misc_feature (416)..(416): n equals a,t,g, or c
  misc_feature (437)..(437): n equals a,t,g, or c
  misc_feature (447)..(447): n equals a,t,g, or c
gcggagatgcagctcaaggggaagaaaggtggtgcgggcctgcgggcgggacagagggggccggtaacttgtggaggggcggcctgacaaaggccgggcgcggagggaccgtgcgaggagcagtgattgawctgccgtccaatcccagctctgccgctgactagttttgaaacctgtagaaaggctccgtgtctgctttaattaccggtccccccaggattgtttcaagaattcagtagctgaggctgggagtggtggctttgtaatcccagcgctttgggaggcctgggcgggaggatcgcttgagcccgagaccggcctgggtgacatggtgagatctcgtctctagaggaatgcaaaggttggcncgggcgtggtggcgcacgcctgtggtcccggctgcttgggcggctggngtgggaggattgcttgacccnggaggtcaanggctgcactgca

SEQ ID NO: 483 - DNA, 710 bp, Homo sapiens
  misc_feature (65)..(65): n equals a,t,g, or c
cctcgtcatattctaagatatccctaagaaattcttcaaaagtaacggaatcagcatctgtgatncaatcccaggatgtgagtgggtctgaagatacattcccaaataaacgacctaggctagaagataagactgtttttgacaatttttttatcaagaaagagcaaataaaaagcagtggtaatgatccaaagtatagtacaaccacagctcagaattccagcagttcatccagtcagagcaaaatggttaattgcccagtttgtcagaatgaagttctggagtctcagattaatgagcacttggactggtgccttgaaggtgacagcatcaaagtcmaaagcgargaaagtctttgaaaaaggtttcaaagtctcaagtaccacctgtattatctcactaatgtgctatgtcagccagtcaggaagttctggttaatactaagatttgtaggttataatctagttcacataaccaatagaaagtgtcctattttatatatacgcatataagattgtaattttaagatgttttgtgtctcagggtgctacattcactcttgccttaggtatactgtaacccaggttctgcctgtcgtgtataatttttagatactttkgttctttcttgctcttaaggattttaaaaacctgktaatctttttatttgtatactttcctaaaaatattcatatggggaatcctgtcaaa

SEQ ID NO: 484 - DNA, 1279 bp, Homo sapiens
gcccacgcgtccgccgcaagccaacaggggtgtcgtgcggtgggagtacttccgcctgcgtcctctgcggttcagggcccctgcactgaggctgcagaagtcccagtcatctgatctgctggaaagggagagggagagtgtcctgcgccgggagcaagaggtkscagaggagcggagaaatgctctcttcccagaggtcttctccccaacgccagatgagaactctgaccagaactccaggagctcctcccaggcatccggcatcacgggcagttactcggtgtctgagtctcccttcttcagccccatccacctacactcaaacgtggcgtggacagtggaagatycagtggacagtgctcctcccgggcagagaaagaaggagcaatggtacgctggcatcaacccctcggacggtatcaactcagaggtcctggaagccatacgggtgacccgtcacaagaacgccatggcagagcgctgggaatcccgcatctacgccagtgaggaggatgactgagcctcgggatggggcgcccaccccctgccctgccctgaccctcgtgggaactgccaagaccatcgccaagcccccaccctaggaaatgggtcctaggtccaggatccaagaaccacagctcatctgccaacaatcccaccatgggcacatttgggactgttgggtttttcgtttccgtttctatcttcctttagaaatgtttctgcctttggggtctaaagcttttggggatgaaatgggacccctgctgattctttctgcttctaagactttgccaaatgccctgggtctaagaaagaaagagacccgctcctccactttcaggtgtaatttgcttccgctagtctgagggcagagggaccggtcaaagagggtggcacagatcgcagcaccttgaggggctgcgggtctgagggaggagacactcagctcctccctctgagaagtcccaagctgagaggggagacctgcccctttccaaccctgggaaaccatccagtctgagggaggaggccaaactcccagtgctgggggtccctgtgcagccctcaaacccttcaccttggtgcacccagccacacctggtggacacaaagctctcacatcgataggatcccatgaggatggtccccttcacctgggagaaaagtgacccagtttaggagctggaggggggtctttgtcccccacccccaaactgccctgaaataaacctggagtgagctgccaaaaaaaaaaaaaaaaaaaaaaaaaaaaaaa

SEQ ID NO: 485 - DNA, 480 bp, Homo sapiens
  misc_feature (354)..(354): n equals a,t,g, or c
  misc_feature (371)..(371): n equals a,t,g, or c
  misc_feature (470)..(470): n equals a,t,g, or c
  misc_feature (475)..(475): n equals a,t,g, or c
tgactcgcagtggagtcagtcaacaacccaggtctcctggctcttaagacgtttcctttttaatattataggaatgggaatgctggctccttttacagtactggtccctttacactgtactgcatactcgttttttcagtggatatatgagcttcttgtcaaaattatgtgggtcccatgaagaaacatctaaccaggggaagggggaaggattgagacataagacgtacttatataagatttcttttaagaattccaatcttggacatgttaaatttttttatattttctcatgtttaaatctcagttcgtttttcatgctgtgctcagcacgtaagtgtggggaaatggacnaagggggctgcgggaangaccgctggctgggctcaacatgcctgtgccttttccccttcatgtgttcttgtgtctgatgcatctctaacacagaatgacattttactgtttttcanaaaanaacct

SEQ ID NO: 486 - DNA, 947 bp, Homo sapiens
  misc_feature (3)..(3): n equals a,t,g, or c
ttnggccgagcttgggtcatggcggcgccgggcgcgctgctggtgatgggcgtgagcggctcggggaaatccaccgtgggcgccctgctggcatctgagctgggatggaaattctatgatgctgatgattatcacccggaggaaaatcgaaggaagatgggaaaaggcataccgctcaatgaccaggaccggattccatggctctgtaacttgcatgacattttactaagagatgtagcctcgggacagcgtgtggttctagcctgttcagccctgaagaaaacgtacagagacatattaacacaaggaaaagatggtgtagctctgaagtgtgaggagtcgggaaaggaagcaaagcaggctgagatgcagctcctggtggtccatctgagcgggtcgtttgaggtcatctctggacgcttactcaaaagagagggacattttatgccccctgaattattgcagtcccagtttgagactctggagcccccagcagctccagaaaactttatccaaataagtgtggacaaaaatgtttcagagataattgctacaattatggaaaccctaaaaatgaaatgacaatgattttgtatcagtggtccaaacagaactaagcataaatcattgtgccatcccaaacctcgttccagccgccttgcccatactagattctaaatgtttctaaaggcaaaccccaatgtgtcaagacagacttgtttaggtgtaattttaggaattatgctggttcatcaggaagcagagggggagttttaaaagtcaagcttaaattgaagtttaaattcatctataaccaaatcaaatgatcagaggaaattctgtaatcaatgctggaaatcgttacattgtttagaacattcttgctcatgcctgtatttgcacaaataaatgaaacttcgctgtcaaaaaaaaaaaaaaaaaaaaaa

SEQ ID NO: 487 - DNA, 585 bp, Homo sapiens
  misc_feature (547)..(547): n equals a,t,g, or c
accaggaccacggggcctggctgcgcggcggggatgtgtggctggacagctgccggtttgctgacaatggcattggcctgaccctggccagtggtggaaccttcccgtatgacgacggctccaagcaagagataaagaacagcttgtttgttggcgagagtggcaacgtggggacggaaatgatggacaataggatctggggccctggcggcttggaccatagcggaaggaccctccctataggccagaattttccaattagaggaattcagttatatgatggccccatcaacatccaaaactgcactttccgaaagtttgtggccctggagggccggcacaccagcgccctggccttccgcctgaataatgcctggcagagctgcccccataacaacgtgaccggcattgcctttgaggacgttccgattacttccagagtgttcttcggagarcctgggccctggttcaaccagctggacatggatggggataagacatctgtgttccatgacgtcgacggctccgtgtccgagtaccctggctnctacctacgaagaatgacaactggctggtccggcaccc

SEQ ID NO: 488 - DNA, 3470 bp, Homo sapiens
aattcggcacgagaaggatcggggccctcgccgctctgtctcattccctcgcgctctctcgggcaacatggcgggtgtggaggaggtagcggcctccgggagccacctgaatggcgacctggatccagacgacagggaagaaggagctgcctctacggctgaggaagcagccaagaaaaaaagacgaaagaagaagaagagcaaagggccttctgcagcaggggaacaggaacctgataaagaatcaggagcctcagtggatgaagtagcaagacagttggaaagatcagcattggaagataaagaaagagatgaagatgatgaagatggagatggcgatggagatggagcaactggaaagaagaagaaaaagaagaagaagaagagaggaccaaaagttcaaacagaccctccctcagttccaatatgtgacctgtatcctaatggtgtatttcccaaaggacaagaatgcgaatacccacccacacaagatgggcgaacagctgcttggagaactacaagtgaagaaaagaaagcattagatcaggcaagtgaagagatttggaatgattttcgagaagctgcagaagcacatcgacaagttagaaaatacgtaatgagctggatcaagcctgggatgacaatgatagaaatctgtgaaaagttggaagactgttcacgcaagttaataaaagagaatggattaaatgcaggcctggcatttcctactggatgttctctcaataattgtgctgcccattatactcccaatgccggtgacacaacagtattacagtatgatgacatctgtaaaatagactttggaacacatataagtggtaggattattgactgtgcttttactgtcacttttaatcccaaatatgatacgttattaaaagctgtaaaagatgctactaacactggaataaagtgtgctggaattgatgttcgtctgtgtgatgttggtgaggccatccaagaagttatggagtcctatgaagttgaaatagatgggaagacatatcaagtgaaaccaatccgtaatctaaatggacattcaattgggcaatatagaatacatgctggaaaaacagtgccgattgtgaaaggaggggaggcaacaagaatggaggaaggagaagtatatgcaattgaaacctttggtagtacaggaaaaggtgttgttcatgatgatatggaatgttcacattacatgaaaaattttgatgttggacatgtgccaataaggcttccaagaacaaaacacttgttaaatgtcatcaatgaaaactttggaacccttgccttctgccgcagatggctggatcgcttgggagaaagtaaatacttgatggctctgaagaatctgtgtgacttgggcattgtagatccatatccaccattatgtgacattaaaggatcatatacagcgcaatttgaacataccatcctgttgcgtccaacatgtaaagaagttgtcagcagaggagatgactattaaacttagtccaaagccacctcaacacctttattttctgagctttgttggaaaacatgataccagaattaatttgccacatgttgtctgttttaacagtggacccatgtaatacttttatccatgtttaaaaaagaaggaatttggacaaaggcaaaccgtctaatgtaattaaccaacgaaaaagctttccggacttttaaatgctaactgtttttccccttcctgtctaggaaaatgctataaagctcaaattagttaggaatgacttatacgttttgttttgaatacctaagagatactttttggatatttatattgccatattcttacttgaatgctttgaatgactacatccagttctgcacctataccctctggtgttgctttttaaccttcctggaatccattttctaaaaaataaagacattttcagatctgagagctacatctcaatgtctgtggttataattctggacaggataaatagctaaacttaatgtaggcaaatgcagagacatttatctgaaatgtagacctctacactgagacttttctggcatagtggctaaaacaagatctacacatgcataaaaagggacaatcaccttttcttcataaatatacagctttaggaatatttcaccattctttgtaggacatagtagtccttgtctttttttctcctgacattggaaagatgtgctaattgaaacttgacttagtaggaacattgtgccaactcaaaaccttgatttagtaaaaatctcaatgtttagatcctttgtccagtggtggtgtttatcagggaatgtattcagcttgctcagaaaaccaaaagggtattaaagccacaaaagcaaaraagaaaaaamaaaacttcccatgtttggatcttgttctagttagaaaaattaakttgaaattcttggrctttttcattcatgaggcaaatgctgtaataccttcccctttgacaggtttggattcttaacattactagtggtatttcaggaagtgacgttacagttactttccttatagcggctaagtgtattaagttgaatgtaacgatggtaatattaatttgtttgaactgaggcccactactgattctttgacaaattgaattcttatatttaaataattttatgggaatgttccatcataatttctaaatcatttatatatcaaggtagccttaatttgtatatgtttcagtacaatgagattttattgcctctgggatgctgtttagtttgtattttgttgaacgtttttatcctaggaagagaaacctatgacttgtgtacctagatcatctgttacattaaaaagctgctctttcagcattagagctataaatgaatgttaccttgtcgggaacaatctaggtttagctgtatgagctatgtttattatggtgctaatgttcagtagccacatttgactaatgtctccattctctgtgatgctgtggctagcagcagagctcgccagttcatgcctggacatactgtcagggctgggccctccagctagctcctttggggttgagtccgtatctttttgatgtggaagtataaagcaagtatcttgatttctaaacccagcaattttagaattgacctttatgagtgaagacttttggagcttttaaagaccttggcagtcatgatctcaaaccaattaggagctccaagctcccttcccaggtaactgttgggagcaatggcatcactgtatgcccttgtaatggctggaagggacatgatcttgtaagtaggaaagctgtaactaaaaattgtattgtttgcttattagccatgtatctcttaaaattttgttatgtttacaacgatgtaccttattggcaacaagttattagtttgatgtttaacaatagtgcctttagtaaattattttacaactaaaaaaaaaaaaaaaaaaaaaaaaaaaaaaaaaaaaa

SEQ ID NO: 489 - DNA, 637 bp, Homo sapiens
acgccttggccatcgctgaaaagtctcaggagttcttggaagcagataatcgccagctgcccaatggtgtttacacaactgcagagcagcgtccgaatgcctacatcccagaagcagatgccactcttcctttgccaaaaccttatggtgctttggctccttttaaacccagtgaacctggagccaatatgaggcacataaggaaacctgttataaagccagttgaaatctgaatatgtgaacaaatccaggcctctcaaggaaaagacttcaaccaggcttccttgtacccacaggtgaaaaatgtgagcataatacttctaatattattgataagtaaggtaaccacaattagtcagcaacagagtacaacagggtttctatttacccaccaactactatacctttcatgacgttgaatgggacatagaactgtcctacatttatgtcaaagtatatatttgaatygcttatattttctttttcactctttatattgagtacattccagaaatttgtagtaggcaaggtgctataaaaatgcactaaaaataaatctgttctcaatgaagtacggaaaaaaaaaaaaaaaaaaaaaaaaaaaaaaaaaaaaaaaaaaaaaaaaaagggcggccgc

SEQ ID NO: 490 - DNA, 1889 bp, Homo sapiens
  misc_feature (26)..(26): n equals a,t,g, or c
  misc_feature (57)..(57): n equals a,t,g, or c
  misc_feature (1295)..(1295): n equals a,t,g, or c
  misc_feature (1370)..(1370): n equals a,t,g, or c
  misc_feature (1844)..(1844): n equals a,t,g, or c
aactaagtggatcccccgggcacatnatgttgatactgttcgccatagcgttgctgntgtgtctgggcgaactgacgtgccagttcatcctgctgcatcgcatcgatttcatcatcgttgtactgatcgccagaatcgtactgattgcgctgggcttcacgggctttttcttccgccgcacgctgtgagggcagcttaataccgtaagacgccagttcacgacgagttggcacgcggatacgtttcggtcgtggcaactgcggaccaatcccctctttgacctgaggacgcggtccaccgctatttgccagactgaagactggcgcggcaacggttgcggcagccccgtcgccagtgtcgcttttttcacgccagatgccagcggggaaacagcggcagcggcttctactggaggtactgctgcaacagaaggtgctttcagcgaagatttgatcggttctggttctttaaccggttctggaatcggttgataccaggccgcaagttgttcacgttcacgggctcgcttctcttcaacttcttcaaagtagtaaagcggcggacgcgcgggttttgtctcttctacaacgggttcagctccacaacaggctgctgttcaacgggttgcgsctgttggtacaacgggytctkarcggctggctgctgataagtttgctcagtctggtatgtagactgtgragcaaaagtggattgctgctcttcggcttgccaggcgttacctgccaccggttgttctggcgcaggggcataatacggctgttgcgcaggttgttcagctgcaggtgcataatacggctgctgcggctgtactggttgttgcagcggctcattatattgcactgcagctgcgcatattgtgactgctgtgggtaaccttccggtgcaggagcaataaccggctctcccgtttgtggacccggtacaggctgccaggctactgtaggttgcgcaggtggaacatcaacagaggcaacaggcggcgtctgagtcacaggttcaaccggcgcagccagctttgtgtcgccgtggtagcagcagctgctacagcgacaggttcggtaattggcgcaccgtttaataatggatcgtattcgtcatattctggctgcgttgcacgrttgcccgaaaatagacgtcgtccgggtcggcagccacaccgcgtgcagtgtaggtaatctcttcgtcatcatcccatccgctttaccggagaacaacgcagcgtctgtttgccgccccatcggattaatgaatttttccgccaaccgttttaacgnacctaagccgccgcgaagaatacgggcacggcgtgattcatgctgtttgcccgtgattttcatcttcatactctncgtcgtcttcatactcatcttcatcgacccaggtatcatcgcgacgggtacgattactggcgaaggtgagaatgtttaaaatccagccgccgagtttttcagcaatgtcacccatgaccaaccggtgaacaacgtcaggcccgctgcccaaacgcagagcagcgcaatagttcccccgctactgtgtagcagtggttgtarcstagtgcttagtaarctgccmatgacgccaccggaggcaaaataccagataycgtcagcgttgattgccgccagaccacaggaggtaaggatgagcgccaaaacgccaatgatgcgtagcgaaacggcaaaataatcaatgkmytcgtcgctggactgatgacgccaggcaaaccaacaaccgccgacaataatgacgggaatggtgtaagccattcacgccaaaaataaagaacagcgtatctgccaaccacgcaccgggcatcccacctnaattatggataggttcatgccaggccgtttgcgaccagctggggt

SEQ ID NO: 491 - DNA, 493 bp, Homo sapiens
  misc_feature (453)..(453): n equals a,t,g, or c
  misc_feature (472)..(472): n equals a,t,g, or c
  misc_feature (475)..(475): n equals a,t,g, or c
  misc_feature (491)..(491): n equals a,t,g, or c
taacgatttgtgttgtgagaggcgcaactgcgatttctgctgaacttggaggcatttctacgacttttctctcagctgaggcttttcctccgaccctgatgctcttcaattcggtgctccgccagccccagctkggcgtcctgagaaatggatggtcttcacaataccctcttcaatcccttctgactggttatcagtgcagtggtaatgatgaacacacttcttatggagaaacaggagtcccagttcctccttttggatgtaccttctcttctgctcccaatatggaacatgtactagcwgttgccaatgaagaaggcttttgttcgattgtataacacagaatcacaaagtttcagaaagaagtgcttcaaagaatggatgggtcactggaatgccgtctttggacctgggcctgggttcctggggaattaaaattgttacagcagcagnggtcaaacagccaattttnggncgtaaaactggtgagncg

SEQ ID NO: 492 - DNA, 473 bp, Homo sapiens
  misc_feature (399)..(399): n equals a,t,g, or c
ggcgggggagagggaccagggaaggcgtcggggggaatctcgcgagggttggagttttggcgagagtttgtggaagatggcgcctgttgtgacagggaaatttggtgagcggcctccacctaaacgacttactagggaagctatgcgaaattatttaaaagagcgaggggatcaaacagtacttattcttcatgcaaaagttgcacagaagtcatatggaaatgaaaaaaggtttttttgcccacctccttgtgtatatcttatgggcagyggatggaagaaaaaaaaagaacaaatggaacgcgatggttgttctgaacaagagtctcaaccgtgtgcatttattgggrtaggaaatagtgaccaagaaatgcagcagctaaacttgggaaggaaagnactattgcacagccaaacmttgtatatatctgrctcagccagcgaagactttcatgttgtctgtaaagtgttct

SEQ ID NO: 493 - DNA, 851 bp, Homo sapiens
ggaactcagtaacgccttgagctgggttgattgaggatgtgtgaaaagctcacagagcccgatgcctgctgctatttcacggcaatgagcctttttctttctacactgaagattttcttcttatttaatgtggtttattttgggctcagaaataattgctctgttgaaaataatcctttgtcagaaaagaaggtagctaccacatcattttgaaaggaccatgagcaactataagcaaagccataagaagtggtttgatcgatatattaggggtagctcttgattttgttaacattaagataaggtgactttttccccctgcttttaggattaaaatcaaagatacttctatatttttatcactatagatcatagttattatacaatgtagtgagtcctgcatgggtactcgatgtgtaatgaaacctgaaataataagataataagaaaagcaataattttctaaagctgtgctgtcggtgatacagagatgatactcaaattataataaaactcttcattttgtgaattatagaagctactttttataaagccatatttttttagggaaactaaggagtgacatagaactgatgaatgagyaaaagtaagttttgctggatttttgtagaactctggacgttgaggattcattatgctgtggttaactttaaatatttttgaattccaaatatctgaattaatgagccttgtctttacaaatatgtgccattgtgcaacatcggtggattttctaaaaataatgtaaatgtcttctattaaatgttgagtgcaataaaatacagaagaattctcaaaaaaaaaaaaaaaaaaagatctttaattaagcg

SEQ ID NO: 494 - DNA, 1500 bp, Homo sapiens
  misc_feature (1430)..(1430): n equals a,t,g, or c
  misc_feature (1451)..(1451): n equals a,t,g, or c
  misc_feature (1454)..(1454): n equals a,t,g, or c
  misc_feature (1457)..(1457): n equals a,t,g, or c
  misc_feature (1499)..(1499): n equals a,t,g, or c
cgcacagccggcctttctcagcgaaagcctcctgcgaccccgcgtgagcccacgatcgccaccgtctcccgttgaaaatatcttcttctctcgtatagtgttagcttgatgctccgttagatactttcaatggaaacagatttgcactccgtttgacagccattttcctccaaccactcgggaaactcgtagtaagagcattacatgggccctggaatactgattcgcctgataatttggaagaagtgaagtttttacttcatatgtgggtagctctgttttacagcaatcagaacaaaatcatacgatcttcccgaaaggttgtagaacacagcaacccagcaaaatatgtgtctataaatagcacgttagaatcttgtgagctccgtgaaattgaggagtcccttggtttggaaaaatgttctgcagactctctgttggagactaacgaaatttccagggctcatgctgctgaagtatccttccgtgatcctaactgcttgcttcctttcattaaaacaccacttacccaaggcttggaactctgtgtacaaaatgaacagaaaaaaacttttgcaagagagtgtgatccagacacccaagaagaccagaatttcatctgttcttacaataatgaggtaactggggaagaagctaaacaagaatcattggagacttctaatcttgtgctttcgggtattggaagtacacaaactaatggaccttctgttcctagtgaagaagaaattgttcagccactggatagcacaagagtggcttcttacagtggcactgttactcaagccacattcaccaggacttacgatgggcctggcagtcagccagtgatatgtcagagctctgtgtacggcacccttgaaaacaaagtggatattcttgatgcagcagtgcaaacaaaaacaggtactttacaggaccttatccaacatggcagccccataaacaatgaatgtcacccttccttggaaagaaaggatgataatatggggkgtgcartgattaacccggaaccaattactctcacctttgaaaaaaatgcacatgtaccaatacagacagaaggtgtaaatactgctgatgaacctacaacctttaagaaggagttgattaagcaagtatcacctgctgcaagccttagacatcctgtatccacctcggaaaatgcacgaacacaaggcctgagggacattccctctctagtagttgcaggacagaagggcactaagtacctttgtgcctcgtcagtaggtggagagacacttgataaagcagtgtgttcattacagaaggagacgccccttccagtctctctaccatctgataaaacaatggtcatggaggcactatcattagctaaaagttctagtcatctatcacccagtgaagaartgagatgcactcaggatttnctttyacagactyagartctnctnggnctatctttagaaaggcttcttagaacttgacacaggttgaant

SEQ ID NO: 495 - DNA, 491 bp, Homo sapiens
  misc_feature (452)..(453): n equals a,t,g, or c
gactgaggaggctcggtttgtagagccccgctcaggcacagggaggaggagatgccagggctcctgccttttgccacatcggcctcgtgcagtgagggctctgtgggctggggctgctgcccctgcctacctcctgcctgtccccagaggctgaggakagggggtactgtgcccaccacacatrattaggcctcagacccaactctggtcctggctccacaacagtggctgccactcactttgtccagaaggtggcttgggggtggatatctttgggttgctggaaaaggtgtgggaaggttcaggatggtgggagggactgaggtccctgaggtgaagaggcccttggtcctgacgggtttgacccgtgcctggacccttggagcagtgttgtgtgaacttgcctagaactctgccttctccgttgtcaataaagcctccccctcatgacnnaaaaaaaaaaaaaaaaaaaaaaaaaaaagtcgtatcga

SEQ ID NO: 496 - DNA, 1317 bp, Homo sapiens
  misc_feature (1310)..(1310): n equals a,t,g, or c
gaggatagggagcctggggtcaggagtgtgggagacacagcgagactctgtctccaaaaaaaaaagtgctttttgaaaatgttgaggttgaaatgatgggaaccaacattctttggatttagtggggagcataatagcaaacacccccttggttcgcacatgtacaggaatgggacccagttggggcacagccatggacttccccgccctggaatgtgtggtgcaaagtggggccagggcccagacccaagaggagagggtggtccgcagacaccccgggatgtcagcatcccccgacctgccttctggcggcacctcccgggtgctgtgttgagtcagcaggcatggggtgagagcctggtatatgctgggaacagggtgcaggggccaagcgttcctccttcagccttgacttgggccatgcaccccctctcccccaaacacaaacaagcacttctccagtatggtgccaggacaggtgtcccttcagtcctctggttatgacctcaagtcctacttgggccctgcagcccagcctgtgttgtaacctctgcgtcctcaagaccacacctggaagattcttcttccctttgaaggagaatcatcattgttgctttatcacttctaagacattttgtacggcacggacaagttaaacagaatgtgcttccctccctggggtctcacacgctcccacgagaatgccacaggggccgtgcrctgggcaggcttctctgtagaaccccaggggcttcggcccagaccacagcgtcttgccctgagcctagagcagggagtcccgaacttctgcattcacagaccacctccacaattgttataaccaaaggcctcctgttctgttatttcacttaaatcaacatgctattttgttttcactcacttctgactttagcctcgtgctgagccgtgtatccatgcagtcatgttcacgtgctagttacgtttttcttcttacacatgaaaataaatgcataagtgttagaaaaaaaaaaaaaaaaratttattaacggcgcaacttatcccttagtagggtaatttagctgcactggcgcgtttcacgcgtactggaaacttgcgtaccactatgctgagaatccttcgcactgtaatcgagagccgcgatgcctgacagtgcctgatggatgcgccttagcgtacgggtttgtgtgcggacgaatcactaggccttgtccttttgaagggggctcgggagggggggtgttccaaaaatgggccaaatttggcgctagttaaacacgtttgtggggaaaagcaaagggggttatanaagtttc

SEQ ID NO: 497 - DNA, 944 bp, Homo sapiens
  misc_feature (932)..(932): n equals a,t,g, or c
  misc_feature (942)..(942): n equals a,t,g, or c
  misc_feature (944)..(944): n equals a,t,g, or c
tcgacccacgcgtccgcccacgcgtccggacagacccagcctggagctggcccctggcctgtgtgctgacttcttggggtcctcaaaccactgtatttttctgttgagcctgtacttggggagagatcagtagcatttgaggaagtaagagaaaagaatcatggtacctcagggtttctttccctttactcgctggcagccattgtctgtgggcacctcatgtttttccacactctactgggccgtggaggtaacgatcacccaggccagtctcctctgcctgggatgcgccctctgagaggaggcctagcagggcaggctccctctgggcatccctggatgcagcctctggacacatgcctcctttaaagtgtccgggtgcagctcaggttgagtggaggtagaaggagaaacagacatgtttaccacgcgttttccaaagctcctgatctttcccaagattgtaactgaaaactgctgtctcttgttttgttcgttttgggggtggtggtgctggctgggccatgcttgtgaagtgatgtgtgtctctgatttaacggattcactgttttctctgctaattgagagagcgttatttacattatttatttgttttgacacaagtgctttcagtgttttatcctagctaatggcttcttaaaggtaataaaacccttccaacgtaattggtcagataaaactttttttcttgtatgcttaaataaagcaattagtgaagcacttctatccaaaatgacttttttgtccttttttaaaaccaatttactgttactggaaactttttgtacaataaagcaatcacgcagattaaagaaaaaaaaaaaaaaaaaaaaaaaaaaaagggcggccgctctagaggatccaagcttacgtacgcgtgcatgcgacgtcatagctcttctactacgtgnaccctaactncn

SEQ ID NO: 498 - DNA, 1677 bp, Homo sapiens
gaattcggcacgaggtttgcagagtgcttcccgcccctratctcattggagccatggactggaagacactccaggccctactgagcggtgtgaacaagtactccacagcgttcgggcgcatctggctgtccgtggtgttcgtcttccgggtgctggtatacgtggtggctgcagagcgcgtgtggggggatgagcagaaggactttgactgcaacaccaagcagcccggctgcaccaacgtctgctacgacaactacttccccatctccaacatccgcctctgggccctgcagctcatcttcgtcacatgcccctcgctgctggtcatcctgcacgtggcctaccgtgaggagcgggagcgccggcaccgccagaaacacggggaccagtgcgccaagctgtacgacaacgcaggcaasaagcacggaggcctgtggtggacctacctgttcagcctcatcttcaagctcatcattgagttcctcttcctctacctgctgcacactctctggcatggcttcaatatgccgcgcctggtgcagtgtgccaacgtggccccctgccccaacatcgtggactgctacattgcccgacctaccgagaagaaaatcttcacctacttcatggtgggcgcctccgccgtctgcatcgtactcaccatctgtgagctctgctacctcatctgccacagggtcctgcgaggcctgcacaaggacaagcctcgagggggttgcagcccctcgtcctccgccagccgagcttccacctgccgctgccaccacaagctggtggaggctggggaggtggatccagacccaggcaataacaagctgcaggcttcagcacccaacctgacccscatctgaccacagggcaggggtggggcaacatgcgggctgccaatgggacatgcagggcrgtgtggcaggtggagaggtcctacaggggctgagtgaccccactctgagttcactaagttatgcaactttcgttttggcagatattttttgacactgggaactgggctgtctagccgggtataggtaacccacaggcccagtgccagccctcaaaggacatagactttgaaacaagcgaattaactatctacgctgcctgcaaggggccacttagggcactgctagcagggcttcaaccaggaagggatcaacccaggaagggatgatcaggagaggcttccctgaggacataatgtgtaagagaggtgagaagtgctcccaagcagacacaacagcagcacagaggtctggaggccacacaaaaagtgatgctcgccctgggctagcctcagcagacctaaggcatctctactccctccagaggagccgcccagattcctgcagtggagaggaggtcttccagcagcagcaggtctggagggctgagaatgaacctgactagagsttctggagatacccagaggtcccccaggtcatcacttggctcagtggaagccctctttccccaaatcctactccctcagcctcaggcagtggtgctcccatcttcctccccacaactgtgctcaggctggtgccagcctttcagaccctgctcccagggacttgggtggatgcgctgatagaacatcctcaagacagtttccttgaaatcaataaatactgtgttttataaaaaaaaaaaaaaaaaaaaaaa

SEQ ID NO: 499 - DNA, 1640 bp, Homo sapiens
  misc_feature (680)..(680): n equals a,t,g, or c
  misc_feature (695)..(695): n equals a,t,g, or c
tttagatctcaggtctaaggcttcctttccctccctctcccagctagtttgtgctaattaagagaccttttatactgttttattgcctgtttgaagaaataatttttatcacgtttttgtaagatatctataattttaaatgtttataaattgtttaatttattagcatcttaatgtaccccatttttatatactgaatgtggccttttgagtgaaataggaagcttcatggtgttggagccacctttgtacagttgtttaaagtttcccattgtcacggaaaacattggytgcaaagcccctcaaagccctcaagtgccttctgtgagtttaaatgtgctggtgccctccagaaaagcctcggcctcagctccgtttccgcctgttccctcccccaggataatgaatggttactgcactgtaaagaccgtggtctcttttcactaaataggagattcgagtttcccagtttacatgaatgaagtctgaatttaagacggtgatgaaactgaggttcagtactctcgggactcgaggaaattattcctgagacatggagtaattcttacaaatttaaactattgtacagatccacatacatgttgttaagtacctaatgttttgctgaacttttaaaagttaatttccaaaatgtatagggattcatgataattaaaccntttttattgctcatntttttagtagaagaatatcacttatttttagacttgtaaaatgtatgractggtgagcggacatctgttaagagagtcactagtcagaatgttaaaggagtgcatgcaggatgccccaaatgtcgtgaactcttgttactcctgtatgtagtagtgtaagcatgtgacttttaacaccatttggtttgaaactaatgtagagatgcctgattccaaacaggtgtggagaatattgaacggctcagaagccgcgtcccttacttaacacaattccgaatctccctcatccatgatgcgtccattggatcactcgctggtggtcactgtgtggcagttactaggggaattctgcctctgactgttctttttcttttggtctttaaacaccctgtcgtgggatgtgctcactgatttgtggctatgttgaaggtatcacttgtcttgagggttttcaatatttcaggatcatgctggtggcaaaaggactccaygcctctgtggaatcatgtccacagggggacctgcctcccgtgatgtcccacctttccttcaaggtctgtcatatgagtcctccccttttacaacacttattatggtatttttcaagttattcttcttagatttgcagtacctactgaaatttgtgtttttatagttgaagttaggaaaatgctatttgatttgtawttagatatttaagtcacttgtccaatgatgtgtatgtctaagcctcatgtaccgatttgaagtcagacttaaaaatgtatttacagattcacttgagactttttaatcggttcttcaaatatttcatgtttacattaaaaatttccagagaagcataaaagtattcactttcctgccttgtcatttctggaaagattttggggagatattttattgcatattaattaataaattgttctactaggaaaaaaaaaaaaa

SEQ ID NO: 500 - DNA, 637 bp, Homo sapiens
atttcggcacagtaccgctgggaccagccttatctcagacctgcttacctgcatgatgcctttttgggggctggggattgartcttgctgctctgcccagccctgttctattctgcarggtccctgtgttggaattctccctggggaacctactttctgctcagtgargctccggccagaaacctggagtccttatcctcccctctgtaagtgttttagggtctggcttttgcaggcaccctctgacctcagcagagctcctgggcctgctgcctgcacaccacatcgcctacctacaatgccaaagcctcactgtcaccctttctgccttggtttccctagctgagccacgctgcccatgcagcagagggcagaaggcttgcacttgggccaaagggcctaaggtccactggacagttgggaaaacacctgaccaccatttaaggactctaagccagaatggaaaattcaccaggactccattcttaagcctatgcgagtcccctagagagaggcattgtactgatatataaatattatataatatatacatgagacatactgacagaatctgtaagctaataaaatgtaagaaaaggttaaaaaaagaataggtaaattgacaagaagtaaaaaa

SEQ ID NO: 501 - DNA, 464 bp, Homo sapiens
  misc_feature (338)..(338): n equals a,t,g, or c
  misc_feature (397)..(397): n equals a,t,g, or c
  misc_feature (438)..(438): n equals a,t,g, or c
gtatttacaaagagaaggggccactcgtgtgtgagcagcaccgagggacagaggtaccttgcctgcttgtgtcccctccaagtccttctgatattttcctttccagctgttgcctagtttcctggtattaaggagaatcaactctctggataaacgtggtaaatatggcccatagtcccatctttttacaggcattttttacacctggagcagccagaggacgcatgcatggctcttcggaaggtaatttagggatcacccatgtaagtttcctaaggatttctttaacatggttcttctgattcagtccggccaattaaatctgaaatccacccctngaaagccatctggtgtggataacaaggcccacaaattgaggcagttcagctttttgtgnccttttaggcytgggacaaccacgggatcttaaaggggggnggggaactaggaggtttttgagttcc

SEQ ID NO: 502 - DNA, 777 bp, Homo sapiens
tctgtgtcactcttgtatgtcctcatatctttcatacctcttgtgtagtctctagaagcagaacacctaagtcctgggtctggataatgaaaccctcagtctctggggcctctgaaaataaggaagcattggagctattgccatgttgagtartgggcttcctagaactattgtcatctatcctgccagtgttttatgttgtagctgtttttctttgacaggtgagttccagctatgttgttagtcatgatcctgccattattttctgtgttctgtaggatgtctccaggctacttaaacatattttatgagtttgcaataaaattgttgaatcttgtatgatcaagtcactcctctgctcagaaatccacagtgacttcttagtaagcccctacattatatgcatacttgtttttttcttaactttactcccacttctacctaacagggacctcaacttaagtctcttcagttcttcaaggcctggccttgttcctgattcctcaaaaaatcttgactctaaggcctattttattgtctgtctctgaatccctataaagcttcaagtctgtatgacattcttaacgccaaattatatattgtcttgtactgttcctagctggtacatgtatattagtcttgtctccctcatgagaatgtaagctccttaagggcagggaccatgtcttaatttttgtatccaccacaggcctagcacagtgcttggcacatgggtgctgaataaatacctttgtttattgatcarmaaaaaaaaaa

SEQ ID NO: 503 - DNA, 564 bp, Homo sapiens
  misc_feature (510)..(510): n equals a,t,g, or c
  misc_feature (522)..(522): n equals a,t,g, or c
tccaagctcgaattcacctcactaaagggaacaaaagctggagctccaccgcggtggcggccgctctagaactagtggatcccccgggctgcaggaattcggcacgagattaataaaacagaggagtacattttacccttgcaattccagtcaatactgtggtgtcatttcagccaacataccaacattcagtcaaatcccaaagccaaatggataatttcagatggaatggagttagacaggaactggcttccctttctcctgttactatgaggacaacccacacctgctcagtggcctaaaatattttaaatatgttcatgacaattatgctgagaatgccaggataacrctgatggaacccatgacttcaccaggattgtggtctacatttacaggcctagtactagaactagaccggcttagagagtgggagatatccctctgttgtccatcgaaaagataaaaatacaggctttcagccggtgtgcagtggtgcatgcctttggnccccagctactnaagggggctgagaatgggggaatcctttttgagccccagaaa

SEQ ID NO: 504 - DNA, 773 bp, Homo sapiens
  misc_feature (283)..(283): n equals a,t,g, or c
  misc_feature (734)..(734): n equals a,t,g, or c
  misc_feature (762)..(762): n equals a,t,g, or c
  misc_feature (768)..(768): n equals a,t,g, or c
ttagagctcaatgctttgtcctctgtcatccttctactgcatccctttcttcgtttcctcacttcaactttttagtaaacttgtctgaggcattagctttactcttacgcattttgctcccctgcctttttgttataaatattatcatggcatgaaacaaaaagcctgttatctgcctttccatgatcactttgctgacactgtttcagccacaagtaaacctagcaactctatgaatagcaggacagacttgaatgtggtgtgtgtgcaaggaagttatttnaactttcttaatcttaaatgccaccagaaaacattctgctccctgttacttctttttttttttttttaaattactttgttttgcggtaaggagttggggaatgtgtggtggcagggaagtaatgtaagttgctttataactcactgtctaacaaagttttgaaaatttgtctgatatgtaattaggtactttagggttattaggttttcataaaaattctggttagggctcttgcctgctcccaatgaaagcctttccacagggcaaatataaaagagagagtagagggaawycccctgaggtttaaatamgtcaaaccagtaagtaatagtgctaagtttgtcagtgcctctctttcttactgtacttaacatctaaaggggcacctcatttattttcaggctaattatgttctttatggggtgactgtccaatcaggggaggggtgttnacggtccagtggggagatacccttttcntaattnatagc

SEQ ID NO: 505 - DNA, 723 bp, Homo sapiens
  misc_feature (597)..(597): n equals a,t,g, or c
gtcctagtgaagaggaaggcctgtgtagcagaaaggctttgggcctgagaggttaaggccacagctgttgacacctgttttggtcctgcgaccctttactggtctccgctggctttgaatcttcctctgggctctactctggagaacataagggctgctgtggttgagtctggctagcactgtctgtggttggcagtgtgtacacccctccgttcagttccttgggggtatttttcagaaatccaaaggcaacccttcgtgcagtgctcacttttttaagtacagttgattacccttgcctgctggggggcctagscatgggccagagatggaggagccccagtggctgacaggscagcctcactcaggcacgtacctgctgaccagtcagccactgccaacccatggcccagccactgtgtgcattagcagggaggtttgtaggscatggaggaaatgaggagacaccacctagtggagacattggggccctgytggggggatggtgtctatagstggytctgctggctccctcaggccctgcttaccaagctctggaggaggggagtgctgcattactgagcaccttccttgttntttcctcataggacactgatgttactgtcactttagttatgctaaagtggaggtttcagcctccagaaggacagcagagccttctagggtcaccttaagaataggttttagctaggctggggtttt

SEQ ID NO: 506 - DNA, 445 bp, Homo sapiens
  misc_feature (366)..(366): n equals a,t,g, or c
  misc_feature (388)..(388): n equals a,t,g, or c
ggtctctaaatgatgaaaaaagaaatcattctcagaaggagaaaagattgtatgggtttggcctctccatatcttagccaattatgttgctattttcatggcttcagttatcaaaacattactgctgggtagcagggctgtagttctcgacagccttcacagtgcacatctcttgaagtcacatgagagctctttggaaagttgaaattagaggcatctcatatttactgggkctgaatttgkccctgactactmatggagtagaaaatgacccattttgcctacattgagtaggctgaaggaatttgcawttctccactcttgtgagggttacacctaatttatttaaaatagaacaagttcttnatgcttagggttaagcctttanaaatggaaaatctcgatattcatctctctatcttgataaaagtcagccaggccattt

SEQ ID NO: 507 - DNA, 617 bp, Homo sapiens
  misc_feature (525)..(525): n equals a,t,g, or c
  misc_feature (603)..(603): n equals a,t,g, or c
  misc_feature (617)..(617): n equals a,t,g, or c
gcagggacagcacatgggaaagccccatggctttgtgatccatctggggatgtgatccatttgggtaaggacttgggtttcagggcatgagttggcttccttgcaggatgcaggtccttaggtgggtggcctctgtctccagctgtagggccctgccaggaagcctctatatgagcctacctccctcctgcaggaccagagaggggttgttatgaacagcccaggggattggttgcactaagcttgtcttgaagcttttgctggggagtccaggtgcccatgtctctcacctgctccccatacacatctctgcacacctggctgaggcattcccagacctaacctcagataatgtgcatgtgatgaacactcccaagtggctaggcctcttgcacctgagcaggtggattctgccccagcactggggctttctctgggctgtccatcatgggtatatctctggattccaggattgctagttagcacctcacatttgagggtctgtgctattcartctaraatcanaattggatgaaaaatcaactttgacaccacctttggggtggctgsattggcttwacacctgkaatcttaacactttangaagcttaagccan

SEQ ID NO: 508 - DNA, 1189 bp, Homo sapiens
actactagagaaaaaccaactggcagtttgctaagcatatctactggtgttgtttctgcgccctcttttggctaattgatgtaattatactggctctaaagatttactgccccataagtaaatagtatagccacattctgaacatatcaaaagtacaaacttaggaggagtgtatgtacaaaaatgtaaaattttatgaaaatgaacatgtttttatgatgttatttctagttcataagaatgtgatgactgctttgcttcatttatgtacgttcccattatattcttgctgtcaatcaatcacaaatttatatcagattaggataaactaagccattttatgtattttattttaaaccttattttggcagagtaattccttagaattggaaaagctgttactttgaaattaccaatttattacaaaacatagaaatgtattgkagctacaaagacaaccaagcattttctgtgttttaatgaatatctaaaaaactacatttagtttattttactcagttttgaaatgatttttttactggctctattgccttaaaataactaagagattaatgattctttgtataattttccttttctttgttctttttttaccatttcgcagagttatatctatagttttagtaacaatttcttatgtattctggataactgaaaacaactaaaggtgttgggcrttagaaaataattgtgagcagtaagattactgatgtaatatgtatgttggactgaagtatttctttataaacattctatttgattttaagcaaaatgtatgttaaagcatgtttttacatcagtaaagtcatttgtcgaccttctggaaatgaaaggtttttacctagatactgtaagttacacctccttaacaatcatatttgtcattgttgttttctgcaaacaaaaatgtttatgggcttcatgtaggcttaagattgtaggcaaaaatggactgagttcaggacccttcaagcagtaggcattcagttacagagcagttggtactttgtaacccagacttacagtttaaaaatatcaagttagctgatgtttcattataataaaaatactattttgcttaagagttgtattacaaatatttgtgcttaacattagaaatagctgttttaaattgtagttaacatattaactttttcagaaaaaaaaa

SEQ ID NO: 509 - DNA, 396 bp, Homo sapiens
attaaatcaaatgatattgacatattatgagggagaagaagtcaatgctggaaggattgggctaacgctagtagtagctggaatggtgggctctattctttgtggcttatggctggattatactaaaacatacaacttcttcatgactggttacctccctttgggttttgaatttgctgttgaaatcacttaccctgaatctgaaggtacttcatctggtcttcttaatgcttctgcacagatatttggaattytgttcacattggctcaaggaaagctcacatcakactatggtcctaaggcagggaacatttwtctctgtgtctggatgtttatasgcatcatattaacagcattaatcaagtctgatctgcgagacacaacataaatatagga

SEQ ID NO: 510 - DNA, 1309 bp, Homo sapiens
  misc_feature (253)..(253): n equals a,t,g, or c
aaaatgtgccagttccacttggtaataacgttgggaaaatgcaggtttatgaatgatgtggacttttagaggatcaaatcaataaattggattttttattttttgagggcagctgcmtcactgttttaaataaagaatcttacataagaatgttgacaacattcacagtaagccattgsagaaaattgatctgcatgtcctagaccaatgattacaaggtgtctgtgggtctgtggtttagggggcccagccnatcattccttttccccttggcactcatgagagagatgccaagttcagtgtggatttttcttggtgctctatggagaaatggagtctgtgtgcttactgaagagtcccaaaaascagagaccattttcatttaytgccatcataaatattctccaccattcaagatgcctgtgtacacggctatttgggaaactwaagtgttggaggaggcaggggctgaaggtgtcaaaacctcctcagtaggataacccctttctcccctttggaccatctgccatctttcatgagtgtttcccatggtgtttttgcatccagagttgacarcaactcaattttgccttgaatttactcagtcttataaattaaaaatgtgcattttatataaagatgcattttatataaaaatgcacacctttaatctctatatggcagcatatacatatatatatataaaatgcacacttttaatctctatatggcagcatttttgaggctttatatctgcccgtgtaccctcaactgcctcytttttgcagagaacgatccccacaggaactggtctaagaacactgtctgcacatgattgatgcttaaaatccaatataccaccacatatcaaaggktgggattttcagagtccttcttgatttctgagctgaaaccttaacaaatagggaatttggcagggaagacacctgggtttttaattcagaaccctatttatatactgttaaaatttgaggtactatagtttatataaaagtcggatgttaagatattatatttcagtactaggagcttctttgcagtcattaacatgacaaattaagtaataaatataaaagtgattgtccataaattatcattgaattttttgtttattttgtagtgttctgtatttatctgcactttgtgtatatatacacacatacatatgccaacatgtaaataacctcatgtttattcctaatctaaattgccmcaatatttttaatgtatggttacactgtgttttaaattactttaaaaataaactttgtaagcagaaaaaaaaaaa

SEQ ID NO: 511 - DNA, 944 bp, Homo sapiens
  misc_feature (10)..(11): n equals a,t,g, or c
  misc_feature (16)..(17): n equals a,t,g, or c
  misc_feature (882)..(882): n equals a,t,g, or c
  misc_feature (892)..(892): n equals a,t,g, or c
aattcggcannagggnncaaagcagttagagttcagaggccagcggctcagggccactccctccctagccttcatcagcagagcaccctccatccccctgcattgctcttctgtgaaagcaaatactaaaggatgccatcctctggaatcctaatggcaggcaaagggagagaggaagggtgacggcttctggcacttagaaaacaaaaagaacaaaaaaagagaaacccccaagcctggaacgcagagaggtctttactgctgggatccacggaaaacatgtctgtcctagccaagatcatatgaagagtttggcacggaggctgagaatgacctggcatagatggtttgccagttaggatgtctcaatttgagcctttgcttttggtggataactcagctcccctcttgtaacctggaaagttggttgcctttatcatcctgctggttttatccatggactgaacacccaacagcagtgcactatgstttctatggcatctttcattctcattttatattgtgctataaaaaggattgtttctccatatatatattatatatgtgtatatatataatatatatatgtrtatatatattatatatatatattatatatataatatatatataaaatatatatatatatgctctcctctttcagcctctttgtcacagggaaraagtgtaggargttgccttgggcctgcctctctcctaacctcctcttccccactgggtaccctcagcccctatattttaattcttgatcatgtargaaattgtttttgggtaaatgttgatattattgttattatcattattaattaaataaaggggaaaagggaatttttgttttaaatgaggaaatgtttaaccagnttctgttctnttttggattgtggacttggcaccttttgttccaaggtatttcctttggggcc

SEQ ID NO: 512 - DNA, 664 bp, Homo sapiens
  misc_feature (106)..(106): n equals a,t,g, or c
  misc_feature (148)..(148): n equals a,t,g, or c
  misc_feature (628)..(628): n equals a,t,g, or c
  misc_feature (631)..(631): n equals a,t,g, or c
ggcagaggtcagtagggatttaagatagggagaaaatgtagctcagggaaaatgtgtgcagtacaaaagacccataaatttttcagaaagcagcttggccctgtgnaagttgaccagattgaaagtcccagaatcctgggttccagtncactcatgaatggcttttggttaattcttcctgtgcttcaattccttctcttgtgtgaaatgggtaacaccttatctgcctccctgagatgtcatggaaataagcaaaattaggtcttaaaactacttggaaacctaaattgtgaaaattatctttatctctgttgtttcttagttaccagtttaccagaagtaacttaacactaggattctctgcyagtactaaaattagactctaccactctgggctttccttttctccctcttgcttttgttttcggggcgtggaggagacatctgtgctgctggagttaataataaactaaagactaaagaataacttctcccactagaaaatactattttcatcctacccacctgatcaggctttaaaagaaggagcccaaatctgccatggattttgattatttgattcactttkggaaatgtgcctgaraaarcctagggaatgagagaagtnggnataaatgggaatcttaaatggtatagaaaccaa

SEQ ID NO: 513 - DNA, 602 bp, Homo sapiens
ggtttttcggggggtggcccaagccagcctcgctctcggkgggggccatggtgaggctggagcctgaggaccaagtgtgggtgcaggtgggtgtgggtgactacattggcatctatgccagcatcaagacagacagcaccttctccggatttctggtgtactccgactggcacagctccccagtctttgcttagtgcccactgcaaagtgagctcatgctctcactcctagaaggagggtgtgaggctgacaaccaggtcatccaggagggctggcccccctggaatattgtgaatgactagggaggtggggtagagcactctccgtcctgctgctggcaaggaatgggaacagtggctgtctgcgatcaggtctggcagcatggggcagtggctggatttctgcccaagaccagaggagtgtgctgtgctggcaagtgtaagtcccccagttgctctggtccaggagcccacggtggggtgctctcttcctggtcctctgcttctctggatcctccccaccccctcctgctcctggggccggcccttttctcagagatcactcaataaacctaagaaccctcaaaaaaaaaaaaaaaaggg

SEQ ID NO: 514 - DNA, 547 bp, Homo sapiens
  misc_feature (475)..(475): n equals a,t,g, or c
  misc_feature (523)..(523): n equals a,t,g, or c
  misc_feature (541)..(541): n equals a,t,g, or c
tcatgactgaaaaggagctttggaaatcactgcataaggcttgatttatttgcacaactttctttagggttgcagctagaacaaacctgtgcgctttgaaatgttaccttctgctctctgttcccaagtacagagaaataatgttgcaaatctcacttctgctgaacattatgcttcctgatgcatttagcagacactaaacatttgtcatactctaaacaaagttacaaaggactagaagaattcttgttctgtatttagaaacccactcacattacttgatatttgggtatttaagtcatgaaaggtatttcttctaggaagcagtgattctaaagtgtatgcttaaccagtcagttgagtgtctactcttgtgtgttcacaagtgtaccaargttttkggtaaattaagaatattatttcaaataaattaattcatccccataggagccagtttacagataatccgttctcntttctggcaatcatacacaatgaactcatttccgaataaatataatanttttccttatttccaccntggtcc

SEQ ID NO: 515 - DNA, 2083 bp, Homo sapiens
cgtccgatttactattcttaaattataggcagctgtttggggaagaagatgctgatcaagaagtatctcctgacagagctgaccctgaagctgcctgggaaccaacggaagccgaagccagagctagagcatctaatgaagatggtgacattaaacgtatttctactaaggaatgggctaaatcaactggatatgatccagttaaactttttaccaagctttttaaagatgacatcaggtatctgttgacaatggacaaactatggcggaaaaggaaacctccagttccgttggactgggctgaagtacaaagtcaaggagaagaaacgaatgcatcagatcaacagaatgaaccccagttaggcctgaaagaccagcaggttctagatgtaaagagctatgcacgtcttttttcaaagagcatcgagactttgagagttcatttagcagaaaagggggatggagctgagctcatatgggataaggatgacccatctgcaatggattttgtcacctctgctgcaaacctcaggatgcatattttcagtatgaatatgaagagtagatttgatatcaaatcaatggcagggaacattattcctgctattgctactactaatgcagtaattgctgggttgatagtattggaaggattgaagattttatcaggaaaaatagaccagtgcagaacaatttttttgaataaacaaccaaacccaagaaagaagcttcttgtgccttgtgcactggatcctcccaaccccaattgttatgtatgtgccagcaagccagaggtgactgtgcggctgaatgtccataaagtgactgttctcaccttacaagacaagatagtgaaagaaaaatttgctatggtagcaccagatgtccaaattgaagatgggaaaggaacaatcctaatatcttccgaagagggagagacggaagctaataatcacaagaagttgtcagaatttggaattagaaatggcagccggcttcaagcagatgacttcctccaggactatactttattgatcaacatccttcatagtgaagacctaggaaaggacgttgaatttgaagttgttggtgatgccccggaaaaagtggggcccaaacaagctgaagatgctgccaaaagcataaccaatggcagtgatgatggagctcagccctccacctccacagctcaagagcaagatgacgttctcatagttgattcggatgaagaagattcttcaaataatgccgacgtcagtgaagaagagagaagccgcaagaggaaattagatgagaaagagaatctcagtgcaaagaggtcacgtatagaacagaaggaagagcttgatgatgtcatagcattagattgaacagaaatgcctctaaacagaaccctcttactatttagtttatctgggcagaaccagattgttatgtcctttgttccaaagggaaaaaattgacagcagtgacttgaaaatgattctgctccctttgaaagcattcattttgctagaactgttagacacattgcagtatgctgtattgaaagtaggaatatagttttaaaaaccctttgaacaaagtgtgtgcataaccagtcatgagataaaacaacacaatgcatgttgcctttttaatgtaaatacccttaggtatcattaatagtttcaaaatattgtggtttagtaaagttgatacctggttataaatattatgcctttatttttggctagaagaagaattatttttagcctagatctaaccattttcatactcttaactgattgaaacagattcaaagaagtatcgagtgctatgcattgaaacttgtttttaaatgttagatggcactatgtatattaatgtaaaacaatgttaatttactcaagttttcagtttgtaccgcctggtatgtctgtgtaagaagccaatttttgtgtattgttacagtttcaggttatttatattcgatgttttgtaaaactcaaataacgactatacttatggaccaaataaatggcatctgcattcttgttaaaaaaaaaaaaaaaaaaaaaaaaaaaaaaaaaaaaaaaaaaaa

SEQ ID NO: 516 - DNA, 1234 bp, Homo sapiens
  misc_feature (118)..(118): n equals a,t,g, or c
agcctccctcttccccatggaacttacaatcaagaagcatcttccaatttcatgtacactaaacctaggtggccacaagcttcatttgggccatgaactcctttgaaaccctcataanaactgtcctactatctccctggtaaatcgcacatacacagagttttgcctttcaggacatatggccttataagattttgactactagtgaccaaaatgttgatgtttttcaaaaattacacagaattgttaagatggaatagttttattcagcaaacaaaaaacttgctaattcagagtatcctctagtccacgtaatgtggtttagactacatttgcaaaattagggccttgacgctgaacaaaataaaatccagaggaagaactacagtatccaatcaaaaaggaagtactagcaaatgaaccagaataaaagactttattgtattccatacattcacaggtcacttccagatttagtaacaacactgcaatgctatgatgctgtgcggtcatttagcttaaaccacagtgtaagttggtagctctctcctgctctcttggcctctagatgtatcacaatacaattcctaactgtggcctggcaaccaatgcttatttcattggattattttctgactgggacatgagttcatcgcatcttcccagaattttaaagtaccttcccttacattataagagatgaccaaacactctagtgtgarggctgcttcacacactgttcttatctatcatgattgctcttccttacatacacgtcccgtacagatcagctacacacggcatggtcctgaaaccacagcttttgtttctttggccagaatgcacccctcaccttgagtgcccgccttagaaacacaggtacttggttctcacagggtgtgcatggttgacacaagttcatctgccccacggtaaaagctcttcaaaacctttgcatgacttgtggggagcagggtcacaatttgttgcatgtgacctgcctcagcctcaaaagataagagatcatgaggctccaccgcccccgggctcaggaaacttgatccacatcgctagggctctgcctgttaggttatggatgctcacctgactctctgaagcagagggaggctgacacagattagcttttattgaaattattaaagtgcaactttgtgttttcactctatcaggcactgaaaagcaagaagcttttaattttttcttttctataatg

SEQ ID NO: 517 - DNA, 646 bp, Homo sapiens
  misc_feature (619)..(619): n equals a,t,g, or c
gatacaggcgtgagccactgtgccsggccttcttctttcaagttatatagaatggagcatgggggtggcagtggctagggacatttcctggggacactctcccctaaccccccagaaggacttcacaaaaacctgtggataatggaagggatgttacggtacaaacgtatatttatgtgtgtgtgtgtgtatgtgtgtgcgcgcgcgcgtgtgcacataggcgtgatgtctgtgaccctcctctcctcgtcacatttcccccagaatgaatgctgtcctgtctgctcatgtttgtgttgaagctgccaaagtcggggagctctggtcctgcccagacccctttggaattgctggcccatcctcccactggagagctggggtgcagctcaccttggggaaggaaacctcatgcctcagagtaatttcttgtgaatgcaaagcctgggggagcgggtctttggggggcaaggagccagtcaggggcttgtttcccctcatagagctccccagacgtgcctccgcaatgcctgaaacccagacctaggctaataaacggttcaatttctgttaaaaaaaaaaaaaaaaaaactcgaggggggccgtacccawtsgccctttngtgggtggttttaaaattcattgggcc

SEQ ID NO: 518 - DNA, 2257 bp, Homo sapiens
  misc_feature (838)..(838): n equals a,t,g, or c
ggatgattaggctgtgtgtgcgkgtgagaatgatcacatgtggcgtcatgctttgtacagagcctcagaccactgggcctygtccagtgagagtcctctctggcgacatcacacgcggagagccaggggccaccttagatctcagatctctcagagcaatacttttctgaactgccactgtgcctgggtggttgggtttggtgtcatgcttctgactagagtagatcgcgcatgtccaccagtgatacgttgagtccttacagttccccccatggagtcccataagcagctccatcgagatctgtcagcaagttgcaggaccccacaatgttctgacatgttaagacccccttacatgacgagtagagaggcagctgaggccacaaccgtgtcttcctcttgaatggagctaactcggaaccccccgttttctcttcctttctgcccaccactgaacattgccttttagataactcagtgtttcttctagatgtcatagcaatagactttcactttcatgaagtttgggtacgatttggattctcgcttaagtacakatatttatcaatatttttataaggcaaagttcayttaaaaaatctttccaagtagcagtgtgcctaagatggcaaaatactaaaaactggtgtttcctgctcctgttgtgtgtcacttttcaagccgattgaaatatttctggstyttagggcattactttttaactatctcctttaaaaacgatgttctgtaggtttagtgtctttgttcatttccaaaagagtccagacaactgtgtctgcccctgcagaggctgtttgtccaaaggcagcatgccgcnttccaccggaacgcagacagcaggggagcggaattctaaagcagcgacttaaaatgaggaatccccaattgcactaaatggtttcaggattgactaatcattgtcttaacattaactcagattttcgatgtgtaaagagctgtgtgacttggcgtctgagagatccctctgctttgctttgcttcagagtcctcgcacccgcatcctcagaactgtggggcatggtgggctctaacgagcactccccttctgttttccttcattacttttgacctccttaagacttcagagagaatgtccgtcaagttcttttctccatcaagttctttaagttccttgaaaggaagggactgtgcaaacacaaagcaatattcttttgtatctgcaaatgcgtcmgtggacataccaattggtatcaaatagaataaaatcaaatataaatgtttgagtcttaggttaaaaaggaaggttatttgtatagtttatagataatgaaggaaaaatttctttttcattgcaggaaatcttgtttactggaagatagagtcactcttttcatataagacaaatagtgctttaatgccaacttctttttatctcaacatttcaggatcatgctaggcacactgcccccttgaatagacattatatgcacagttgcaagtcagccaatgtttttattcagaagtatttccccccattatagtgcctgcctatcagagatacaaaaagcatccaacacactaccgtaataggcttctttggggatgagaaatttgagtctcaacaactcagagtttgagatgtcagcttttttggtaaacgtaggtgttagaggtatattttgctttcctacaacaattgttggcccttgatttcaagcatgttgcttcataggaagcaccagagtgccatctgctgcatttcaagagattgtaaatgtcatctcagctggctcagttatatctctaatgtcccgggtagcagcacctccctctaaaaatatgtttacttcgctgtttcacttgtattttgtgtatacgaaatggcagcttccgatttctagttggatttgtcttgcattgtttgtataacttgctggtcacccagggctatttgctttttcattgagaaatttggtaggggtgtctagttcagcttttatgttgatccatcctgacttattttagacattgaatttatctcaccacaagtaaaagaacatgtgtattgactgtctttgctaagtttcctaatttttcctaattatggcaattatggatgtgaataagaatactgatgctgtacaaatatttttgtggaaatgtaccttgttaatgtgactatttaaataatatgaaaataagaatactcttgaagaaaaaattaaaatatttactctttggaaaaaaaaaaaaa

SEQ ID NO: 519 - DNA, 701 bp, Homo sapiens
  misc_feature (9)..(9): n equals a,t,g, or c
  misc_feature (34)..(34): n equals a,t,g, or c
  misc_feature (600)..(600): n equals a,t,g, or c
  misc_feature (637)..(637): n equals a,t,g, or c
  misc_feature (647)..(647): n equals a,t,g, or c
  misc_feature (676)..(676): n equals a,t,g, or c
  misc_feature (691)..(691): n equals a,t,g, or c
  misc_feature (700)..(700): n equals a,t,g, or c
ccccaaagngggcccgcctgaaagggccctaggnagtacacctcctaggaaccctaagccagagagaggcttcactacatcatgcttcctgacatctctcccctttgaagagcagtcagactcctgctttgctcttcagacttaatttgggggtttaacaggtgaggttgctgggggaactcttttacaacatctctctgaaakaatccgggctgccagtttcatttggtttgggtgtcagtagcatgatggaaagacaaaaaaacacaacttgacatctgcagaaatgggttcaaattttacctgcaactcaccaattctgtggccttggttcagcaattaaactccctaaaattcagttttttctttgtaaaatggggttatgaacagtacctacttcaaaatgtgtttgtgaagattaaaaaagttaacataaagagtttaraagagtgtctggcaaaaaaaaaaaaaaaaaaaaaaaaaagggcggccgctctagaggatccaagcttacgtacgcgtgcatgcgacgtcatagctcttctatagtgtcacctaaattcaattcactggccgtcgttttacaacgtcgtgactggnaaaaccctggcgttacccaactttaatcgccttgcancacatccccntttcgccagctggcgttaattagctgaanaggccccgcaccggntcggccttnc

SEQ ID NO: 520 - DNA, 345 bp, Homo sapiens
cagagtgagacactgtcttaaaaaaaattaaaaattgtaaaaaaatgaaaaaaaaagttttgagcattatttgcatcattgggatacatatgtcacttcacaagatgttcaatttgaaggaaataccactcattctctatgtcctgttgtctgtagtgtgcttcagtttttcatattgagttgacctaaatcctggattcatgacaagaaaggagtaagtactactattcattgttctatttgtttataatctgtattataaaattgcacataattaaaagctttcccttgtcttcaaaaaaaaaaaaaaaaaaaaaaaaaaaaaaaaaaaaaaaaaaaaaaaaa

SEQ ID NO: 521 - DNA, 967 bp, Homo sapiens
gacctgtcactgcctcccgccgcctcctgcccgcgccatgacccakycggtgccccggctctccgtgcccgccgcgctggccctgggctcagccgcactgggcgccgccttcgccactggcctcttcctggggaggcggtgccccccatggcgaggccggcgagagcagtgcctgcttccccccgaggacarccgcctgtggcagtatcttctgagccgctccatgcgggagcacccggcgctgcgaagcctgaggctgctgaccctggagcagccgcagggggattctatgatgacctgcgagcaggcccagctcttggccaacctggcgcggctcatccaggccaagaaggcgctggacctgggcaccttcacgggctactccgccctggccctggccctggcgctgcccgcggacgggcgcgtggtgacctgcgaggtggacgcgcagcccccggagctgggacggcccctgtggaggcaggccgaggcggagcacaagatcgacctccggctgaagcccgccttggagaccctggacgagctgctggcggcgggcgaggccggcaccttcgacgtggccgtggtggatgcggacaaggagaactgctccgcctactacgagcgctgcctgcagctgctgcgacccggaggcatcctcgccgtcctcagagtcctgtggcgcgggaaggtgctgcaacctccgaaaggggacgtggcggccgagtgtgtgcgaaacctaaacgaacgcatccggcgggacgtcagggtctacatcagcctcctgcccctgggcgatggactcaccttggccttcaagatctagggctggcccctagtgagtgggctcgagggagggttgcctgggaaccccaggaattgaccctgagttttaaattcgaaaataaagtggggstgggacacacgaaaaaaaaaaaaaaaaaaaaaaaaaaaaaagtcgtatcga

SEQ ID NO: 522 - DNA, 532 bp, Homo sapiens
tactatcgggaaagctggtacgcctgcaggtaccggtccggaattcccgggtcgacccacgcgtccggctcccggttccaggcgagttcgcagctgcgcgccgggtcctggaggccgaggccgctcccgcccgttgtccccgcagtccccgacgggagcgccatggcccagccgccgcccgacgtggagggggacgactgtctccccgcgtaccgccacctcttctgcccggacctgctgcgggacaaagtggccttcatcacaggaggcggctctgggattgggttccggattgctgagattttcatgcggcacggctgccatacggtgattgccagtaggagcctgccgcgagtgctgacggccgccaggaagctggctggggccaccggccggcgctgcctccctctctctatggacgtccgarcgcccccagctgtcatggccgccgtggaccaggctctgaaggagtttggcagaatcgacattctcattaactgtgcggccgggaacttcctgtgccccgctggcg

SEQ ID NO: 523 - DNA, 515 bp, Homo sapiens
  misc_feature (20)..(20): n equals a,t,g, or c
  misc_feature (49)..(49): n equals a,t,g, or c
  misc_feature (464)..(464): n equals a,t,g, or c
gcaaacagttcttccattantgaagcgagaggaaaagccataataattncatcttcacccactacccttccagagctttgcttctcctccacatttagccattaaattgcatgaggatttctcttcatcagggtccgcatggaatctttcttatattttaccctttcctacatgtagccttgaatgtcctttccacaaatatgctcccacggctgggagcattttcttttcttttcgtcacctttgatttttgggattagattaataggggaaaaagtccctggctttaaagaaaacaaaagtagaattcttcaaaaataaatttcatactgggaacagaaaggaactaaatgcttcataaaacagggaaaaagaaattaagatcatcctagaaataaactaagatwaaaataagtatactgacccttggttggtagataaaaagatgaccagtcttgtattgntttaaaattagataaacatggrttaagcatgcaaagactctgktccttttt

SEQ ID NO: 524 - DNA, 495 bp, Homo sapiens
  misc_feature (467)..(467): n equals a,t,g, or c
  misc_feature (495)..(495): n equals a,t,g, or c
tctaacatcctccctttgctgtyctgaaaacttcacgtcagagtcatatttaaatgtgtaattactgctctttctcctgcttataattcattatactttttgaatttgaggcttgtgtttttatgaaccttgaaaagccctctgctgccggcctctggagccaccgtctccctgccctgctctctcctctgccgaggtgcctgttaagctgcattctctcctccacagctccccgcttcctgcaggcttcctgtctcactttctttctgtgctccagagtctaggcaatctctkttgttagaacttccaattcaccaatactttcttatgttgygtctaataagctacatcatctgctcactgggttttttatttcagtgattatagttttcatttccagatattccatatgccttaaaaacatctgcatgatactccatggttttaactcccctgatgaatactgngcatttaaccatcccagcacgtgagggn

SEQ ID NO: 525 - DNA, 446 bp, Homo sapiens
  misc_feature (35)..(35): n equals a,t,g, or c
attacaggcatgagccaccgcgcccggctgaactnatttttttttaatgaagtgcatcgtgttcccacttgcacttaaagktcacatttggtgccaggctgtattgcttcytctcactggtgagtggcagctgtgtctcctttctgccagtccagcagtcccagctgtcagtggcacctgcataatgacacgtctgcatttccccccaatcrgcrtgcagcggttttgggaggaggaatgcgactgcatggcgcgctcgctgcaacctcagtctgcagcctgctagggacgcacggccacactcctgtctttcagcctcagtctgcagcctgctagggacgcacggccacactcctgtctttcagcctcagtctgcagcctgctagggacgcacggccacactcctgtctttcagcctcagtctgtagcctgctagggatgcacgg

SEQ ID NO: 526 - DNA, 1175 bp, Homo sapiens
  misc_feature (639)..(639): n equals a,t,g, or c
  misc_feature (699)..(699): n equals a,t,g, or c
aattcggcacgaggtttctctagaagtaatttatgttatcaggttatcccctgagttttttcttactcaccatatgtctggtggttctcacagccaggggcactgaggggctctgccctgggatctggaggccagcactgttcacctgatctccaccactgagatacctctggctagagccataatcaggtggcccaaaggactgaacaaggaagaatgggagggcactctagactaattaaggttgtcttttcagtctaaagttaacaatgacacacatgaattttcatatcagtataattagatgcgggtcccatctaattacagtgggtcattatggctgttcggttagagcagcttgggtgctctgtgaccatggcatgtgcccgtgtcaggactagacaaagtcatttgcttggggaagctctctccccttcaggtgtgaggccaggagcacctggtgtgggtcctgtccctgaggttctgtcctacaccaccctcatgcaacacctactacacacaggtgcacagcgactgtcacaggcgcttcatgtttaaggatgggcctccgtgtcataaacttttttaaagggtatatagrgatagcttatgraatccaaatcaaaggtccagagtttncagcaaattgtacctacctatttgccaacttamctcaccatagaaagccaaaagattcancctgtggccagtctttcacattacagagtttaaagtactttttttaaattyctattttatttttaacaaaatatttaacaaaatatagtatatctcatgtgccaggtactatttgtaatatttataaacactgatttayttaatcttcacagagactcattttacagattggaaaacagaggcagagagaagttaagtaactttaatgtcactcagctgggtagtatcaaagtcttggctgctggctccagagtctagacctttaaccactgtgttatgctttccatgggtaaagcaacctaaaaaggcccctggaatcagttacatgtggttggagactaactctgtcattgacttactaaatgcttgatattgggcaatttatctaacctctctctgcatttagtaagtcaatgacagagttagtctccaaccactgtgttatgctttccatgggtaaagcaacctaaaaaggc

SEQ ID NO: 527 - DNA, 473 bp, Homo sapiens
  misc_feature (338)..(338): n equals a,t,g, or c
  misc_feature (344)..(344): n equals a,t,g, or c
ctaacatttttttccttttttttcccccaaaggatataatgtattatctatcaaccactctctcagaataacttgtttgttttatcatgtactgtgataggttagtcatgaatttgcagttaatgaagggctatttatttcatgcctaccctcacaggttttctttcttttttcttttttgtgacggagctcactctttcaccaggctggagtgcagtggcacgatctcagctcactgcaatctccacctccccagttcaagtgattctcctgcctcagcctcctgagtagctgggactgcaagtatgaaccaccatgactggctaatggtggttttntttttngtttgtttgtttgtttgtttgtttttttggcagcaggtcggtgggtgggcagtgtttgtagagacagggtctcacattgtgcccaggctagtctcaaactcctgatgtgaagcaatcctctccgctcag

SEQ ID NO: 528 - DNA, 1508 bp, Homo sapiens
  misc_feature (580)..(580): n equals a,t,g, or c
ttttttttttttcttttttttttttttttttttttttttttttttttttttttttaaaatgtagtcaactttattctccttaaaccacaaaatagagtctttggttgtacaaacatcactagttacagtctcgccgaggtctcggctggggtggggcagttagttagtcacaggccagaactcctgtggggtctctttaaaatgctaacacccaggttaaaagacttggggcaagggtggtgctggagctggcagggcccccaccccaagtctgggggaggtgcctgctcctctaggagggcacagggcccaggccacggcgcccaggccttacggggcggcggctgctgcacagtgccacatcttcagggcccacagcgccgggtgagggcctgcccagaagcaccagagccacttctccatcctcctcctgcgggccagggctgggagatggttccagggacctcaactcctcagcaaagtccggtgacaggcgtcccggggaggtgctggtctgggggccgaggtcttccacaggggtgggcgacggggtgggcgcaggggaaggggcctcggccantcgctccaggggcccccgcgtrccccggccttcctgggacctgctgaggaccatctgtgctcggagagcgtcctgttccaatgacttcatcctggctgccctccacagcgcacgcttctcggcctccagggcccggagctcggcaggggacagggcacgctcgggtgccggtggctccggactctgcacgcgcagccgctcctggtggcgccgttcagctttggccgtccgcaccggggcgccacctcccaggggcgggggggacgccgggctctgccttgaggtggggctcgggctggcccagggtggctgctcatcctcctgttcctcctcgcccagcgtctccccgtccagggcgagcctcgcttcggccccagcctctgccgcctcccgyagcatctgcgctctcttctgctgtagttttctggcttcctcctcctgcatcttccgcaggtcgtcagcacccaccagggacacgcgcttaggggggccctcggcctggggcacgcgcacctccagctcaaagtacttctgccgctcccggaaggacagctgctccggggaggctgcaggcccaggcgtggggggctgggcaggggcatcctcaggcgggtgagaagtgggcacggccgcgaargccctgtaggcctgcttcacattggcgggcagctcatccggagaaggcggggagggcggctgctggccactaggggagcagggagattcagccatcttccctccagctgctccagacggtaccctctgcacgctgccagcgctgggcacggcggccagggcgcggtagtccagcttcaggggctgcagaccccgacctgcggcttctgtggcctcgggcccccagtgcagggtctgtccaggcagctccttctccttgcctgggccctcagggctcagctcccggtcgatg

SEQ ID NO: 529 - DNA, 592 bp, Homo sapiens
  misc_feature (14)..(14): n equals a,t,g, or c
cctcactaagggancaaaagctggagctccaccgcggtggcggccgctctagaactagtggatcccccgggctgcaggaattcggcacgagtatgtttgtttcggttgaaatttttccttaagtgtctggtgatccctggatttctgctcataattaaggaaaagaatgctgactcactggacccaggcagggcttctctcccagattgcaggcttgcctcggggatacacgggtttcccaaatgctagaatgaaaagagattttattttggcttgctaacatcaaagatactagtttctccagatggtttattcagaacactgttgtcttatttttatttgtctgagattaaatgtcttcccctttaattaaagggaggtctctgatgaagtaggtttgggaactgctaccttggtgacagcttgagtctttcctttagtgaagtgcagcacaattccacgtgcacggtgaccttctcttgattagggtgccttggaatgtacagaacctaacttgaatatacagcactggtttcttggtaagragtgtacagtgatctaaacttgcaaaccaaaatacagagatgatggg

SEQ ID NO: 530 - DNA, 568 bp, Homo sapiens
gctgcagcctcacagactcgctgagtcgctcctgcagaaagggggggagagagatcgaaaagcaggggagggggacggcacggccgtttacctgtctgcctcctcattcgctctcccccctcgttctgctcactcctggtgtcagcctatccgccttcccaaaccctcccattcccccggtgtagccccccccttcactttccttctcgtcctctgtgtttctcctctcttctttcttcccttccccctctagcattgctaccttctctcctacacgcacgcaggcatataaacgtaggtttttgatgctcctctgcctgttgaccccgctattttcatgtttccaacaggtttttcttcccccagtccctcagctgctgctgctgctcaggaggtcagatctgccactgatggtaataccagcaccactccggcccacctctgccaagaaggagaaagttaaacagcagcagcagtagcagcagtaacagtagtaacgagagagaagactttgmttccacctcttcctcctsttccactcctcctttacaacccagggattcggcat

SEQ ID NO: 531 - DNA, 987 bp, Homo sapiens
  misc_feature (25)..(25): n equals a,t,g, or c
  misc_feature (28)..(28): n equals a,t,g, or c
  misc_feature (61)..(61): n equals a,t,g, or c
  misc_feature (162)..(162): n equals a,t,g, or c
  misc_feature (934)..(934): n equals a,t,g, or c
  misc_feature (968)..(968): n equals a,t,g, or c
  misc_feature (974)..(974): n equals a,t,g, or c
tcttcactaagggatcaaagctggngcnccaccgcggtgcgaccgctctagaactagtggntcccccgggctgcaggaattcggcacgagttttttttttctttgtgaattgaatgtacgatacaaatggtaggccttcatgtgagccagttactacatgantcttcatttcccacagtggtttgttcattcatcagcgttaggcttggtcctggctccacctttctcctctccgggcactgaccccacctttccgtgtatttactgtaggctattaaatatgatcatgacccgccttgcattttcattcatcacctgtttatgcccaaatttaaaggaagtttgtctcattttgccagaaaaaaattgtaatagtcggcacgctggatttgtagggccagcaaaattgcggcagtgaaactagtttcacttctaaagcccttcatttcccacaaggttaagctctcgaaaccccatttgatccttggttcctatttcgatcctcctttggaatctgaaaatcggtctccatgttgtatgcagattagaagttgccttgtttgttactcttccaacacagggtatcagggagaaagaggccttatctgttcctccatcccccctgttttgacagactgctaagaattcctcaggacttcctttggttggggattttactttcccaaaagtctgatctgatttctttcaggggtagacaagcttgtcctagtgstctgsttcaggtcttatcagaaggaaacccagggaataggaaaaggtaggatgccttgacttttgtccctgttgtgggggacttaaagtgttttttgccagaattgttcaaaagctccggtttcaaactctgtaggagttttcatggggaaaaacaaaacaaaacaaaaaaggtggcttattcgtccccggagatgttgtnagtaaggttcttccagcacggctttggggttttncccaantggggaagccaag

SEQ ID NO: 532 - DNA, 1155 bp, Homo sapiens
  misc_feature (8)..(8): n equals a,t,g, or c
  misc_feature (10)..(10): n equals a,t,g, or c
  misc_feature (13)..(13): n equals a,t,g, or c
  misc_feature (23)..(23): n equals a,t,g, or c
tagtgtcntntgntggaaccggnctcactatagggaaagctggtacgcctgcaggtaccggtccggaattcccgggtcgacccacgcgtccgcccacgcgtccgcccacgcgtccgcccacgcgtccgcaacaatatccttattttaggtgccactagcagatgtaagcgtatacttagttgccgttagatgtgacagaatgagataatttatgtaaagcagtagagtacctggcacaaagcaaacaataaatattattgttattgttgttataattgtaaaatgaatgacttcaaaaacatagtcccagtttggagggattttgtgatgcagaatatctaagtcatagaaatagaagacaggtggaataagtatatgttcagagtttttagatgtgttgagtagagacggkaataatggaagcattaaatacaaatgaaaatcacaccagatatccctgraattcaagcaaagaaagttcatcatgtattcttgggcagcaagagaaaggactagggttatggcaatgtgtggaaaagttgaggcttgctaagggttgagatctgttggtagccctggwtcacatggggtcagcaccaggcagtgsctytgaaagcggagaraggtcctggacttcccttgkgkataacagttcctagtgtccaacaatgaggaaayggtgaagcatggttacaaaactgtgacaaaaatatttacatctagcactgttaccactcacatgccaaacattggctgcacacgtgcagcttatttgtaattaacatcaaaagactagatctgaagccttccataaatgagaggccattcatatggcattcctggaacaaaacactgcacaggtaccagcctctccactcctgaccgggttggtgctgaacagtcagggattgttcttgaactagacttctgatgcttcttgcaatcttctttcatctttccctgaaatacacaaaataaacaaatacaataacaaatagtaattaaatgactttcaggataacatctagttgttcagacttcacccttcacaggtgtgtgtgtatgtgtgtttatgtytgtatattgaagcaatttgaatttatttactgtatattttctgagtaaaagactgaaatgaactacttggttcagaaa

SEQ ID NO: 533 - DNA, 529 bp, Homo sapiens
agttctgctttttcgtcctctaccagtctgattaattcgtaggcttaacacttcctttttctttctccttggaatgcctcttgggatatgcattagttggtcttatgtcttttcttggtctaggtggtgtgtgtgtttggcttgtttggggcacttttagaggctccagctgcacatttccactcctctctgtgtgttcctctctgcatctgctgtttgtgtgtgtacactttttttctgagcaatctttctccttagccacattgagttctttaacagtttttctgttttcttcttcattaagataattaataatcatactactcacatatcatgttttagaacttcctaagcctttccctttcccaccttttggacctcctaactgaatttcaaagtcttcrttccttagattaaaaaaataaatccaaagataaaagaatgtaatgtcttataagtcgtatcagtgtatattttctctgttattgttgttagtgttataataaatcctaagtgacacaaaaaaaaa

SEQ ID NO: 534 - DNA, 1981 bp, Homo sapiens
  misc_feature (57)..(57): n equals a,t,g, or c
catgtttgaccatggtaatatcttttactacctggaccatttaaatttcctaaatgngaaaggtatatatattmctgtaactgtagagggaaaagggaaagtatttggttctaaaaaatgttagccttcctcgtaaaagtagcacaagcccacttatgaatcactgagaaaaagtgaaaaacttgagttggcaaagatgcagagcagcagtgcagatggcaatgaactctctgaattctcttttaccttatttagaagaatgcagagtaaagggaccttcttggttctgcaggaacttctcaagggatgaggagacagaacccctacttccaagtgctctatttgtattacccagatgactgaagcttaagagaaggcagggaagtatacaagcagagccagttctggtacaaacaaagaatttgacagggacaatggaagggtcttcttcaccactccttaccttctatgtgatggaaagactagagcttataaaagtacttccatttttttattctcctgaataccaaaggcaattaaagtcagctacaaatgacttgccagtgtcatgttttatttttgttatagatttttaaattatttccttcaagatcagttcttatcccatataatgcttagcttccaagaatattctttactttcttctgtcttttacagctctttgcattttgtagaccttaatactcaggttaaatattcattgcatttataagatcttctgcaaaaagcccagaaatggtccttttcaggtgcctcttcaaagagctgacaccttaccttgtgcctttggcaaartgtgcagaatagatacatcagttggtgcataatcgaaaaaaataggaattttgaacactgttcttccttctacatttatttctcttcattttagaatcacactttttatgttaaaccagattattattattattattattcaaccagtattaagttgttaaaaccaagggaatggggccctaaccaaaaagaagtctcaactcagaaaaataagtccccagtcaggtggttcttactttcttgtgggttgcacattttgtatctctctaacatcagcgtattcctgactttaagcaggtgtttatatgtaaaataaaacctgggtatcgaagggaaatgcattctttttatggagtattgaccctgatcctctatgatgtcatatagagcaactcagggctatacttgctagattttaaccaagcagtttgaaatattaatcatcatcctctcatcttctccastctccattgccaaagtctttgtcaaaactccaaatttgttgataaaagattgtgtttgccattctcatttataatgcagtttctccttaagcctggagttttttgaatgagtgcatgagtaaatgagagaatgtgtgaacgaacatttatgaagtatctaacatgtgccaagcattgtgcctggcactttcaatcattagaatgttttatgtgattccacagcattttctgtatragagtagctcacaacattttaaatgtttccaatatgaatcgtgttacaaaattcttaattttatatttcatataaattaaagaggaaaaagaaaaggtttataatatattttaaaacaatgtgttactrtataatacaactataattgtagttaataactaaaacctcttgaaaatgtcaaagaaatacttgatttctgatgcaactttgactaaaatatttactttagaaataaaaacgttcttattttgctatatcactttaattgcataattaaaaagcagtgttttatagaaatgctggttattttatattcaaaaagattttgtcacataattcatgggtaaaacttgcagttgtaaattgtgtctgctctggtatgggccctattaatagtcccatgctgttaaatataaagaaaaatatactaaaatattcaaagttccaaaaaaaaaaaaaaaaaaaa

SEQ ID NO: 535 - DNA, 1570 bp, Homo sapiens
  misc_feature (1533)..(1533): n equals a,t,g, or c
gcccacgcgtccggcctcctgagtagctgggactataggtgcccgccaccactcccggccaatatttgtattttttgtggagacggggttttgccatgttggccaggctggtctcaaactactgggctcaagtgatccaccctcctcagcctcccaaagtgctgagattacaggcatgagtcactgcgtccagcccaaccctctcttttgatgtgaaagtatcaccttttgtacatttagtccatacccaatatctctttgcctcctttagtgcaaagttactcatccttacttgtatctaagagaatctttcctactttctgagtgggcactagttttggagtatatatattgtatgccatgaactatatttttctgcttatggctttgcctcatttaattgccatagcacttacatggggcaggtattcattttcctgcttagcaaataaggaaactgaatttcagagatgtcaggtaacctgcctacttcacacactaggagttttgatgtttaattttgaactaagatctatctggcttgaaagctctttgcattaaacaaccttgaacaatatacttggaacgtaggtgtgtttttggcacagaacatggcatgtgtgtgagggattgaacacagacttgcccagattcaaacttaccaatcttctgtttcatgtgcccagaagaaacagcctgtttctcagcctcaaacccaaacttctagttgtcttgattggttcagcctgactgtccaactctgatttatagctgtgattgggggagctgagattacacagtgtaggcaggcagaagggccccaggcctattgatatgggtgaggacaatactcacgcactcccttcacttactcactcttccaaggtcttggcttgaacccaattttttttgagagaataaaccaggctttttgttctccacttggcctgactccatttctggcattccagccatgtatttagctgttatcagctttcagatttagasaaagccttgtttccaataagcttgtttctctgaagtaattgttaaaatataattttcagaaaaaggttaaatcatgactcatacaaatataaaaatgaacatgtgctaaagatttttatttcactcatgtgatatgaagtaaccagacagaagttataaccagtacatatggaaagtcaaaaagcacaaattcatatgtagtaaaggaattggattgcaaatgaaggcaaaactgtttttyctacagggtggagggaagataatcaaaatgctagaaccagaatttscatgcctgtcacttagcttcaatttacaaaagcccagaataactcaaaggcaaattctagccctgcaaatatcagccctaaagctgtgctgtggccagtgcatagttttctattgaagtacaattttttccccaaatacattatctctcagagggagtccaaattgcttccctttcactcagcagatctgttcagtcaacagatgttaaatagctacagcgtatcaggcacaaataanttctttataaaataaagtaacaaactatatgttgttt

SEQ ID NO: 536 - DNA, 1084 bp, Homo sapiens
  misc_feature (35)..(35): n equals a,t,g, or c
caatttctagtaggaagagaataattacatttgcnggggggggtggataaaaacatgtctgcttctcatttaaataagagagaaatgatgccgttttttaaatgtgaagcagactataattctcagctctcttttcttcttagccttaaattaatattctctttcttctagttttggaaagtgtagtgggaatattcagacaaaagaggccattttccatttttaaagcttcttactggtgaaacagcccagttgtagtaggtgccagtcagtcaaggcaggggcctctctccgtcaatatggaaaactcagcagttttcctctcccccagttgtgttcttgtaacgttgttaatgggttcctttgctttttgctttctccttttctgaaaatgtatgtgttttgcctctcttttggctacatcttcaaaatatttcttttgtgcctatgtacatgtgtaaacatgccatagcatgtgtggtaggtgtcctgtattttgtttgggaaaaaaactatcaaaatgaggaagagaatttcccctatttatgcactaggtttctgtgctttttctttgagttctctggagtagatattaatttgataccttcatggtaatgaaattatgatggagctgtgttataaattccttatgtcagaggccagtgcggtagcctttgtcccttcatgcctttcaattctgagtgggaggaaaagcaaacatcaaaacagtgcttcagccaaattccatatgtaatgccattgggagagtattgactaaaatatcattcgtcagggaaatatagttgtaatatttttacaggatattcctaggtaaatgaaggagccttcagttgtaaatttcaattaccccaaaatgtatttgctacattttgttgtttgaagtattacctcttaaccttctttgttaatttttttcattttgtcttatatagtccagttttccaagataagctcagtcctttttcaaatgtcmcctttttaccaatactttttcattaaattatgaaaactgctaaaaaaaaaaaaaaaacaaaaaccaagtacctgcccgggcggacgctcg

SEQ ID NO: 537 - DNA, 1506 bp, Homo sapiens
  misc_feature (1491)..(1491): n equals a,t,g, or c
  misc_feature (1502)..(1502): n equals a,t,g, or c
tatagaaggtagcctgcaggtaccggttccgaattcccgggtcgacccacgcgtccgactaaaggcagcaagggattgtaaactaatcttacatagtcaatgtttcatagaatgctttggttacaatcaggttttttaaagactttaaaggttttttgtatgctataatatatgcttatgatttctaaaaattatgcagtatacacaaagggcataaagtcaaaaagtgtgtctccctctgtgactttattctcataccccagaggtatataatttcttgtattcttgtgtagtctttaagaaatgttatcgtttattttatatatggctctctctctgtatgcctcttcctgttcttattttaaatgttcaagtttgtgacttggttcttgtttaacttggttgtctttccatattgccaccttccagctctaacattaatgtctccaggattccattatatggatgtccctttggagaacatttgtttatagacttttctactaaaaatattgttataatgataatatccttatgcatatatgaagattactcttgattctgcctgactggaaactttattaataaagtagacattattctattttgaggctcaccagctgtgtaggtatgatcttgtgcttccatttaagaaattcttccatttaaagaagaaaaaaaatctctctaattgactatctgaagatatatgaaaaagcctatgcttttaaattaaactgttaagacagtccattgaaagattgtggaagttcacatctattttgcaccttaattttttcattgtccctactcatgactctaaaaagtgcatggcttggggctatactttgttttgcagtttgttggtatcgtgcctttccttatctacattagcttagactataccttatttttaagaagagaaagtggaaattaactgtggcaaaacctattttggcacaaccacatttgttcattatacaaaattagcttcctatgctttagaaaaaatgtgagttattactctgaaagttgtgattctgattcctcatggtttggagctcagaaatttcttaacatgtctttgctgttagtcaagcacaggatttgttttctgcaaaagtttattttcaatgaagaatacttgtcctaatagctcataaaaagtacctttgcactttaaatcctaggaatagggaacaaggaaacttactgggaagttcaaaagaaagaataacaggaccttctagtcagcagggcatgtttggaaaatgttaatacgccatgatttttgaagaccaattttagttcaggaggtggttttaaatattggatgaaaacttacaggctgttttcaatattcatttctgaaatactttagtatgatagataaatttggttaagttcttgttcattgtgaaatactgttggaagaatttttttcaaaataaagacttctgaatttgtgtaccaaaaaaaaaaaaaaaaccncgggggggggncccg

SEQ ID NO: 538 - DNA, 321 bp, Homo sapiens
  misc_feature (231)..(231): n equals a,t,g, or c
  misc_feature (315)..(315): n equals a,t,g, or c
  misc_feature (320)..(320): n equals a,t,g, or c
ctgcactacacacgtgttggtacctattagcaaactgcgctgctctaacctgccacctatccctttgccccaacacaactacggttgccaccgtgcccacaacaattccaactgtaacactggtaattgcgtactctgccacaaatagcccttgcgggagcaccagcatgctgggcctgcttgcgttgccgtctatgtccacatatatggcggcgagcgcctacacaacanctcttttaaccttcacgttggtgggtacattaaacttggccatcgtacgcttactcagcagcaacagacttacctgcaacaacntccant

SEQ ID NO: 539 - DNA, 814 bp, Homo sapiens
  misc_feature (171)..(171): n equals a,t,g, or c
gtgggattgcaggcacccaccatcatgccctgctaaattttgtacttttgtagagatggagtttcaccatgttggtcaggctggtcttgaactgctgacctcaggtgatctgcccaccttggcctcccaaagtgctgggattacaggtgtgagccaccatgcctggactcnttgttgttgttgtttttaattagtgaggagctacaagaacacatttataaaaattaagaggaaacagccccactgcatttgagaaggttaccatttccttcgaagttcctgctgttgccccttcctggtgggggagacactgtcctgtttcagtcattccgttgctttgctttatagttttattaatgtgtttgtgttggctttgcatgttttcaaatatatgaatgaaatcatgcagagtttattcttttacagtttgccttttcacttgattatgttcctgagatgtatccggattattgtgtgtagctgtatggcattccttttccctgctgcctagtgatccattgaaaatacaataattgatttttctatgtggttccactggtcatttttctgcccctgtgccctttgggaatcatctcctaaactctagtctcggcccttgctcttccatgtaaccttgagaatcagcttgtcaaattccccccaaaaaccccttgagatgtagaatgkaacccagctgaatctatagrtcagtctggataaaatcagcacctgtgtaaaattgaattttcccattcatgagcagggtttatttctgcactcaatgttttcaataaagttgtgtaccttttcccat

SEQ ID NO: 540 - DNA, 326 bp, Homo sapiens
  misc_feature (254)..(254): n equals a,t,g, or c
  misc_feature (273)..(273): n equals a,t,g, or c
  misc_feature (289)..(289): n equals a,t,g, or c
ggactgagctcggcgcctctagtgtagatgggtttttaattttcccagctgaacgtcgttatttggattgtgatttctttggtgwttcaatggactgtagatgaaggaggacctgttttctctcaggagtgtctgtggggtctcttgtcctggtttgctcagtgaagtgtggccccaagggctgagggaggtggccaggaccccgcagggtggcccccaccacagaggctgctgtcctacgggttcttctccantttctgggaccttgccgangagcctctgggagggngaaatggccacaggcctggagaatcgacacccggtgg

SEQ ID NO: 541 - DNA, 564 bp, Homo sapiens
  misc_feature (470)..(470): n equals a,t,g, or c
  misc_feature (501)..(501): n equals a,t,g, or c
  misc_feature (521)..(521): n equals a,t,g, or c
  misc_feature (564)..(564): n equals a,t,g, or c
gggcctggtgggcccgctgctggtgtgcagggctggtgccttgggtgcagatggcaagcagaaaggggtggataaagaattctttcttctcttcactgtgttggatgagaacaagagctggtacagcaatgccaatcaagcagctgctatgttggatttccgactgctttcagaggatattgagggcttccaagactccaatcggatgcatgccattaatgggtttctgttctctaacctgcccaggctggacatgtgcaagggtgacacagtggcctggcacctgctcggcctgggcacagagactgatgtgcatggagtcatgttccagggcaacactgtgcagcttcagggcatgaggaagggtgcagctatgctctttcctcatacctttgtcatggccatcatgcagcctgacaaccttgggacatttgagatttattgccaggcaggcaagccatcgagaacanggatgaaggcaatctataatggctccaatgncctgggcaccaagccacccntggcaacgcttccaacttgcaagaatctactatttcatggcan

SEQ ID NO: 542 - DNA, 616 bp, Homo sapiens
  misc_feature (149)..(149): n equals a,t,g, or c
  misc_feature (613)..(613): n equals a,t,g, or c
  misc_feature (616)..(616): n equals a,t,g, or c
gttccaggaaccagcaaacaagaggctgctcccgcaggaggcagtgtgaatggagaaagaaggctgcagtaggggctgctgctggactcggtggggagcaggtgcaaggagctctggctcccccatggacctgagctggagagcagagngcagctccagcccattcctcattcttccagggcacagtcctcaggatgtttcggggagaataggagccagaacctgagcccctaagccattcccctcaccaatgatggggtccccagtgagtcatctgctggccggcttctgtgtgtgggtcgtcttgggctgggtagggggctcagtcccaacctgggccctgctgagcaggagcagaaccattacctggcccagctgtttggcctgtacggcgagaatgggacgctgactgcagggggcttggcgcggcttctccacagcctggggctaggccgagttcaggggcttcgcctgggacagcatgggcctctgactggacgggctgcatccccagctgcagacaattccacacacaggccacagaaccctgagctgagtgtggatgtctgggcagggatgcctctgggtccctcagggtggggtgacctggaanaan

SEQ ID NO: 543 - DNA, 649 bp, Homo sapiens
  misc_feature (644)..(644): n equals a,t,g, or c
ggccagcatggatcctgacagtgatcaacctctgaacagcctcgatgtcaaacccctgcgcaaaccccgtatccccatcatcatagcactactgagcctggcgagtatcatcattgtggttgtcctcatcaaggtgattctggataaatactacttcctctgcgggcagcctctccacttcatcccgaggaagcagctgtgtgacggagagctggactgtcccttgggggaggacgaggagcactgtgtcaagagcttccccgaagggcctgyagtggcagtccgsctctccaaggaccgatccacactgcaggtgctggactcggccacagggaactggttctctgcctgtttcgacaacttcacagaagctctcgctgagacagcctgtaggcagatgggctacagcagcaaacccactttcagagctgtggagattggcccagaccaggatctggatgttgttgaaatcacagaaaacagccaggagcttcgcatgcggaactcaagtgggccctgtctctcaggctccctggtctccctgcactgtcttgcctgtgggaagagcctgaagaccccccgtgtggtgkktggggaggaggcytctgtggattcttggccttggcargtcagcatccagtacnacaaa

SEQ ID NO: 544 - DNA, 723 bp, Homo sapiens
tcctctaacacattcagactacaagtccagacccaggagagcaaggcccagaaagagctggaaaggcagctcatcatgcagagtgaaatgagggaaagacaaatggccatgcagattgcgtggtctcgggaattcctcaaatattttggaactttttttggccttgcagccatctctttaacagctggagcgattaaaaaaaagaagccagccttcctggtcccgattgttccattaagctttatcctcacctaccagtatgacttgggctatggaacccttttagaaagaatgaaaggtgaagctgaggacatactggaaacagaaaagagtaaattgcagctgccaagaggaatgatcacttttgaaagcattgaaaaagccagaaaggaacagagtagattcttcatagacaaatgaaatcatgcttaccaatcaaatctcaaagcacagaattattgacttgaatcatggtttttacagttttttaaatgctcaagattttgatattatagattttattttaaaatattaaaatgcaagatagttttgagctattttaaaataaaatttataacattcaacacaaaatcatggaggtgctctaaataacttttagatttcctctctctgtgtgcattaccaatatctaagtgtaaaattaataaattgttttgaattcctggaaaaaaaaaaaaaaaaaaaaaaaaaaaaaaaaaaaaa

SEQ ID NO: 545 - DNA, 796 bp, Homo sapiens
  misc_feature (742)..(742): n equals a,t,g, or c
gattggaaggcgtgtttccggctggactgaaatcctgtgaggaagattcgcgccctccccgccccctgccctccctgggaatcctctgaagatgcggccccctgtccttcgtgaacccggagccccggcctcggccccggcccagccccttccgggggccgacccgggctgggacttcgggggtcctagcctgagcccgctgcgggagaacaggcccggccgctgtggggaggggccgcgcgctatcctcgccgggggcgctgggaggcgaacacgtgcccgccgccccagccctgcgcgaacttcgtcgcgccartcttccggcaaagggtctcttttttttagtttaggtaaaataaaatctcccagagaaaacaaagccgggaagggagccccctttctgtgaaacgcatgccatcttctccatttgtcagtttgatgctgtaacgtacatggggttttgcaagagcttcaaaactgtctgcagacgtcaatttcgcccctccccttgtgagaactcgctacgtarccagcaactgtgtagtgctacaaatgatgaaaacgatcagaaatgcgattaggtgtcggggaaaaaagggtttcccctgkttttaacttgkatttttactttaattgttacaatcttgatattcttaacgtgacttttttgggaaaccaccaagtgctttttaagcaaggagttactggtatttatgcccttaatattccttcattataggcntattgaatacgttaatatctcagtaagtgtatttgaattataattgactggctt

SEQ ID NO: 546 - DNA, 1135 bp, Homo sapiens
  misc_feature (12)..(12): n equals a,t,g, or c
  misc_feature (15)..(15): n equals a,t,g, or c
  misc_feature (1107)..(1107): n equals a,t,g, or c
  misc_feature (1123)..(1123): n equals a,t,g, or c
  misc_feature (1129)..(1129): n equals a,t,g, or c
cggacggtgggncgncgacacaatgggccayggagttcccgttcgatgtggacgcgctgttcccggagcggatcacggtgctggaccagcacctgaggcccccagcccgccgacccggaaccacaacgccggcccgtgttgatctacagcagcaaattatgaccattatagatgaactgggcaaggcttctgccaaggcccagaatctttccgctcctatcactagtgcatcaaggatgcagagtaaccgccatgttgtttatattctcaaagacagttcagcccgaccggctggaaaaggagccattattggtttcatcaaagttggatacaagaagctctttgtactggatgatcgtgaggctcataatgaggtagaaccactttgcatcctggacttttacatccatgagtctgtgcaacgccatggccatgggcgagaactcttccagtatatgttgcagaaggagcgagtggaaccgcaccaactggcaattgaccgaccctcacagaagctgctgaaattcctgaataagcactacaatctggagaccacagtcccacaggtgaacaactttgtgatctttgaaggcttctttgcccatcaacatcggccccctgctccctctctgagggcaactcgacactctcgtgctgctgcagtcgatcccacgcccgctgctccagcaaggaagctgccacccaagagagcagagggagacatyaagccatactcctctagtgaccgrkaatttctgaaggtagctgtggagcctccttggcccctaaacagggcccctcgccgcgccacacctccagcccacccacccccccgctccagcagcctgggaaactcaccagaacgaggtcccctccgcccctttgtgccagagcaggagctgctgcgttccttgcgcctctgccccccacaccctaccgcccgccttctgttggctgctgaccctgggggcagcccagctcaacgtcgtcgcaccagctcccttccccgctctgaggagagtcgatacttaacagcttacccttctccctgccctgggggagacctgggggtggggcaggggaaccccttttcttgaggaacctttnaggacccatttttttncatttngcattc

SEQ ID NO: 547 - DNA, 1234 bp, Homo sapiens
gactagttctagatcgcgagcggccccctttttttttttttttttttttttgttttttggctctttcaaaggtaatggcccatcgatgagcatttttaacatactccatagtcttttcctgtggtgttaggtctttatttttatttttttcctgggggctggggtgggggtttgtcatgggggaactgccctttaaattttaagtgacactacagaaaaacacaaaaaggtgatgggttgtgttatgcttgtattgaatgctgtcttgacatctcttgccttgtcctccggtatgttctaaagctgtgtctgagatctggatctgcccatcactttggctagtgacagggctaattaatttgctttatacattttcttttactttccttttttcctttctggaggcatcacatgctggtgctgtgtctttatgaatgttttaaccattttcatggtggaagaattttatatttatgcagttgtacaattttatttttttctgcaagaaaaagtgtaatgtatgaaataaaccaaagtcacttgtttgaaaataaatctttattttgaactttataaaaagcaatgcagtaccccatagactggtgttaaatgttgtctacagtgcaaaatccatgttctaacatatgtaataattgccaggagtacagtgctcttgttgatcttgtattcagtcaggttaaaacaacggacaataaaagaatgaacacattcctcgtgtgtgattcactcttgtctaaatgtcccaacctgtgacttctttactttccacaccactaattatccaagatcttgaagaagtattgaacctctaataggccatcctctggcagatcagtacagtgaacagcattctggatcttagttttaccaaagattgctctgagagttccagggcgtaaatgccgggcaatttcaggatcagcaggtccacaaaattctcgaaatgtctttgtagcattattctgttgaatctccattgctacacaagggccagaatacatttctgtcaccatgtcatgatattcggtcactactcctttataaacttcatagaattcctcaacattaacccgatccatattgaacatctgcatagctgagatttcaaaacctgcatctcggatagccatcaggatctttcccaacagtccttcactgacagcatggggtttaacaatgcaacaggtacaattagtaaatttagcagtgtttc

SEQ ID NO: 548 - DNA, 1539 bp, Homo sapiens
gcaaaatgtgattatgtttgttggattgcaagggagtggymaaacaacaacatgttcaaagctagcatattattaccagaggaaaggttggaagacctgtttaatatgtgcagacacattcagagcaggggcttttgaccaactaaaacagaatgctaccaaagcaagaattccattttatggaagctatacagaaatggatcctgtcatcattgcttctgaaggagtagagaaatttaaaaatgaaaattttgaaattattattgttgatacaagtggccgccacaaacaagaagactctttgtttgaagaaatgcttcaagttgctaatgctatacaacctgataacattgtttatgtgatggatgcctccattgggcaggcttgtgaagcccaggctaaggcttttaaagataaagtagatgtagcctcagtaatagtgacaaaacttgatggccatgcaaaaggaggtggtgcactcagtgcagtcgctgccacaaaaagtccgattattttcattggtacaggggaacatatagatgactttgaacctttcaaaacacagccttttattagcaaacttcttggtatgggcgacattgaaggactgatagataaagtcaacgagttgaagttggatgacaatgaagcacttatagagaagttgaaacatggtcagtttacgttgcgagacatgtatgagcaatttcaaaatatcatgaaaatgggccccttcagtcagatcttggggatgatccctggttttgggacagattttatgagcaaaggaaatgaacaggagtcaatggcaaggctaaagaaattaatgacaataatggatagtatgaatgatcaagaactagacagtacggatggtgccaaagtttttagtaaacaaccaggaagaatccaaagagtagcaagaggatcgggtgtatcaacaagagatgttcaagaacttttgacacaatataccaagtttgcacagatggtaaaaaagatgggaggtatcaaaggacttttcaaaggtggcgacatgtctaagaatgtgagccagtcacagatggcaaaattgaaccaacaaatggccaaaatgatggatcctagggttcttcatcacatgggtggtatggcaggacttcagtcaatgatgaggcagtttcaacagggtgctgctggcaacatgaaaggcatgatgggattcaataatatgtaaagaaaatgccttaatataaactgactcagttgaatacctaatttgctgagacctcagcgtttcccttctttttgcgaattggggagaaagtgtatttttcttgcttatcatgcactctttcctttttttctcgcccgcttttcccctccttttctttttccttccttctttcctccctttaatataagggagaaatacatggtttttgtggaaatcattatatgtttgctttagattttcttctgttttcaccatcataacacttaagttaaatcatgatgtaaaattttagtacctcggccgcgaccacgctaagccgaatt

SEQ ID NO: 549 - DNA, 788 bp, Homo sapiens
gagtctcatatccttgtacttcagtttttttgtgtgtgaatactatccctataccactacccctaaaacctcagaattatttgctttattttttcatacaacttggggaagggaaccatgggagtatgcacatgggatcataatccattctgtggtttggaaaaagaaaatgttaacctctgctttagagggtagctactagctttgttggggataaaagtgtaatacatgcacttttgaactctgaaagtttgccaatctgaaaaggggtgtttctgaagaccactatcttttacgaacacttaaaaataagtgtttgcagttgtgtatgggcacgatactgtattctttacatttttatggccctacagctacttcttatccctgcaagtatataaattaaaaccaagtcactttagaacagctttgaaactagagtttcaaaggtaaaaggatctcatgtttctgaatctgcgtaaagcaagatggctgtgatttgacaggtttaattgctagkttttataggtggatagaaatgaatagtttggagtctttaaaatgttttaaaaaatgtttgcttactatctatatatatgacattattcccaattagttttatatctccaagatatatatatgtatataggtatatacacatatgtatatatacatagtctatatattctatataagaatatattccaataagaatatattccatacgggaatatattagtcattgatgtattttgccggtaaaattaaaagatattttaacaaaaaaaaaa

SEQ ID NO: 550 - DNA, 874 bp, Homo sapiens
ccacgcgtccgcggacgcgtgggcggacgcgtgggaaaaaagctgcgaggaaattgacttagacaaacacaagagcatccaaagaaagaaaacagaggtggaaatagaaaccgtacatgtcagtacagaaaagcttaagaatcgaaaggagaaaaaaagccgagatgtagtctctaagaaagaggaacgtaagcgtacaaaaaagaaaaaggaacaaggccaagaaaggacagaggaggaaatgctttgggaccagtctattcttggattttgaagctttcaaagttggttctcccaaagttaaattgaaaaaataggtgagagcttggttttatgatatccgtgttcataccacttttcttatgtgaataggttctttaacttctaacaaaggcctagtaaacaaagtgtttagcatgcttgctctccaacacagaaattgcttttcctcattttctaaaagcattattacattttttgaacatatagtgtaatttcctttaatgaaagtgactctgcttttattcatcaaattgctttgatggtggaaatattttctgttgggaggttatttattttaaattggaggattaatgacctttgcacaatctgtttcttgattgggtttgttatagttttgagttgggtattttatgttcattggtttttctctgtgaagcaatttttttctcctttattagatctaacttgcagtgtattttctaggctggaaagtggaaaatgaaatatattatratcttaggttacataaagtttctaaagtttcaaagagtcttgatacaaaatcagtttatattctgaaaatatttataataaagtattctaatttctaaaaaaaaaaaaaaaaaaaaaa

SEQ ID NO: 551 - DNA, 549 bp, Homo sapiens
  misc_feature (38)..(38): n equals a,t,g, or c
  misc_feature (536)..(536): n equals a,t,g, or c
tggcggcttccttcacccgcaacccgagagacgacccnccgggcccgccccgcggaagccgccggttgccaggccaaggagtggactagggtcgccggggaagcggtttgggagagcccatggtgactgcgtgagtggagcccagctgtgtggatgccccagcatggatgactacatggtcctgagaatgattggggagggctcsttcggcagagctcttttggttcarcatgaaagcagtaatcagatgtttgccatgaaagaaataaggcttcccaagtctttctctaatacacagaattctaggaaggaggctgttcttttagccaaaatgaaacaccctaatattgktgccttcaaagaatcatttgaagctgmaggacacttgtatattgtgatggaatactgtgatggasgggatctaatgcaaaagattaaacagcagaaaaggaaagttatttcctgaagacatgatacttaatggtttacccaaatgtgccttggagtwaaatcacattyacawgaaacgtgtgctncccaagagatttt

SEQ ID NO: 552 - DNA, 467 bp, Homo sapiens
ggccagccctggggcgccttaaaaaccggagctggcgcttggcakcgccactctgggcaggatccaacgtcgctccagctgctcttgacgactccacagataccccgaagccatggcaagcaagggcttgcaggacctgaagcaacaggtggaggggaccgcccaggaagccgccatggaccagctggccaagaccacccaggaaaccatcgacaagactgctaaccaggcctctgacaccttctctgggatygggaaaaaattcggcctcctgaaatgacagcagggagacttgggtcggcctcctgaaatgayagcagggagacttgggtgaccccccttccaggcgccatctagcacagcctggccctgatctccgggcagccaccacctcctcggtctgccccctcattaaaattcacgttcccaaaaaaaaaaaaaaaaaaaaaaaaaaaaagtcgtatcga

SEQ ID NO: 553 - DNA, 1211 bp, Homo sapiens
  misc_feature (1156)..(1156): n equals a,t,g, or c
  misc_feature (1165)..(1165): n equals a,t,g, or c
  misc_feature (1190)..(1190): n equals a,t,g, or c
  misc_feature (1193)..(1194): n equals a,t,g, or c
gtgaaaaaagacactctgacagaagaggagactcagttttatatagcagaaacagtattagccatagactctattcaccaacttggattcatccacagagacatcaaaccagacaaccttcttttggacagcaagggccatgtgaaactttctgactttggtctttgcacaggactgaaaaaagcacataggacagaattttataggaatctgaaccacagcctccccagtgatttcactttccagaacatgaattccaaaaggaaagcagaaacctggaaaagaaatagacgtcagctagccttctccacagtaggcactcctgactacattgctcctgaggtgttcatgcagaccgggtacaacaagctctgtgattggtggtcgcttggggtgatcatgtatgagatgctcatcggctacccacctttctgttytgagacccctcaagagacatataagaaggtgatgaactggaaagaaactttgacttttcctccagaagttcccatctctgagaaagccaaggatctaattttgaggttctgctgtgaatgggaacatagaattggagctcctggagttgaggaaataaaaagtaactctttttttgaaggcgttgactgggaacatatcagagagagacctgctgcaatatctattgaaatcaaaagcmttgatgatacctcaaacttcgatgagtttccagaatctgatattcttaagccaacagatgccttcctgggggatactcctccccaccctaaagggtcgcctgcaacttaggcggattgggtctctctgctgtggcgttctctcttgagagaccctctgaattttagcacaaagtgccttctgtttcacagctgccaccacctttagaggaatttcgtcagaaaaatgtggaggctccatattaatgcattattttttaaaaagttttgataactcttaaagcatcatttgcacctatgtgggaactttgcctgttgcaaagtattgtggccgagctgcagctgggagcctgctttctgccagtcttgaggttctgaagatcagctttgaaaggaaagtatgtcctagcttagccattcagaagagaaaaatggratatcagagttacagttgtcagtgaaactactttggattttaaccnctagaggangaaaaaggttaggrggcactctgtnagnntgggttgcttagcttat

SEQ ID NO: 554 - DNA, 1463 bp, Homo sapiens
tttcgagctctgcaccgaggagctgccctggacttgagtcccttgcatcggagtccccatccctcccgccaagccatattctgttggatgagcttcagtgcctaccagacagcctttatctgccttgggctcctggtgcagcagatcatcttcttcctgggaaccacggccctggccttcctggtgctcatgcctgtgctccatggcaggaacctcctgctcttccgttccctggagtcctcgtggcccttctggctgactttggccctggctgtgatcctgcagaacatggcagcccattgggtcttcctggagactcatgatggacacccacagctgaccaaccggcgagtgctctatgcagccacctttcttctcttccccctcaatgtgctggtgggtgccatggtggccacctggcgagtgctcctctctgccctctacaacgccatccaccttggccagatggacctcagcctgctgccaccgagagccgcactctcgaccccggctactacacgtaccgaaacttcttgaagattgaagtcagccagtcgcatccagccatgacagccttctgctccctgctcctgcaagcgcagagcctcctacccaggaccatggcagccccccaggacagcctcagaccaggggaggaagacgaagggatgcagctgctacagacaaaggactccatggccaagggagctaggcccggggccagccgcggcagggctcgctggggtctggcctacacgctgctgcacaacccaaccctgcaggtcttccgcaagacggccctgttgggtgccaatggtgcccagccctgagggcagggaaggtcaacccacctgcccatctgtgctgaggcatgttcctgcctaccatcctcctccctccccggctctcctcccagcatcacaccagccatgcagccagcaggtcctccggatcacygtggttkggtggaggtctgtctgcactgggagcctcaggagggctctgctccacccacttggctatgggagagccagcaggggttctggagaaaaaaactggtgggttagggccttggtccaggagccagttgagccagggcagccacatccaggcgtctccctaccctggctctgccatcagccttgaagggcctcgatgaagccttctctggaaccactccagcccagctccacctcagccttggccttcacgctgtggaagcagccaaggcacttcctcaccccctcagcgccacggacctctctggggagtggccggaaagctcccgggcctctggcctgcagggcagcccaagtcatgactcagaccaggtcccacactgagctgcccacactcgagagccagatatttttgtagtttttatgcctttggctattatgaaagaggttagtgtgttccctgcaataaacttgttcctgagaaaaaaaaaaaaaaaaaaaaaa

SEQ ID NO: 555 - DNA, 536 bp, Homo sapiens
acccctgcaggtaccggtccggaattcccgggtcgacccacgcgtccgcccatttttccggttgataatgcaatagataatgkraaagaaattcaagttgcattgyytatcttaatggcagcttatgcaatggcggaagcgtttatgtcaacaggagttggagcttctcttatcctaattgcattaaaagtaggaattactgctaaaactgttgcagttataggagctattgtcacatcaatattatcaatagcaactgggacaagttggggaacatttgcagcctgtgcacctatttttttatggctaaatcatatagttggcggaaatattttattgacaacagcagctattgcaggaggagcatgttttggagataatataggacttatttcagatactacaatagtaagttctggtatccaaaaagttgaagttgtaagaagaattagacaccaaggtgtatggtcagcattagttttattatcaggaataatagtatttgctattgttggatttacatggatttacccttc

SEQ ID NO: 556 - DNA, 588 bp, Homo sapiens
  misc_feature (572)..(572): n equals a,t,g, or c
  misc_feature (577)..(577): n equals a,t,g, or c
  misc_feature (585)..(585): n equals a,t,g, or c
tttttttttaatttccatatgggctaaagaatccaaatattttaaaaatctgtctctcttttcttctctcataaagtgaattattccttttttttgttttatgtaagtgtatatattcttagtttttcttgaaatcattgtaatgttaactttgttgtttcaaatatcttggtgattgcttcattatctcttcaacaaaaaaaacctttaattttgccattgaaactgtagaactatgccatgcttttattagaagcagtgctctgtgttaacaacaagaatggtgtaattagaattgggatgtggatatttactgtatgacaacacatttacagttctgtaatgcaaggatgcagtttaaaaatgtgaagtagtgatggtttttgaaataagctttaaaatatagggatcttgaaggctccctggggtaactattttataacttagataaaatggctagtcatatctgtgtgtttgtaaagttatttttttaatattttaagrttacaattttaacaatgtagraatgagccaaacttttaaattkaaaacagtaaracaaatggaaaccnatagntcacaaantcc

SEQ ID NO: 557 - DNA, 1585 bp, Homo sapiens
tttttttttttttttttatgagcaggagatcttaattgacagaaactcattggtggttggagtggccaatggcacgggaaaaagtatccagtaatcagaagaattgtatctgggttatgtaatcttatgcacattccattgtctttgccaagcccagaagccatgttgtgttcattgttaagaaatttgatagatttacccagcttttctatgtattttgacttattgaaaatatgtaacaactgagtcgggttgcagcactggtggggtagaatcgactttccctgaaggtgacacagatgtcagaattgtgtccagggatttaatttagacccatactgtccaggagactgtctctasytggatctctgtgctgactgactgacagacagactttagtgtctgtgtgctgactgacagactctagtagtgtctatatgttgaccaactggtagaccaggaggatctgtgtgctgattgactctagtaggatctgtttgtcactgacagactgtagtagtgtctgtgtgctgactgatagatagactatagtaaaatttgggtgttgcctgactaacggtctagggtctgtaagctgacagtctgcctgctttctgattgtatccattgaagtgtatgtacattatggtaattctctgtctattaaatgtgtctaacaaaggaaggaattaagcactccacrtgttttctttataggggagttctgtacactatgattttaaatagatatttcttatatagtagtggccaaattctcattattttgtacaagataaaggttatgcatcacttttatggtattttgtgaactcagctaagggaatgcctgttcagagcctggagttgttacctttacttgaagtcatctcatccagtcccctgctttagggcaggacttcagttccactgttcatttctgaagcttctgtgtccccagcttaccctgttctgraatgttgtattccattggacagggctgctatttttagtcagccatgcatttggattttacrcttaatctagtaagtaaaaatgagaagaaaatttggcatttaaaaattgattttaagggttggcaaaagtattttttccagtaagcctttcactggatatctgtgaccaatgtttacctacgcaatgtttttgtatctgaattgcttatgtacgttttttattatattgacctaacaagaagatcaacttatgctggtatggtgatggttttgctatggcaaaatcaaagggctgatcatacatggtgccctttgggaagggggatggtgtggggctgagcacctctgggttgaatgggaatgggtcagattgggaagcctaggaagagagttctactgtagatttcctaggcactgctctgttgaaataggaacataagtctttagcaacattctgatttaatcgggtgacactgataacaaagtatgccactcagatccatttaaagtgtgcataactgtatttgaaatgtgtttttgtgtgcgtgtgtgtagaatgggtaaataaaattgttgagtaacttgaacctaaaaaaaaaaaaaaaaaaaaa

SEQ ID NO: 558 - DNA, 1279 bp, Homo sapiens
aggtatccaggccagctgggaaggacatgatgaggaaattggaaaaacatatgactgcakagaagggccccatgattgtgttggtattggacgagatggatcaactggacagcaaakgccaggatgtattgtacacgctatttgaatggccatggctaagcaattctcacttggtgctgattggtattgctaataccctggatctcacagatagaattctacctaggcttcaagctagagaaaaatgtaagccacagctgttgaacttcccaccttataccagaaatcagatagtcactattttgcaagatcgacttaatcaggtatctagagatcaggttctggacaatgctgcagttcaattctgtgcccgcaaagtctctgctgtttcaggagatgttcgcaaagcactggatgtttgcaggagagctattgaaattgtagagtcagatgtcaaaagccagactattctcaaaccactgtctgaatgtaaatcaccttctgagcctctgattcccaagagggttggtcttattcacatatcccaagtcatctcagaagttgatggtaacaggatgaccttgagccaagaaggagcacaagattccttccctcttcagcagaagatcttggtttgctctttgatgctcttgatcaggcagttgaaaatcaaagaggtcactctggggaagttatatgaagcctacagtaaagtctgtcgcaaacagcaggtggcggctgtggaccagtcagagtgtttgtcactttcagggctcttggaagccaggggcattttaggattaaagagaaacaaggaaacccgtttgacaaaggtgtttttcaagattgaagagaaagaaatagaacatgctctgaaagataaagctttaattggaaatatcttagctactggattgccttaaattcttctcttacaccccacccgaaagtattcagctggcatttagagagctacagtcttcattttagtgctttacacattcgggcctgaaaacaaatatgaccttttttacttgaagccaatgaattttaatctatagattctttaatattagcacagaataatatctttgggtcttactatttttacccataaaagtgaccaggtagaccctttttaattacattcactacttctaccacttgtgtatctctagccaatgtgcttgcaagtgtacagatctgtgtagaggaatgtgtgtatatttacctcttcgtttgctcaaacatgagtgggtatttttttgtttgttttaaa

SEQ ID NO: 559 - DNA, 1389 bp, Homo sapiens
ggaatgttagatcaccttaacaagaaggagctccggggccaactcaagatggtggacagctttcacagggtgagtctacattatgggattatgtgcctgaaacggctcaactatgaccggaaggacctggagcggaggcgggaagaaagtcagacccagatccgagatccccacgcagaatgcacaggtgagctgccgctgggcccggagcatgctgggcgtccccacctcgcagactgcacgctccaaccgcccsctccacctmctctttccaggcccggcagcttctggagaaggaattcagcaaccttatctccttaggcacagacaggcggctggacgaggacagcgccaagtctttcagccgctccccatcctggcggaagatgttccgggagaaggacctccgaggcgtaactcccgactcagctgagatgttgccccccaactttcgttcggctgcagcgggagccctgggctctccggggctccctctccgcaagctgcagccagaaggccagacttctgggagttcccgggcagacggcgtttcggtccggacctattcctgctagtgcaggcctccaggtgacctcactcggacggaagaatcttcccgaggctgggctgttccctctcctgcccggactgtggcctcgccggggagagcgggcgggggagctcgcgccgaggactggaccatctgtacagaccagcgggagtgcgcgcgcccgcctcgcacagggccggggcctggaccaaaccacatgaactggactgagagggggaagaagcggggaggaagaaatcccgccccaaacgtccgctttccttttctctactttgtaatttattgatcagtttctgttgggagacgggtgtcctttacccgcgggaagggggcggggcttccctcccgggccgcatgcggggagaggctgctccctcccctttttcctgcccagtcgcggggcccaagtcttccttcttcgtccgaaaggaggggaggggggactcgctgctacaagcctcgccccctgtgccactcagctccgccccgccgcgtccggtcgccggtcccccgggtcatctgcgggcgggktcccctctccctcccccgtgtctcgtgtccccggggcctcaccgccccccgtgctgtggccgtgtccgtgccccgggggtagggggcgcagaatggcgcttccccttctcctctggctccggggtttgcatgggagaatcctctttccacgatgccgctgggcgacgtggcgtgggggcagggggacggtgggggagccctcgcccccgactctcggtcggcctccccgccccaggcgtcactcagtgatcacgggtaaagagaactgtttcaaaaaaaaaaaaaaa

SEQ ID NO: 560 - DNA, 539 bp, Homo sapiens
  misc_feature (228)..(228): n equals a,t,g, or c
  misc_feature (508)..(508): n equals a,t,g, or c
  misc_feature (515)..(515): n equals a,t,g, or c
agaggccgccaacatgatcctggtggatgatgacttctcagccatcatgaatgcagtggaggaaggcaagggtattttttacaacatcaaaaactttgtccgattccagctgagcacgagcatctccgccctgagtctcatcactctgtccaccgtgttcaacctgcccagccccctcaacgccatgcagatcctatggatcaacatcatcatggatgggccaccggngcagaggtgaggcagggcggctgggagccctgtgtctctttacctacctgcggggcttcctccaggggctgctggctgtgcccaaggctatagggatgaacaaatacagccactttccatcaggagttcccagaaaactgaagtgtgttgcactggagtgagactgggagtagaaggcagaggagaaagtacctgggccggcagagctgggtgaggatggaactttctgcttcctctggctggatgctctctctgggcaaacctgcatgggttaattctnatgcttnaatttcaagtcacccagtcactgg

SEQ ID NO: 561 - DNA, 1089 bp, Homo sapiens
gacactattgaaggtacgcctgcaggtaccggtccggaattcccgggtcgacccacgcgtccgcggacgcgtggggactgcttagaaatatagctgaagtgatcaccacagccataaaattgtttaagaaagatttatataatgtttacaaatctggaatcaaggattttagctgaaatcctttaagagatattagagcaagtatttaattcaggtattttcaagttttaaaacttaacctgtttacctactaaaaataaaatagctagtttttttctgcatataaaagttcattgaaatgatatgcccttatttgcaatacttttcccataaagttttaagtgtgaaagaattgtaatttactagatatgtttggtatgggatattttgttaggcaagttttcttttttcttcttaaattgcaataggcttccaaaaagagtataattgtttcagaacaaattaactcttggcattatacgtctccctttttctttacagtattagtaaaatgaaaaattgtacactttctgattttaacttcactaatgtaattactctctcaagaagcttttaaaatttaaattaccatcacacaacctttttatagtaaagccaacatttgttctctcaccaaaccccatgccaaattcatcatgaagaaagctcagcataagtaattcaaatactgcttataattttagaggggggtagaatttagtaaatattccagccggtcgttttatgcacaaggcttcagtcagaacatagaaaaaaaaaacattctgtgaatgaaatattgtatgttcagattttataaaagacatttttaaaagcccaatttacagccgtatattttcttatgatgtaatttatgaaaaagatgtctgtactaacaggtgctgtaacactactgttgttggattttattgtttggtgataaatgtatacaatatttctaagggaaactatgtactgtgatgtaaaagtctgggcaaaatgtatataatcctgtatataattatgtatttgattataattactgattgtaaagatttaataaaatatgtaaatattccaaaaaaaaaa

SEQ ID NO: 562 - DNA, 1938 bp, Homo sapiens
  misc_feature (555)..(555): n equals a,t,g, or c
  misc_feature (1521)..(1521): n equals a,t,g, or c
actgtgtgcaattttattttgcctcagtgacagtcactttacagccatattggtgcacatgcattagcaaaagargtgcatgccgcgtgcacgtgtgtgggtgcggcacagctctccgcagcaagaggtaaacaagacaagcactacggtggttcaagttgaagctggaggtcattttttgcccctgtaagctgagccctgaagaagaaagtcaccatgtatccatctttgttacctttttggatttgacgctgatccagatcctcctgggaccttcaatccgctgcttttacaaggatgaaaaggattctgatgactttttttgaactgtttgggcaggaatgctacagrgagaaycaatttctgtgaactgagagtccccaggtgataatttggtgtttcacacacaggcagtttctttttaaatgtgtggtgcttttttagtcawctggctttgcaaacccyagtgtttgaaaaacagggatgtagttcagcagtgtctgaataaggctgatgactcagaatcatgcagtgcctggcttctcaggccgccgncagccgggactgctttaggcgcgaacccacgcttctgacctgtgctctgtctttgcagttctgcacggagctaaaccagccgaccctgcccaacatccgcaagtgggaaggggccccggggatgctggaaggctgttgttgctgagaagccctcgaatcagctccagaagggagctgggtatgcaggattcctatgggacgcggctgccggcatggagctgagagacgcgggttcacaggagagctcgccaagcaacgggcacgggaagctggcgggccccagcccatacctcgggaggttcaaggtgggaagtcacgacctgacccttgttaaccttcacctggcagccctgaccctcctggggagcgagaatcccagcaagaatcacagtgatggccaccggttggcgagctttgcacagaccctacaggaaaccctgaaaggagaaaaggatgtcattatcttaggggattttggccaagggccagagcagcaatgactatgatatcctgaggaaagaaaagttccaccacctgatccccgcgcacaccttcaccaacatcagcaccaagaaccctcaaggctcgaagtctctggacaacatctggatcagtaaaagcttaaagaaggttttcacaggtcactgggctgtggtgagagaaggcctcacgaacccttggattccggataactggtcttggggcggggtggcttctgaacactgcccagtgctagccgagttctacactgaaaaggactggagcaagaaggacgcccctcggaacggcagcggggtggccttggagcgaagtgaagccaacatcaagcacgagcgatgatgacaccaaatccatgtgtccaccccgggacccaggagggcacagccaaggaatgagccctgtggggtgacgcttcagggcagagctgccttttaatttttattctcagagcatcagcacttgagnccttgccccacgccttctctgtggaccattcaggacctccagtgggggtggcgtgccaggcgcgtaccccaccaggtgggcaaagcagaaacctgcggggagcggagacgccttttatctctggatgccacagacctgagcagcattgggctggctgtccgctgctgactggatggcagcacaaggacaatatgagcagagggaggagaagaaggggtgctcaggctgcgggccacagtccagcagcgccagaagcactcatttctgaccaccaggctatgacgttcctctgcgcattacagaaagcttttaactgtgatcaggcagtctgctcagatacattgagtggcgatttttagttttgttttgaaaaaataaacagattaacctgcaaaaaaaaaaaaaaaaaaaattact

SEQ ID NO: 563 - DNA, 1442 bp, Homo sapiens
ggtccccgtcacgctgactttccgtgcagtgctgtggtgcgaaaatgcctcgccgctcytggtagacgaagaggaagacaaacctacagtcgcttccaaactctagagttggaaaaggaatttctttttaacccctatctgaccaggaaaagaagaatcgaggtttcccacgccctagccytcaccgagagacrggtaaaaatctggttccagaacaggagaatgaatggaaaaagkaaaacaacaagacaaatttcccgtttcccggcaggaggtgaaggacggggaaacgaaaaagkaagcccaagagctggaggaagacagagccgaaggcctgmcaawttaacytctacctttaaaatttaccacagactattaaaactaataatcaccatatgctgtggacaccacctattttctttgttggaaaggaccttacctgtgtttcaagctaccttcatgtcactgctcttgaggttttctgtgctttgagagggatttgggtgtttaaaaaagtttctagtatcacatagaagctgtccttgagctgtcctatggaagggtaatttgatactgaccttgtagctatatttttataatggtttttaatgtctgagctagtgatttgcctcaacaacgtaaacttcctaatgattagcacttaataattgcatataaaatgctttattaattaaacaagtgcacttgaacattttaatatttgtggtgagtaaattaaaaggagtttattaattaaaaaaaattatgtctgcagaatactttatattatttgattacaatgtattatttatggattttttattctttcctttataatgaatagttcgggtgcgttttgtttactcctaaaaggtttctttgcgtattttctaaatgtaatatctcggggaaaatattagaaaagcacgtattagctgaagaatgtaacttgtagtccagctctgcagcttccttaaacttaagaaaaagattgggccagtgacaagaatttaaagacaatgtccaagttgacaattatttttctatagtccatacaaattaaataatctggcaactctggcaaatcgccttgtaaaatgcgtctcattttttaacttgctttcgttttgaaccgcccttgtaatcgcctgaaatcgctagttctttatgcggtggcygccctgtgttccgttattttcagtaggtgtcatatttatttgtattgcctttgttctgttcgccgctggttttaaaccagcttgctgtgtgcatctcagacgtcggttggtacgtcctccgctgttyttcaggaaagcgatagcctcacctatttgaaacaagccctgagaggaaacgcagaaaaacctgagtgtaaacaactccggaatgtcgctagctccttagtaaataaatgaatctctttytggaaaaaaaaaaaaaaa

SEQ ID NO: 564 - DNA, 1446 bp, Homo sapiens
  misc_feature (35)..(35): n equals a,t,g, or c
  misc_feature (37)..(37): n equals a,t,g, or c
  misc_feature (57)..(57): n equals a,t,g, or c
aagaactaaaacgactcactatagggaaaaactananacgcctgacaggaaaccggnccggaattcccgggtcgacccacgcgtccgaaaragaggtggaggaggagggtgatgttgatagtgatgaagaagaggaggaagatgaggagagctcctcggagggcttggaggctgaggactgggcccagggagtagtggaggccggtggcagcttcggggcttatggtgcccaggaggaagcccagtgccctactctgcatttcctggaaggtggggaggactctgattcagacagtgaggaagaggacgatgaggaagaggatgatgaagatgaagacgacgatgatgatgaggaggatggtgatgaggtgcctgtacccagctttggggaggccatggcttactttgccatggtcaagaggtacctgacctccttccccattgatgaccgcgtgcagagccacatcctccacttggaacacgatctggttcatgtgaccaggaagaaccacgccaggcaggcgggagttcgaggtcttggacatcaaagctgagtcactggacctagctgtgcccccaacctagattggcagcaccaccccagggcagaggactctctgggcacccgctgtgcatggagccagagtgcagagccccagatcctttagtaatgcttcccctggtcctgcaacaggcccggtcacctcggccgggcccggggctgaggtcagcctcactgcctgcttattgcctctttctcagaatcctctttcctccccatttggccctgggctcaggggaccaggtggggcgggtggggagctgtccggtgctaccacaccgtgccctcagtggactaaccacagcagcagccagggatgggccctggaggttcccggccggagagtgcctctcccctctgccatccacgtcaggtctttggtggggggaccccaaagccattctgggaagggctccagaagaaggtccagcctaggccccctgcaaggctggcagcccccacccccaccccccaggccgccttgagaagcacagtttaactcactgcgggctcctgagcctgcttctgcctgctttccacctccccagtccctttctctggccctgtccatgtgactttggcccttggttttctttccagattggaggtttccaagaggccccccaccgtggaagtaaccaagggcgcttccttgtgggcagctgcaggccccatgcctctcctccctctctggcagggccccatcctgggcagaggggcctggggctgggcccagagtccagccgtccagctgctcctttcccagtttgatttcaataaatctgtccactccccttttgtgggggtgaacgttttaacagccaaaaaaaaaaaaaaaaaaaaaaaaaaaaaaaaaaaaaaaaaaaaaaaaaaaaaaaaaaaaa

SEQ ID NO: 565 - DNA, 1278 bp, Homo sapiens
  misc_feature (1228)..(1228): n equals a,t,g, or c
  misc_feature (1235)..(1235): n equals a,t,g, or c
  misc_feature (1245)..(1245): n equals a,t,g, or c
  misc_feature (1252)..(1252): n equals a,t,g, or c
ggtcggtttcagaaatgccttgcagtggggatgtctcataatgccatcaggtttgggcggatgccacaggccgagaaggagaagctgttggcggagatctccagtgatatcgaccagctgaatccagagtccgctgacctccgggccctggcaaaacatttgtatgactcatacataaagtccttcccgctgaccaaagcaaaggcgagggcgatcttgacaggaaagacaacagacaaatcaccattcgttatctatgacatgaattccttaatgatgggagaagataaaatcaagttcaaacacatcacccccctgcaggagcagagcaaagaggtggccatccgcatctttcagggctgccagtttcgctccgtggaggctgtgcaggagatcacagagtatgccaaaagcattcctggttttgtaaatcttgacttgaacgaccaagtaactctcctcaaatatggagtccacgagatcatttacacaatgctggcctccttgatgaataaagatggggttctcatatccgagggccaaggcttcatgacaagggagtttctaaagagcctgcgaaagccttttggtgactttatggagcccaagtttgagtttgctgtgaagttcaatgcactggaattagatgacagcgacttggcaatatttattgctgtcattattctcagtggagaccgcccaggtttgctgaatgtgaagcccattgaagacattcaagacaacctgctacaagccctggagctccagctgaagctgaaccaccctgagtcctcacagctgtttgccaagctgctccagaaaatgacagacctcagacagattgtcacggaacacgtgcagctactgcaggtgatcaagaagacggagacagacatgagtcttcacccgctcctgcaggagatctacaaggacttgtactagcagagagtcctgagccactgccaacatttcccttcttccagttgcactattctgagggaaaatctgacacctaagaaatttactgtgaaaaagcattttaaaaagaaaaggttttagaatatgatctattttatgcatattgtttataaagacacatttacaatttacttttaatattaaaaattaccatattatgaaattgctgatagtatttgaagactgagtcttgtgtgtttcccaccctagcccccaggctttcttttttaccccttttccttctcccctncctcctncatccctctnactcttnctccctcccttccttcctttcttctt

SEQ ID NO: 566 - DNA, 2001 bp, Homo sapiens
  misc_feature (1979)..(1979): n equals a,t,g, or c
  misc_feature (1991)..(1991): n equals a,t,g, or c
aaaacaggcttggctggtcttgaaaatccggcatcttagtgaacaacgtgrgaatgtcgtatgagtatcctgaatactttttggatgttcctgacttggacaatgtgatcaagaaaatgataaatattaatattctttctgtttgtaagatgacacaattggtactgcctggcatggtggaaagatccaaaggggctattctgaacatttcatctggcagtggcatgctccctgtcccactcttgaccatctattctgcaaccaagacttttgtagatttcttctctcagtgcctccatgaggagtataggagcaagggcgtctttgtgcagagtgtcctgccatacttcgtagctacaaaactggctaaaatccggaagccaactttggataagccctctccggagacgtttgtgaagtctgcaattaaaacagtcggcctgcaatcccgaaccaatggatacctgatccatgctcttatgggctcgataatctcaaacctgccttcttggatttatttgaaaatagtcatgaatatgaacaagtctacacgggctcactatctgaagaaaaccaagaagaactaagcattgataactgcattgtaacttggccagatgctccagcatatgcacgttcactgcaaagcaccctactggttttgaaaatctgaccttgtcatttcaatagttattaacatgactaaatattatcttaattaagaggaaaatagaagttgcttttaggggtttctgacatatattctggatactatccgaggtaattttgaagtttaatataaatgctcatatcaaatgaatatagaactaatattgtcgggaacacctaatagaaaggaatactattatagcaaatcacagaatgatagactcaagcataaaacttggcagttttatctgcttcaaaatgccattgatcattattcctgtattttctctgaaactgattataaaaaccaatgtccagctactcttttgtttttgacacttgaagaaatggagatcgatttgatttgtttataagcagacacactgcaatttacaaagatctctttacggttttataaaattatcttccagtttgtacatttatatggaattgttctttatcaagggtagctaatgacatgaaaataattgtgaaatatggaattatttctgacacatgaagcccactaaactatgctttcttataatgcatatttcttctcagtttaaatgtatgtaaatatcgaagctatatggtatgatttataaagataaatgggccaaagtgtacattgagactggcagccatctatggtaccactgaaaccctgacccagaaaagtggcttgcttggacacccagctgcctttgtttctgcattaaaccaatattgatcacacatatgacacaggctagtcctataaaagtaatgacttcatagaaatggcattataatttttaagttgatactctacaggtagctattgatataattagttttaataaaacatgctgcaaccatggtatacaacaaaaatacatttctttggtgattgaaattaaggccgtatttacaatgacttaatataagactgacttttatcctgcttcataacttgtatggagaactcaccaagaaagaattcaatactgtgaaatatgcagcaagaagattggtctttacctaggctgtgtttcctaagctctgagttttcagcaccagtagatttgtattaaaagaaaaaaaaatggggccttagcttctggcttttaattttgccagctaaggacataaaacaaaaataaacaaacaaaaacaaatagccatctgctatcagcatcattatgtaaaagaaaatatattttagcccctaaaattaggaagaatgtaatctcagaataaaggttgtcatttaagttgaataaatatatagctttatgaaaaacaaaaaaaaaaaaaaaaaaaaaatntcctgcggccgncaagggaatt

SEQ ID NO: 567 - DNA, 2524 bp, Homo sapiens
  misc_feature (308)..(308): n equals a,t,g, or c
  misc_feature (596)..(596): n equals a,t,g, or c
ctgctaaaaaaaaaaaaaaaatggggcccgaaataaaagaatatatagtactcacctcagttccttccataagaagtgggtggtttaatgattgttaagccatttttgcctgtgccgggagcatggagggctgagatgtcracaggcagtgggaaacaaatgccctcctaagccacaaggcgtgcgccagattagtaggcaactccattttaagaagctgcctttttcacaaaactggaagaaataaaagcggttggaataaacaagttaaaagtctttaatgcaaaaagtaattgaaaggcagtgcntccattttggtgtactttcttggaagaaagtataaaattgaccggcatcatgagagacggaagatgccgtgttctcagccaaacaagcaactctttccccgccagcactgtcgggtggggtcaggccagcttttaaacactggggactggatcacagaaaaacagtggttttctgtccctgggaaatgaataggcacaaagacccacttggctgtgggcagactactcttcaataagatttgggtgggaggaggaacattccttttgctattttgagctgagacaatntaaatattcaactgtgccatgcataaagcattgaattctcagggcacctcttcttccccttaccccttttaaggccatcccctccattaataataatccaggtagttgtgaaaatcgtgcttctatctgatcccttcttagtttggcttttcatcccatcagaacaagtaaacgtaggcgccacagctcttgtgagtactgtctccctcacggtgaatgagcctcctggtgtttcgtccaagaaaagaaagggtgtcactggaaccacagccctttttcattttataaactgcctcttcatgttgcctgctcaagtttccacctagaattgctatcactgtggctctttctaaaaatctttctrtttaactggttcactgaaattagtcatagaaaacttgtgatttggtgaagaggcattccttgtaataaccaaatgacttgggatggtgtgcatagcaagggcagtgttacacttaygaggactgtctctagcatccaggaagtctctgggtctgagggatggaaagttcttcctgctatgaatgagagtggactcttcccctcacccccaactgaaaccacaaacaaccagaatcttctggaattctgacttagagtcgttgttatagaagaccttgttgctatggaacatgaaactgtgtgtcagatggagagatccccttaacctaagagccttaaatagccctgaaagtacactgggacggtttgcgatggaattaaaattggaagtgaatatttttaggtgctcttgaagctttctggggactcaaaattatcaaaagtcagggacagtccggaggaagagcgtctgcaaaactgggttcctagaagtatagacggacttagctttttgtagaatttggtgaggagcagcgcctcgtgagagcagaatggcctggcgtggccagtgcttcccggcagcacgcagctctgcggcctccagaattcccctgttctgagcttgatgcccctagcctgtcccctacctacttcctcccctcctctctagccctctcacaggggtgattgctacctctctgttttcttgggcctaggcaagttttagaggagttcccaagcattgttatgaggccagtgtgctcgctgggctgggcgggatggcctgggcttgtgtgtggcctgagggctctcctggggccttctcttttcccagtcacctttggagccacagaagcagtgcactcattggatgtctgttcttaacacagcttctctttctacattaaaaaaaatcattattgcattttggaaagcagtgctcatcaaaagcaacttttaaaacctattttattgttcctttaaatgttctctcccgctgaaactgccctggagaggctatctgctgctcttccatttacccacatcaggttattctccatgtcactcagtggagatgactccagatgtgtttaaagactggacaattcacctatactgtgtaggaaattacctccttaattacctggtagaattgtcagcagacatgttcatccgatgatagtactgcagttttctattaataatttgcagacttttatctaacctgcactcatgtacagattattaaaagttttaaaatgtaactgatcagtattgatcaatcattgtcttgatttttttttacagcgtatatttctaatcatattttttaaagccaagagaactggttgaatgaatgtttattttcctgaaggtatttttaagataaagcttcctaatggcgtgtaaactttgcatatgtatgtagtttgatacatattgtcacatttgaaaatcttgtgggttgtaactggttttatacaaaatatcgaatagtggaaattgtataattacaatcatgtaattaaaagtattaacccaaaaaaaaaaaaaaaaaaytcgag

SEQ ID NO: 568 - DNA, 2667 bp, Homo sapiens
gagaaataataatatagctttatagaattttccatcttgtattaaaataatcacatgtacatcattgtaactcagtccataacataagattttgtacaacaatttctttttgtgtgctggcatcattaaggtttagtctgcccagatcacctattagtacctaatttatatattctgaattaaaattatctgttaatttaaaaacattttatctattgtctttcaaaatagtattaactgagggtttttttgtgtgtgtttttctattttgcttggctttttgaacattactggactctcgttttagaaggaaaaacctttcagctctactctcacaatcttatagctttgtttgaacatgccaaaaaaccaggattagctgcccatattcaaactcacaggtttccagaccgaatactaccaagaaaattcgctttaacaacaaagattcctgatacaaaaggctgccacaaatgttgcatagtcagaaacccttacacgggacataaatacctctgtggagctttacagtctggaattgttttacttcagtggtatgagccaatgcagaaattcatgttgataaagcactttgattttcctttgccaagtcctttgaatgtttttgaaatgctggtgatacctgaacaggaataccctatggtctgtgtagctattagcaaaggcactgaatcgaatcaggtagttcagtttgagacaatcaatttgaactctgcatcttcatggtttacagaaattggtgcaggcagccagcagttagattccattcatgtaacacagttggagagagataccgttttagtgtgtttagacaaatttgtgaaaattgtaaatctacaaggaaaattaaaatcaagtaagaaactggcctctgagttaagttttgattttcgcattgaatctgtagtatgccttcaagacagtgtgttggctttctggaaacatgggatgcagggtaaaagcttcaagtcagatgaggttacccaggagatttcagatgaaacaagagttttccgcttattaggatcagacagggttgtcgttttggaaagtaggccaacagaaaatcctactgcacacagcaatctctacatcttggctggacatgaaaatagttactaagcaacagaaactgatctcaaatgacaggaaaatgaatatactccattgaaaggaaaaataaggaaattcaatacaaactgcactatgatttgctttaactattatgggttatattgcaaatgatctgtactttagggtagaattcaatattttctgcagctggaaacagctagtctatctcttgccactgtgtggtggttatatcaagtttgcttaataaaagctatgagacaaatagtcctctagttccaggaaacacagtctttttttaaaaaaaacaatgtttgtaacaagggtgccatggtatttttagataactcgtgattatcttaagagaggtaaatttagtgatcattttatatcatgtcttattccttcttaatgaacataatttgttaaattctcaagcaaggttttcacttttatattggccattctgtatgtttttgtaaaacagaatatttaatccttatttattaatctcttgctggagtggtgtaatgtatctaacttttagcaaaggagggttgcagagcagcttaaattttttttataatgtataagaattttgtttatcttttaagagtagtaaagtactttgagtgtttgggggttcaacacacacatgcaattttgcttaacaaaagtattttataatacagtttcatacagaattaccttaaaagggagtcttatgttttcaactacagatagttgtaagggatcatacagaagatattgatgatagttgaaatattcttagaaggggtgtgtatgtctagctgtgtctaccatgtgtatgtattcttgacaagcagtataaaatacctgtgatttttctttacattagggataatgcataaggaattaatcttcatatatattatcatccctaatgtagcagggggaagtatttaattgcccatgatatgtattttacttatactatgccagagaggaaactataaagtaattacacatgtaatcttgggtttttcacatatgtaggtattcattttgagtaggttgaagaagaaaaaaaatatttaaatgaattgaattcctgatgggatagtatcaataagtatttaaaagccagtattctaaaaataataaagggtagggtcatttttgagtttgtttttcttttgctattgttaatattcaaaattaaagtgttacattggtacctgttgtcttaatgcatttattgagaacagcattgagatgatgaacaaggggttagcaatagcaaactctataattattttgactaattacttaagaggaaaacagtataagtatctcattcagtatttagcaattctgtaaaataagtattatctctatttttcagatgaggaagtaagggtttagcaaggttaagagatctatccaatttacacagcaagttagtagttgagcctgaccatgagtcttctgactctgttcttttcactatgcaatacgcaaacaataaaatgttatacaaatggaaaaaaaaaaaaaaaaaaaaaaaaaaaa

SEQ ID NO: 569 - DNA, 2607 bp, Homo sapiens
  misc_feature (74)..(74): n equals a,t,g, or c
ccggcgccaagcccgcgcctctccgcgccgccccggcttccgcaccggccctctccgcgtccccgcccgcgcgnccggaccgggcagccagaaaaatcatttttcttctctgggaaggtgaacatttgtagcattgatttcccggatctggtaacatggcaaaagatgccggtctaattgaagccaacggagaactcaaggtcttcatagaccagaaccttagtcccgggaaaggcgtggtgtccctcgtggccgttcacccctccaccgtcaacccgctcgggaagcagctcttgccaaaaacctttggacagtccaatgtcaacattgcccagcaagtggtaattggtacgcctcagagaccggcagcgtcaaacaccctggtggtaggaagcccacacacccccagcactcactttgcctctcagaaccagccttccgactcctcaccttggtctgccgggaagcgcaacaggaaaggagagaagaatggcaagggcctacggcatttctccatgaaggtctgcgagaaggtgcagaggaaagggaccacttcctacaacgaagtggcagacgagctggttgcggagttcagtgctgccgacaaccacatcttaccaaacgagtcagcttatgaccagaaaaacataagacggcgcgtctacgatgccttaaacgtgctaatggccatgaacatcatctccaaggagaagaaggagatcaagtggattggtctgcccaccaactcggctcaggaatgtcagaacttagaggtggaaagacagaggagacttgaaagaataaaacagaaacagtctcaacttcaagaacttattctacagcaaattgccttcaagaacctggtgcagagaaaccggcatgcggagcagcaggccagccggccaccgccacccaactcagtcatccacctgcccttcatcatcgtcaacaccagcaagaagacggtcatcgactgcagcatctccaatgacaaatttgagtatctgtttaattttgacaacacatttgaaatccacgatgacatagaagtgctgaagcggatgggcatggcttgcgggctggagtcggggagctgctctgccgaagaccttaaaatggccagaagtctggtccccaaggctctggagccatacgtgacagraatggctcaggggactkttggagggcktkttctctgccagtgacctgaccaacggtgcagatgggatgctggccacaagctccaatgggtctcagtacagcggctccagggtggagactccggtgtcctacgtcggggaggacgacgaggaggacgatgacttcaacgagaatgacgaggacgactgacgtcctccccacttcagattcggcttcaggaaaacgtttagcgaaaagaaactttttttttaatgtgggttttctgtttccttttggcctactcccaagaagatattggtaagctattgaatttagatatgcacctctgataagcaaggattgtttcccgtaggattaggacgtgctgtggatgtgtgttttgataccagtgtgctgatgcagagcgtttatttacttgttaggattttgtgttttcatttgctatttttctttaagtgcagagttcatttttgcccctgaaaagtttttgctgagtttgctgaagaaattgtatttcaaccacatccatgaaaataaaacacctcctgttgtggatggtgagcccctgatgccgcttatttgccgtgagtttggacggcacccctgctggcggatagcaagactctgtggagtttgttcagtggtacggtgtccaagcaaacagcagaatgcaactttctaaacagccccaagcaaacagcagaattcaactttttaaacaataaacaccatcaaccttattgactttattgtcccttaaattatattgactgttgtgattccatcaagtttgtacactcttttctctccctgttttgcagcaacaaattgcgaagtgcttttgtttgtttgttttcgtttggttaaagcttattgccatgctggtgcggctatggagactgtctggaaggcttggaatggtttattgcttatggtaaaatttgcctgatttcttacaggcagcgtttggaaaccttttattatatagttgtttacatacttataagtctatcatttaaagacatgtactgaaacaaatgtatttgtttcataagcatcttcctgtaatctattataaaattgaaattaaatatagagaatgttttaacaattttttaaaaatttgtcaatcatttttaatagttctttttttataaaaagaaaaaggaatttaaggacaggcagtagtctcttttaaaatttattcacaaaacccattaactgcacagttgctattagctgcctgttctaaaacgatagtctttttattgaaacacaaataaacttttctgtaatattttatggtatataaagagactttaattgtttgacttgtttaacttggcactgttagtttttattaataaaacgcgcatgggcattttaaamaaaaaaaaaaaaaaaaaaaaaaaaaaaaaaaaaaaaaaaaaaaaaaaaaaaaaataa

SEQ ID NO: 570 - DNA, 1837 bp, Homo sapiens
ctggataacctaccagggattcctttcccagtggacgctcacgacttatttagatgtacagcggtgcctggaatatttgggctatctaggctattcaatattgactgagcaagagtctcaagcttcagctgttacagtgacaagagataaaaagatagacctgcagaaaaaacaaactcaaagaaatgtgttcagatgtaatgtaattggagtgaaaaactgtgggaaaagtggagttcttcaggctcttcttggaagaaacttaatgaggcagaagaaaattcgtgaagatcataaatcctactatgcgattaacactgtttatgtatatggacaagagaaatacttgttgttgcatgatatctcagaatcggaatttctaactgaagctgaratcatttgtgatgttgtatgcctggtatatgatgtcagcaatcccaaatcctttgaatactgtgccaggatttttaagcaacactttatggacagcagaataccttgcttaatcgtagctgcaaagtcagacctgcatgaagttaaacaagaatacagtatttcacctactgatttctgcaggaaacacaaaatgcctccaccacaagccttcacttgcaatactgctgatgcccccagtaaggatatctttgttaaattgacaacaatggccatgtatccgcacgtgacacaagctgacctcaagagctccacgttttggcttcgagcaagttttggtgctactgtttttgcagttttgggctttgctatgtacaaagcattattgaaacagcgatgatataaaaagaaatactgtccctaccaaaaacaaatacttttatgtacattctgaatgctttaagttctgctagaattattgagatatttatacatgcagagttactttattaatatttgtaattcatgcataagagtattttaatgatagttataactgcagtattggctagcatatggaaagaaaacagctaacagccaaactaaaatggctaaattccagaggccaaaagggaatattttgtaaatatatgtacatattcaggcaagatatggtctcccaagctgagttctagaaatgatgtttctagacatttctaagtggtattgttagtgctcacttggctcactcttctaggtttaagttagcccagagattgtatttactcatggatcactttatttatttcacatttactcagaatgatcctttgggttctataaggacataaggtacaatttgccattgtctctccatttttaaaaacatacaagtcagtgtcagcttaccaacatgacattttttcagtcagttgtggtaggccagccttgaagccatcgcacagtctagaaacttgtgtagctgagtgtgcagctcacctttaagggtgaagttaggtaaaagcaattagcagaggcgttatctatgtgattatgttgcttccttgtcagtatgttgaattttatagccctttcaatgaaataaaaaaaaaatttgtatattaccaatgtttttagtttaaataaagagtcacccttactactgttgaatttcatcccaagtgtaaatcattctataatggctgtgtctgttatagtatattacagtaactgcatgtgtcaccaagtgttctatatcaggctaggataacctagaggcagtaattttttaaatgataaaataaatctaatgaatataaactctcatgataaacctattttttccatcatcagccttttcaagtatttaaataaataactgctgtgtactgtgatcttgagttcttttgtcatctaaagtaaatatttctgtacagataaaaaa

SEQ ID NO: 571 - DNA, 1682 bp, Homo sapiens
  misc_feature (3)..(3): n equals a,t,g, or c
ggngcagcagcagccaggtgtggcagtgacagggaggtgtgaatgaggcaggatgaactggacaggtttgtacaccttgctcagtggcgtgaaccggcattctactgccattggccgagtatggctctcggtcatcttcatcttcagaatcatggtgctggtggtggctgcagagagtgtgtggggtgatgagaaatcttccttcatctgcaacacactccagcctggctgcaacagcgtttgctatgaccaattcttccccatctcccatgtgcggctgtggtccctgcagctcatcctagtttccaccccagctctcctcgtggccatgcacgtggctcaccagcaacacatagagaagaaaatgctacggcttgagggccatggggaccccctacacctggaggaggtgaagaggcacaaggtccacatctcagggacactgtggtggacctatgtcatmagcgtggtgttccggctgttgtttgaggccgtcttcatgtatgtcttttatctgctctaccctggctatgccatggtgcggctggtcaagtgcgacgtctacccctgccccaacacagtggactgcttcgtgtcccgccccaccgagaaaaccgtcttcaccgtcttcatgctagctgcctctggcatctgcatcatcctcaatgtggccgaggtggtgtacctcatcatccgggcctgtgcccgccgagcccagcgccgctccaatccaccttcccgcaagggctcgggcttcggccaccgcctctcacctgaatacaagcagaatgagatcaacaagctgctgagtgagcaggatggctccctgaaagacatactgcgccgcagccctggcaccggggctgggctggctgaaaagagcgaccgctgctcggcctgctgatgccacataccaggcaacctcccatcccacccccgaccctgccctgggcgagcccctccttctcccctgccggtgcacaggcctctgcctgctggggattactcgatcaaaaccttccttccctggctacttcccttcctcccggggccttccttttgaggagctggaggggtggggagctagaggccacctatgccagtgctcaaggttactgggagtgtgggctgcccttgttgcctgcacccttccctcttccctctccctctctctgggaccactgggtacaagagatgggatgctccgacagcgtctccaattatgaaactaatcttaaccctgtgctgtcagataccctgtttctggagtcacatcagtgaggagggatgtgggtaagaggagcagagggcaggggtgctgtggacatgtgggtggagaagggagggtggccagcactagtaaaggaggaatagtgcttgctggccacaaggaaaaggaggaggtgtctggggtgagggagttagggagagagaagcaggcagataagttggagcaggggttggtcaaggccacctctgcctctagtccccaaggcctctctctgcctgaaatgttacacattaaacagcacccctgccctctgctcctcttacccacatccctcctcactgatgtgactccagaaacagggtatctgacagcacagggttaagattagtttcataattggagacgctgtcggagcatcccatctcttgtacccagtggtcccagagtcgac

SEQ ID NO: 572 - DNA, 1694 bp, Homo sapiens
gggccaagatggtgaaaccccgtctctactaaaaatacaaagaattagctgggcgtggtggcgggcgcctgtaatcccagctactcgggaagctgaggcaagagaatcgcttgaacccaggaggtggaggttgcagtgagccaagatcgcgccactgcactccagcctgggcgacagagtgagattccatctccaaaaaaaaaaaaagaaaaaaaaaagaaaagttctgtgttgatgtacagtttctcctaagaagaagcgaggtggttgaattttggaagcacttcttgaatcggattaacccatgctcttattgaattttttcatctgctctgtttagtttgatattaaagcaaaattaagaggtcttagtttttcctatagaacttttaatatgtcaaaagctatattgtctaaatttcagtacttaagcaaatactgagtagtgttttaaattcagaaatagagcttctattatgaacacatgagaatgatttttttctcttaatcattattaaggaaatattttaatttcatggtcatataatggtgataagtaatacctgattgtttccttttctgttctagtaactcagaggagatacgtgttttatttgtgatagcaaattcctaaatgaacattaggcaagtggtatcattatcaggccagctgcagcctcttgccttgacctgcattcctagaatttctttgttgctgtaattcttgattaagtgaccttgactttcattttgtaattttgctaatcatcagcaaattcacttgcatgacgttactgccaaatatgaaggcagttgaattattatgagtgattgtggcagaggtttgtgccatggtgaaaactttgatgtttgtctgtgttcattggatccatctttttaaatgacattaccatgagtctgttgtcaaacctaaatatctttgtttgaatttaaaatgggactctatattgttgtagttcaggtcttcattgactaagagattgagagaaatctgacataagaaaatattgttttcactgcaggaataaagaggaagtaacagtgaatccaatatagttcatattgttattgtccaatcatcaagttaactaagcattatcagattacgtttatttctcatacatatggatattaacttaaggtaaaaaagctggatgtgaaggatctgaaaaggcattaatttatgtactaattctataaacatgtattaataattgcagtattattaaatacagatggactcaatgtacctttgaaaagaccactaatttagaaaacaaagctaagtgcagtcattacaagaagcaaagaaatacttaagttagaaaaaaattaaaatgaagggatggtctaagttttcttcatgctggaacaaatgttaaagaagcagtgattgcttacaatgtatgtgataaaataatacctttcacaatcaaaattttaatagtaaatataagataaaatttatattaaataatgaaaacgtatttgtactgaatttagtcactagagaacatcgtaacaaaatacatgaaacaaaagtagccagaaatgttagaacaggtggaaatgtatacattatttgatggtttgtttttttatggaaataaacaacatacatagaattaaatggtgatcaaaaacatggaaaaaatacttcactaaaaaaaaaa

SEQ ID NO: 573 - DNA, 949 bp, Homo sapiens
  misc_feature (867)..(867): n equals a,t,g, or c
  misc_feature (874)..(874): n equals a,t,g, or c
  misc_feature (914)..(914): n equals a,t,g, or c
tgcgcgccgagtctgtccctgcgcatccctgtggctttcctgcaccactgccccccaccaggatgatggagagtaagatgattgctgccatacactccagcagtgcagatgccaccagcagttcaaattatcattcctttgtcactgcttcatccacctctgtggacgatgcattgcctttaccacttcctgtcccacaacctaagcatgcttctcagaaaacagtttactcctcctttgctaggcccgatgtcaccactgaaccctttggtccagataactgtttgcatttcaatatgactccaaactgccagtaccgtccccagagtgtacctccccatcacaataaattggagcagcaccaagtgtatggtgccaggtcagagccaccagcctccatgggtcttcgttataacacatatgtggccccaggaagaaacgcatctggacaccactccaagccatgcagccgggtcgagtatgtgtcttctttgagctcctctgtcaggaatacctgttaccccgaagacattccaccgtaccctaccatccggagagtgcagtctctccatgctccgccgtcttccatgattcgctctgttcccatttcacggacagaagttcccccagatgatgagccagcctactgcccaagacctctgtaccaatataagccatatcagtcctcccaggcccgctcagattatcatgtcactcagcttcagccttactttgagaatggccgggtccactacaggtatagcccatattccagttcttctagttcctattacagtccagatggggccctgtgtgatgtggatgcctatggacartccagttgagaccctttcaacggctttccantcgagantttgttttttacaatcctaggttgcaaggaaagagctttntacagttatgctgggtttgggtccaggtccccggg

SEQ ID NO: 574 - DNA, 503 bp, Homo sapiens
  misc_feature (15)..(15): n equals a,t,g, or c
  misc_feature (20)..(20): n equals a,t,g, or c
  misc_feature (500)..(501): n equals a,t,g, or c
  misc_feature (503)..(503): n equals a,t,g, or c
aaacagggagaaganagganagaaaaagggggattagttatatcaaaaagcctggaaaggtgggaatggaccaaaaagatgggactcctcctttattccagcatggagggttttaaatggaggatttcctttttcctgcgacaaaacgtcttttcacaacttaccctgttaagtcaaaatttattttccaggaatttaatatgtactttagttggaattattctatgtcaatgatttttaagctatgaaaaataataatataaaaccttatgggcttatattgaaatttattattctaatccaaaagttaccccacacaaaagttactgagcttccttatgtttcacacattgtatktgaacacaaaacattaacaactccactcatagtatcaacattgttttgcaaatactcagaatattttggcttcattttgagcagaatttttgtttttaattttgccaatgaaatcttcaataattaaattatgtaaaaagtcnnan

SEQ ID NO: 575 - DNA, 374 bp, Homo sapiens
  misc_feature (357)..(357): n equals a,t,g, or c
gtctgagtggatggacactgcctcttagaactagaacttagaactktatcttgaaaatgtaccactgttgcagaagctcctcacagagtatgtgtcaggcatttttaacctgctaaaggcaagaagaagtgttcaccacatagttgcaaaggtcttcaacttgccacagccaacagaaaaatcaaaatgattgaaccctttgggaatcagtatattgtggccaggccagtgtattctacaaatgcttttgaggaaaatcataaaaagacaggaagacatcataagacatttctggatcatctcaaagtgtgttgtaactgttccccacaaaaggcaagagaattgtcctctctttgnttcccatagcattttgg

SEQ ID NO: 576 - DNA, 1652 bp, Homo sapiens
agcttataccagctgaatggcagccttgcctaatccacctacaacaagaatttcttaagctttcttttatttgcatgagagagccactaccaaggcatgttttgttatgctgaaactgggctgctgcatactgctaaatggcacctctgggattggcctacctggggatttcttggtttgtgaaaacaggagaggagaaatatctcatacaagtgaaaggatactggagagagaaattacccatttctaaaaaaaaaccacactctgtcgtatctgtgttaatgttttctagcatgtactctggtttcaacagacacaaatttatatgttaacccagttttcttgccgttctgtaagtgttttattcttagtgtgatttttttccattgggatgtttttgattgaacttgttcattttgttttgcttgggaggaaaataaacaattttacttttttcctttaggagcattatgagcattatgtcagaatagaatagaattggggttcgatcttaacaggccagaaatgcctgggttttwttggtttgtttttgtttttgtttttttatcaaatcctgcctgactgtctgcttgttttgcctaccatcgtgacatctccatggctgtaccaccttgtcgggtagcttatcagactgatgttgactgtyraatctcatggcaacaccagtcgatgggctgtctgacattttggtatctttcatctgaccatccatatccaatgttctcatttaaacattacccagcatcattgtttataatcagaaactctggtccttctgtctggtggcacttagagtcttttgtgccataatgcagcagtatggagggaggattttatggagaaatggggatagtcttcatgaccacaaataaataaaggaaaactaagctgcattgtgggttttgaaaaggttattatacttcttaacaattctttttttcagggacttttctagctgtatgactgttacttgaccttctttgaaaagcattcccaaaatgctctattttagatagattaacattaaccaacataattttttttagatcgagtcagcataaatttctaagtcagcctctagtcgtggttcatctctttcacctgcattttatttggtgtttgtctgaagaaaggaaagaggaaagcaaatacgaattgtactatttgtaccaaatctttgggattcattggcaaataatttcagtgtggtgtattattaaatagaaaaaaaaaattttgtttcctaggttgaaggtctaattgatacgtttgacttatgatgaccatttatgcactttcaaatgaatttgctttcaaaataaatgaagagcagctgtccttctttcctcttttaagtgttcagctgtggcatgctcagaggttcctgctggattccagctggagcggtgtgatacccttctttttcagctgttcgtgccttcctttcttgtatccaccaaagtggagacaaatacatgatctcaaagatacacagtacctacttaattccagctgatgggagaccaaagaatttgcaagtggatggtttggtatcactgtaaataaaaagagggcctgggaattcttgcgattccatctctaaaaaaaaaaaaaaaaaaaaaaaaaaaaaa

SEQ ID NO: 577 - DNA, 1291 bp, Homo sapiens
  misc_feature (1192)..(1192): n equals a,t,g, or c
  misc_feature (1252)..(1252): n equals a,t,g, or c
  misc_feature (1286)..(1286): n equals a,t,g, or c
tgaacctctaatagaactgtctaaccctggagccagtggatccttgttttttgtgaccagtgatgatgaatttatcatcaaaacagttcagcacaaagaagctgagtttcttcagaagctactgccaggctattacatgaatttaaaccagaatccaaggactcttttgccaaaattttacggactgtattgtatgcaatcaggaggcattaatatcaggattgtggtgatgaacaacgttttgccacgctccatgagaatgcactttacatatgacttgaaaggctcaacgtataagcgaagagcatcccgtaaagagagagagaaatccaaccccacatttaaggacttagatttcctgcaagacatgcacgaagggttgtattttgatacggaaacatacaacgcgcttatgaaaacacttcagagagactgccgggtgctagaaagcttcaagatcatggattatagccttctgttgggaattcatttcctggaccattccctcaaagagaaagaggaggagaccccacaaaatgtgcctgatgctaagcggactgggatgcagaaggttctctactcaacagccatggaatctatccagggtccagggaaatctggagatgggataatcacagagaacccagacacaatgggaggcattccagctaaaagccataggggagaaaaactacttttatttatgggcattattgacattctgcaatcatataggttaatgaagaagttagaacattcctggaaagctcttgtttatgatggggacactgtttctgttcatagaccaagcttttatgcagacagatttcttaagttcatgaattccagagttttcaagaaaattcaagctttgaaggcttcaccgtctaagaaacggtgcaattcaatcgccgccctaaaggccacttcacaggagattgtgtcctcaattagccaggaatggaaggatgagaagcgggatttgctgactgaaggacaaagttttagcagccttgatgaagaagccctgggatcccgacacaggccagacctggtccctagcactccatcactgtttgaagctgcttccttggcaaccacaatttcatcttcttccttatacgtcaatgagcactatccacacgacaggcctacactctatttcaaacagcaaagggttaccttccagktncaacattttaccttgggaaggggggaccttttacttggaccgttggggcccaacattttnggaagttgcagggtgacattgtttttgtggtttngacgt

SEQ ID NO: 578 - DNA, 442 bp, Homo sapiens
  misc_feature (8)..(8): n equals a,t,g, or c
  misc_feature (388)..(388): n equals a,t,g, or c
  misc_feature (393)..(393): n equals a,t,g, or c
  misc_feature (398)..(398): n equals a,t,g, or c
  misc_feature (440)..(440): n equals a,t,g, or c
gggaaagntggtacgcctgcaggtaccggtccggaattcccgggtcgacccacgcgtccggctttttattctgtggaagtaaaatcctgaacgtttacaacttttccttaacttgtaaataaaaaattgtaagttttttctttttttacagaaaacttagcttgtgtaattctgttagtttcagatttctctcctgtttttgcaaattgtgggaaagattgacaatgcaaatgtgtcaaagacatactgttgggtgcaatattaacaattttaaatgcaaatttctttggataaattatttctatattctgtaaatctgagatttaatgtatattttgtttaaaaaaatgatttagtaaaatctttgaaaagtatgatcttctaaagnatttnaaaanaaaaaaaaaaaaaaaaaaaaaaaaaaaaaaaaaaaaaaaaanaa

SEQ ID NO: 579 - DNA, 2084 bp, Homo sapiens
tgctctgtcccccttaacaaaccagggggcatggaggggcccagggcaccgcccccctaccaggctcaggccctccaaggagaacctgctgagacccctgagcctgtcctagaccccggacccctgacccttcccaccccttccagcgtcccagggcgaggccttggacagagctcctggtcctctgcagggagaccatccagcccaagctctgggaggcacagtccattgagtgggcggaggccgcgggtgctgagccggggagggtgctcggagtccatccatccctcagacggcaagtcccacagggtccaacccacctgaaacctgcctgcacggtggaagtggtggaggtggacactcctaggggcttttctaaagctagactcgcagctccttgctcaggaaaattaaactattcacgtttcagatcaagtgttgacagtcaccagtcaggaggagttcttaaagagttttatgttgactgaatattgcacattgagtccccattgagtccctggtgggaaaagtccacaatttcccattgatagctttttactgttgtgaaaaagggaagcgtcagcacacaaaagcctgcatgaccgctgcttcggagaagytctcgaccctaactgcagtcactgttacttggatcagatcaagcgcagtgactttttgggattcagtggttattctccacacttcgtagccatttcaaccaactctgagcacaaaatgcagccatcctctatgcagcaagccctgcccagtcagtgaccctactggacagatccaaggccagccctgggttccctgctgcagccaccgtcctgacgttcatcggagcaggccggggctggccttcccggcacaagtggctgttctgacaggcccccagtttgtcccatctgaactgctgggaggtttccgggtggccagaggagcaaagctgccttccaagtgcctgtctgtgcctgggagaacagagcaggagcgtcgtgcggtccaccgcgcagtgcatggcgattccaggcgctgaacaactcccctggacccttgggcctgcatctgactcccagctgcagagtcagaagctgagtccaggcaactgcttggccactcccgatcgctcctccctggacacccggttaccaaagtcagcaaagaagatgcggtaatcgccgcctgatctccacatggtgaacacaacactcccaccaacacctccttgactggtcggtcttcagcaccgggggtgggcaggcaggtgttctgtgttgacragaattgcacaggctaaacacaaacacggaaccagagtgagaacacctcactcacggsagcccaggctgctccctaccaggtgacggagcgcgccggggctgtgggtgccaggggctgagtgctagggactcgtcatgagtggggatccccacgttcctgtcactgctgtcaaacagaaggtaaacagtcttatgaatgtatttccttaggaaaacttgtaaaaacttttattaggatatctatttaatactgaactttggcctactttgtgatagactataaacaaattgaggaaatcactatttctcacttctgtattttctcaaaaataattttgttacagagttcaatatactgtgtaccattgatcttctattgtgaaagcaaagaatttcatcaaaatattttaaattatgagtgaaaattgtgtatgttaattttgcagctataatattaatcaaattttgtgtaattctaatcacaaaatgacgtgccttaagtgcccctccagctgtgggttggcagtgtccagacagggagggcccatcaccgaaatcctgaacgattactagaccaattctattaaaaacatttcaaggcattttgggtgcaaactttgtttataaaagagaaatatccacctatgagaatttaaggagacgtctcctgtaggcagacatcgctctgcccaaaaattagtactgacacatgcgtgtgtgtgcgcgttgtgtgcgtgtgtgcgtgcacgtgctgttgctgcccttcctagctggtgtgaggaagcccggacgcgtgggtcg

SEQ ID NO: 580 - DNA, 982 bp, Homo sapiens
ggcacgagcttacagacgctgccagcatcgccgccgccagaggagaaatgtctgaagtaagacccctctccagagacatcttgatggagaccctcctgtatgagcagctcctggaacccccgaccatggaggttcttggcatgactgactctgaagaggacctggaccctatggaggacttcgattctttggaatgcatggagggcagtgacgcattggccctgcggctggcctgcatcggggacgagatggacgtgagcctcagggccccgcgcctggcccagctctccgaggtggccatgcacagcctgggtctggctttcatctacgaccagactgaggacatcagggatgttcttagaagtttcatggacggtttcaccacacttaaggagaacataatgaggttctggagatccccgaaccccgggtcctgggtgtcctgcgaacaggtgctgctggcgctgctgctgctgctggcgctgctgctgccgctgctcagcgggggcctgcacctgctgctcaagtgaggccccggcggctcagggcggggctggccccacccccatgaccactgccctggaggtggcggcctgctgctgttatctttttaactgttttctcatgatgcctttttatatttaaaccccgagatagtgctggaacactgctgaggttttatactcaggttttttgttttttttttattccagttttcgttttttctaaaagatgaattcctatggctctgcaattgtcaccggttaactgtggcctgtgcccaggaagagccattcactcctgcccctgcccacacggcaggtagcagggggagtgctggtcacacccctgtgtgatatgtgatgccctcggcaaagaatctactggaatagattccgaggagcaggagtgctcaataaaatgttggtttccagcaaaaaaaaaaaaaaaaaaaaaaaaaaaaaaaaaaaaaaaaaaaaaa

SEQ ID NO: 581 - DNA, 872 bp, Homo sapiens
  misc_feature (865)..(865): n equals a,t,g, or c
  misc_feature (867)..(867): n equals a,t,g, or c
  misc_feature (870)..(870): n equals a,t,g, or c
gaagcacccttaggataccaggaccctgtttcccttcggagaagacacacaaccatgaccctcagcctggggaccccaactccaggccctccagccccaaacctgcccagccagccctgaaaatgcaagtcttgtacgagtttgaagctaggaacccacgggaactgactgtggtccagggagagaagctggaggttctggaccacagcaagcggtggtggctggtgaagaatgaggcgggacggagcggctacattccaagcaacatcctggagcccctacagccggggacccctgggacccagggccagtcaccctctcgggttccaatgcttcgacttagctcgaggcctgaagaggtcacagactggctgcaggcagagaacttctccactgccacggtgaggacacttgggtccctgacggggagccagctacttcgcataagacctggggagctacagatgctatgtccacaggaggccccacgaatcctgtcccggctggaggctgtcagaaggatgctggggataagcccttaggcaccagcttagacacctccaagaaccaggccccgctgatgcaagatggcagatctgatacccattagagccccgagaattcctcttctggatcccagtttgcagcaaaccccacaccccagctcacacagcaaaaacaatggacaggcccagaggstgaagcaaacagtgtcccttctggctgtgttggagcctccccagtaaccacctatttattttacctctttcccaaacctggagcatttatgcctaggcttgtcaagaatctgttcagtccctctccttctcaataaaagcatcttcaagcttgtaaaaaaaaaaanantanaa

SEQ ID NO: 582 - DNA, 733 bp, Homo sapiens
gcctgcgcggactcccgccttagtgggcggagttgtgccgcgtctgatgcgcagttccctttatagcgcggcaagccgaatcctagaggctaacccggcaggtgggagggagaaagttgctttctgcaccaatagctgaggcgttcagggttgtccagggacgctaccctcacgtgtctggttccgagtgctgcgttcggctgtgctgggaagttgcgtagacagtggcctcgagaccctgcctgcctgaggaggcctcggttggatgcgaaggagctgcagcatccaggggacaagatgccaactggcaagcagctagctgacattggctataagaccttctctacctccatgatgcttctcactgtgtatggggggtacctctgcagtgtccgagtctaccactatttccagtggcgcagggcccagcgccaggccgcagaagaacagaagacctcaggaatcatgtagaactggggggctttttctcctgagcagagaggcccaaggcatgctgtggagagacttcacctgccaccatttccaggtcaacaggactagagcgttgatggttttcaaaccctgttggaagaaagtgcccatggtttctctggttctgccagtttgacagtttatggaggcttttgaatcgtaatagcaatgtgagggtgaggtacacctacagacattaaataatttgctgtgtcaaaaaaaaaaaaaaaaaaagtcgagc

SEQ ID NO: 583 - DNA, 569 bp, Homo sapiens
  misc_feature (274)..(274): n equals a,t,g, or c
gctgactacagggccgccggcaataaaagcccaggagcccatttggagggcctgggcctggctccctcactctcaggaaatgctgacccatgggcaggagactgtggagactgctcctgagcccccagcttccagcaggagggacagtctcaccatttccccagggcacgtggttgagtggggggaacgcccacttccctgggttagactgccagctcttcctagctggagaggagccctgcctctccgcccctgagcccactgtgcgtggcgnctcccgcctccaacccctcgcccagtcccagcagccagccaaacacacagaaggggactgccacctccccttgccagctgctgagccgcagagaagtgacggttcctacacaggacaggggttccttctgggcattacrtcgcatagaaatcaataatttgtggtgatttggatctgtgttttaatgagtttcacrgtgtgattttgattattaattgtgcaagcttttcctaataaacgtggagaatcacaaaaaaaaaaaaaaaaaaaaaaaaaaaaaaagtcgtatcgatgt

SEQ ID NO: 584 - DNA, 1718 bp, Homo sapiens
agtaccatcctcgaggactgtccacgagggcctgaggaatcaggagctgaactccacagagtcagttatgattaatggaaaatattgctgtccaaagatatacttcaaccaccgttgcttctcagggccatatcttaacaaaggaagaattgctgagctgcctcaatgtgtaggacctgggaactgtgttctggtccttagagagcctacaaacccagccgtgtccttcgggagctccagctggacaaagactctgtgtggcacggatgtggggaagtcctaaaagccaaatataaaggaaagagttatcgggctactgttgagatagtgaaaacagcagatcgggtgactgaattctgccggcaaacctgtatcaaactggaatgctgtcctaacctcttcggtccacggatggttctggataagtgttctgagaactgttctgtacttacaaagaccaaatacacacactattacggaaagaagaaaaataaaagaattgggaggccacctggtgggcatagtaacttagcttgtgccctgaaaaaagccagtaagaggagaaagaggcggaaaaatgtttttgttcataagaagaaacgctcctctgcatctgttgataataccccagcgggctctccccagggaagtgggggtgaagatgaggatgacccagatgaaggggatgatgattccctaagtgaaggcagtacatccgagcagcaggatgagctacaggaagaatcagaaatgtcagaaaaaaagtcatgctcctcttctcccacccaaagtgagatatccacatcgctgcctccagatagacaaaggagaaaaagggagcttcgcaccttttcattttctgacgatgaaaataaacctccttcaccaaaggaaataaggatcgaagttgctgaaaggcttcacctggacagtaaccccttgaagtggagtgtggcagacgttgtgcggttcatcagatccactgactgtgctccattagcaagaatattcctagaccaggaaattgatgggcaggccctgttgctccttacccttcccactgttcaagaatgcatggacttaaaattgggccctgccatcaaactttgccatcacatagagaggatcaagtttgctttttatgagcagtttgccaactgagaaggacaaccaaagtgagctggatctttgaagcacaaatgcagcaaatccttcaccctgctttataagtggagctggaatagtcctggggctctggggcctgcaggtatcagcttgctctctttgcactttcggggaaggaggactcacagtgaggaagcaaaaactgtgcacagaagtggatcacctgctggtggaaatgtggacatctcttgttcagcagatggcagtttttaaaaaataaaggttgtgaggaaaagacttatataagaagaaaagcatttccagtggtgtggcctgaaaacaaagaataacctaggctgctggaaagcacccttttggttgttttcattctgttccctcccattgtagattgaactttgttctctgctttctttttcttggaaagagaggacttagctttaagtcagcactgatttgggactgttcctaaggcatatcagtgcttcattgtcattgtgtttttaaactttttaaaattaaaacagttcattttggggatgaaaaaaaaaaaaaaaaaaawraaagtcgacgcg

SEQ ID NO: 585 - DNA, 1544 bp, Homo sapiens
  misc_feature (1538)..(1539): n equals a,t,g, or c
  misc_feature (1544)..(1544): n equals a,t,g, or c
agtgggatccaaagaattcggcacgaggggattaggtaaaagtcttgcagtgaaaaacccgaggacccttaccgcaagtgtcttttgctcccagctactgatactggattccactcgtgattctccctttcttagcgcattcatgatatagacatcagtctctgagctggaggaggacaaaggcagcggtcctgtgaattctatgctctagcttgggttaagggatttggaattgcacttgtttcagagagctccctctttgcccactagcagggcattagctggtgctgaagacagtggctgcttggcgagcctggatctccaagtgaccccctcagcaactcctgatgaacaggactgaagccaatattaaagcaagtcaaccaaaggttctctggtgtagacaagacagcaaaaggacagactaccttgtggaacctagcattgttctccttctgcagcactaagtactgtgtgcagaaatgtgattgagattcaagtcagggcctctctgcccttttccctccagaaacaaaaccaagataatttatcctgaacacggtgaaaaaaggaagggagggaggagaaaaagtccgggtctcacctgggattctctgtctcctgcaacatgaaggatttagcctgggaggaggtggtgagaactctgggagagaaaaaagaaggaaagaatagttttacccatgctgaagttaatttaaaccttcacctagagaagcaaaaaaaaaaaacccacactttcccattttgtgcctcccttcctagagttttagccaaaggtttagctaagtaattggttttaccagcgcactcactcctcctatcccaagtctgtttgactccctccccatcatcctcctcacctcttttcaggcagggtggggatagcagcaggaggagattttgggagcctggcaactcctgcaaggaccgcaggacagcccctctgtggggatgcgtggtgccccatctgccgcccttctgaagaatgcactgccttcactttttactgtgttagagtccatccagactgttctatccaaaaaagtttctttttcccccacaggcaatcaggaaatgattcctttcccgactgcttctgtctagtgcctgggaatcttgagtcaatccctcagtaagtcagtgactagggaaatccctctctgagcctcccagttcatgttgcttagggaacctgatattttcgtgaaacctgcctacacatgggcagcccaacagcagaacaaatggtggtgaccaaagtgaacaaagaagtatagttgtgccagcttcgtagttgcccatgtggacaagtcagcaggatcaggacacgaggaagagtaaatgtgagacagtcaatgtgacttctgcgataaacagatttttaaaccccgaaattttgcaaaattttggtgaaacctgaactttcttcgttgcatatactggcactatctgtaccatcatacaactgtctcacattaaagctatttttcttgggcaaaaaaaaaaaaaaaaaatgnnaaaan

SEQ ID NO: 586 - DNA, 660 bp, Homo sapiens
  misc_feature (74)..(74): n equals a,t,g, or c
catcagttctatttaatacttatggcaattaagagatttagaaagcagaggaaaagaccaaaaaaaaagtatgngttacaaagtgtcatcatgcttgtaggaccccagcattcttgaaactaacgcacctttaaaaagtaatatttacactgctgtaaatatttgcaaagtatcaatgtttaattcacttagaattttaaggattatggatttactagcgaaaattcccctaaagcaactttcccatatcagtaacttttatttagggaaacaagtttaatgtacataatacatgtgaccttggaattcaatagaattttcgaaactagaagtaactcagaacrttcactagatggttttaaagtcytttttgatactgtccytaacatttgcytatttgcmaattaatatgtaagaatgrgtcyaaaagtaagttttaggaatggttattcgacaaagatgttattcctattaccaatactgcgaaatgataattacagaaacaatgtgggatccgttttataacttcaaatttaagttcctttgtactttggagcagaaaatgtaagaaatcgaaatcaagagttagtattttttatctttcaggctggctttaactgttcatacacctagcaaaataaacatttgtgaaaggcgtta

SEQ ID NO: 587 - DNA, 574 bp, Homo sapiens
  misc_feature (29)..(29): n equals a,t,g, or c
  misc_feature (332)..(332): n equals a,t,g, or c
  misc_feature (532)..(532): n equals a,t,g, or c
  misc_feature (550)..(550): n equals a,t,g, or c
  misc_feature (565)..(565): n equals a,t,g, or c
aaatttactccccagtacaaaggtgtctnttgatcacagtaacccatagtcccccactggggggacggtgggggaagactttgggaggattttacccagaatacttgccgcctgctttttgtcctccaggaaaccagaagcccgggtaattaggacaaagccaaaggccccttgttagctggccatccctgccccattttttcccctggtcctttcccctgtggccacagggaagtgtggcctgaataccccaccccggctcctctgcacccagagctgggggccacctcagaagtgtcatctctctctgagcacgcattcccctgcagcantcgaggaatgagcagattgagtgatgctggggcagagaggcctgggaggaaaggtgttcagccagtcgtttgtaaggcgctcgtcggcacctgctgaaacgcccccacctgacagccccatcctcaaagactgtcttaattactcatggcaaggttctagagacttaaggggaaaagctgctttaaggccaccacatgtntgtgctccccaaccagtntatctggcttggggntcattttgg

SEQ ID NO: 588 - DNA, 939 bp, Homo sapiens
  misc_feature (85)..(85): n equals a,t,g, or c
aattcggcacgagccaaagtgcagggattacaggtgtgagtgagccaccgcggccggcctctatcattttctgactcagcagctncaccaaaattgacatcctagcaaacactgtgaaggaattaacctaagtgcttccagagcatctcatgtaacctctatggagtaagtcactttttctgtaacatgtggcttttgaccttgatgaagactttgacttctcatccctgtctacatggaggaagatgattcagtggtggggaaaatgaacctcggtaacatttccaatgtccttcaagagggaaacaagttcagtgttatcatcgtggcattcgttagttttttttttttaaatcacttgtttagatacaactttatttttttatacctacatagcacatgactggggggataaagcatgtataagttgggagagggtaaagaatgtgtgactatgtatacagaaaatagactaaaatgtgcagcaaaatgatatatactgtaatctggtttttgaagtatctactattctggaatattgttaaacaactttttgcttttgaaaaaaaaaggtgccttgattcagttgcgtgacttagaacattcatcctattttattgtgatttttaatgtcttctgaccccaaactgtgtttttggttgcagtctggcggctgcaggcatagcgtcggttttgttccaataacagagaccaaagagttaatcagatatggttcagctgctacaattgtatgattcaaaggcaatttaatcaccccaaatttccatggcccccacagtcaagacctgccattcgttttctcttgcaggttggagtaaatttgcactttgaatcatgtgggtcatttggggaccttgttcttttctattttgctttattaataaaggaacttgtagaaaaaaaaaaaaaaaaaacact

SEQ ID NO: 589 - DNA, 778 bp, Homo sapiens
  misc_feature (35)..(35): n equals a,t,g, or c
  misc_feature (59)..(59): n equals a,t,g, or c
  misc_feature (778)..(778): n equals a,t,g, or c
cacccagcccggagataccatccaccagaacctgngccatggcctattagtcctaaagncagttgtcaaagcagggctgtacgtcgggattcgggaaattcaccagcgtccgcaacctcagtccctcaaggccatacctggacccaacggtgaagaaagacgatgaggaggaggacccgctggaccagctgatctcccgctctggctgtgctgcctcccactttgcagtgcaggagtgcatggcccagcaccaggactggcggcaatgccagccacaggtgcaggcgttcaaggattgcatgagtgaacagcaggcgaggcggcaagaggagctgcagaggaggcaagaacaagccggtgcccaccactgagaccccaaaccacctatccccagtagatggccctgccaagaccagcacccagcaagattatagaggaagaaatcctaaatgctggtgtgggaggtctaaaacatggggagagtttttggatctggagttgagagccatgggtttggacatgactggcacaaacagctgtcatatgttcatggtcagatgtcatacattctcagctgtcttgttccaccagtatttaccaggaaaacaaagaatgtgttaagggatgctcccccaccccacatcttaagtcagtgtgccaagtactgagatgattttagggacattttattttaaattaaatttacaatctaatggtaaattgaaaaaaaaaaaaaaaaaaaaaaaaaaaaaaaaaaaaaaaaaaaaagggggggggn

SEQ ID NO: 590 - DNA, 626 bp, Homo sapiens
  misc_feature (432)..(432): n equals a,t,g, or c
  misc_feature (434)..(434): n equals a,t,g, or c
  misc_feature (470)..(470): n equals a,t,g, or c
  misc_feature (537)..(537): n equals a,t,g, or c
  misc_feature (617)..(617): n equals a,t,g, or c
gcgcttcacagcttcctcctcgtctgggatggtgcccaaattgccagctggcaaaatgaataaccgtgatctcaaaccccagcctgatatagtcttgcttccgttgcccactgcctatgagctagacagcaccaaactgaagagcccactaattacttcccccatgttccgtaatgtgcccacagcaaaccccacggagccgggaatcagacgggtyccgggggcctcaraggtgatccgggagtcgagcagcacaacagggatggtcgtcggmattgtggctgctgccgccctctgcatcttgatcctcctgtacgccatgtacaagtacaggaacagggacgaggggtcctatcaagtggacgagacgcggaactacatcagcaactccgcccagagcaacggcacgctcatgaagggagaaagcagcananctcgaagagccggccacaagaaaccagaaaaaaccntgggacaggggaagtatttaacgtggtaaaaccattggcgaaaccaacttgggttcaacaaccgccnaagttttttttcaccaagggttaatttttccttaattcccaacgggccctttatttgaaaaatccttttttggggaaccnggttggaaa

SEQ ID NO: 591 - DNA, 645 bp, Homo sapiens
  misc_feature (595)..(595): n equals a,t,g, or c
  misc_feature (604)..(604): n equals a,t,g, or c
  misc_feature (608)..(608): n equals a,t,g, or c
  misc_feature (621)..(621): n equals a,t,g, or c
gcttggattatatctaaatggattatttgttaaaagtactgaaatgagtataaggcagtatcacccatccaaaagaaaggtctttatagacctgcacagtcactagattaattcattaaaatgcccccaccctgatgtaattgacattacatttcttaacattttaaaatctagaatttctaaaatggaatttaatgccatcacaatttgaaaaactttttttttttttttactatagaagttacaaaggaagttctaaaattatgcctccctctgtttttataagttgccatcgaaaagtgatttaaataagcaggttatctttatagattttaaagaaaactagaaagttytaatgttttaacttggggaaaaatacatctctttaatgtttagcatgcttgtcaaccttgagtgagtgtcatttttaagaacagttgtagcccttctgattattgcagtagctgtagaagtatgtaagaatatgtgatgggtgtagtcattagcaaagcatttaaatcacttgagtattttgtcatggktcattattattaaagcacaaaataacctattgttagaaaatatgtgttttatnaatgaatgnaaantaattaaaaaaanaaaaaaaggggcggccggtctaga

SEQ ID NO: 592 - DNA, 369 bp, Homo sapiens
  misc_feature (339)..(339): n equals a,t,g, or c
  misc_feature (352)..(352): n equals a,t,g, or c
  misc_feature (362)..(362): n equals a,t,g, or c
gggagggtatggggcacacttccccaagggcggacccagcaggaggaagcccaggagctgggtcctgccgcccaggagctgggccctgccacccaggccgggctagggacatggcagggcctgggcatcctggcgctggacttgggcgacctgggaggcacagggaggggagagatgggcggccccgccccagcgcagtgccggccacacccatgcaccgaagctcctccctgccacaccccaaggcggttgccggagcttaagccccgcccccagcagcgagaacatcccaccccccacccccctgcagccagtgctccttgtcaagctccccccgtnactccagtggganccaccccggngaggggg

SEQ ID NO: 593 - DNA, 1269 bp, Homo sapiens
  misc_feature (719)..(719): n equals a,t,g, or c
gcggacgcgtgggcggcggcgtycagggtcggcagcaaccgcagscgagcccgagcgggtggcggcgccatggcgtgcgcggggctgctcaccgtgtgcctgctccggccgcccgcgccccagccccagccccagaccccgcggcacccccagctcgcgcccgacccggggcccgccggacacacgctcttccaggacgttttccgcagagcagacaagaatgatgatgggaagctctcatttgaggaattccagaattactttgccgatggggttctcagcctgggggagctgcaggaactgttcagcggcattgatgggcatctcaccgacaatttagaaacagaaaaactgtgtgactacttctcagagcacctgggtgtctaccggccggtgctggctgcattggaatcgctgaaccgtgcagtgctcgctgccatggatgccaccaagctggagtacgagagggcctccaaagtggaccagtttgtgacrcgcttcctgctgcgggagacggtgagccagctgcaagcccttcagagctcgctggagggggcgtcagataccctggaggcccaggcccatggctggcggtcagatgcagagagcgtggaggcgcagagcaggctctgcggcagccggcgggcaggacgccgagccctgaggagtgtcagccggtcatccacctggtcccccggctcttctgacacagggcgcantcagaggccgagatgcagtggcggctccaggtgaaccgcctccaggagctcatcgaccagctcgagtgcaaggccccccggctggaacccctgcgtgaagaggacctggccaaggggcctgacttgcacatcctcatggcccagaggcaggtccaggtggcagaggaaggcctgcaggacttccaccgagccctgcgctgctatgtggacttcacaggggcccagagccattgtctgcatgtgtccgcccagaagatgctggacggtgcctccttcaccctgtatgagttctggcaggatgaggcctcctggagaaggcaccagcagtcgcctggcagcaaggccttccagcgcatcctcatcgaccactgcgggccccggacaccctcaccactgtgttcttcccagcctcctggtggataatgaataacaactgagccagacctgcacacgccgagggccccgggaccctgcctgcctctgaaccccaggtgggaccccagcacagaggcaataaaggcagtggtcccttccaaaaaaaaaaaaaaaa

SEQ ID NO: 594 - DNA, 1943 bp, Homo sapiens
  misc_feature (1177)..(1177): n equals a,t,g, or c
gctgatccagaacgtcacccagaatgacacaggattctacaccctacacgtcataaagtcagatcttgtgaatgaagaagcaactggccagttccgggtatacccggagctgcccaagccctccatctccagcaacaactccaaacccgtggaggacaaggatgctgtggccttcacctgtgaacctgagactcaggacgcaacctacctgtggtgggtaaacaatcagagcctcccggtcagtcccaggctgcagctgtccaatggcaacaggaccctcactctattcaatgtcacaagaaatgacacagcaagctacaaatgtgaaacccagaacccagtgagtgccaggcgcagtgattcagtcatcctgaatgtcctctatggcccggatgcccccaccatttcccctctaaacacatcttacagatcaggggaaaatctgaacctctcctgccacgcagcctctaacccacctgcacagtactcttggtttgtcaatgggactttccagcaatccacccaagagctctttatccccaacatcactgtgaataatagtggatcctatacgtgccaagcccataactcagacactggcctcaataggaccacagtcacgacgatcacagtctatgcagagccacccaaacccttcatcaccagcaacaactccaaccccgtggaggatgaggatgctgtagccttaacctgtgaacctgagattcagaacacaacctacctgtggtgggtaaataatcagagcctcccggtcagtcccaggctgcagctgtccaatgacaacaggaccctcactctactcagtgtcacaaggaatgatgtaggaccctatgagtgtggaatccagaacgaattaagtgttgaccacagcgacccagtcatcctgaatgtcctctatggcccagacgaccccaccatttccccctcatacacctattaccgtccaggggtgaacctcagcctctcctgccatgcagcctctaacccacctgcacagtattcttggctgattgatgggaacatccagcaacacacacaagagctctttatctccaacatcactgagaagaacagcggactctatacctgccaggccaataactcagccagtggccacagcaggactacagtcaagacaatcacagtctctgcgganstgcccaagccctccatctccagcaacaactccaaacccgtggaggacaaggatgctgtggccttcacctgtgaacctgaggctcagaacacaacctacctgtggtgggtaaatggtcagagcctcccagtcagtcccaggctgcagctgtccaatggcaacaggaccctcactctattcaatgtcacaagaaatgacgcaagagcctatgtatgtggaatccagaactcagtgagtgcaaaccgcagtgacccagtcaccctggatgtcctctatgggccggacacccccatcatttcccccccagactcgtcttacctttcgggagcgaacctcaacctctcctgccactcggcctctaacccatccccgcagtattcttggcgtatcaatgggataccgcagcaacacacacaagttctctttatcgccaaaatcacgccaaataataacgggacctatgcctgttttgtctctaacttggctactggccgcaataattccatagtcaagagcatcacagtctctgcatctrgaacttctcctggtctctcagctggggccactgtcggcatcatgattggagtgctggttggggttgctctgatatagcagccctggtgtagtttcttcatttcaggaagactgacagttgttttgcttcttccttaaagcatttgcaacagctacagtctaaaattgcttctttaccaaggatatttacagaaaagactctgaccagagatcgagaccatcctagccaaca

SEQ ID NO: 595 - DNA, 577 bp, Homo sapiens
  misc_feature (78)..(78): n equals a,t,g, or c
  misc_feature (80)..(82): n equals a,t,g, or c
caccggtccggaattcccgggtcgacccacgcgtccgggctctgaaggaggttttcaaggagtatttgattgaactgngnnngttgcaacactttcaagggaacatgatggatttcttagctttcaaggagagactgtatggaccattacaagcatatcttaggcagaatgatttggacattgaagaagaggaagaggagcactttgaagtcattaatgatgaggtaaaggttgtggccagaaagcacgggcagcctgggactcctgttgccatagcaacccasstaccgccgaggacttctgcggcttttccagcccagcagcagccgctccaggtactttctgatggctccacagtgcagctccccagactttcctcactcggatttgaggactcgatgtgctgaggcakgacccagaggggtcccaagagcctgtcctcttttgttcaaaatacatcttgaaacgtctttgtgaaggctcttagttttaatgcatggatgctgttatttttccctactgttactgaaattaaaaagtgtttgtctctgaaaaaaaaaaaaaaaaaaaaaaaaaa

SEQ ID NO: 596 - DNA, 1240 bp, Homo sapiens
gctcgtgccgcggccccgcccgcgtcagctctgcgcggtgattcactccctccttcgccccggggcccccttcccggccagacggcgggcaagacagctgggtgtacagcgtcctcgaaaccacgagcaagtgagcagatcctccgaggcaccagggactccagcccatgccatggcggattctgagcgcctctcggctcctggctgctgggccgcctgcaccaacttctcgcgcactcgaaagggaatcctcctgtttgctgagattatattatgcctggtgatcctgatctgcttcagtgcctccacaccaggctactcctccctgtcggtgattgagatgatccttgctgctattttctttgttgtctacatgtgtgacctgcacaccaagataccattcatcaactggccctggagtgatttcttccgaaccctcatagcggcaatcctctacctgatcacctccattgttgtccttgttgagagaggaaaccactccaaaatcgtcgcaggggtactgggcctaatcgctacgtgcctctttggctatgatgcctatgtcaccttccccgttcggcagccaagacatacagcagcccccactgaccccgcagatggcccggtgtaggcgaacttccctcatttctctctgcaatctgcaaataactcctccattgaaataactcctccccaccccaacaacaacattcccagcagaccaactcccaccccctctttgaggtaaaagtgcctttattgggagacttttgtcttccagcctgccaatcaaccctcctgggtgtggccaccatatgtgtgtgcctaggtcctccttctgcacgatccaataggagacaccagttctgactgaaccatgcccccacctaagtcacaaaatgagggaagtggggagttagatttcagagtccaggccctaggttgggacccactccaaataatctcctcggtgtgggtggtggttctatagagggataaatgaataataaacattgttaaaatatacgataatgaataaagtaatcctttcatcaaatgtgggtaaatttcaagcatcaggagggggaaatggagtggaaacagctggggcaaggaggcaaagaagccaggcctgttttacaacaaatattaaattacttcaataatacaaacgagaggcccggtgcggtggctcatgcctgtaattcccagtcctttgggaggctgcgggaggattgct

SEQ ID NO: 597 - DNA, 875 bp, Homo sapiens
ggaarggttgtaggacttaatcacgtttcagcttggctgtcgggctgtgagtcacggttgcactgcgattatgtaagcacgcaggaataggtggcatgacatatatgctgccagcagccacgggcctcgcccttccgagtcaccactactttttaagcctttttttggatacaagtttctttgggttcatctttgraatgraaatgraagcatgattgcagaataggcagamcaggaattatccatcaatcagagagamcccagacctttaagagaagctggaattagaatatggaattcctgagccttgagctggcatagccgagccctggtttatgctcttcctgcctccctccttttttccctcctgcctgtgtgctccacttcctctcctgagactcccccaaggtagcatcactcccaccaggagccttaggcaggaaaagtaaggcccagagaagggactgtccctggggacgtgcactgagtgtgtgtgagggtgcggggcaggaataggagtgccaggagtctacctctggagcaatgcctcccacagtatttctgtaggggaaaggatagaaactcacttcttgggttcctccaatcaccatgcacatgtcagtccttcagctatcaatgcaaaggaaacccagaactgagatttgagctttctcaccatctccatggtcagatatctccactgccaaagggttcattccgcctctgggtttatctctttcttcatgcttcttcctggcagtgtcctgttgaagcttaccttcccatctgtgtttgcatccactccctaaaaactacaagacaaaaaaaaaaaaaaaaaactcgagggggggcccggtacccaattcgggctatag

SEQ ID NO: 598 - DNA, 1517 bp, Homo sapiens
  misc_feature (144)..(144): n equals a,t,g, or c
gttgagtctttgggtgtgcttttaatggtctctctgcctcttccttaggtgtcaggctgctctacctgtttctagacgctcttcctttcccccttccaaacctcttttcttccttgctgctttcctatcttctgtggctagganatcaggtaatcaagcctgtgttttctgtaatgagtaagtgggttgccagcgaggtctctgtggatgctcctgtgagtcaagtgcatgagctttagtgcatggactttggggtcttggttcccacagcttatatgttttgggggctgctttcttgctctttacccacattctgtgtcatgagtgtgccgggtaggtggcctcctgcccgatggaggctgagcatcttggcagtgtccatcatgccttgcgtgtgcctggcctctttgctgcagatactatggacccgcagctcatcccctgctcaccacctggcctctccttttctctgtgtgcagatctggcagtgtggtggggttctggaaacacacccatgttcccatgttggccatgttttccccaagcaagctccctactcccgcaacaaggctctggccaacagtgttcgtgcagctgaagtatggatggatgaatttaaagagctctactaccatcgcaacccccgtgcccgcttggaaccttttggggatgtgacagagaggaagcagctccgggacaagctccagtgtaaagacttcaagtggttcttggagactgtgtatccagaactgcatgtgcctgaggacaggcctggcttcttcgggatgctccagaacaaaggactaacagactactgctttgactataaccctcccgatgaaaaccagattgtgggacaccaggtcattctgtacctctgtcatgggatgggccagaatcagtttttcgagtacacgtcccagaaagaaatacgctataacacccaccagcctgagggctgcattgctgtggaagcaggaatggatacccttatcatgcatctctgcgaagaaactgccccagagaatcagaagttcatcttgcaggaggatggatctttatttcacgaacagtccaagaaatgtgtccaggctgcgaggaaggagtcgagtgacagtttcgttccactcttacgagactgcaccaactcggatcatcagaaatggttcttcaaagagcgcatgttatgaagcctcgtgtatcaaggagcccatcgaaggagactgtggagccaggactctgcccaacaaagacttagctaagcagtgaccagaacccaccaaaaactaggctgcattgctttgaagaggcaatcattttgccatttgtgaaagttgtgttggatttagtaaaaatgtgaataagctttgtacttattttgagaactttttaaatgttccaaaataccctattttcaaagggtaatcgtaagatgttaacccttggtatttagaaaattaaaaccttataatatttttctawmaaaaaaaaaaaaaaaaaaagggcggccgctctag

SEQ ID NO: 599 - DNA, 871 bp, Homo sapiens
  misc_feature (12)..(12): n equals a,t,g, or c
  misc_feature (863)..(863): n equals a,t,g, or c
gggagcggaggncaggaacccaataagctgcttcgcctcggagctgaagcccgtactcaagatggcggctccgggcgggcgtggccagtgactagaaggcgaggcgccgcgggaccatggcggcggcggcggacgagcggagtccagaggacggagaagacgaggaagaggaggagcagttggttctggtggaattatcaggaattattgattcaracttcctctcaaaatgtgaaaataaatgcaaggttttgggcattgacactgagaggcccattctgcaagtggacagctgtgtctttgctggggagtatgaagacactctagggacctgtgttatatttgaagaaaatgttgaacatgctgatacagaaggcaataataaaacagtgctaaaatataaatgccatacaatgaagaagctcagcatgacaagaactctcctgacagagaagaaggaaggagaagaaaacataggtggggtggaatggctgcaaataaaggataatgatttctcctatcgacccaacatgatttgtaactttctacatgaaaatgaagacgaagaagtggtagcttcagccccagataaatctttggaattggaagaggaagagattcaaatgaacgacagttcaaacctgagttgtgaacaggagaaaccaatgcacttggaaatagaagattctggtcctcttattgatataccttctgagacagaaggttctgtttttatggaaactcaaatgctgccttagaaatcactcctagatgaaatgtttctcataataacttgtcaagaactttttagagttgttacataaaaataattgctgtgtaaaaaaaaaaaaaaaaaaaaaaanaaaaaaat

SEQ ID NO: 600 - DNA, 1566 bp, Homo sapiens
ctttcatactaccctttagtcataaggagaaaaaaacactcaaatagtagaagcagcaagtagcaaacttcaggagagctactttctatccaaataatttaaaaaacacttttcacctactcctttcatggttataacacattggcagactttttgctggctctgggagccatgattttaatcacattctgcaaggtgacaaatgtcatacattccacattgtgtggtagccatctctttagactcatgtgttttggggaaaggaagaagttcttggctgagtactattttgaactttccagaaccctctcacaccagagacagttcttctctgttcagtttccaatccccgataatttgctaaaataacattgtacatccaagagagggaagaagagtatgtcagtatattatgcagaagatagatacagccttttcagaagatctccactagtttttgttccaaaaattcaagtttatgggagaaatctcaattagccaccttttcacagttgtgtggatataacatttgggggatctttctggactcctacctatctgtgcattttaccggcacctcaggaaaggagggtgaccaggttgtcttagcttgtactgcttggtgatctctgaggaccttctaattcagttgtaccccagtgttccatgtatagaaaaacttcattagaacaaactttacttgatatgaaactcctattaacagtctttttttgaaataaaaagtagcttgagctttcttttaaaatcatgtatcttgattgttgatttaatgaaggatttccttttaatgctgcttttgagcttcaaggtaataggacagcaggaacctaaaatatctgccatcatctgccataggaaagatacccagagacccatcatgttctctttttgttgttacactgttgggtgggtataacaattggaaaatgaacaaactgattgattgtgcaaactactttttatgacaagcctaaaccctcataatgcggcagcttaaagtgtatacatatgcactaactttgatcaattatattctcatatctgttagctacacagtctcctattatctcaattgcttatgtgcatatggaatatgttacttaaaacgtgtgcattcttactgaaaatgttttcaaaggaaggtatcagctgtgggctaattgccaccaatttcagcctgccacgattcttggaaatatgtcttccaagtgccatccatcatcagtaggacaagtgtcgggagtttgtttatttttttccagtagcaacgatgggttacatggagccatgaaacctccttctggcctcccttgtgattaatggcatgtgtttgtaaaatggatagctggggttggcagatggctagagaagaatcgcctttggtttaaaatgtatgtggtcccctaatgattgtgaccccattctgtaatcaactgagctagttccaataaagttaagcaggtttaaatccactttgtgcctatcttttcactgacaataaagttagctattttaaaatgcaaaaaaaaaaaaaaaaaaaaaatt

SEQ ID NO: 601 - DNA, 1192 bp, Homo sapiens
  misc_feature (298)..(298): n equals a,t,g, or c
accttgagtgtccttggcaacctagcctttgacattgatgtttttccataggattttcttcatttgggttggaataaaaatgcatttttattcacaaggcacagacagataagaatatcataagcagggaagtgtctccaaaggtcaggacttatgtttttctgttgagtgctatatgtggaggttattgcaagttccctgatatgagtatggtttcgcttgctacattgtgcctattaaagtaaaattttacacaagcctcgcatttctaagattagtgttcccgaatgaaatgttnaagaaaacattaaaagattatctctttttaagatggaggaaaaaaagtgaacaaagctaattaatctataatgaaaattgcacaaaataacatttcttaacaaatttaatacaattttgtgttctttgttgctagtggtataaaacgagatttttttccctcatttttctcattgtagatgtcatctctcacatttatatcagtgaggtttgaaattctgtgtagcagttactcagcacatatgagagggcagcgaatgaatgagatttgtcatgtgctaataaaagctgaatttttgtaatctaaaatgatgtattttctactattgctgttaatttgcattgttaaaaattcttaaagtttaatatgttatgttcagtcattgaaagcgaccactcatttttttcttaaagttgatgccttttctgctgtgctagagtcagtattttgcttctggcaggagagctgcaaactgtgtatcctcaaacagatgcaaaaagtagtgctttgcaaaacgtttgttttctgtttatctcagattaacatcctttaatacaagtttcttaagtgtaacttgtatttctgaaaatgcttaaaattattttatatttccctttgggaatttttctctatttccagcacgctgatttgatttaaaaatgtaataagaccaagagttggagtaaagggatattcattccatgttaaaagtggcttcatagctactgacaaatgtctgaactattgtcgtgcccttcaaaactggagttttctaaaataatcttatttttatacttgtatgttccagcaatttaagatatataccattgaaagggaaataaaacatttttgtttatttgaataaataatactcccaaaaaaaaaaaaaaaaaa

SEQ ID NO: 602 - DNA, 401 bp, Homo sapiens
  misc_feature (220)..(220): n equals a,t,g, or c
  misc_feature (361)..(361): n equals a,t,g, or c
  misc_feature (400)..(400): n equals a,t,g, or c
ttatttggaagacattatttgtggaacataatggcataacatttacatacgttcacctwctgactttgagtatgaatgtgtaggttgtgtatatgtgtgaatatatatacaccacgatgtcattctaagtgtttggaaataactgttcatacatgtrgtttaccttcttccttggaattactatcttgtaatatggcattaaagaattatcccatctctnaagtcctttgcctgggaaacatggtgaactggaggatccttacacattctgtgtgaccagctattaaacagaatgaggactaggtctctctgtcactgacttgggaaggtaatgaaatgttcaggcaaccagtattgacancttgcagcttttgccccggttttgtttcccaggtgattna

SEQ ID NO: 603 - DNA, 654 bp, Homo sapiens
  misc_feature (58)..(58): n equals a,t,g, or c
  misc_feature (71)..(71): n equals a,t,g, or c
  misc_feature (545)..(545): n equals a,t,g, or c
  misc_feature (564)..(564): n equals a,t,g, or c
  misc_feature (592)..(593): n equals a,t,g, or c
gtccggcttaccttttataacttgaatgttaaggaatggaccatgggctactactggncattagtgccatntaaccagcgataataaaattctctattagtctgttaatttatgaccatgatctcggaatggaaaaagatcatttccagagtgtgcgaaataatagtctttaaccatgtaattaaatatgtgtgtttattgtcaaataaggatttgttttaaaggtgattcttgggtttgaagacatttgttaattcatggtctgtacagaaatgaagctggttgcaataccaatctagagagtccaagctggcgaactattaagctgtttaaagatcacccttggcctggcacagtggttcacacctgtaatcccagcactttgggaggcctaggcaggcagactgagctcaggagcttgagaccagcctgggcaacatggcaaaaacccacctctacaaaaagtacaaaaattagtcgggcgtgatggcaggcatctgtagtcccagctacttgggaagctgaagtgggaggatcacctgganctctggatgtggaagctgncatgagccatgatcgtgccactacactnnagcctgggtgacagaatgagatcctgtctcaaaaaaaaaaaaaaatcacccttaaatcaac

SEQ ID NO: 604 - DNA, 682 bp, Homo sapiens
  misc_feature (673)..(673): n equals a,t,g, or c
tggaaggagcagcagttttgcaaggtaagcagggcagagacacagcccatggcccctcattgccctgctggtaagggctgatggarctccccgcagcgtggttcctgcctggktgacagaggctcctktggccactttagaartgcggtttactcctcatgccgagatggaccttgggcagctcagttcacaagatgttggtcaggcgtcatttaaatattttcagtcagcagaggaagcaaagcgtgccattgaggctgtgctgtcagcggatcctcggtctgtgtaccgccggaagctttgccaggaccgccttttctactttactgtagacatagcgcatgtcacttgctggtttggtgatggctttgcagaggtgctgaggatcaagccggcttctgagcctgttcatatgactggccctgtggggtccttggtgtctctagggtcttaaggagcctccctcatgtctttaaggtagcatcattgatctttggatgtggcttttggattttctgaacaagctaatgttgtgtcragaagcaacactttgtgatctcatggctttgattgatttgggctgttcaaaatgtttatttgaaaaacgtatacattaataaacttaacaaagagatataaaaaaaaaaraaaaaaacccgagggggggcccggnacccaattc

SEQ ID NO: 605 - DNA, 1430 bp, Homo sapiens
cagtctcagttggagggctgatartaaaccttattggtatctgtgcctttagccatgcccatagccatgcccatggagcttctcaaggaagctgycactcatctgatcacagccattcacaycatatgcatggacacagtgaccatgggcatggtcacagccacggatctgcgggtggaggcatgaatgctaacatgaggggtgtatttctacatgttttggcagatacacttggcagcattggtgtgatcgtatccacagttcttatagagcagtttggatggttcatcgctgacccactctgttctctttttattgctatattaatatttctcagtgttgttccactgattaaagatgcctgccaggttctactcctgagattgccaccagaatatgaaaaagaactacatattgctttagaaaagatacagaaaattgaaggattaatatcataccgagaccctcatttttggcgtcattctgctagtattgtggcaggaacaattcatatacaggtgacatctgatgtgctagaacaaagaatagtacagcaggttacaggaatacttaaagatgctggagtaaacaatttaacaattcaagtggaaaaggaggcatactttcaacatatgtctggcctaagtactggatttcatgatgttctggctatgacaaaacaaatggaatccatgaaatactgcaaagatggtacttacatcatgtgagataactcaagaattacccctggagaataaacaatgaagattaaatgactcagtatttgtaatattgccagaaggataaaaattacacattaactgtacagaaacagagttccctactactggatcaaggaatctttcttgaaggaaatttaaatacagaatgaaacattaatggtaaaagtggagtaattatttaaattatgtgtataaaaggaatcaaattttgagtaaacatgatgtattacatcatcttcaaaaatagatatgatggattctagtgaagaccaaaattacttctgtttactttctatcaggaagcatctccattgtaaatatgtatttacatgtttattacaaagacccaaatgaaaaatttttagtccattttttgcatagcctaaagataaaataggaataaaagttctatatttatggattttctgtatataaaactggtttctaattataacttaagtccattaagtaaaatctgtattgccactttaaatgtaaactaaattatttgggagaaacttcaaccactgatatgagataagcaatgagaatagggaagtgtataacatcacagtttttgatgtattacaaaaatcaaccactctataaaataaattttttttacttttggtaatatttgcaaatgaataattaatttattagggtaaagaacttatactaagttgt

SEQ ID NO: 606 - DNA, 1597 bp, Homo sapiens
gctagtccttcggcgagcgagcaccttcgacgcggtccggggaccccctcgtcgctgtcctcccgacgcggacccgcgtgccccaggcctcgcgctgcccggccggctcctcgtgtcccactcccggcgcacgccctcccgcgagtcccgggcccctcccgcgcccctcttctcggcgcgcgcgcagcatggcgcccccgcaggtcctcgcgttcgggcttctgcttgccgcggcgacggcgacttttgccgcagctcaggaagaatgtgtctgtgaaaactacaagctggccgtaaactgctttgtgaataataatcgtcaatgccagtgtacttcagttggtgcacaaaatactgtcatttgctcaaagctggctgccaaatgtttggtgatgaaggcagaaatgaatggctcaaaacttgggagaagagcaaaacctgaaggggccctccagaacaatgatgggctttatgatcctgactgcgatgagagcgggctctttaaggccaagcagtgcaacggcacctccaygtgctggtgtgtgaacactgctggggtcagaagaacagacaaggacactgaaataacctgctctgagcgagtgagaacctactggatcatcattgaactaaaacacaaagcaagagaaaaaccttatgatagtaaaagtttgcggactgcacttcagaaggagatcacaacgcgttatcaactggatccaaaatttatcacgagtattttgtatgagaataatgttatcactattgatctggttcaaaattcttctcaaaaaactcagaatgatgtggacatagctgatgtggcttattattttgaaaaagatgttaaaggtgaatccttgtttcattctaagaaaatggacctgacagtaaatggggaacaactggatctggatcctggtcaaactttaatttattatgttgatgaaaaagcacctgaattctcaatgcagggtctaaaagctggtgttattgctgttattgtggttgtggtgatagcagttgttgctggaattgttgtgctggttatttccagaaagaagagaatggcaaagtatgagaaggctgagataaaggagatgggtgagatgcatagggaactcaatgcataactatataatttgaagattatagaagaagggaaatagcaaatggacacaaattacaaatgtgtgtgcgtgggacgaagacatctttgaaggtcatgagtttgttagtttaacatcatatatttgtaatagtgaaacctgtactcaaaatataagcagcttgaaactggctttaccaatcttgaaatttgaccacaagtgtcttatatatgcagatctaatgtaaaatccagaacttggactccatcgttaaaattatttatgtgtaacattcaaatgtgtgcattaaatatgcttccacagtaaaatctgaaaaactgatttgtgattgaaagctgcctttctatttacttgagtcttgtacatacatacttttttatgagctatgaaataaaacattttaaactgaaaaaaaaaaaaaaaaaaaaaaagtcgacgccaggaatttagtagtagtagtaggcggc

SEQ ID NO: 607 - DNA, 602 bp, Homo sapiens
ggcaggggtggagccctcatggagaacctctgttagggcagtgcagaagagaaatgtgaggtcagagccttcacacacagtccccactgaggcactgcctagtggagctgtgagaagagagccactattctccagatcccagaatggtagatcaaccaacagcttgcactgtacatctggaaaagctgcagacactcaatgccagcctatgaaagcagcttggaatggggctgtaccctgcaaaggcacaggggcagagctgccaagaccatgagagtctacttcttccaccagtgtgacctgaatgtgagacatagagtcaaaggagattattttggagctgtaaaattcaatgaataccctgctggattctggacttgtcattggcttttagcccctttgttttgtccaattctcctatatggaatgggagcatcctcatccaatgcctgtaccctcattgtgtcttagaagtaattaacttgcttttgattttataggccatgctaatcagcattcagttctagattccaatttattctcagtgtgcctgtataacttttctttctatatatatataattaaatttctattacttattt

SEQ ID NO: 608 - DNA, 432 bp, Homo sapiens
gctcgtgccgaattggtgcggcgtcaggtgcgcccgccaggtgagcgcgctccctggcaccgttggcccccggagggtcgggcccagttgcggcgagcggattggtttatcttggaagctaaagggcattgctcatcctgaagatcagctgaccattgacaatcagccatgtcatccaggcctcttgaaagtccacctccttacaggcctgatgaattcaaaccgaatcattatgcaccaagcaatgacatatatggtggagagatgcatgttcgaccaatgctctctcagccagcctactctttttacccagaagatgaaattcttcacttctacaaatggacctctcctccaggagtgattcggatcctgtctatgctcattattgtgatgtgcattgccatctttgcctgtgtggcctcacgcttgcct

SEQ ID NO: 609 - DNA, 1319 bp, Homo sapiens
  misc_feature (591)..(591): n equals a,t,g, or c
tgtgtgttcacaaccaaatgttgatgcccttatctactgataatatcctctcaatgttcactgaggcatagaaattatttcagagtagaaattgcagcatgaggataaactcacctctttgttctgaaaatagaactttatcactatgctttccggtggttttcccttttacaatcgaaatcttgtgcctcccaagtgcattggaaaatgacaaaagcctgtctctccaaattcctatttaacagtttgattttttttttttaatcaccatctttcaaatcttagctcaactctcaccaagtgaaaattggctacttgggagaaagttaactttctatggtgggatggtgaaggatgagggacagtttacataggaaaagaaaaaaaaaagtctaaagtccatgttgaaaaaccacactaccacttattttctgctaaccctaaattatttttgcgtatacgcttgaggttatagtctgtgcctagacctaaaatgcaccagcgggggggattttaaaaaatccttcaaaataccagttttttcccaacaagtacaattgttcttgtgccttctgtggctttcgatttcanctttttkactttwtttccaattactacagctgcaataaacactagattttttttctggctgtttgacataacgttgatagctatgcatatkttgtgtctttttaaaacaaagcgggagaatacgtttttgaagaagagaatttttagaacagtttgataccgcaaattatttttycctcaattgtttgagcagcattcgagttttgaaaattcttgtagaagccaattttttgtaactgtggtgcaaatcttgtgttttcttagcctaatgaaaagtagtatagaagcaatatttcataccatgtgctatatatgtgtgcgcagatgtgtgaacataaaatcacatacacacatatacacacatgtaaaaatatacatatatatatatgcgtgtgaagtggaaagcttaccttttcctatctagatttaagaacctattttagacatttgttatgttttgtgaaaagaatgttctatttgcaacaaaacatttaattcttactgtatctctggctgtttaatgaggacgtttcacattaaatggtaaaacacatggaagatgttagaatgtagtaattatttaagtaaacgttcacccacatattcctgaagtttgctttgtgcctccgagtattatttaattaaagaagtgttttatgtttgcagaatctttgtcactgtactagggatgtgggtgaatatcatttaaaaaaatttaaaacaacaaa

SEQ ID NO: 610 - DNA, 973 bp, Homo sapiens
  misc_feature (746)..(746): n equals a,t,g, or c
  misc_feature (942)..(942): n equals a,t,g, or c
ctcacctccgagagctagactttggccaggcatggctaaaaccactggttaacgatgtgacagttatgatcttggagattggaaatctttcttccacattagagttctttaccttaattccttattctgaaaaattgtaagattttatgaaggtttgaatactgaagcacagttctgctttcaaaaattaaaattcaaacttgaaaaagctgtttaacccatggaagatatcatttagtaagatgtaaaagattttttaaatctacacttcagtttatacatctttatcattatcaatactatataagttactgtgagcattttagagaattccataaaggtactatgagtgtgtctgtatgtgtgtgtatatatagcattgtatttaatcatagactaaatttaatttgatatagaaatactactttacttgtacattaaggtcataatttctgctggactcttttatatttaattaatggggattatagtcttccttcataaatgcatttaaacctgaaattgaacaccagtgtttttctttttctacttatgggaagttgtctgcttccccctttagagaaaacagtatttttatattttgttaaaatattaactactttatgcctacacactatgctgtagatactgatcataattcttgggtgttcacaaacactcctagwgcctcttttttggcccgttgaaagtgttggtattactactttcactacagagcctttggncctctaataatgctgaggtgggctgatccttcccmtttctgtcytcgggtcattctgggtagggtcttctcctccactgtcaaggtaaggcaatcagggtccgtgacaggggattgggacatatggaacaaattaaggtgggatacacacagtgaggaaaggttacatggcattctatggggaaccaactactgtncaataacatctgatgttaacatggcacatta

SEQ ID NO: 611 - DNA, 1473 bp, Homo sapiens
ttgagactgactactgagtctacctttttaatcaagcctaacatgaatgggctccaaaaagtaatgaatgtaattgtactttttgatgtgcctctgcacttggcttggtgagtcatcataaatagctgttaaatatgtgactttacagattttgatatgttcagattgtaaaaaatgaatagtttatttcattaattgatgggcagtcaagaatctccctcccttcagtagggctgacacttaggagttaggtcatggttgtggttacttggcatggctaatcagattttgttctggtcagaatttgcccaagatcaatacccagcagaaactggagttaggctataaaaaaccattcatgtttccgagtgatcatttcagtcagcgattcatgttttacagtgtttagttgttgattattagaaaaagtaatattttcttccctttatgattacatcattataaatcaagtccttccatgaacacatttaaggtgtgtggagatgagatgtctgaatccatttggggatgggctgcatttttggggaactctatgcctgtccagtgaagagtgcctaaaacattaattatagatcaaagatgttctgttgagggacaaagcttgatggtcatcaaacacaaggctttgtaaaaatacgaccacctattccacttactggatctgtcaggtgtgtaaaacttctctcgccagttcatcatgcttccatgagccctcaggactgggatttgagccttcctggctctttatcccttggggcagacatggaaccatctctgagggaccaggtggatgctgaagctcacccagtcagggcccctctcctagctccttttacactgaaattaatctgaaagctttcatagccaaggctttgctaggtgctattattccagctggccaaagagaagtcttgggccagattgggattctcaatggattttatagacataattcccctgcaaacttaaaaaaataaataacccctactttataggactaattgtttgaattgtatctttctctgtatgttaaaccagatttaaaactattttataaccacaatatgtaatcagagcaatatagtgttttcagatatataccttgttttataccttatgtaggtgtcctacataagggtggcatgcccactggctgtggtaaaatttaatcctcattgctttgggagtgacttaaggccttttgaagtggagcttttgcactttatactttttctgtgaactatgataactatatttgatattaaagctgtaagtggcattttcagcaaatgaatatgtacatgtttgtgtctatttccaaaatgatttctgaactatctgcagtgaaaatgtatctgatggattgtagagcaaagcacattgcctaaattcatttgttaatgaattgggtaccattgttattaaaaatgcgtaaagtaaaaaaaaaaaaaa

SEQ ID NO: 612 - DNA, 481 bp, Homo sapiens
  misc_feature (480)..(481): n equals a,t,g, or c
gccttcacattggtcttccggggcttaaaagcatatcattcctgattctgcagctggttctctctccaagcactagcaaaaccctgccctaggagcccccagactctgagagcccatgaccaaaaagaaaaggaaagccaagttggggaagaacagggcccccaactccacagccctccactctssccagagggcccaccctgggctgcctggaaccccctaaagttgccacccccgcaacacagtagtggggcagttcctggcagcgcctgcagcccatgggctggctctgtacccgcagccccgccaagcgtctgttatcttatttactggaatctgcacagccaggctctagctcaccggtgactaaggagctgcagccattattaccaggcagatggcagactccctaaaagcagacattaaacaataaaatgccaccacataccttgcccacaaaataaaatcaaaacaaaccann

SEQ ID NO: 613 - DNA, 1667 bp, Homo sapiens
gggaattatttcacaatactgatagtactgggaattgtkaaataattcctctgaaagataagaatcactggcttctatgcgcttcttttctctcatcatcatgttcttttaccccagtttccttacatttttttaaattgtttcagagtttgttttttttttagtttagattgtgaggcaattattaaatcaaaattaattcatccaatacccctttactagaagttttactagaaaatgtattacattttattttttcttaatccagttctgcaaaaatgacctataaatttattcatgtacaattttggttacttgaattgttaaagaaaacattgtttttgactatgggagtcaactcaacatggcagaaccatttttgagatgatgatacaacaggtagtgaaacagcttaagaattccaaaaaaaaaaaaaaaaaaaaaaaaaaagmaaactgggtttgggctttgctttaggtatcactggattagaatgagtttaacattagctaaaactgctttgagttgtttggatgattaagagattgccatttttatcttggaagaactagtggtaaaacatccaagagcactaggattgtgatacagaatttgtgaggtttggtggatccacgcccctctcccccactttcccatgatgaaatatcactaataaatcctgtatatttagatattatgctagccatgtaatcagatttatttaattgggtggggcaggtgtgtatttactttagaaaaaatgaaaaagacaagatttatgagaaatatttgaaggcagtacactctggccaactgttaccagttggtatttctacaagttcagaatattttaaacctgatttactagacctgggaattttcaacatggtctaattatttactcaaagacatagatgtgaaaattttaggcaaccttctaaatctttttcaccatggatgaaactataacttaaagaataatacttagaagggttaattggaaatcagagtttgaaataaaacttggaccactttgtatacactcttctcacttgacattttagctatataatatgtactttgagtataacatcaagctttaacaaatatttaaagacaaaaaaatcacgtcagtaaaatactaaaaggctcatttttatatttgttttagatgttttaaatagttgcaatggattaaaaatgatgatttaaaatgttgcttgtaatacagttttgcctgctaaattctccacattttgtaacctgttttatttctttgggtgtaaagcgtttttgcttagtattgtgatattgtatatgttttgtcccagttgtatagtaatgtttcagtccatcatccagctttggctgctgaaatcatacagctgtgaagacttgcctttgtttctgttagactgcttttcagttctgtattgagtatcttaagtactgtagaaaagatgtcacttcttcctttaaggctgttttgtaatatatataaggactggaattgtgtttttaaagaaaagcattcaagtatgacaatatactatctgtgttttcaccattcaaagtgctgtttagtagttgaaacttaaactatttaatgtcatttaataaagtgaccaaaatgtgaaaaaaaaaaaaaaararaaaaaaaaaaaaaa

SEQ ID NO: 614 - DNA, 1193 bp, Homo sapiens
ctaacgtattcatgccttgtatttgtacagcattaatctggtaattgattattttaatgtaaccttgctaaaggagtgatttctatttcctttcttaaagaggaggaacaagaagatgaggaagaaatcgatgttgtttctgtggaaaagaggcaggctcctggcaaaaggtcagagtctggatcaccttctgctggaggccacagcaaacctcctcacagcccactggtcctcaagaggtgccacgtctccacacatcagcacaactacgcagcgcctccctccactcggaaggactatcctgctgccaagagggtcaagttggacagtgtcagagtcctgagacagatcagcaacaaccgaaaatgcaccagccccaggtcctcggacaccgaggagaatgtcaagaggcgaacacacaacgtcttggagcgccagaggaggaacgagctaaaacggagcttttttgccctgcgtgaccagatcccggagttggaaaacaatgaaaaggcccccaaggtagttatccttaaaaaagccacagcatacatcctgtccgtccaagcagaggagcaaaagctcatttctgaagaggacttgttgcggaaacgacgagaacagttgaaacacaaacttgaacagctacggaactcttgtgcgtaaggaaaagtaaggaaaacgattccttctaacagaaatgtcctgagcaatcacctatgaacttgtttcaaatgcatgatcaaatgcaacctcacaaccttggctgagtcttgagactgaaagatttagccataatgtaaactgcctcaaattggactttgggcataaaagaacttttttatgcttaccatcttttttttttctttaacagatttgtatttaagaattgtttttaaaaaattttaagatttacacaatgtttctctgtaaatattgccattaaatgtaaataactttaataaaacgtttatagcagttacacagaatttcaatcctagtatatagtacctagtattataggtactataaaccctaattttttttatttaagtacattttgctttttaaagttgatttttttctattgtttttagaaaaaataaaataactggcaaatatatcattgagccaaatcttaaaaaaaaaaaaaaaaaggtcgagccggccggctaattagtagtagtaggcgccgc

SEQ ID NO: 615 - DNA, 438 bp, Homo sapiens
  misc_feature (386)..(386): n equals a,t,g, or c
  misc_feature (430)..(430): n equals a,t,g, or c
  misc_feature (438)..(438): n equals a,t,g, or c
aatgccaaaagtacttcccctgtttccacaagctcgtttacatcctcagcccttgagaagcccagtcaggaagcataacctgatagcttgggctgatgcaatmacagaaactctggcctgctgtagcttttgttctgcttaaagtgcaggcagagcagagcagagcagtaattggctgtgaatgaaaggggattgtcagaatgagcctaagttccggwtctaccaccgcagtttcgtatttgggccctgttttaagccagggtggctggttggtgaaggtcatgtgcgacctcaggaggctgtcttgtcacctccctcatgtcaataggaagggaggtattctccctcctccagaatatacaggataatctgtcttgcttgctaanagcattcacctttgacctttgcattctttgggtctggagatgtntatgatcn

SEQ ID NO: 616 - DNA, 2674 bp, Homo sapiens
  misc_feature (75)..(75): n equals a,t,g, or c
  misc_feature (206)..(206): n equals a,t,g, or c
  misc_feature (1782)..(1782): n equals a,t,g, or c
  misc_feature (1923)..(1923): n equals a,t,g, or c
gttcgsccgcacagcagcccgagcgccccctttccrgagctcccctccggagctgggatccaggcgcgtagmggnatcccaggatcctgggtgctgtctgggcccgctccccaccatgacctcctcggggcctggaccccggttcctgctgctgctgccgctgctgctgccccctgcggcctcagcctccgaccggccccggggcngcagacccggtcaacccagagaagctgctggtgatcactgtggccacagctgaaaccgaggggtacctgcgtttcctgcgctctgcggagttcttcaactacactgtgcggaccctgggcctgggagaggagtggcgagggggtgatgtggctcgaacagttggtggaggacagaaggtccggtggttaaagaaggaaatggagaaatacgctgaccgggaggatatgatcatcatgtttgtggatagctacgacgtgattctggccggcagccccacagagctgctgaagaagttcgtccagagtggcagccgcctgctcttctctgcagagagcttctgctggcccgagtgggggctggcggagcagtaccctgaggtgggcacggggaagcgcttcctcaattctggtggattcatcggttttgccaccaccatccaccaaatcgtgcgccagtggaagtacaaggatgatgacgacgaccagctgttctacacacggctctacctggacccaggactgagggagaaactcagccttaatctggatcataagtctcggatctttcagaacctcaacggggctttagatgaagtggttttaaagtttgatcggaaccgtgtgcgtatccggaacgtggcctacgacacgctccccattgtggtccatggaaacggtcccactaagctgcagctcaactacctgggaaactacgtccccaatggctggactcctgagggaggctgtggcttctgcaaccaggaccggaggacactcccgggggggcagcctcccccccgggtgtttctggccgtgtttgtggaacagcctactccgtttctgccccgcttcctgcagcggctgctactcctggactatccccccgacagggtcacccttttcctgcacaacaacgaggtcttccatgaaccccacatcgctgactcctggccgcagctccaggaccacttctcagctgtgaagctcgtggggccggaggaggctctgagcccaggcgaggccagggacatggccatggacctgtgtcggcaggaccccgagtgtgagttctacttcagcctggacgccgacgctgtcctcaccaacctgcagaccctgcgtatcctcattgaggagaacaggaaggtgatcgcccccatgctgtcccgccacggcaagctgtggtccaacttctggggcgccctgagccccgatgagtactacgcccgctccgaggactacgtggagctggtgcagcggaagcgagtgggtgtgtggaatgtaccatacatctcccaggcctatgtgatccggggtgataccctgcggatggagctgccccagagggatgtgttctcgggcagtgacacagacccggacatggccttctgtaagagctttcgagacaagggcatcttcctccatctgagcaatcagcatgaatttggccggctcctggccacttccagatacgacacggagcacctgcaccccgacctctggcagatcttcgacaaccccgtcgactggaaggagcagtacatccacgagaactacagccgggccctggaagggnaaggaatcgtggagcagccatgcccggacgtgtactggttcccactgctgtcagaacaaatgtgtgatgagctggtggcagagatggagcaytacggccagtggtcaggcggccggcatgaggattcaaggctggctggangctacgagaatgtgcccaccgtggacatccacatgaagcaggtggggtacgaggaccagtggctgcagctgctgcggacgtatgtgggccccatgaccgagagcctgtttcccggttaccacaccaaggcgcgggcggtgatgaactttgtggttcgctaccggccagacgagcagccgtctctgcggccacaccacgactcatccaccttcaccctcaacgttgccctcaaccacaagggcctggactatgagggaggtggctgccgcttcctgcgctacgactgtgtgatctcctccccgaggaagggctgggcactcctgcaccccggccgcctcacccactaccacgaggggctgccaacgacctggggcacacgctacatcatggtgtcctttgtcgacccctgacactcaaccactctgccaaacctgccctgccattgtgcctttttagggggcctggcccccgtcctgggagttgggggatgggtctctctgtctccccacttcctgagttcatgttccgcgtgcctgaactgaatatgtcaccttgctcccaagacacggccctctcaggaagctcccggagtccccgcctctctcctccgcccacaggggttcgtgggcacagggcttctggggactccccgcgtgataaattattaatgttccgcagtctcactctgaataaaggacagtttgtaaaaaaaaaaaaaaaaagggcgrccgctcgcgatctagaactagtc

SEQ ID NO: 617 - DNA, 1609 bp, Homo sapiens
  misc_feature (1593)..(1593): n equals a,t,g, or c
cgggtcgacccacgcgtccgcggacgcgtgggtgtcgatgaaatcaagagtgtgatgttctagttatttttttttatatatatttttaaatgttcaatattcaactattgaaacaaatgtacatctgtgaactagctaaaatcatcttatgtaccactaatatgcccagcacattttgtaaaacagtcctgatttggcctccaagggtatttattgaactaccagcagtatctaggagaccacgaaggaataccacgaaggaatttatgctccagtgcttgccataatttgtctgagaaggaatctgttaaataaaagcttttatcctctaacctttaccttcatcagaccttataaaaggtcaaatggtgatcttaagttttttagtcacaaatcttacttattcagtattagtgcgaagagtagaatactttcaagtaagcctaaacttacatgaaamcaaattacataaatctagctctgagaataggaaattagtgacaagatcaatctgtaagatgttgagcacttatctgaagtaaatgggtaatgagtttcacatcttataaatacaagttagcatgtgttttctcaagagtccaagggttttcattattggactacagctttaatcttctaaatgttattccccaagattaaagagcatctcaagttagatcaccaaagatcaaaagctaaaaccagaagtatttttgtcattgtggtggtggtagtgttactaattgcctagatttttaaagggaaacatttttttcactgggttgtttcgttgaaaaaaatagaagcagaaacttgcccaaagtcacagtggtcaaactggaaattgcaccaaaacttggcatactggttctgaaatccatagttttagcccttatgtatactggttaatttggaaggaagaaatatatacgttctgaagtgaagagtgagtgaaaggaagaattcagtgaatacattgataccttgatattatctgcattgtggctacatgttacttttcttcacaagagtgatataagtgaaataaagaatgattggactgggaraaaaatggctcagaaaactttgcaaaagtaygactgtatgtaaagataagtattcaacattaaatgggaaggaggagagcaagcagtttaatatatagaattttataattttaggcctgcaagggaccttataaaacatgagcaatggaacacttttttccaaactaaatttcgtgcagtggaacttggccgactctgtccttcctctattctaagcaccctactctagcccggctgctctgagttcagtttgttacaaatatggacacgaaagtaccacaggctttgcacagcttaattgaagtttccccttcacaccatggtaaaaaaacatactgggatggaagggtttgtgtctagaacargaacaagaaataaactcttggtcacttactaatatttcaaaatcacaaagcagaattttgcttggatgkttaktaaaacatccttggaaatttaactgcttgcagcttctaccttyttcattaaatgctgtctggctaataaaaagtgccatgtgcagctntattttaatttcaatt

SEQ ID NO: 618 - DNA, 920 bp, Homo sapiens
  misc_feature (202)..(202): n equals a,t,g, or c
gacacgaagtccgagaaattgagcagcgacatatcaacactaccaaaaataatccagtgatgtcattgcaagatcaggtgcgctttgtaaagaatataacttcctggaaagagatgaaaccaggattttatcatggacacgtttcttacttggattttgcaaaatttggtgtgaagaaagaaaccaatttacattaatgtcntaagggatcctattgagaggctagtttcttattattactttctgagatytggagatgattatagaccagggttacggagacgaaaacaaggagacaaaaagacctttgatgaatgtgtagcagaaggtggctcagactgtgctccagagaagctctggcttcaaatcccgttcttctgtggccatagctccgaatgctggtaggggagataaagttggctcagattgattatcatccttattatctctataatctgtgtttcatttcacaagggctagatatagggaaatcggtgaaagactagactaaaaataacatgtaattcagtaatatctagttttgcagttacttttaaatgcatttaaaagattcctcatgtagagtgatatcctaatatccttgcattgttttctgagatgccggtttttagtatttcttatttttggtgttatgttttgctgtattccagcagagctcttagagactgggggtgggggtgggkgtcataaatcttattttgtccaaagcttactgttttagctattcatgttaaattaagaaaaggcttagtgggttaaaattcacctggttttactgttaaactgattttgactttaagagaagccaaggttatggctgtggtttagtttgctagtaaatatcaagtggaaaataaagatactttaataaaaactgtatttcctcaaaaaaaaaaaaa

SEQ ID NO: 619 - DNA, 283 bp, Homo sapiens
  misc_feature (60)..(60): n equals a,t,g, or c
acgcccgcaggtaccggtccggaattcccgggtcgacccacgcgtccgaaggaagaaggngggaaacctcaaatgaattctgaaggggagataccttccctgccatcaggcagccaatctgcaaaaccagtaagccagcccaggaaatcaacccagccagatgtttgtgcctctcctcaagaaaagccactcaggactctgtttcaccaacctgaggaagagatagaagatggtggactcttcattccaatggaagacaagacaatgaagaaagtgagaaaag

SEQ ID NO: 620 - DNA, 498 bp, Homo sapiens
  misc_feature (11)..(11): n equals a,t,g, or c
  misc_feature (411)..(411): n equals a,t,g, or c
  misc_feature (417)..(417): n equals a,t,g, or c
  misc_feature (464)..(464): n equals a,t,g, or c
aaagcccaacncccccgtaaacccagaatctcccatatggtaacctgtgtgatgctccggattctcctcgcccagtgaaggcatcaagggaagatagtggtttatttagtcctattcgatcctctgcttttagtcctcttggaggctgtactccagctgaatgtttttgccaaacagatattggtggagataggattcatgaaaatcatgattctgtttattacacctatgaagactatgcaaaaagcatttcatgtgaagtactaggctcagttcttcgtacccaccatactaataccctatcaaatattaacagtattaaacatggagaaaataaaactgtaacttttaagcatggaaaccttgatcaaaaaaataaatctaaaaataaatccttaatgaaaaaaaaanattaanaaaaaagggcggtcgctctagaggatccaagcttacgtacgcgtgcntgcgacgacatagctcttctatagtgtcacctaa

SEQ ID NO: 621 - DNA, 1069 bp, Homo sapiens
  misc_feature (176)..(176): n equals a,t,g, or c
  misc_feature (1060)..(1061): n equals a,t,g, or c
cctttgaaatacccctcactaaagggaacaaaagctggagctccaccgcggtggcggccgctctagaactagtggatcccccgggctgcaggaattcggcacgagcggcacgaggtatccacagggccacagcgacaccactgtggctatctccacgtccactgtcctgctgtgtnggctgagcgctgtgtctctcctggcatgctacckcaagtcaaggcaaactcccccgctggccagcgttgaaatggaagccatggaggctctgccggtgacttgggggaccagcagcagagatgaagacttggaaaactgctctcaccacctatgaaactcggggaaaccagcccagctaagtccggagtgaaggagcctctctgctttagctaaagacgactgagaagaggtgcaaggaagcgggctccaggagcaagctcaccaggcctctcagaagtcccagcaggatctcacggactgccgggtcggcgcctcctgcgcgagggagcaggttctccgcattcccatgggcaccacctgcctgcctgtcgtgccttggacccagggcccagcttcccaggagagaccaaaggcttctgagcaggatttttatttcattacagtgtgagctgcctggaatacatgtggtaatgaaataaaaaccctgccccgaatcttccgtccctcatcctaactttcagttcacagagaaaagtgacatacccaaagctctctgtcaattacaaggcttctcctggcgtgggagacgtctacagggaagacaccagcgtttgggcttctaaccaccctgtctccagctgctctgcacacatggacagggacctgggaaaggtgggagagatgctgagcccagcgaatcctctccattgaaggattcaggaagaagaaaactcaactcagtgccattttacgaatatatgcgtttatatttatacttccttgtctattatatctatacattatatattatttgtattttgacattgtaccttgtataaacaaaataaaacatctattttcaaaaaaaaaaaaaaaaaaaatnnctgcggcc

SEQ ID NO: 622 - DNA, 899 bp, Homo sapiens
  misc_feature (116)..(116): n equals a,t,g, or c
gctttgtattgcttatattgcatctgagattgtttgtatcttttttccttgactagtcttgctagaggtttatcatatttattgtttttgctttacaaagaagccaatatttttgnttttcttctttgttatattttctctattttgttgatttcagctttttcttttctatgttaatatgtcatattattgtagtggatggttagctcttcaaattttcaactttctattctgatttacatatttaaagctatagatttccatgataatgctactttatctcttgcgttagttttctatgctgggtaacaaattaccacaggtttactggtttataacagcataattttattatctcacaatttcttggggttaagagtttcagcatggcttaactgggtctcacaaggctgcagtgaagtcagctgaactryrttgtcatctggagctcacagttctcttctaaattaatcagattgttgataaaacttagttccttgaagctgtagaactgaggtcctcagctacttagggctgctcttttatataagcagtgtaacgtgacatgcctttttaaggtcagcagaacttctgactagaatctgtttcagagaaggccagaaagagttcacttggktaggtcagagwcacctgggatagtctcccttttgattaagtcagagtcaactaaataggcaccttaattgcatctgcaaaatcctttcacttttgccatattctcttactaaatgtaacaggcgttgtccacacaaaggtatggatatcgggcttggaaaggatttcaggaaccatcttagaattctgcctactactaactccattctacaagtctcaatatctagcattttagttattcactaactgcaaagttttttatt

SEQ ID NO: 623 - DNA, 532 bp, Homo sapiens
gaacactaaacagactatttaacttgagggtaataaacttagaataaaattgtaaaattgtatagagatatgcagaaggaagggcatccttctgccttttttatttttttaagctgtaaaaagagagaaaacttatttgagtgattatttgttatttgtacagttcagttcctctttgcatggaatttgtaagtttatgtctaaagagctttagtcctagaggacctgagtctgctatattttcatgacttttccatgtatctacctcactattcaagtattaggggtaatatattgctgctggtaatttgtatctgaaggagattttccttcctacacccttggacttgaggattttgagtatctcggacctttcagctgtgaacatggactcttcccccactcctcttatttgctcacacggggtattttaggcagggatttgaggagcagcttcagttgttttcccgagcaaagtctaaagtttacagtaaataaattgtttgaccatgaaaaaaaaaaaaagtcgacg

SEQ ID NO: 624 - DNA, 511 bp, Homo sapiens
  misc_feature (460)..(460): n equals a,t,g, or c
  misc_feature (503)..(503): n equals a,t,g, or c
  misc_feature (508)..(508): n equals a,t,g, or c
gctttgaaaccaattgcagattgcttggttttatacaaactttgattagtctttggcagtagaaggcagtttgctaaagtggctttacacttgggattatgctgtttctttggtgatacataaagttcacatttttttttttataacttcatggtcaagagcttgggaagaaagcccaagtctcacttgaggacctgatgtaattgcttctctttgagctccgaagaaaagattgaggagctgctcttttgatttggggagtgagcaggttaagtgctcttactttactttgscaccctygtacagacaaagtccggttacaaaggcgggtaactccaatgtgctattctttttttyttaccagctttactggggataatgcacatactgtacaattcacccacttaaagtgtacaattcagtgggttttagtttattcatgggggttgtgcaacccttnaccataaatctatttttaggggcacttttcatcatctcagggnggaancct

SEQ ID NO: 625 - DNA, 505 bp, Homo sapiens
gctcggcgagatccagtccacagcttgcttcactcttagaacagcggcatcctctatttggtctcgcacggggaacttgctggggtaggggagaggtgttagagctttgaaaaagctttgcctctcggaggagtcaaaggggcagtaactgtatggggtgagaggaaggcctgcgaaataaaaaggcaaaggaaccgtttgaggaggctagttgccttctcggggccggtgtgtgtgcgggggtagtgttaagggggaggaaggagcccgkgagcccggaggaccctcccggaggtgcgggcctgaaattccgctgggtgccgggaggctccgccctccggagtactgacggccttcgcagccaatgcgcagccaggacctcgcgttcgggagggcgggtacttcctactccagccctgggctcggagaaggccgcgttagttctttttctagggatgtctgcggaaggggcgccaggctgagggccagcctggagaaagaaaga

SEQ ID NO: 626 - DNA, 778 bp, Homo sapiens
  misc_feature (226)..(226): n equals a,t,g, or c
  misc_feature (253)..(253): n equals a,t,g, or c
tagggttctaggcccctgttcctggggacttgaaggcggttttacatactggtcagacacggctggaggccaaggtcaagttgaaagttgcagtccagccagcatgagaactgccatgcgagcgtagagacacaggcagcagcaaaaggcccattgcccacatcccctcactcttaattttctctctctttttaaaattctcgcctctgactgttcggctgcccanaattttttggtgccttcgtggggtttntggggcggtgtttaccgactcttctctgcctccgccctgctcagccagggctttgagcctcttcggttttccggccagacccggaaaaacgaaaacacagcttggggagcccccactagccggcgcctgtgccagctcacctctggccatggcgcagctgccggtgcacacggcggccaaggccagctccacattcttccctccccctcccacttcaccgtagccccgaaccctgcgcgcagagaaagggtctcagctccacagacgactgggtccctcctcaccaaaaatggtgagacaagatttcatctgtcggccgaggagccacaagcaggtttgtctgagagggatggtgctgggggaaggctttggattgcatctcaaattaagctttgctccttaaatgtggcgtctcgccaagaaaaagcttggggcctgaattcttgagatttatggtgcaccttattgatcaaatttatctggactttttttagttccccgatgtgtccctatcattaaaaaaaa

SEQ ID NO: 627 - DNA, 750 bp, Homo sapiens
acccacgcgtccgttaaaacgtcataacttaaatatcaaaattaaaaataaatcaataaaatagcattttaggacatgctgttttgaattcatgccttccctttccattttgttgatcatcactgttttagattcttaacctctataaactcttataaaaattggccactgcacccagcctaggggttttctttttgaggtgataaaaatgttctaaagtttatagtgatgatgcttgcaatttctataagtagacttaatgcagtgatggttgcaaattctataaatatatttaatgtggtgatggttgcaaattctatgaaaaacccaaattgtacaatttcaatgagtgaaagcatgctatgtgaatgtcttcataaaggttttatttaaaaaatgagcaaacggtagaatgttaacatggcccacgtctatgtggtgtctatattggtttctattatatgttttctatgtggttgaaacattcctaataaaatgtgcatagttttttaaaaaaraaaacacatcagtggacgtgaatgcaggatgtcttatgaatgctcacacagaagctcccattcgtgaggaatgcagggaaaagcagaagatggagtaggagttggcatggcccagctagctcagatgacacacgatggtcccagtggcatgacttggtttgtgtgatttgtgccttggggttttattttggcacattataaaggagtaaataaagcctgtatacagtcaaaa

SEQ ID NO: 628 - DNA, 451 bp, Homo sapiens
gcggccgcagtggaaggagcaggcgcttgagctcgagcgacggcgctggcggagacgccggctgctcctcccctccccgccggtgagtgagcgcccccgccccggacgctggcggcggtcgcggccccctcacggccctccgcggtgggtggggacagtcgtgagggagcgtggcctggcggcgcakcggacgcgggcctggcctcccgctcgcggcctgtcggggctgggacctgccgtcgcccccgttcgaggttgaagccccgggcctaggactcgacccccagcatcccacggggcctctttcctttcccggctcattccgctgtcattttgacctggggttcccctccaagcccctcgccttcgttcccttcccaagcatcccagggccgaggttgagggaggggcgtgtgagaagtcgggccgaggmcgagggactgtttaagga

SEQ ID NO: 629 - DNA, 1080 bp, Homo sapiens
aagagaaagataccatttgagactccagaatctgcctctaactctcaacaagactctgcaattactcaagtatcctttccatcctcattgccctgctgttattacataggccctggttcaagtccttgttacttgttcccattattgcaataacttctaattccaatgccgttgtgtgatcccattttaaacacggccagagcagtcttccaacaacatagctctaatctagtttcatccccacttttacatgcytcagtggctttcccagtgacttggcatggaacacgtcctcagttgccatacattccagctaactcttacccaacctttctttgttcacacagtttccttttccttcctcattgacccatccgcatctctgtttatccaagacttctctgtgatagctgacccttagtctttctctcccctattcctccagactagatcctgtctccttcctgcagccccgacacagccttcagttcatatcttttgcatgatgcttagcaccttctatccctaaggacaacttactcatttgagatttctggcagggtaccttgcatgcagtggacactcagtatttgctgaattaaattccttcctatggatcccttctgattttttttaagtgcctctaatacacatatcattctagggctcatgccacttttaatgtcattttctaaaggaaaatcttatctatgatattttcccttataagagatagttgttttgagtagggttttttaaaagataaaggtagtaggaaattttttaaagcctaaatatcaaattcctttccctttggagttgggggaagkaatgaagggggagcaacttgctctttcatatgagttggtcatagcatgtaagaaccaatcttgaaatatcgttttttttttaatggcttataatgtatttctagaaatactttgtacttaaaatgataacagtttgtatctttttgtccatataaagatactttataaataaaaaaattagcattgtaaataatgttaatatgtatttatacaaaataaatttactataatataaaaaaaaaaaaaaaaa

SEQ ID NO: 630 - DNA, 823 bp, Homo sapiens
  misc_feature (646)..(646): n equals a,t,g, or c
  misc_feature (699)..(699): n equals a,t,g, or c
  misc_feature (717)..(717): n equals a,t,g, or c
ggaggtttcctttgtccattaagcaagccccaagaaccagaacccttttgctgcttttcttacatacctaacagctctccagtcatgatgaccaaggttgttcttcaatcaaatgtgtttgwgggattttcagtccgcaaatgaagtgctctctaatgaatgggacaccatgataaatatgtatttatatttagatgccaaagtatggcmaattatttccaaatgataactacaaatgggaattttcgatattctaccttttttatagaaccagctcacttttcatttctttttcattttgaattaagaaaattgktgaggatgtggtgggttccagtgtgtggaatggaaaggaaactgcagaatagtgtctgctccccattcagagggactgcttcctgtgccccccagacccggggcttcgacagcttctccacattccacacagatgcctaggagcagcgagttggtatatgaaaagtctcccaccttttctcctaaaacttctctcctttctctccataaaaagaaaaggaaaggaacaaaagaaaaacattcagtttttctttttctgaaaaaggtaagtcctttcctgaagtcatcaaatgaaacattatctggaaattagtttctaatgttgtatatnaagaaatacttaaatataagttcctgcagtatttattagatagttgtaactgnaaactcacctcctagtanataagagtttcaggttaaatactggaacatatataggcagtcaaaaatactactttaaatgcattcacctaatttaaagccatggtttaacactttttaaggccaa

SEQ ID NO: 631 - DNA, 720 bp, Homo sapiens
gctctaatggaggaaacagtcaacatgcaaaaatagatgtgtaatgtaagaagagtgatggaaactctaggaaacaatcaaaaggaaatgctagaaataataaaaatcactgacataaataaagaatgtcttcaataggttcatcaacagaacaagtttgaggaaagaatgagtaagcttgaagataagtcaacagaaataatttcgaaagtataatatacatctatttggaataccagaaggagaagaacaagaacaagaaactaaagaaatatttgaagtaacactgtcagaggattttcccaaattaaccacagcaamtcacaagtcaagaagtagagaacagtaaacaggagaaataccaaaacaattatacacaaacttcagaaaaccaaagacaaaaagaaaatcttcaaaggagtcagagaaaaagtaacctgacttacagcaaaacaggacaagaattaaattagacttcccatcagaaacacagaagcaagaagactggagtgaagtatttaaatgctaaaataaagaaaaaaaatacaaacttgagaaataaagacttcctcagacaaatgctgagggaaataatcaccatcagaccttccctgtaagaaaatattaaaagaagttctcacggaaaaggaaggtgataaagttcagaaactcaaatctgcgtaacaaaggaagagtgccaaagaaggaataaataaaggt

SEQ ID NO: 632 - DNA, 332 bp, Homo sapiens
  misc_feature (332)..(332): n equals a,t,g, or c
gccaccagtacctagccaaagttagttttaatgtgagagtcaaggactacagtggcatgctgaggtaacaactgcaggagcatcgaggtaacagcaaaaatcttttactccaattgggtcaatccagttaaccatgtaagaaactcctcacctagggtcagtatgttacttctgtatttctgcaagcacaatccactgacataaaagtctaataattagactttattgtaagtctaatgtatcttgtacatgataaaatgtatgaactttggatcaatatggcaagctgaagacacctgtcatgtggggggactattttgtttgggttctan

SEQ ID NO: 633 - DNA, 510 bp, Homo sapiens
  misc_feature (76)..(76): n equals a,t,g, or c
  misc_feature (471)..(471): n equals a,t,g, or c
  misc_feature (491)..(491): n equals a,t,g, or c
  misc_feature (501)..(501): n equals a,t,g, or c
  misc_feature (504)..(504): n equals a,t,g, or c
taaggctgtttcagagtctgagttgacttctctttaatctacctatagaacttttaggtttcaaaaaatacttttnaaatgactttttgggtttggaaagtacctttaatacatttaagctagttttcctcctggaaatatttagaatttcttccttaattggcaacctttatagaagtctggtaagatttgtcgcaaagatgtgccacagatggacacaaatttcccattcgggagcaatatcttaccacagtggtggctaaatgctagggacaaaatacaaggccggaactttccttccctcagataccttgtgctgtggtgttttgttgccactttctccctctcattttcaattatatgcacaatcttccctttctagagtatgactttggccagatgactcacctgatgccacctaagggcattgcctggccaggtacatttctctggctccagccttggctaagntgatgacctgagtcgatctncacattcatntcntgaacg

SEQ ID NO: 634 - DNA, 653 bp, Homo sapiens
gtttttttatggaaagaacataaacatagttttctaatttggagaaatcggtcttaatgcaagtaggcattttaaaattacatttatgaattatttttagaccctacataatcttttttattctgcaatgttaaacagtttctctagaaaatctgtttttgtttcctagtgactattaaactattctctcctacaacagtaatatttatgctataaatttaaatcatcatttttgttttgattgattataagatatatgttttattatcatgtagcctagtttaagagtcctcaatatwtctgaagttttagtgattctgctgagagagagcatagaaaaaaataagaaaaaaaaaaccaacctagtatctgttgktcagtagattgtaggtacttctgtttatagaaataataaggggaaaatgggtattttagaatgaggatcttttgtgktgkacctcttgcttctcttttatttgaataataaaggraataacatcaaattaatgtttarcctactttartatggatattgaagttaaaatgtcattcatttgcatttatttaggaaaagaagatatgcttcttaaacaaggtcagatgtatatggcagactcacagtgtacttccccagggtatccaggcccaatgca

SEQ ID NO: 635 - DNA, 421 bp, Homo sapiens
gagacagagcaagatgccttcaggaggaatctctggccgtcttctttggtaatatccaaagagctttggtcagcgttgatatcaaagcggtgtgaagaaaacataaggccataagactaatctctggagagctgcacactgaaggggaacmtaagttcttgagtccctggagtaccccaagtktggwttcagagagggtgccattcatgagcaacactgctagccattagtggccagcaagaaggggagtgaaaggagtatcttgtagatggtgacttgggtaatatgaaattgctgtcatcaaggtttatcaaaamaccaaaggttaaatattacatgtaggcaatgtgaggctgccccaaatggtgtgtttcccaggaacttgattcaactctgagaataaatgcatgagtactgagaa

SEQ ID NO: 636 - DNA, 500 bp, Homo sapiens
tcgaaccttttggatctctgtcagaaatgaatgtttatttctttcaagttttatcaagtattaatacgttttatttatattcttttaaatgttttattcagtagttctgtgaacttcagactttgttgttcagcctaatcgtatgcttctgtaacttctacacattttataagaactcattcaaagttgtagtcctaccatagtgtttcagggttccttgttgtgtacacttttactataatggcaaaatgtttcaaaatcattcagctttttaaagaaacttattatgcaaaagacactcttgaaatgctgtgcatttgagctgaagtgaaagaatttgtttcatgttgtactttgcattattttaagttttcacatctttaatatgcttttctatgctaattatattagaaatctataaatataagtggtttctttgtttaaactagtcattaaaaattaggttgaaaatgaaaaaaaaaaaaaaaaaaaaaaaaaaa

SEQ ID NO: 637 - DNA, 545 bp, Homo sapiens
gttggtacgcctgcaggtaccggtccggaattcccgggtcgacccacgcgtccgctctgttcctctgtggctactctcccatcttaaaaacgatccaagtggtccttttcctcctccctgccccctaccccacacatctcgttttccagtgcgacagcaagttcagcgtctccaggacttggctctgctctcactccttgaacccttaaaagaaaaagctgggtttgagctatttgcctttgagtcatggagacacaaaaggtatttagggtacagatctagaagaagagagagaacacctagatccaactgacccaggagatctygggctggcctctagtcctyctccctcaatcttaaagctacagtgatgtggcaagtggtatttagctgttgtggtttttctgctctttctggtcatgttgattctgttctttcgatactccagccccccagggagtgagtttctctgtctgtgctgggtttgatatctatgttcaaatcttattaaattgccttcaaaaaaaaaaaaaaaagggcggccg

SEQ ID NO: 638 - DNA, 679 bp, Homo sapiens
cccccgttttaaaagatcagtagtctctattcaaacttttaaaatgtcgtggtattgtaacaatatatttgatgaaagaaggttacagactcccctgaagaaccagctttcctacgctttttatttttctaacttgtctaacctgattttaaaatgactgcaattccagactaaaaacatgcttcagccctgtttcaagacattatgcttcttttaacagtccaaattagtagttttatttttcttctaaatctttgtttcacacttgtaaaatcttgggaaggaggttcttaaaactttgccaggaattgttacccatttccaaaaacagtttattatgttcaaaaaccaccatatctttgagggactgtttgaaaggggagagggcaacgcgggaaataattcactctgcgcaccggaactattgtagttcaggacttccagctactgtatttagatgttgggtttgaatatacagatttcttttcaatacctgtaaatatggctatattcttgtatttgtacgggagtgtacaaaatgacactgaaaagtaataaatatgttttgactatattgtgcagttatttcagaactgtgttttgaaagtcttagaatgcataatttgcatttgagtaaggaaatttaaaatacagattactgctgagattttaaaaaaaa

SEQ ID NO: 639 - DNA, 905 bp, Homo sapiens
  misc_feature (165)..(165): n equals a,t,g, or c
  misc_feature (793)..(793): n equals a,t,g, or c
  misc_feature (803)..(803): n equals a,t,g, or c
  misc_feature (816)..(816): n equals a,t,g, or c
  misc_feature (843)..(843): n equals a,t,g, or c
  misc_feature (869)..(869): n equals a,t,g, or c
  misc_feature (889)..(889): n equals a,t,g, or c
cagtcgcaagtgactcttgcaataatagcatctcactcctatctgaaaagttgacaagcagctgttccccccatcatatcaagagaagtgtagtggaagctatgcaacgccaagctcggaaaatgtgcaattacgacaaaatcttggcaccaagaaaaacctagnccatgtcaataaaatcttaaaagccaaaaaacttcaaaggcaggccaggacagggaataactttgtgaaacgtaggccaggtcgacctcggaaatgtccccttcaggctgtcgtatcaatgcaagcattccaggctgctcagtttgtcaacccagaattgaacagagacgaggaaggagcagcactgcacctcagtcctgacacagttacagatgtaattgaggctgttgttcagagtgtaaatctgaacccagaacataaaaaggggttgaagagaaaaggttggctattggaagaacagaccagaaaaaagcagaagccattaccagaggaagaagagcaagagaataataaaagctttaatgaagcaccagttgagattcccagtccttctgaaaccccagctaaaccttctgaacctgaaagtaccttgcagcctgtgctttctctcatcccaagggaaaagaagcccccacgtcccccaaagaagaagtatcagaaagcagggctgtattctgacgtttacaaaactacagagtaagtagtagtacctattagctaacatccctttttcttccacatttggaaaaatactttgactatcaaaaaacaatatagattcttttgngtttcataanccgtgatgattgngtttttgcactcatggattgaagtacnccttccttaaacttttgggtcaaggncaattacattaccccttttntgatgtgggggggaaa

SEQ ID NO: 640 - DNA, 800 bp, Homo sapiens
  misc_feature (732)..(732): n equals a,t,g, or c
  misc_feature (772)..(772): n equals a,t,g, or c
  misc_feature (776)..(776): n equals a,t,g, or c
  misc_feature (798)..(798): n equals a,t,g, or c
gcagcctggacggtccgcagagacgttcctgtcttaggcgtcccacgagatgctcctgttcagccctgccgaggtggaagcttggagtggctcacggtggatgcattgacgctgcagacgccagcaagtgctacaaaccagagctggcctttaactcagactgatggagaaggtgttaataatgcagattagacttaaaagtgttgaagccattgcactgtgaacagcaaaaaaattgaagaactcttctggcatttaaaaacaattactcagttcagcagagaagtcactgacaaacgagatcacactgactgctttgtcgttttggttttgtcttactcattaatgcaaataagaacattcactagcatctgtgtcgggcctaccctccctggtcaaatacagctacagtctccctgcagatacgagttttccagaaatgagccgatgttttctgcgagaatcaattggtcatatacaatttacaaaaatgagtactgtatactatatttgtaaactgtacactgcagatgctttatttcactgaaatttataatacacttatccatgtatatgcatgcatgcatttttgttcctgagatccagctgtgaaatgtttaccagcacataaattaccagcacatgctcttttttgttaacctactaggtaaaatcttcatttattacatcaaaaaaaaaaaaaaaagggcgggccgctttagaggatccaancttacgtacgcgtgcatgcgacggtcatagcttcttctantagngtcacctaaattcaatttcacngg

SEQ ID NO: 641 - DNA, 378 bp, Homo sapiens
  misc_feature (13)..(13): n equals a,t,g, or c
  misc_feature (17)..(17): n equals a,t,g, or c
  misc_feature (40)..(40): n equals a,t,g, or c
actaacggggctncacnatggaagctcattatagggaatnctggtacgcctgcaggtaccggtccggaattcccgggtcgacccacgcgtccgcgggagccctttgctgtgtgctctgtccagtgtcatgagacgggagccctttgctgtgtgctctgtccagtgtcatgagacgggagccctttgctgtgtgctctgtccagtgtcatgagacgggagccctttgctgtgtgctctgtccagtgtcatgaggcaggtgtttgcaaagccagctctcggttccgatggggtattgctgacctacttttctaggggaaatgctcttaaacactgtaattatgcatttctaatgaaataaaatgtatttawraccacaaa

SEQ ID NO: 642 - DNA, 602 bp, Homo sapiens
  misc_feature (529)..(529): n equals a,t,g, or c
  misc_feature (540)..(540): n equals a,t,g, or c
  misc_feature (548)..(548): n equals a,t,g, or c
  misc_feature (583)..(583): n equals a,t,g, or c
gcccgccccagtttgaggacttgctatccccgtgggaacatcaccatgtccgaggcaccccgggccgagacctttgtcttcctggacctggaagccactgggctccccagtgtggagcccgagattgccgagctgtccctctttgctgtccaccgctcctccctggagaacccggagcacgacgagtctggtgccctaktattgccccgggtcctggacaagctcacgctgtgcatgtgcccggagcgccccttcactgccaaggccagcgagatcaccggcctgagcagtgagggcctggcgcgatgccggaaggctggctttgatggcgccgwggtgcggacgctgcaggccttcctgagccgccaggcagggcccatctgccttgtggcccacaatggctttgattatgatttccccctgctgtgtgccgagctgcggmgcctgggtgcccgcctgccccgggacactgtctgcctggacacgctgccggccctgcggggcctggaccgcgcccacaagccacggnacccgggcccngggcccgncagggttacaagcctcgggaagctttttccaccgntactttcgggcaagaccaa

SEQ ID NO: 643 - DNA, 669 bp, Homo sapiens
gacaggatacgtccctgtaacccaatctctcggttgattgatagcagaacagctcttgttggtctgagaaggcaggataagtgaccacatatttatgccactacctccaccagggagagtccttctccacaggcttgataaattcaatcaccaactgtgctgtcgtccctgactctgctactcccgttcttcctgctttcctgctccgtatctcagtctgcactgaccccagggctgggctgacatcaagatgggagcccagcccacgggctttataaacacccaagaaccgtttcagatcttctctgtgctgatgcaggtagttttaaatttttctcagttccagtgatagaaaacccacacaatacatcctctgccagtcttaatagaatatcagaggtaagaggggcctcagagaagctctgacgcagtgctgctggggaagggaagtgactaaccccgggtcagcctgccatttagggaaagagctgaggttcttacccttgttgcatgctgccacctctccttagccagtgctcttgtacatccacacagcaccctaaggagccatagtcaccatcaaagactcaaccctaaggcccttcaagatctcaaagtgccttctgaagcatcagagattaaatattgttcaaactaaaaaagtcgacc

SEQ ID NO: 644 - DNA, 405 bp, Homo sapiens
  misc_feature (330)..(330): n equals a,t,g, or c
gcaattttaaactaggttatcctgtgaattaaacattttaatttattttttatcatgtatgatttatttatagatgcatacatatgcagtaaaagcagtaaaggaagcatgagaaagataaacacaaattgatggtggcagtgacctctggggaaagaattataggataaaaacaaaaacatatatactttaaaaagtatacttcgtgktatgaaatattctcatttgaatgcatgttaaaatggratwaaagtagaataagttataatactgggtacttagaaaccagatattaaacttacctttattatagtggtacctgggtgccsntagaattacagtactwaaaggtacaaattatactaaaaatgatattggaagatttgcacatgggtgggttttaag

SEQ ID NO: 645 - DNA, 1329 bp, Homo sapiens
agagagaaaagcacctttgaatgcagtgaatgtggaaaggctttcagttatctctcaaaccttaatcagcatcagaaaactcatactcaagagaaagcttatgaatgtaaagaatgtgggaaagcttttattcggagttcatctcttgctaagcatgaaagaattcatactggagagaaaccctatcagtgtcmkgaatgtgggaaaaccttcagttatggttcatcccttattcagcataggaagatccatactggagaacgaccttacaagtgtaatgagtgtgggagagcattcaaccagaacatacaccttacacagcataagagaattcatacaggagccaagccttatgagtgtgctgagtgtggtaaagcctttcgacattgttcatctcttgctcaacatcaaaaaactcacacagaagaaaaaccctaccagtgtaataaatgtgaaaagacctttagccagagctcccatctaactcagcatcaacgaattcacactggggagaagccctataagtgcaatgaatgtgacaaagcctttagccggagcactcatctgactgaacatcagaatactcatactggagagaaaccttataactgtaatgaatgcagaaagacttttagccagagcacatatctcattcagcaccagagaattcattcaggagagaagccttttggatgtaatgattgtggaaaatccttcagatatcgctctgctctcaacaaacatcagagactgcatcctggcatatgacaattctaggaacatcataaatttaggggagatatttactttagtttgtccttttgttaagtactgaagaatcagagtggatttagaaactgccttgaaatcttttaaattttcactatcatgttatggaatggaaagtacattgggctgaactaatccaattgttattaagccactctgtgacattagaaaactctactgttttaagctttagtttcctttatggaatgaaggmtttggagtagattatttcaaaggtagtttggagttttataatcagttttgtatatttacaatattttcttgaatgggtttactatacatcagcattttgctgtgttgcatctagaatgtgtatgtttatgcatgttttgccaatagaatttgtgcttcagtaactagatcggggatctagtatgctcctggtctaatgcatttacattgtttaggtaactggttcctaataaaaagaattataaaataccctcaaattaacaattcaattgcatataatagcctaactcagtaagaatattaaaacttactattattaaaaaaaaa

SEQ ID NO: 646 - DNA, 440 bp, Homo sapiens
gctgctggaagcccaggcgggggaagggggccgtgtgtcgcgsagagcgcccttgagccttacgcagaggtcttgtgtgttcctagttaagccctcccacgcccgaggccccatcgcttcctctccaccctctttacccaccaatattccaagcccagatcctaattccccaccgcattaccccgccctggatttggggaatgtttttctttattttaatatagctcaaggaaaaaatacgtatatcttgagagatttggggtggggaaaacaaaagccttgcggagtaraaaaaacaaaggcttatttttataaatgtttaatgttttcaccccctggatgctccgaracgccgtaattgtgacggcggggtacgtgtgccataaatcatttagttgctaataaaaattctgcctgtttgccctggaaaaaaaaaaaaa

SEQ ID NO: 647 - DNA, 1216 bp, Homo sapiens
  misc_feature (139)..(139): n equals a,t,g, or c
  misc_feature (1213)..(1213): n equals a,t,g, or c
ccagtgctttctggctacccagcaccagaatcatcacttcttcggcatccagcagtgtaccaacaccgacagtcagggcatattttggcacctgattaacatcgttatcaaagaaacgagagtttgcgacgcgagtgtncatgagtcagggttttgatacgagtacgagaagccagagaagacgccggttcgttaaatgcaatatgaccgtcgttacmtacaccgcccataaacagatgaatttttccgtaagaacggattttttyttcatactggcggcactcggcgtcgatatccggggcgttgccgttgagaaggttgatgttttctgctggaatatcaacgtgatcgaagaaattacggtgcataaagctgtagtagctttccggatgctctttcggcagaccgacatattcgtccatgttgaaggtgacaacgtgcttaaagctgacctggcctgctttatgcatttcgactaacgctttataggtggtcatcggcgtgccgccagtcggcaggcccagtacaaacggacgatcggcagtcggtttgaacgcattgatacgattgacgatatggcgagcagcccawtccctttgcaagataatgtgatttaaacgtaatacacactcttgcacctcgccacgccccaggcattgagatattcgctaattatcctggttacagtgatttaagcgcgatgttctcatctatcagcagtttcgcatcaaacgttttgccgctctggatccatttgcgaattgggcgaatctcacgcccctgattcagcgtgaccgcaccgataagcacgccgttttgcagattaaaccaaatcgccttctgagtttccgggttgccacgacaaagccagtcatcgccacgcatatcgccaataaactgtaagttatcactgtactgatcgctccagaaccacggcggcggcagtagcggtagcggtagccctaacattgcggcagcggcaatttgcgcctggttattggcgttttcccagctttcgcagcggtgtagtgcaccattatcaagacgagtgattgccacatcgccaccggcaaagatcgcgggatcgcaggtgcggcaagcctcatcaatgacaatgccattggcagtatcaaggttggcctcgcgagccagttgctcgttggcgctgataccaataccgtaaatcaccacatcagcctgaagcgtttccccnctt

SEQ ID NO: 648 - DNA, 557 bp, Homo sapiens
ggggattctgttcatatacctggatggtgcctttgacctttgtgtcacttcagtgtcaaaaggaggatttgaaagggaagaaacggcaacatttgcactgctgtacaggttgagaaatatcctatttgaaagaaatagaagagtgatggatgtcatttctcgttcacagctttacttggatgatcttttttctgactactatgacaaacctctcagcatgactgatatttcactcaaagaagggacccatatccgagttaacttacttaatcacaacattcccaaagggccttgcatactctgtggaatggggaacttcaaaagggagacagtttatgggtgctttcagtgttctgttgatggtcagaagtatgtgagacttcatgcagttccttgttttgatatttggcacaagaggatgaaataaaatgaaaaatgaatacaccgtgttggtgttttaggtgcagttgtgccacaaaccttccctaaattatctaggtttgmwwtgatsmmttaaattaaaatgagaaaagcaaaaagaaaaaaaaaaaaaaaaa

SEQ ID NO: 649 - DNA, 1269 bp, Homo sapiens
aattcggcacgagtttgtattttgagtagagacagggtttcaccgtgttggctaggatggtgtctatctcttgaccttgtgatccacccgcctcagcctcccagagtgctgggattacaggtgcgagccactgcgcctggctggttttcatgaatcttgatagacatctataacgttattattttcagtggtgtgcagcatttttgcttcatgagtatgacctaggtatagagatctgataacttgaattcagaatattaagaaaatgaagtaactgattttctaaaaaaaaaaaaaaaaaaaatttctacattataactcacagcattgttccattgcaggttttgcaatgtttgggggtaaagacagtagaaatattattcagtaaacaataatgtgtgaacttttaagatggataatagggcatggactgagtgctgctatcttgaaatgtgcacaggtacacttaccttttttttttttttttttaagtttttcccattcaggaaaacaacattgtgatctgtactacaggaaccaaatgtcatgcgtcatacatgtgggtataaagtacataaaatatatctaactattcataatgtggggtgggtaatactgtctgtgaaataatgtaagaagcttttcacttaaaaaaaatgcattactttcacttaacactagacaccaggtcgaaaattttcaaggttatagtacttatttcaacaattcttagagatgctagctagtgttgaagctaaaaatagctttatttatgctgaattgtgatttttttatgccaaawtttttttagttctaatcattgatgatagcttggaaataaataattatgccatggcatttgacagttcattattcctataagaattaaattgagtttagagagaatggtggtgttgagctgattattaacagttactgaaatcaaatatttatttgttacattattccatttgtattttaggtttccttttacattctttttatatgcattctgacattacatattttttaagactatggaaataatttaaagatttaagctctggtggatgattatctgctaagtaagtctgaaaatgtaatattttgataatactgtaatatacctgtcacacaaatgcttttctaatgttttaaccttgagtattgcagttgctgctttgtacagaggttactgcaataaaggaagtggattcattaaacctatttaatgtccaaaaaaaaaaaaaaaaaaaaaaaaaaaaaaaa

SEQ ID NO: 650 - DNA, 691 bp, Homo sapiens
gggaatattgtaatacagtccagctagattctgggatagattaccggaaaagggaacttcctgctgcaggaaaactctactacctcacaagtgaagctgatgtggaggctgtcatggataagttgtttgatgagctggctcagaaacaaaatgatttaactagaccaaggattctaaaagtgcaaggcagagagctgcgcctgaataaagcctgtggaaccgttgccgactgcacatttgaagagctgtgtgagagaccacttggagccagtgactatttggaactaycaaagaattttgatacaatatttttacgaamcattccgcaatttactctggcaaacaggactcaaggtcgaagattcataactctcatcgataacttttatgatctcaaggtgcgtataatttgctctgcgtcgactcctatatcaagcttatttttgcatcaacatcatgacagtgagttggagcaaagcagaatactgatggatgawttggggctkarccaggattcagcagaaggactctccatgtttaccggagaagaggaaatctttgcatttcagcgcacaatttcccgactcacggaaatgcagactgaacagtactggaatgaaggagacagaaccaagaagtaactgccacttttgcataaataaaactctagacaaatggttaaaaaaaaaaa

SEQ ID NO: 651 - DNA, 604 bp, Homo sapiens
  misc_feature (528)..(528): n equals a,t,g, or c
cgcgtcgactttttttttttcaatttcaaggattacgaaattcttctgtcttagttacaaacaaaatgcagctatgaagcactgggaagtaaatgcaaaatatagaaagaatcttcatgattctcccaaactgtaagcacagctcacaaagtctcattgctttagaatgttttctggatgaacaagttaccagctgcaaaccgacttcagaagtgaggaaaatgttttctcatgtttcatgtagctgtcaaattttcaaaaatcctccatccttcaatcacccagtggggaaaatgtgttataaaacactgccccctggagtattctgggaggaatgtcttaaaaaaaaaaaaaaaacagcarggagaaagtactttcaaattctttactaaccactaacagaatttctaagaagcaaaagaaaaccacagaaaggaaatgtacatgaataaagttgagcaggatgtgtacaactttaaactgtattgtattcatgttgctaaacaatattggccttctcgatgattntattcatgttgctccaaagttaaccctgtagaactaagtaggtgaagagatattttgtataagtgccacagaagag

SEQ ID NO: 652 - DNA, 961 bp, Homo sapiens
  misc_feature (31)..(32): n equals a,t,g, or c
  misc_feature (923)..(923): n equals a,t,g, or c
  misc_feature (947)..(947): n equals a,t,g, or c
  misc_feature (953)..(954): n equals a,t,g, or c
  misc_feature (960)..(960): n equals a,t,g, or c
tagatagaacagatgttttgtgtgaaatttnntatctttaacttaatwaaccagcaggaactgtatgaacacaacacacccaactgacaaacagagagaactaacatgtttatttagctgtatgtatatatgcttaactacacccgaggaagctgtagagttagaaaaacatgaaccattaacagatgtggcctccctgcagaacttttactttgaaaaagaagtacgtctgaaccagattcacatgtttgatatttggatgcagagaaaatggggcagaaagcatcgcaacagttggctctgaaggacagcaaagaggtgcccgtcgtctgtgaggtggtcagtgaagctatagtccatgcagctcagaaactgaaggagtaccttggatttgaatatcctccaagtaaactctgcccagctgcaaatactctgaatgagatcttcttaatccatttcatcactttctgccaagaaaagggagttgatgagtggctgaccaccaccaagatgaccaagcaccaagccttcctgtttggtgcagactggatttggaccttttggggatcygacaagcaaataaagcttcagctcgcagtacagactctgcagatgtcttcacctcctcctgtggaatctaagccttgtgacctttccaatccagaatcaarggtaraggartcttcctggaagaaaagtagatttgataagctggaagaattctgtaacttaataggagaggattgcctgggtctgtttatcatctttggtatgccaggaaagcctaaagacatcaggggagttgtcctggacagtgtcaaaagtcagatggtgaggagccatctgccaggagggaaggctgtggctcastttgtcctggaaactgaagattgtgtgttcatcaaagagctgctcaaaattgnctgagtaagaaagacgggctgganagaagnnggcaang

SEQ ID NO: 653 - DNA, 425 bp, Homo sapiens
acatggaagcttttttaccaaataactgtgttgcatcatcctccagtttgcctggtgtccttaatcaatggaaggggaataagcaaactgagttttcttacaccttttgagtatagtgtttttgccatcatagatgtggctcctcataattctccaacttttatattaaaaaaccaaaacctcaaaaattgtagttcatgtcagtcagtgatgactcatcttagaaktattttgtttttggatgtgtgaatgtgcatagttcttaaagtccaacattcatgtaataagacatcttgcatataacaatgacccttacgtctaagatgttaaatagatcctaagcctggtataactttattcaagtatccttatttgcccctaaaatgtctttaatacacattacttgggttatytcttgaatgaac

SEQ ID NO: 654 - DNA, 419 bp, Homo sapiens
ggtttcaatgttttgtctgtgtctctctgattattttgcttgttgattggccagttgttaattctgtctttgtgagttgtctttttctcagtacttggcctatttgtctttgatttgaaaaagctctttatgttgtagtcattttaattcctgtcatatgttttgtaaacaatttttcgagttcataatttttcaatcttgtttgtattatattttgccacacaaaaattttaaatttgtatagtcaaatttatcagtctttttccttatgttggaccttctaatctcaaggtactaaatataatctagcatttttttaaacattaaaaatttttaatccatctataatttattttaggatagggagtgaggcaggggaaggtatctttttaaataaaaatcgttgctaaaaaaaaaaa

SEQ ID NO: 655 - DNA, 655 bp, Homo sapiens
  misc_feature (14)..(14): n equals a,t,g, or c
acagcctaactttncagctagacagaatggccattaagaatatttccaaaatccaagtttatcaaaattattttgtgggaaatcatcaatctattttattaatgttatgtgtttaattttggacttattttgggaaaaactgttcaaattgggtccttttaagcttattttaagcagcctagaaggaagaagctacttagctaatgaaagctgagacactttaataaaagcaggatcttaagagcattgtttttccttaaaaactttatactctcagataatctgcaacaacaaaaattaagaaatccctgacttttgtagaattcccactgtcaaattctcactgacttatgagtgtgagagaagttatcttttgtttgaattctgatagaacagtttaactcctttctaaggatataaaaaattcattggaaagtgtgtatatttcaaagactctcaattatctggactgaaggcactgttctcactatggccagatgaatgggagtattctgtacatgaatcatgctgtattttaaatcaggacatcacttaagtattaatgttgtgtgtacagatttttgttttgggattttttttgcctaaataaatgttataaattttatgtaaaaaaaaaaaaaaaaaaaaaaaaaaa

SEQ ID NO: 656 - DNA, 458 bp, Homo sapiens
  misc_feature (371)..(371): n equals a,t,g, or c
  misc_feature (427)..(428): n equals a,t,g, or c
gccctctcttccaatatccatgtctcatacactatggcttactgttgaaatccaactgggaagaagataattctttgagcaagcaatggtagattcaggctcctacagaaacagcattgatcatactgtggttcttcgagagaagctgcccatccgcagtaatatcttccctctgatgctggaaactgtcgacggccatccacttattaatggacccataactaaggaaacatcacctgtccaagttcaaattggaaaccatgttgaagagctccagtttgacattattcatgcaccacgataccctctgattattggaatccattggcttgagacacatgaccaaacataraatggartacccgcactgngtcctttctatcacgttatttgtcactacaattgcttcaggcacaggtgggaatannaagaaatccgtgatgaaataattttctggg

SEQ ID NO: 657 - DNA, 285 bp, Homo sapiens
  misc_feature (153)..(153): n equals a,t,g, or c
  misc_feature (162)..(162): n equals a,t,g, or c
  misc_feature (236)..(236): n equals a,t,g, or c
aaggctgacacaggagcaatcaagaacccaggagacggtggttgcagtgagctgagatcgcgccattgccctccagcctgggcaacaagggtgaaactctgtctcaaaaaacaaacaaacaaatgcatttaactattcctgtgtaacaaattntaaagggangctgtaaagtaaaggtttttcttatccaaacagattgctcttcttgaaaacagcagcctgyggttatgtcaganatgcaaacactgctgaaggctacagagagaagctggtaactggctgccg

SEQ ID NO: 658 - DNA, 1872 bp, Homo sapiens
aattccgattttatgccagttgcaccagcatgcagaatatttgtaatgcatttcaaagtggatataatggcaccctttgtcagaatcacaaagctcactgcggcactgctacaagaggacactgaggaaaatctggccctatgaacctagtcaaccccaagcaaaaagaatgactatgtgtgtgagtgcagcacatggccagttcgtttctcactgttttggaaagccctgtgtgccaaaccaaggacgtgtctttcagggaaaggttaattttccgaagtttattaaaatagaacttggaaaaccaagcattttgaatttattccagtcctctgggcatcattcctatttcttctgccatgtcaaggagaaattccaagcctgcattctgtcatgctaaaataaccagcccatacttctcggtgaccttctgttgaacgtacctgagcctgcaaatgtaaaaatgattgtatctgaatttgcactaatggtgtctgagagcaaaaagagtgtgacctctattggaaacctttgttcaaattcaataattcagagatgctacatacttctgcaagcttcctgattatgttcactgtaatattaatgacctaagtttgaatgtatttccttacagtccattaatttgacatccatcttttacctggggattattacaattgcaataagtcattaatgttttcttcacacagcttcttaaaccaagtttctctgcagctctttcggttctgcttacagtgtgtgggaaatctgatttttttcccctagtaatagtttgataagaaatttagtgtattgactgcctcagtgacacaatttatctttaaaggtgtggaagctggtggggaccaaatgttacctgtgtttttgctgttgattgctattttcagaagcaaaccatgtttttcacttacagtaggagtcaacaaatttgggattttagaagggggaggagggagctatttgtgtaagactgctgtcatatttgactacatattaaaaacagtaaatgagcattttgttttaatttcttaaataccttgtctttcaacatacgttttgtttcctttcttccattagtgttcaaaaggttctacccattgtggaagaaattctgtgtgcagaattcagaggcacaaggctgatggcaagattagaaagttattttgcttctaaacccaccccgatgtggaaactgatactagctagagggagctgtagaaaacaaagatttcaggattgcacagtgtgtgggcaatgggatggagactttttcccctattcccagccacagtgcccaagcgttcaagtcycctggatcagacagatgggattttagctgctgctttaaatcctagtgctggaataagtcaaggtacytcagttcagctcttgcctctgtcactaatcttgctttatgaactcctttgattttctgaataagttccagaaggttctctattattctgtccttcttccaaactggaaatggctgtatctaattctcaggatattttggatgtgtgcctcaggtaatttatgtggaatgtgtaaagcaagatgtctccaattctgaatattccttccccttttcccaatcctccactcttggactacctttataacaacaccgagtacgcacagacctgaacccatgcccaagaagcacacacaatgactggagctgtcgggaattcctgtcagtggcattccctgagcactggctctgtacaactcaattataattttttaagaatcatacctctgtatagatcttttggactgtactgattaaactttgatattgtggagtaaattcagaagtgcaattttaaaaaaaaaaaaaaaaaaaaa

SEQ ID NO: 659 - DNA, 840 bp, Homo sapiens
aattggaagggaccttaaagccctctaagaaagagttggttagtagcagctagaagccaggtcttccaaatcacagtcctaaatgatgaatgttgaatgatgcactatgtttttgtttaaatgagatttcctgaaaatagttaatttcagaattaagggaaattgatgtcgctatcatgaggcatcataaaaatatgtattttacaaggtgaaggcatttcaagtagatatagttcttgatgaagcaggaagaacatggatctgggatttggaagacctggcttctagctgctactaaccaactctgtgactctgggaaagggggactcagttcttacttctgtaacatgaggacaccggactatttgaattcagaacttagaaaattggaagggaccttaaagccctctaagaaagagttcgggaatgttctccattgctgtcagttttcctccaaaaataacctggcttggaagttattggtccagtgggaatttgattccccatagaaactggagaaaaggtaatgcaagtagagaggaacagctgtatttctgcttgagtaataaacccactaacagattctggtacgaattgtggagacataaagagaatgagtgtatgtactctaagtgtaccagtttcttcactctctcctggcagaagatgcaacacttttagtgattctgggattctgggatgtgttcctattaattctaatacagatgaagaagatgtggtagaggaaaagatggtagcagaaggagtgaataaagaggcaaaacagcccgctaaaaagaaaagaaagaagggtttgcgaattaaggggaaaaggcgtcg

SEQ ID NO: 660 - DNA, 823 bp, Homo sapiens
  misc_feature (4)..(4): n equals a,t,g, or c
  misc_feature (192)..(192): n equals a,t,g, or c
cggntttggagcatatacccaacttttctctggatgatatggtaaagctcgtagaagtccccaacgatggagggcctctgggaatccatgtagtgcctttcagtgctcgaggcggcagaaccctggggttattagtaaaacgattggagaaaggtggtaaagctgaacatgaaaatctttttcgtgagaatnattgcattgtcaggattaatgatggcgaccttcgaaatagaagatttgaacaagcacaacatatgtttcgccaagccatgcgtacacccatcatttggttccatgtggttcctgcagcaaataaagagcagtatgaacaactatcccaaagtgagaagaacaattactattcaagccgttttagccctgacagccagtatattgacaacaggagtgtgaacagtgcagggcttcacacggtgcagagagcaccccgactgaaccacccgcctgagcagatagactctcactcaagactacctcatagcgcacacccctcgggaaaaccaccatccgctccagcctcggcacctcagaatgtatttagtacgactgtaagcagtggttataacaccaaaaaaataggcaagaggcttaatatccagcttaagaaaggtacagaaggtttgggattcagcatcacttccagagatgtaacaataggtggctcagctccaatctatgtgaaaaacattctcccccggggggcggccattcaggatggccgacttaaggcaggagacagacttatagaggtaaatggagtaggtttagtgggcaaatcccaagaggaagttgtttcgctgttgag

SEQ ID NO: 661 - DNA, 541 bp, Homo sapiens
  misc_feature (7)..(8): n equals a,t,g, or c
  misc_feature (66)..(66): n equals a,t,g, or c
ggcacgnngggaggcccagggagaacggggaagggacatttagtttgagacggtgctgagataggntcatgaaggaagaggtgaagggaattcctgtaagagtggcgctgcgttgtcgccctctggtccccaaagagattagcgagggctgccagatgtgcctttccttcgtgcccggagagcctcaggtggtggttggtacagataaatccttcacctacgattttgtatttgatccctctactgaacaggaagaagtcttcaatacagcagtagcgccactcataaaaggtgtatttaaaggatataatgcaacggtcctggcctatgggcagactggctctggaaaaacctattcaatgggaggtgcatatactgcagagcaagagaatgaaccaacagttggggttattcctagggtaatacaactgctcttcaaagaaattgataaaaagagtgactttgaatttactctgaaagtgtcttacttagagatttacaatgaagaaattttggatcttctatgcccatctcgtgagaa

SEQ ID NO: 662 - DNA, 1655 bp, Homo sapiens
  misc_feature (1378)..(1378): n equals a,t,g, or c
  misc_feature (1444)..(1444): n equals a,t,g, or c
  misc_feature (1521)..(1521): n equals a,t,g, or c
  misc_feature (1606)..(1606): n equals a,t,g, or c
  misc_feature (1648)..(1648): n equals a,t,g, or c
agtctggagccggcgcgtaggagcgggcggccgggctgtgccctctcctactcctcaccgcgcgmgcggggaaccagtarccgcggctgcttcggttgccgcggtcggtggtcgttatggattctccatgggacgagttggctctggccttctcccgcacgtccatgtttcccttttttgacatcgcgcactatctagtgtcagtgatggcggtgaaacgtcagccgggagcagctgcattggcatggaagaatcctatttcaagctggtttactgctatgctccactgttttggtggaggaattttatcctgtctactgcttgcagagcctccattgaagtttcttgcaaaccacactaacatattactggcatcttcaatctggtatattacatttttttgcccgcatgacctagtttcccagggctattcatatctacctgttcaactactggcttcgggaatgaaggaagtgaccagaacttggaaaatagtaggtggagtcacacatgctaatagctattacaaaaatggctggatagtcatgatagctattggatgggcccgaggtgcaggtggtaccattataacgaattttgagaggttggtaaaaggagattggaaaccagaaggtgatgaatggctgaagatgtcataccctgccaaggtaaccctgctggggtcagttatcttcacattccagsacacccagsatctggcaatatcaaagcataatcttatgttcctttataccatctttattgtggccacaaagataaccatgatgactacacagacttctactatgacatttgctccttttgaggatacattgagttggatgctatttggctggcagcagccgttttcatcatgtgagaagaaaagtgaagcaaagtcaccttccaatggcgttgggtcattggcctcaaagccggtagatgttgcctcagataatgttaaaaagaaacatactaagaagaatgaataaatttacgtgatgagctctacaaggccaaaaattttttttcttatctacctgttatattgtgctaattttctatgtatgtgatgtgaaatgaagactatatatatggaatggaggtgacagaaagaaagaaattctttgtttgagggagacttcccctttctggattgtatttgtagagtgttacgagtgtatcatgtgattatgctttaccggtataagagattctgttgtgattatttgaatagttttatattaataaaagaagacmaaattttttaaatgttagaaaaagcagatctgtcattgcaaagtaacaaaaattttaagcttttaaaaatgtaagatttttcgtatttttaaaatttgaatctattttgagctttagntcagcagaattaaatttttacttgacattatcattaaaattgctaggtatggagaacaattcctgntttattttgaacactgagaaagaggtaaacttttcctaaaacactttatattataaaccgaaaaataaattgctagnttatattttaagatattaacatcatattttttaataatacctacatcaaatgggaaaatatctgaaatttttttttcattagcanggatttttctactagaaagtagtttaactactttcattttanaaccaga

SEQ ID NO: 663 - DNA, 1160 bp, Homo sapiens
tggcgctagtctgaccctccgccaggcaaaaggaagattgtctttggctatagagttttttttttaaagattactaaacatacaggaagtgataagaagtatcattcatcagaagcatcattcatcaatcaacttgaagaaaaaggtgatatattatttctttaaggtgctgtgtgatgtgttaagagcatattagaaggaatggttttgtctaattttcttcatgagttatggtggctgagacatcgagtctatattttggggcaaaaactaaacggcagcacaaaaggaaatctatattaatagaatattttgttgaacaaaggaggttagataagaactgcaaaccaacagactcagcaaacaaggaaagaaacgtgttagccataagacatgtttcaagtgaatcgaagtccaataactgtagacttcagaagaaaaaagttttcaaaaattttatcaaaacaggtcactgataaataactcctccagtaatagagctaggcctgaaaccaraattaattaaaaaattaacaaaacagattgaacctgaattaaatttcttttgataaaaaaacttattaaaaataatcaaaattttcctcaaatttttattaccttgtccaaagtaaagcaagtgtcttttagcattcatgccagcttttctcatgktctaggaatgacagaaaccttacttgaagcaaactagtatttttgttgaaaatgkatatcagcatcagttaaagttgatttttcagacctgctcctcagtaataatactagctagtcagcattcacgcctaccaggacacaaaaatcctcttcaaaactactcagaaaagaaagtcattactcaggaatgatgtccattcaggagaaatcaaaagagaattcctccaaagttactaaaaaaagtgacgataagaattcagaaacagaaattcaggattctcaaaagaatctagcaaaaaatcaggtccaaaggagactataaaatcacaggctaaatcttccagtgaaagtaaaataaatcagccagaattggaaacacgcatgagtacaaggtcatcaaaggcagcatctaatgataaagctactaaatccattaataaaaatacggtgactgtgaggggatattcacaagaatctacaaaaaaaaa

SEQ ID NO: 664 - DNA, 836 bp, Homo sapiens
  misc_feature (538)..(538): n equals a,t,g, or c
gaaggcctgagagacggcagactgagcagaattccttttttgagcacgagagcattactagaaccattgtcaaagcagtggcaagggacggagaggtcccaacaggagtcaggaagaggtttgattataaccaagaaaactcactatgctaggaatagactgtgtgcaccagtcccagacacttggcagaagtgtagcagcgttacacatgtgtgcgaasagatcgcaggttccacgccatctgcatggcctgcaggagcttctgctgctgaccccatgctgagtggccagtggggagcggcgcccggcaggctcttctggggtcgtctgtcctatccgtggattgtatatactcttctctgttaaggagtttttcccaagaagaaaagtatttaaaagaaataccagtgagtgccttaaagttggagaagtaactgcccatgcccagaaataaggatgccagtgcccagaagcagtgagattagtctgtgtccacaagcagaggccccctcgatgggagggagtggcaggcaggagnaaggtggcgctgccaggtgcccgggtctattggaggcgccccatctcagacttcctaacacagcctgtgtggaaggcagaacaaagaatgcatgcccagtcagaaatctgktctattctgctccaggaaaatcggaaacctgtgagtcagagtcagagaaacttacccaagcaacgtaattcctgttttcatgggtcctgtagatgtttgagtcaggaggtaaggcggggagttactaataaactctgccttttaaattgagcatcttggccgggcatggtggctcacgcctgtaccc

SEQ ID NO: 665 - DNA, 1188 bp, Homo sapiens
  misc_feature (1158)..(1158): n equals a,t,g, or c
  misc_feature (1162)..(1162): n equals a,t,g, or c
  misc_feature (1175)..(1175): n equals a,t,g, or c
actatatctggcctttataaacttttttgattcttgtcataacacttagcctaaaatgcaaatgtacagctgtagaaaaatactttatttctttatatccttattctagaagctttttttctattaatttttgtttgtttgktttgttttactatttacttctaaaacttttttgttaaaaaccatggcacaaacacacacattatgctaggcatacaaaaggtcaggatcatcagtctcactgtcttccacccccacttctcatcccaccattgtatctgctgtctgtggctgaccaaaacatcatcatgtagcacatgactagtgtggcaagtgctctgttagatgtaaggccatgatgctaaagcatcacaagagggcatctaacccagattggggatgtcatggaaggccgacatcctgagttgaatcctgcaaatgtaaaaaccaataggcaaagaagaggaacaaaaaggattccaggacaaactgaggtcacatctatgatccttgactttattgtgtctgtttaaagtatctacagtaacctgtatcaacttagtcagtgtattaatactaaatttagctccttcaaagcagttggaactatgtgctacataaatttcagcttcacacaaggaagggaaggagtgaaattagtgaacaggcagttacagcaaaagaaaaaacataaaaattgaatagctggctctggtgaaatgagcaaggactttagagtcaaactggcctggatttgaatcctgatcctcattgcttgtagctgtatgatctggacaaatgacagtaactgtttctaaccttgattttctcatctgtaagatgccaattgtaactcctaaggatactgaggattttttaaaatgcgtgtacagttcctgaccagtggtttgtgcctaataacttattacaaattattacccagtaaaaaccttgagacaagagtgaaaacgtaaagctaattaatccattacttgttagcaagcaaactacgtgcttgagaaaattactcaactttcatgttttacttccagacagtagtttgattaaaagaaaaaaaaaaaatccagcccaagcatggtggcttacaccctggcacttggaaggcccaaggtgggaaccataagcttggagccctancaanttttgaaaactanccctgggggcaac

SEQ ID NO: 666 - DNA, 1132 bp, Homo sapiens
  misc_feature (256)..(256): n equals a,t,g, or c
gacgcgtccgccgcctccggaactaaacggggtgaggtcacattcggttatctctaacgttggaaaacgatggagctaacacccattatggagattaaccacttttcatcaggtttttaacttaagtcgtgaggaatacaacggtgaacacaagattcattttattttcatcaccatgggacgtatcctgttgttgagttctctgggtcagacctctgaagacttctcagatggatcctagtctctgggcttgccntgaaattactcgctgctcagggagagagttgaaatggttggcatcctcccactctgttgctccggctgtgtcccctcgctctgttgttccagctatgtcccctctgttgctccaactgcagctcattctgttagagttcctcattcagctggtcactgtggccagagggtgttggcctgctcccttcctcaagtattcttaaagccatggatttttgtggagcatttttcttcctggctctcccttgagttattttcctttcttcgctatcttgggactcttctttgtgcttgcggwcatcggttgagagaaggacttcttcttccttgtctccttggtgttggctcgtggttgctcttcaacaactggactggaggctcttggttttctcttcatcttcaacaagtcagtctctctcaagggtctcacgttgcagcattcttaccagaggccattgggcctggagttccagttccagtgtctggagagtccacctcagctcagcaatctcatgccggttggcaattgtcagcagaagccgatgcctgcccatcagttctttactctgaggtgttagagtggaataaaaatataaatacttatactagttttcatgacttctgcttaatattgggtatttttttgttttgttttgttttggcggtgataggcttaccttacattaaaccaggccttagcctttctgtggctttgttatgcaaagcctcatattactctctagtctggttcagcaggacagtcaggtccacacctggggctgtttgttttctacgtttacctcaacataaggtaccttatcattgtcagccttcatctcctgatccaaaataaaataaaatgccacaggttacttga

SEQ ID NO: 667 - DNA, 566 bp, Homo sapiens
  misc_feature (283)..(283): n equals a,t,g, or c
  misc_feature (461)..(461): n equals a,t,g, or c
  misc_feature (483)..(483): n equals a,t,g, or c
  misc_feature (495)..(495): n equals a,t,g, or c
  misc_feature (519)..(519): n equals a,t,g, or c
aaaaaaaaaacaaaaaaaaaaaaactacttctaattagctcaatattaatattttaacaagttgggttggtaacagtatatctttgsscatgctggcaaattcttgttttgtcagcattttccataactctggccaaagtgtcacctgatgtggcaacgttttacagtcttgctattgtttcttgagtcctttaatctataagatgtatttttaaaaatatataacatataaattttgtttcgttatagctctttaaaaaaaaaaaaaaaaagggcgggccgntctagaggatccaagcttacgtacgcgtgcatgcgacgtcatagctcttctatagtgtcacctaaattcaattcactggccgtcgttttacaaccgtcgtgactgggaaaaccctggcgttacccaacttaatcgccttgcagcacatccccctttcgcagctggcgtaatagcgaanaagcccgcaccgatcgcccttnccaacagttgcncagcctgattggggaatggggacncgccctgtatcggcgcattaagcgcggcgggttgcggtggtttcgcc

SEQ ID NO: 668 - DNA, 1178 bp, Homo sapiens
atccagcggttgagtctggtgaggagtctttgcgagagcgaggagcagcggttactggaacaggtgcatggcraagaggagcgggcccaccagagcatcctgacacagcgggtgcactgggccgaggcgctgcagaarcttgacaccatccgcactggcctggtgggcatgcttactcacctggatgacctccagctgattcagaaggagcaagagattttcgagaggaccgaagaagcagagggcattttggatccccaggagtcggaaatgttaaactttaatgagaagtgcactcggagcccactactgacccaactctgggcaacggcggttcttgggtctctctcaggcacagaggacatacggatcgatgagaggacagtcagccccttcctgcaattgtcagatgatcgaaagaccctgaccttcagcaccaagaagtcaaaggcctgtgcagatggcccggagcgcttcgaccactggcccaatgccctggctgccacctccttccagaatgggctccatgcctggatggtgaatgtccagaacagttgtgcctataaggtgggcgtggcttcaggccacctgccccgcaaggkttctggcagtgactgccgtctgggccacaatgccttctcctgggtcttctctcgctatgatcaggagtttcgtttctcacacaatgggcagcacgagcccctggggctgctgcggggcccarcccarctgggtgtagtgctggacttgcaggttcaggagctgctcttctatgagccagcstccggcacagtgctctgtgcccatcatgtgtccttcccggggcccctcttcccagtctttgctgtggccgatcagaccatttctatcgtccgctgacctctggccacaggaagccaggtccaccgcccaccaccctttcaggccatgtttctactcagtgtgcttttcccaaatgatgtgtgtggtgtttctaagagaaacagggcccataaccagtgggcagctttaggagggatggggatctgtttcagatctaggcataacctgtaaatcacaggtgtccaaacttttggcttccctgggccacatttgaagaagaattttcttgggccacataaaatacactaacgatagctgatgagctaaaaaaaaaaaaaaaaaaaaaaaaaaaaaaa

SEQ ID NO: 669 - DNA, 924 bp, Homo sapiens
gctatagtctgtkaaatgtgcagtagcgttgtgtcttaaaaaatgtgcatactttaaaaatgctttatttaaaaaaaattctcctgatcatcttgagccttcagggagtcatgatctttttgctggtggagggtcctgcctctatcttgatggctgctgactgagcagagtggtggttgctgaaggtycgggtakctgtagcaatttcttaaaataagacagtaataaagttgccacatcaatgggactcttcctttcacaaaagatttttctggaagcatgggatgctgtttgataagcattttacccacagtagaacttctttcaaaattggagtcagtcctctcacaccctgccactgttgtactatgtttatcaatattctaaatcctttgttgtaggctaaacaatattcacagcattttcaccaggagtaaatttcatctcacaaaaccactttccaggctctttctggactgtagagttctttccaggctaccttgtggcagtttaagagtctggcatcattttccgctgggacctaaggatcgaggaggtgcttgtgactagactgccaatggacccatcacaaagtttaacccaaccttgatccccgagtcttcacaaatgctcactgaagaaaattcctagaacaattcagggtcctttcataacctctactctgaggygttaataaaaaaccttagtaacttaaaaaaaatgagctgtacacaaatactgaacaataatgctacatatgttaagtatgtaagaaaaatatatactttgacataaataagaaacggtgagttgataattggatagaatggtggatagagtgakagatatgtagtaaagcaaatataacaaaatgataattgtacaatctaagtggttggactataaatatgcacttcccacaac

SEQ ID NO: 670 - DNA, 813 bp, Homo sapiens
  misc_feature (791)..(791): n equals a,t,g, or c
  misc_feature (798)..(798): n equals a,t,g, or c
aggcgagtagcatgtgcgggagactcacgttgccggcgaagtgggagagagaaaagtgggggtgaacacactgtggggtagcttcgagatcagcaatgtgagactagcccgggtcatgctgacacagtttgccgaggggcggctggaagatcaactggacaaatatgatcactgggctgaccgctttgaggacctgcccctctatttcatgactttccatggacagcaaagcatcaggactgtaatagatacaatgcaacatgcagtctacgtctatgacatttgtcatgtgatcatcgacaacctgcagttcatgatgggtcacgagcagctgtccacagacaggatcgcagctcaagactacatcatcggggtctttcggaagtttgcaacagacaataactgccatgtgacactggtcattcacccccggaaagaggatgatgacaaggaactgcagacagcgtccatttttggctcagccaaagcaagccaggaagcagacaatgttctgatcctgcaggacaggaagctggtaaccgggccagggaaacggtatctgcaggtgtccaagaaccgctttgatggagatgtaggtgtcttcccgcttgagttcaacaagaactccctcaccttctccattccaccaaagaacaaggcccggctyaagaagatcaaggatgacactggaccagtggccaaaaagccctyttytggcaaaaagggggctacgacacagaactytgagattkgytcaggccaggccccmactcccgaccagcagacacctncaagcgntcaaagtgaaggccg

SEQ ID NO: 671 - DNA, 1718 bp, Homo sapiens
ggccgggcatcgcaggcgccctcctcgggcctcccggccgggggcgccaacggggagagcccggggggcggcgccccctttccgggcagcagcggctcttccgccctgctgcaggcggaggtgctggatctggacgaggacgaggacgacctggaggtgttcagcaaggatgcctcattgatggacatgaactccttcagccctatgatgccaacatcccctttatcaatgataaaccaaatcaagtttgaggatgaaccagatttaaaggatctcttcatcacagttgatgaacctgaaagtcatgttactacaatagaaactttcattacgtataggattattactaagacatctcgtggggaatttgactccagtgaatttgaagttaggagacgatatcaagatttcctttggttgaagggaaaactggaagaagcacaccccactctgattattccaccattgccagaaaagtttatagtaaaaggaatggtggaacgctttaacgatgacttcattgagacacgcaggaaggctttacataaatttttgaaccgaattgctgatcatccaactttaacatttaatgaagacttcaaaatttttctcactgcacaagcttgggaactctcttctcacaagaagcaaggtcctggcttgctaagcaggatggggcaaaccgtcagagctgttgcgtcctcaatgagaggagttaaaaaccgcccagaggagttcatggaaatgaataactttattgaactatttagccagaaaataaatttgatagataaaatatctcagagaatttataaggaagaaagggaatattttgatgaaatgaaagaatatggcccaattcatattctgtggtcagcgtcagaagaggatctggttgatactctaaaggatgttgccagctgcattgacagatgctgtaaggccactgaaaagcggatgtctggactctcagaggccctgcttcctgttgtacatgagtacgtgctttatagtgaaatgttaatgggtgttatgaaaagaagagaccaaatacaagcagaactggattccaaagttgaagttttgacctatwaaaaggcagatactgatctgcttccagaggagattggaaaacttgaagataaagtggaatgtgctaataatgccctgaaagcagattgggagagatggaaacaaaatatgcaaaatgatatcaagttagcatttacagatatggctgaggagaatatccattattatgaacagtgccttgctacgtgggaatcattccttacatcacagaccaaccttcacttggaagaagcctctgaagataaaccttaatcccattgaggacttctgtttgatctttgggagacagcatttattaaccaaagttattctttctggatctgccgtgtccttataaagtggatgaaaaatgttttgtacccatctggaaaaccaacaacttgaaatctcaggtattccaggtcactgacatgaatttgaagatatatctatctgtatggatatatatctatatgtatatagatatataaatacagagagatatctggcttggttttaattatgttcttaaatttgtgtgccaataattgcatatagattttttttcttaaatatttgactgtggaacatgccattttaaatatgttgtaaggactgttttaataaaaagtttagtatgaaaaaaa

SEQ ID NO: 672 - DNA, 1114 bp, Homo sapiens
gcggcggcggcgcaggggctggtacgcgctgggcggcgagagctcatggcggaggaagagagcgaccaagaggccgaacgcctcggagaagagcttgtggccattgtggagtccccgctgggccctgtggggcttagagctgcgggcgacggcagaggcggcgctggcagcggcaactgcggcggcggcgtcggaatcagcagtcgggattactgccgacgcttctgtcaggtggttgaagattatgctggaagatggcaggtccctttgccacagcttcaggttcttcagactgccctttgttgttttacaacagccagtgcatcattcccagatgaatgtgagcatgtacaatatgttttgartagccttgctgtgagtttctttgagttgctgctgttctttggaagagatgagttttatgaagagcccttaaaggatattcttggatcattccaggaatgccagaatcacctccgcagatatggaaatgtgaatctggaactggtgactcgaatcattagagatggtggcccatgggaagatccagtgttgcaagctgtccttaaagctcagccagcatctcaggagatagtgaacaaatatttaagttctgaaaatccactgttctttgaactacgtgccagatacctaatkgcttgtgaacgcatacccgaagcaatggctcttattaaatctkgtataaatcacccagaaatcagtaaagacttatacttccatcaagcactcttcacatgtctgtttatgtcacctgtagaagatcagctattccgggaggtattgtttgagactatttttgcctattaccattttaaccctaccaaaaaaaaaccaaaaaaaaaaagtagcccactgttgttgttaaattccttttacagtaatgccaaagatttaaggattacattatctggatgtgttttcttttggcaccataacttaaggtcatgttgaattagtcaaaatctgatattaacaaatgatgaaatcaataaaatatactcattaataagtattattcacattgcacttttgatgtgatggagaagaggtcaaataaaagtcaacaagctcacagcttgccaggagtaaaaaa

SEQ ID NO: 673 - DNA, 341 bp, Homo sapiens
  misc_feature (25)..(25): n equals a,t,g, or c
  misc_feature (50)..(50): n equals a,t,g, or c
  misc_feature (70)..(70): n equals a,t,g, or c
gattaaaaggatggctcttcctaangtaatttactctttgttggttttangaaatcttttgcatgtatanggtataaaacaacaactgtttatatgttacttccattagccgatgaactagyggktaaatgatgcttcaaatagaaaataagttaattccactaatagattgtgttttcattaaagtcataaacatgaaataacactttacaaagttcattttgttgagtatcttgcattactgtgaattatattgtaaagtagtttaaagtttaacattaaagataaaattattatttttgctgttatggtatgaataaaaaaatttgattaacttttaa

SEQ ID NO: 674 - DNA, 285 bp, Homo sapiens
accatggcagtacacaggccgccgccaatctgcttaacaccaaccagcttgacgcgcgcagctttcaccatcgcgtcagaagcctcaatcagtgcaaccaggccccgggtttcgatcattcctaatgcttccattgtsctttcctctttatcagggtccagaacgggaccgttcattcaaccagtgtttgtaaactgctttcgcggttcactwctgtctgacgcggcacagctgccaccagcgccagctcgataatttcctgcacgctacaaccacgagagagat

SEQ ID NO: 675 - DNA, 631 bp, Homo sapiens
  misc_feature (581)..(581): n equals a,t,g, or c
  misc_feature (589)..(589): n equals a,t,g, or c
  misc_feature (608)..(608): n equals a,t,g, or c
atgaaaaataacagattatatatagtttgaactatttttcgtgtgcttttttaaacttgttaaaaagaaatttatataaaatttaaaatacaaatgttaaattatccagaaatacagaatagttaatattgctagaaccaaataacctctaaaatgtttttattttggtaattttgtcatgctaagcacttttgtatctgcacaattcagtaggttaagaatcaatcttctttttcttaatagtacagcagactttagcttcaagtttcataggcttagtacttatatctagacatttgtgtctaaataagcttttcattaactttttattttaaggacagtatcttttcatgaaagagtatttggctgaatgtttgctatatatatgttacttgaaatgttaaatttaatatgcagcataccataggtgtatatataggtatataattttaaggttaaaatattcagtctacaagtttggttccttatttaagcttttgggctaatactgcatatggcacaatgttttaatattggcaakttcatctcararaaggggatcaratatawttttaaagttnaaaaaaanttactgaaacctccccctnaaaagcctacctttatttaaacc

SEQ ID NO: 676 - DNA, 1529 bp, Homo sapiens
aaaatttgctgtaataccaaaactaacctcatcaaagatacagaaaaaaagaaatatagtgagccctaaaggacacatacattgaataaataattggaacatgtggttatctttagatccacatcttagctgtcatttgttcactctaaaactgatgttcatctttctgttaatttccctctgcctaaagactacatgacagaaatgacctatcactacttattatttctgaagcctaactgcaagactgatttctgagaacaagtaaagaactggaatacttatttttcatataaaaatctaaatgtgttaataaatcatttcatacaaaagtacattattaaataaccacattattaaaataattgcaagaaaatggaccatatttacaatgttttgtaaacttgctagtgtgtggatatgtaccctacttgtgaaatacatttgaagatataaagagcagccaaaatgatggcaaaatggtaggctaatattttctattattattggagaacatatcatattttggaatcatgcaattttgcacacagtgaaaccattaattttccaaggtaattcctttagaatatggtattggcatgcagtttcttacttatctagaatatttggcttatctgaaagatatcaatttaagatctctggaagtgttagaatttttgatccttcacagtgtcaatatttaatgaatcactaagctttatttattagacgtgttgagtgagtgctgagttccttgctgccacttttgttaccattgtcacacactatgtgtaaaccagtcccaccacttattactaataaaattttgactgataatttatatttgcacttacaatatatatatcctgtccttatatttctctagagtacattttccatcatgtttaagtgtatttctgctattatttcctctcctgcagaatacatacaagtgtatgtgtataaagtcatacatgtacaagcatgcatattgagattgaatcacatttccatactgtctgttattttattgggktttatattgggtttctttagtttatgttgttttctcaaaagcagcattttaaattacgratactggacttattggatttaattataaatccaattactactggaaactcatttttacataatatagtccttaaattatttaacccttgctaagtaattgacatatgtaacaataactagcctaaagaaacscwaaaaaagtatctctcccgagctgaaacttaaaaattcgtaagtgtaagaaagaatgtgagaatatattaaatgcacactgtaccattagatgaaatcttacttgagaaattgccataagccatattacagatcttactttgttactgaatcagattaatttcttgttataataattttcatcataaattttctatttttaaagccgctggtactagaaatattcttttaatgctatatctatgtacctactgacacatttttctccataaaagtacttttaaaaattacttcatgatttg

SEQ ID NO: 677 - DNA, 1020 bp, Homo sapiens
tcgacccacgcgtccttaagtttttcaagttatccttttctgaggaaaattattctagaggaacctaaaaagggacaaaaaaattgaaacttcttaggagtctaatcttggtgccttctgttaaaagtcagtgtatcagaaaagaaagcagccatgtaagaggctaacttaartagaagtgctagaaatatctttgtgtattaacatgcaataaaaggtaccattcaaagcagggggaaaggtaggaagaagaggtaatttttactgaaaattagggcaatgttggtcgccttttattaaaagctttttttaagctttcataaagattgctttttgctatttttgaaaatatggtattatagtttgtatggtaactggtcatatatgacagtctactgcatatatatgaatgactaggattaatctggtgtgtttacataggatatacatagttgaaatctagcatgaaaggttaaaaaggagatactgcacaatatttcttaaaagtaaaatgctgttattgtgatgagtctttggtttaacatcacagtattctgtgatgtctttttaactttttggaaagaggtatcatttgtagaaaaaatttgatttgggttaaatataggtttttaaaactataaatgttgtcttttttatatttttatgaaaaagcagtagaaaattacttttgaagaaaacaggctatttaaatattgaaatatatgtatgttgtgagtttaaggagcctgtaattgtcagttttacaaaaccatctgtgttcaatggttgtaaataaattctcaaaacatcatttcaaaggctgcctacagaatattatcacttgacagatagagttaataaattaccaatcaggcacattttataatgtttgtctctgtaaaggtaatattagcagttaaagaacacggatgagaaaagaatgtgttacataggttgcatcacttgcagttaaataaaactcacaatttgtgctcacagcaaaaaaaaaaaaaaaaaaaa

SEQ ID NO: 678 - DNA, 810 bp, Homo sapiens
  misc_feature (9)..(9): n equals a,t,g, or c
  misc_feature (793)..(793): n equals a,t,g, or c
ggcacaggncatttttaagtgtttagagttttttggggtttggggtggttttttttccttgttttccttttttccttttaattggatgcactgacctggcccaggaaatgaagagattctcttttgatgctattaccaatgttatcataaagtgacagtcacctgtaacaaaaaggtggcaccagacatgatcactgatgttttatttgcacatcaatatttttatttttgtattctggctcagctgcttctctgagtggagttaaggaatgagccacaaagatttttgtagtaggtatattggcattgcattttatattcctctatatttaattttgaaaacctaaaagaaggattgtgcatcttgagagaaagttgagcaaattgtgatctagcggaatgttaatttgtgctgcttcttgtgcacgatagcagcagtagtatctctcttggaaataaacatcccatattatgatgtctatgaatataggtttccttttcttccttccctccctccttcccccacctttctcttttttttttctctctcagcttctcttttcctccttccctcttcccttcctctttctttactttttttgaaatcacttattgtaaataagttgtaatccaaacctcatgtatcaatggggaattttcaaatataaatattaccaatgcattttctggktggtggctgatttttgattgaagataatgagaatgacatgtctggtgctttkggttgaggactcgcttagctcataaactttkggattttagaattcawtgnttaacccggaaaaggcc

SEQ ID NO: 679 - DNA, 2501 bp, Homo sapiens
taaatatgcatatagtagagtgcaaaaatatagcaaaaataaaaactaaaggtagaaaagcattttagatatgccttaatttagaaactgtgccaggtggcctcggaatagatgccaggcagagaccagtgcctgggtggtgcctcctcttgtctgccctcatgaagaagcttccctcacgtgatgtagtgccctcgtaggtgtcatgtggagtagtgggaacaggcagtactgttgagaggagagcagtgtgagagtttttctgtagaagcagaactgtcagcttgtgccttgaggcttccagaacgtgtcagatggagaagtccaagtttccatgcttcaggcaacttagctgtgtacagaagcaatccagtgtggtaataaaaagcaaggattgcctgtataatttattataaaataaaagggattttaacaaccaacaattcccaacacctcaaaagcttgttgcattttttggtatttgaggtttttatctgaaggttaaagggcaagtgtttggtatagaagagcagtatgtgttaagaaaagaaaaatattggttcgcgtagagtgcaaattagaactagaaagttttatacgattatcattttgagatgtgttaaagtaggttttcactgtaaaatgtattagtgtttctgcattgccatagggcctggttaaaactttctcttaggtttcaggaagactgtcacatacagtaagcttttttccttctgacttataatagaaaatgttttgaaagtaaaaaaaaaaaaatctaatttggaaatttgacttgttagtttctgtgtttgaaatcatggttctagaaatgtagaaattgtgtatatcagatactcatctaggctgtgtgaaccagcccaagatgaccaacatccccacacctctacatctctgtcccctgtatctcttcctttctaccactaaagtgttccctgctaccatcctggcttgtccacatggtgctctccatcttcctccacatcatggaccacaggtgtgcctgtctaggcctggccaccactcccaacttgacctagccacattcatctagagatggttcctgatgctgggcacagactgtgctcatggcacccattagaaatgcctctagcatctttgtatgcatcttgatttttaaaccaagtcattgtacagagcattcagttttggctgtggtaccaagagaaaaactaatcaagaatataaaccacattccaggctgctgttttctctccatctacaggccacacttttactgtatttcttcatacttgaaattcattctgctattttcatatcagggtacagacttataagggtgcatgttccttaaaggtgcataattattcttattccgtttgcttatattgctacagaatgctctgttttggtgctttgagttctgcagacccaagaagcagtgtggaaattcactgcctgggacacagtcttataagaatgttggcaggtgactttgtatcagatgttgcttctcttttctctgtacacagattgagagttaccacagtggcctgtcgggtccaccctgtgggtgcagcacagctctctgaaagcaagaaccttcctacctattctaacgtttttgccctctaagaaaaatggcctcaggtatggtatagacatagcaagaggggaagggctgtctcactctagcaaccatccctccattacacacagaaagccctcttgaagcaaaagaagaagaaagaaagaaagcttatctctaaggctactgtcttcagaatgctctgagctgaatgctcttgctcctttcccaagaggcagatgaaaatatagccagtttatctatacccttcctatctgaggaggagaatagaaaagtagggtaaatatgtaacgtaaaatatgtcattcaaggaccaccaaaactttaagtaccctatcattaaaaatctggttttaaaagtagctcaagtaagggatgctttgtgacccagggtttctgaagtcagatagccattcttacctgccccttactctgacttattgggaaagggagaactgcagtggtgtttctgttgcagtggcaaaggtaacatgtcagaaaattcagagggttgcataccaataatcctttggaaactggatgtcttactgggtgctagaatgaaaatgtaggtatttattgtcagatgatgaagttcattgtttttttcaaaattggtgttgaaatatcactgtccaatgtgttcacttatgtgaaagctaaattgaatgaggcaaaaagagcaaatagtttgtatatttgtaataccttttgtatttcttacaataaaaatattggtagcaaataaaaataataaaaacaataactttaaactgctttctggagatgaattactctcctggctattttcttttttactttaatgtaaaatgagtataactgtagtgagtaaaattcattaaattccaagttttagcaaaaaaaaaaa

SEQ ID NO: 680 - DNA, 429 bp, Homo sapiens
  misc_feature (369)..(369): n equals a,t,g, or c
  misc_feature (380)..(380): n equals a,t,g, or c
  misc_feature (410)..(410): n equals a,t,g, or c
  misc_feature (415)..(415): n equals a,t,g, or c
ctcacttcgggcatgtgatcctgggtatcaggtgttacattatatagtattttacagaggaagtagctcagcaaatttaactggcctcagagtctgtggttcagttggtttgcacagggctaaaagctggtgagtgggttatacaccatcacaaaggatgcccattcttcgcagtgactgcagatgcgtgcggacggagagcacaaggatctcactatcatttctccctgctaactcctagaaagctttccactttcttggacacgttatttaaagtgttatagtttgtttttttaaacttgtgttcagaaaacacttaccaccatattgcttcactgtactattccaattcagctcctctgttacccnaactctatatngtgcttggtaaactattccatgaaatttantaccnggaagaaattaggc

SEQ ID NO: 681 - DNA, 1482 bp, Homo sapiens
cagggcactgagtgattctggatgggcttctgacctggggacaatttaaacagcattacaaccgacattttggttttcttggggattttataggccaggtacaaagcagaaagtgcatagaagatgtgatccactttgcctgggaagagaagctctttctcctggctgatgaggtgtaccaggacaacgtgtactctccagattgcagattccactccttcaagaaggtgctgtacgagatggggcccgagtactccagcaacgtggagctcgcctccttccactccacctccaagggctacatgggcgagtgtggttacagaggaggctacatggaggtgatcaacctgcaccctgagatcaagggccagctggtgaagctgctgtcggtgcgcctgtgccccccagtgtctgggcaggccgccatggacattgtcgtgaaccccccggtggcaggagaggagtcctttgagcaattcagccgagagaaggagtcggtcctgggtaatctggccaaaaaagcaaagctgacggaagacctgtttaaccaagtcccaggaattcactgcaaccccttgcagggggccatgtacgccttccctcggatcttcattcctgccaaagctgtggaggctgctcaggcccatcaaatggctccagacatgttctactgcatgaagctcctggaggagactggcatctgtgtcgtgcccggcagtggctttgggcagagggaaggcacttaccacttcaggatgactatcctccctccagtggagaagctgaaaacggtgctgcagaaggtgaaagacttccacatcaacttcctggagaagtacgcgtgaggacgcctgagccccagcgggagacctgtccttggctcttcctcccaatgcccgtcaggctgaactcgcctcccccgtgactctgcctcgggcctcgcagaggccgctggtcacttcgtcatcattttgcccctggagacgtctttctttgtgccttgatgttgagagcgcctctcttttgagcaaacaagcattctatatgcaaccagagtagaggggacctgctcagcaggtgtgaccagggttctctgaatctgttattgtttttgcttctggaaagttcatttggggtttacaacaactaggatgtgttgggtgagatgtttcagatctggagaaatgagcaggtgtcgggaaatgtgtgacttaaccgtggtgagggctggaaatccaaactcaccaccatgatctgtggcatcaggcttctcccagtacaggagggtgccatcccccagcatgcggcttctctgccattagcagccctgggcgggccgaccacactcgaggctgcggtgctacgggcttagcctcgcctccctcactgggagcttccccatcctccctgccttccccagtgggaagttagggaagctcaggagcctgggaccccgcatgtcccaaaatgggattggagaag

SEQ ID NO: 682 - DNA, 607 bp, Homo sapiens
  misc_feature (499)..(499): n equals a,t,g, or c
  misc_feature (585)..(585): n equals a,t,g, or c
  misc_feature (596)..(596): n equals a,t,g, or c
aattcagcacgagatgtcacattgaagaatttcttcatgatacattttcaggcacacttgtaggaaaattaggatcatgagtcctgctttaagtatttgcagtgtagtaagagaatccatcttttactaggagaccagattccttttatacctcattcatcatgctggattgtaataaatttcagattttggaatgggcttatttaactgacctaacaatcttgatgatttccattagaataacttattctaaggtcaaaagtggaaagacactgttggtttttattttgatttcactatactcatttttgaacatggaaatacagtggtgaaaccmcttatgcaaaaatgataacagtgaggaaattatgacagtgaaagagatctgacctaactatctatcttgcctcgaaactgcccttggtcgttcctgagtgtgggccaagctaactttgggagaaatttactttataggttaaattataatagcccttccccnaaactaaacggattctcctgcctcagcctcccgagtagctgtccttataataccatcagcctatcatttattcgtcatggtatggnttggttcccanatcccctatcc

SEQ ID NO: 683 - DNA, 470 bp, Homo sapiens
  misc_feature (389)..(389): n equals a,t,g, or c
  misc_feature (469)..(469): n equals a,t,g, or c
ccattcaacccagtacaaaatccaactgaagcccagcaagtggctcatgcctgttctatctctgaggacagttgtgattggatttagggcccatccagttagtccaggatgatctcatctcaagatcctaaatctgattacaattgcaaagatcctttttccaaataaggtcacatgcacgtaagttccggggattatgcttgcgtgggacacatcttttttgaggccaccattcaacccactacaaaatccaactgaagcccagcgaagtggctcatgcctgaaatccccgcactgtgcgaggccaaggcaggagggtcacctgaggccaggagttcaagagtagcctgggcagcgtagggagrtcckcatctcttttttttttcganatggagtttcgttcttgttactcaggctggaatgcaatggcgcaatcttggctcactataacttcctcctcctgggttcna

SEQ ID NO: 684 - DNA, 1110 bp, Homo sapiens
ggcagagctgttttggagattgattgggtgggtctagagccagaattcatatttttaatatgcattccaggagactcctgcgaatcagatgcatttggaaatcattgcactaagtcatacctctgggtactccaaacagctagtcctgaggcttccttgggccttagaattttttcttcaaatgtcctggtgaggtccctctcaatcctttggggctggctgtggtgagtcactcagaagtctggctgtgacctgggatgggctcaccagagtacgctatggtagtgggaaaacaggcagagagaaaggagtgtcaggagcactcccagggaggctgttgtagatatttccattcccagaacagtgatctattgtgacagtctcagaacagacaacaagaattacaggtaattttctcattctcttgatatatttttagcaaaacttaaatcatgaatagaaggaaaagatgccattggggaaatagaaaaactcaatcattttataaagcatacaaatcataaggatgactggccaatagcactcccactttggtcttacctaaagttgggtggacaagaataataaaagtcctcaktttatatccttccaaaatcagatttaaatgctgccagcatcttaatggaagtctgaaattgattgataggatgtagaaatccaaattcactaaaatagggggccagctacataaagtcctagaaggaaaaagtgcctcgcttttttctgccattatcctaccccctagtcatctggggaattgatctatgaagcttgaagaaggggcatttaacatcagagtggtgcaagggcagtgttgagatgctttaagcagcagcctgagctttagcactatttgaaggggagaaggttaatactaataatatttgtgttatttttatgatatattactgtttacagaacactttcatttgatcccaacatcaactgctgtgatagaggcagggcagatgttgtggtctcattacatagaatgtaaaactgaggttgaaaaatactaagtgacttgtctgtagtcaaatggtttttaaaattataaagccaggccttctgactgtcaaaaaaaaaaaa

SEQ ID NO: 685 - DNA, 250 bp, Homo sapiens
  misc_feature (245)..(246): n equals a,t,g, or c
ggcacgagcggcacgagctagttcctaatcttaatctagcttcaacattgccctgcttgcaaatttactaccttttaaaatgacttgaatcttctctattttcacagttcttgtctattttttccctgtaacagtttgtatgaacactaatgtggtgttcaaccctccctttcaattttagagaattggattctatattggaacgtcacttaaatttttgagtcctcaaaaccaaccttgttggnntggg

SEQ ID NO: 686 - DNA, 692 bp, Homo sapiens
  misc_feature (50)..(50): n equals a,t,g, or c
  misc_feature (73)..(73): n equals a,t,g, or c
tgggggctctggactgtggctcacccgcttcctccacaccctatttcacnggcctggagctcccaggggactngaagctggacgcgccctacaacttcaaccaccctttytccatcaacaacctaatgtmagaacagacaccagcacctcccaaactggacgtggggtttkggggctacggggctgaaggtggggagcctggagtctactaccagggcctctattcccgctctttgcttaatgcatcctagcaggggttgggaacatggtggtgggtatggctggagctcacaccacgaagctcttggggcctgatccttctggtgacacttcacttgtcccattggttaacatctgggtgggtctattacttactgtgatgactgstgtctcagtgggcatggtgttgatccacggggtactgtgataaccaccatgtgccatgatggctgctgcagccccgtgttggccatgtcgtcaccattctctctggcatgggttgggtaggggatggaggtgagaatactccttggttttctctgaagcccaccctttcccccaactctggtccaggagaaaccagaaaaggctggttagggtgtggggaatttctactgaagtctgattctttcccgggaagcggggtactggctgtccttaatcattaaaggtaccgtgtccgcctcttaaaa

SEQ ID NO: 687 - DNA, 362 bp, Homo sapiens
  misc_feature (356)..(356): n equals a,t,g, or c
ttgatacgactcactatagggaaagctggtacgcctgcaggtaccggtccggaattcccgggtcgacccacgcgtccgattgttttgtattttctagagttttatataaatggaattacatagtatgtacttttctttatagtctggcttctttcactcaaataattattttgagattcttctctgttgttgcatgtataaataattcattcattttttgtagtaatatcccattatatgggtataccaaaatttatcattcatttgctgatgagcatttgggttatttacagttttatttacaawtaaagctgttacgaatattagtgtacgagtctttatatggacatatattntcattt

SEQ ID NO: 688 - DNA, 334 bp, Homo sapiens
  misc_feature (87)..(87): n equals a,t,g, or c
  misc_feature (91)..(91): n equals a,t,g, or c
  misc_feature (326)..(326): n equals a,t,g, or c
aggattcaggctgcagaacataagacacggaaagacgaaaaacgcaaagctgaggaagccctcagtgacctcagacgtcatatgaanctgnaagtaggagatctgcaggtgaaccattaaaaagctaagaaagctcgaagaacaatcaaaaygcgtaagtcaaaaggaagatgtggctgcattgaaaaaacaaatttatgatttatcaatggaaaaccagaagttaagaaagaccttttagaagcacagacaaacatagcctttcttcagagtgagttagatgctttgaaaagtgrttatgctgatcmgagtctgawtactgaaanggatcttg

SEQ ID NO: 689 - DNA, 613 bp, Homo sapiens
  misc_feature (571)..(571): n equals a,t,g, or c
  misc_feature (583)..(583): n equals a,t,g, or c
  misc_feature (590)..(590): n equals a,t,g, or c
  misc_feature (601)..(601): n equals a,t,g, or c
gcaggaagggtagaggggactggagttggctaagttctctttctccaagtcaggtaagactctggtgcagctttttcctttggtggtctggcctttattgtggaaaatgctatgggttcatttcaaaatggctatctttcaaacctgagcatatttcaaaatagttacttttttcctgcccatggtcaaacaagagagttttcctctgttcttcgccatgagaacctggtagggcatctgaaggtaaaatccgtgaatgtatgagggctgcctttaacttaaacttgaaacctcccaggggattttatctcacaagcctgatcagtgttcaagytccaacagytaatcaattatcatttaagcattcttagctgctcatgcctccagcagtttcaaatcctggcaaactatgattctgtgtatttgcccctcgctccagtttttggggcatgagtttttttctgtaacttctggtctctgatggatctcagaaaattcattaattttcaatttgtacatcttttctcttggtaggacaggaatgatcatttacaagctctttatatgtcanagcccaaatcanaagctgnaataatcccanaaattggggttt

SEQ ID NO: 690 - DNA, 400 bp, Homo sapiens
  misc_feature (362)..(362): n equals a,t,g, or c
  misc_feature (375)..(375): n equals a,t,g, or c
  misc_feature (378)..(378): n equals a,t,g, or c
  misc_feature (388)..(388): n equals a,t,g, or c
ggaaccaggctgtggtcctgacctccagcagctgccagtcatcttggcaacatagaaaatcaaggaaacggcctaaaggcaggcagaagtgtgtgtcagcaaggtcccaactatgtaagatggacacgagggactcaccttcagggaggaaagagccggggcagaacgtcaggagactggccaaaggtccttccctgccttcaggacgagactagactcctcagtcctgcatttmaggctcctgccacccgcctgctgctcactgatccctccctcccactgtcggcctccatccaggtggcagtgcctgcgctttgtmaggctctctcttgtctctgcattttgcacaagctctgacctanttaccgaaatgtnctncaaccacctncatcctgcatgt

SEQ ID NO: 691 - DNA, 585 bp, Homo sapiens
caaagggttttctttgaagacaggtsaaatgctgttagtaagtttcaggagattgttaattcctcagttataccagattttataaaatatttgagaatagatggctaacaagaggttagaaatacttttccttaattttaatccacagtatgttacatgcattctaccactacattttggtgctatttaaggtgtgcamttttctataggtgacttttgcaattcagggaagatttgggcatattaaatgaaagaatatctaattgggggaggtgtgaagggaaagaaattcttttcaaaagctgaccacaaagagkagttaaaagtttttgtcactatcttcacaagtgtgtaaagcacagatttcaacagagtgcttggcatattgkagggtgctcaatggtggkttttattattattactcagattccacagtggcaagaaacatcattctacataatggaaaacatttacatcaaatcccacttactttaatgcgaacttggagataatttatggtattgtattgtaaaccattaatgaaaactttttcacagttgagtgaaattaaaatcactatatctc

SEQ ID NO: 692 - DNA, 610 bp, Homo sapiens
  misc_feature (35)..(35): n equals a,t,g, or c
ggggtttattacctatgggtttatatcctcaaatncgacattctagtcaaaagttttggtaatatamccaakgttttcaaatgtattctgtyatacaaagagcagatttttattgaacttgtgcaataactatattaccatacaatataaatattcatgaatagtttcccaagtctggagcgaccacatagggagaaaatgtaaatgtctcaatttttgttcacaaaagtatattttatcaaattgctgtaagctgtggatagcttaaaagaaaaaaagtttcctgaaatctgggaaacaagacatttaaagaatcagcaaaatttcaaataaaaaattatgaaaatattatcctcattagttcatttagtcccatgaaattaattattttctctgcttgatcttggtggacagtttcatgaagctgtcagttagttcattaaagttttggaaattctcagacagtgcagtggtatcagaaacttgtattcaagagtacaggtcagagtcttcttttcttttctttttgagatggataagataaaatgcttagataataactctatctagggtgaatacttgagattttaaatattttgtatagctgcaa

SEQ ID NO: 693 - DNA, 415 bp, Homo sapiens
  misc_feature (12)..(12): n equals a,t,g, or c
  misc_feature (377)..(377): n equals a,t,g, or c
  misc_feature (383)..(383): n equals a,t,g, or c
tcatatttttanttttttttttttctgttatacaaagagcagatttttattgaacttgtgcaataactatattaccatacaatataaatattgcacaagttcaataaaaatctgctctttgtatgacagaatacatttgaaaacattggttatattaccaagactttgactagaatgtcgtatttgaggatataaacccataggtaataaacccacaggtactacaaacaaagtctgaagtcagccttggtttggcttcctagtgtcaattaaacttctaaaagtttaatytgagattccttataaaaacttccagcaaagcaactttaaaaaagtctatgtggtcagtcactactcttgctgcagttatgaaaaanaatgangccaagtctgatgaaaataaacttattttgaa

SEQ ID NO: 694 - DNA, 653 bp, Homo sapiens
ttagcttctcattgagattcctagaggtgcgttcgagttttcagagtaattttccagaccaaccagcgtcagtgggaaatctgacctcttttggcaaactgcgatcattcattttcctgagtcccctggtgggtggggggaattctgcctcaggaccctgaggggtctttggggcaagatggccttggtaatgcagccactaagaacaggacttcattcaaaggcataatgaagtaaccagggtgaccatcaagtaaaattaaagcacaagatcattgtaggaggcttccttgtcaaagacgtgaacgtgggatttccaacgcaccacggtgtgtccactcatcactgcatgttaggaactgctgtctctttgggacacgagttaaaagaacacactaatttctggagtgtgcctgcagcttcacggccttcattttgttactaagttattttctggaagaacagcaaaaatttcaggttgaaaacagaactttccaagtgctactgaaattccgcagagaattacgctgcgatggtgggtttcttaccctagaaacatcctaacctgtatccacagaagatgtccttttatttttttaaaagatcaataaaatcaagagaaacgaaaaaaaaaaaaaaaaaaaaaaaaaaaa

SEQ ID NO: 695 - DNA, 319 bp, Homo sapiens
gttcagcctcagcacgcctgcacccaggcgctcattaaaacagcatgttgctccccactgcctcgtgttgtctgttggcgcgctgtcggggttcgaaccgatacaagaaccttccacctacctggtgctttggcctcatctataagcttttccactgtcctgaaacaagatagaraatctgagcggccagtcatctgccctaagtgctgccgccgaagactgaatgtcctggaaagtttgctgtcacatctccattatgacaaaagcattgtgccgaacagatgaaaaaatgcattgtcaacggaatcttttatgttag

SEQ ID NO: 696 - DNA, 281 bp, Homo sapiens
  misc_feature (253)..(253): n equals a,t,g, or c
  misc_feature (260)..(260): n equals a,t,g, or c
gcctgttctggacctgtataaaaatgtctacacagtagaagtgacatcaaggtttaataagtatatcaatgattggcacatataaaaattgttgaaccacatactctgaacttggctaatttagttactgcaggcctccattatccagttttattttttacacgrttgaccttgccttgtagctggtgctgtgtagacctgtgttgraaacacaatcggaatatatgaataattgaataaacagcattatggngaggcanagacacatggagaagtgttaa

SEQ ID NO: 697 - DNA, 178 bp, Homo sapiens
  misc_feature (111)..(111): n equals a,t,g, or c
gctggtcagtgcagccccattctgacattactatgaggtcctggatatccattccttggggaggaccagtaagacatctgctccatccctggaactggataattttggaanataaaccagggacctagccaacagaatgccttagcaatgcccaggggtcaatgggcgtggcattctt

SEQ ID NO: 698 - DNA, 337 bp, Homo sapiens
ggtaggaggcaaagcagtgggtcctcctcaccagccgcttacgggaccctgccatgcctggacccctctatcaggaagacctaccccagcactactggaaaatcagccaatcttaacccaaagatggccatgatttctgtatgtgagacgtcttaagggtgtttttgtttgttttaatcagccctcttgtttgagatttggcaatacatttctgttttctargttatttctgtgtctgatggtwgargatctaataagtattggaatgcttcctatttgctgatagaaktaccaaatagtattattgaagtctaacaaagacttttgttgagaacac

SEQ ID NO: 699 - DNA, 1135 bp, Homo sapiens
gccgaataggtgtttccttcattgatgatggaagtaatgcaacagagtaagtaccattccaggagtgtctaaagccgagctttgagtgtacatgattgataggacttgaagaataaaaatagaaacaattgacctctcaggtgagaaagtcacacaaaacaagctactgttaaaagactgaatatttttagttttctgtaaattatcagttattttttccagtctccttagaaaaatggcaacacagatggtagctgcacagcttgcatcaatggtgtggaataacccaagtcagcaacaatttatgcaatttggaggaagctctggatcacagttgcctcaaatccagacagatgttgtacttccatcatgcaaaaaaaaagctcctgctgaaactcctgtgaaagaaagactttttattgtgtttaatcctcatcctttacctttagacgtattagaagatatattctgtcgttttggtaacctgatcgaagtttaccttgtgtcaggaaaaaatgtggggtatgccaagtatgccgatagaataagtgctaatgatgccattgccactctacatggaaagattctgaatggggtgagacttaaagttatgctggcagattcgccaagagaagaatctaacaaacggcaaagaacttactgattcttgagtggccctgaagctgcactatgttggaggtttccttgactaagagaaccacatgcggcattcagctcagtaggggagtcataaaagatctcgcctctgaccagaagagtatgaatgacaaaggtgacataaccagcacagaaagatgtcttagcctctgcacatcagctgatttagaatacttatgtagatagcggttggggtcgggggggtscggaatgttcttttcagcttctttgcccygagaactttgatcttattgcaaggaagtcccttaccctcttctaccctagatctgatggacctcctgggatttcctggggaaatraaatgagtctaacacctttgaccacctgctggatattatatcagcacttacttaagtaagctgtggaagagctgaaagcagtattcagagtctgacagttctctgcaattggcctagataaactcattgtgaaataa

SEQ ID NO: 700 - DNA, 428 bp, Homo sapiens
  misc_feature (385)..(385): n equals a,t,g, or c
  misc_feature (427)..(427): n equals a,t,g, or c
aagagcgaaactccatctcaggaaaaaaaaaaaaaaaaagtatattctaacagacagatcagaggtctaagagatcctcccttgctattattacctgaagtctgtagaactgtttacagatatctccttgacaggtgtcctttatcttactttatctgtacagtaatcctgtgagaaagacaggacagaaaccactgtgcctattttacagatacgaaaactgagacacaggtaaaggggcttgtctgtagtcccatagctagcagatggctggagccaagactgaggctcgttcttcaatgctgagccagggtccttccgctgcaccacaagaacgctagaccactcgccaccagccttttcattccctcttcctccatttaancaattttaagctgggtgggcctcccaaagggctttgggaaana

SEQ ID NO: 701 - DNA, 1287 bp, Homo sapiens
  misc_feature (1281)..(1281): n equals a,t,g, or c
  misc_feature (1285)..(1285): n equals a,t,g, or c
  misc_feature (1287)..(1287): n equals a,t,g, or c
aagaaatcgggcgctatatacctgtaacaggagacagawttggacamcaaggrttttaagagycattgcccattgtaaagcattaagccagagctggttattcattatcagactaactacatactagtccatgctagtgtcagcctatattaaaatagtctttccttgccatagtgctggcgaaaacccaatcccttctgatgaaacattgcttcttgggaagacaagctgaggaaagcaatgaagatcccagtgtcggcctttattgagctatgtatgagggtcagggtccctcaactcctagtgactatgaagcagcagtgtgatggcttcgccctctttgcccctctgtcatcaatcctttgcatgtggctattttaagcttctcagctttcttttgggaggcttcatgtgtaacttattatagaaatgttactgaaaagctgcctaaacaaaaaattgtataaagtaggaatttgtataaagtaatactgttgtaaatccatcttcaagatgtaaagaatcaatttgtaaagtgtatattttcacttctcccttcaaatttatgtgaacaagtttttcatgtttcaatattgcttacataggaatacaccttacgtttttatcagtataaatggaacatttaaaaccagtcaacaacagaacagataatccagctccctgtttgtgttctgggttaattttgcaaggatgaagggctagaaagtggtgagtttgggtgtgtttcttattttcaggataaccggctgcattgcagtagaggaatggaatggtgaggtcatttgacctgttccaggtgagtggaggccaaagaacattgtttctgcctccccttggatgggaaaattgagaaattaaaaagttgcctttccgaggaaacaaaagttattttctctatttaaaataaatgtccaaaggcacccctctaaacaccaaaacttttagctcctggcaaacttacctagctagaagttggagaagagtgcggtttcaaaccatgcttcctttctgcccttgccaatacgttctcactgactgtgattctgctgtgaacacacacacacacacacaaacacacacacaagccccttctgtgtatgatcaggacaagtagttcaacagttaataaaaaagttaaattattggatgagaaagatatatttaacctaaatcataaatatgtawatccatttaataaacactaaaattgagaaaaaaaaaaaaraaaaactcgaggggggcccggaggccaattcgganctgnan

SEQ ID NO: 702 - DNA, 351 bp, Homo sapiens
cctgtctcaaaaaaaaaaaaaaaaaaaaaaaaaaaaaaaaaaaaaaaaaaaaaaagccctggtgttccaaactcagtctttcctgaagaagaggatctgagttatcttctgaaacagcgttctcccttcccagttgtatcactcttataaaaagactgtccagtctatgtcatgccctaggagacaaactgttcctcccagccccctttgagtattgagcagaagaatcaaattattaaatacgtatgtttgtacagaatggtatttgtgtatgtgtgtgggcttagagattcacaagtaaatattcctttggtgaaggaatttcaataaaaacatctatcaagtgtcaaa

SEQ ID NO: 703 - DNA, 1204 bp, Homo sapiens
  misc_feature (1010)..(1010): n equals a,t,g, or c
  misc_feature (1080)..(1080): n equals a,t,g, or c
  misc_feature (1201)..(1201): n equals a,t,g, or c
ggcaaggacaaagaagattccttttctgggagtttgtcttgggatgcaactagcagtgatagagtttgcaagaaactgccttaacttgaaagatgctgattccacagagtttaggccaaatgccccagttcctctggtgattgatatgcccgagcacaaccctggcaatttgggaggaacaatgagactgggaataagaagaactgttttcaaaactgaaaattcaatattaaggaaactttatggtgatgttccttttatagaagaaagacacagacatcggttcgaggtaaaccctaacctgatcaaacaatttgagcagaatgacttaagttttgtaggtcaggatgttgatggagacaggatggaaatcattgaactggcaaatcatccttattttgttggtgtccagttccatcctgagttttcttctaggccgatgaagccttcccctccgtatctggggctgttacttgcagcaactgggaacctgaatgcctacttgcaacagggttgcaaactgtcttccagtgatagatacagtgatgccagtgatgacagcttttcagagccaaggatagctgagttggaaataagctgaaatgaatacatgactgggaataatggggactgcctgtgaggcctctgaaataattgaaggcaagatgaaggaactatctgaagaaatcactacactcttagagaatccctctgttctccagcaaacatgggatgtaaagcctcacagggaatctgataatacatacttctgtcaaccagaaccagaggggtagttttcttttccctccagaggcagcctttggtacttaaaatatctgtagctgattaaatttttcccaacaacctcactggggagaaagtgtgttcatgttttgtccagcggatcaggatgttaggatgacgagcaagagtccaggtcactgtgcctttgctgtgttgtatggaaaggatggcagggaacatgctgtaagtaattttgagtaagaaantgagtcactgtgttacctggaactcagccacagatttgtgtgtggtccaagatcattgcagtttctcacnctgtttatttcctggtaaaagtaaaattgaataggtccaagacttgggggtggcaagtaaggctttgcctcaagcacaaaatttaagggggctccaaaaaactcaggaatccaaggggggnggg

SEQ ID NO: 704 - DNA, 283 bp, Homo sapiens
  misc_feature (237)..(237): n equals a,t,g, or c
gccagcccaggtcttggaggagcacaatctagtgttctacacaatgggtttttccatgggtctccaggagagctattatacacccagaagatccagcctttaccagcgctctctcctttttctctcttgctccccttccctatgccaaggagtaggcaaagkttgacatttcgcacctccattgcccasctcattctaaggcctttatttaaaggtggataatggcacataraaaantttttctataacaggttagcacatttcctatggtgctttggaattt

SEQ ID NO: 705 - DNA, 2733 bp, Homo sapiens
  misc_feature (431)..(431): n equals a,t,g, or c
  misc_feature (449)..(449): n equals a,t,g, or c
  misc_feature (456)..(456): n equals a,t,g, or c
cacgagcaaaggtgacagcttccggcaactgatgcctccactggccactcctccctccgtccacctgtcacttcgggtagctgggaggccagttaaaaaaaatggaacctttttcctswgacactttcgtggcattacctccagcaacagtcgataacaggattatttttggaaaaaattcagatagactctatgatgaagtacaagaggtggtttattttcctgctgtagttcatgataacctgggagaacgtcttaagtgtacatatatagaaattgatcaagttcctgaaacatatgctgttgkcctgagkcgcccagctggttgtggggggcagaaatgggagccaatgagcatggagtttgcattgggaatgaagctgtatggggaagagaagaagtttgtgaatgaagaagcactattagggatnggaccttgttcagacttnggccttngaaagagctgatacagytgaaaaagccctcaatgtcattgtttggacttactagaaaaatatggccagggtggaaattgcacagagggtagaatggtatttagctatcacaacagtttcctgatagctgataggaatgaagcctggattctggagactgcagggaagtactgggcagcagaaaaagtacaagagggagttcgtaatatttctaatcaactttccataacaaccaagattgcccgggaacacccagacatgagaaactatgctaagcggaaaggttggtgggatggtaaaaaggagtttgattttgctgcagcatattcctatcttgacacagccaagatgatgacttcatcaggcagatactgtgagggctacaagcttctaaataagcacaaaggaaatataacttttgaaacaatgatggaaattcttcgagataaaccaagtggcattaatatggagggagaattcctgaccactgcaagcatggtttctattttacctcaagactccagccttccttgcattcacttctttacagggactcctgatcctgagagatctgtttttaagcctttcatatttgtgccacatatttcacaactattggataccagttcaccaacatttgaacttgaagatctagttaaaaagaaatcacattttaagcctgacagaagacacccactctaccaaaaacatcaacaggcattggaagtagtaaataataatgaggaaaaagccaaaataatgttggacaacatgaggaaactggagaaagaactattcagagagatggaatcaatccttcaaaacaagcatcttgatgtggagaaaattgttaatctctttcctcagtgtacaaaagatgaaattcaaatttatcagtcaaatttatcagtcaaagttagttcttagtgatcatatggtcagctaatattagttcttagtgatcagtggtcagtaatcttcaaagtcagaatctatcaccttggtaaattatataaacctaacttgagcagatctgattattcttggatagtattcaagtggtatcttgactattaaactacgtatagtgttgctgaaatagaaagaaaacagcattggaattggattcatgtatcgtgggatacaggtgttatttcaggtgatgtacttgcattattttctttagccatagtaactttttgtcacaataactaagtattcaattatatataaagagtgaaacattaaaatgacgcatggatttatatttattataattatgtagtaccctcaaatcattttgtcagttacatcaagaaagcagatttttctttagtcatgaaaaatatctcaagtggtaagttgtttgtgctttaggcaaacattaaccagctctaacaagaaaaatgtctagatttacacattgtcaatacagtatattagttctgcaaatgcacttttgttaaactcaaacatgctctttgtcaagacttggctaaccagtgagcttgtagctctgattatctagcatttttagggtcattctccttaataggcttttatgttaataagatatatttttagaagagcttgtttgggagattagagaataagataaaagaaccaaaaccttaggatatactgtttctgggtctgaaatctctctcattgtttacttctgttcactcagtgaaaacagaaacaagaatgaggtagtggcaatgaaatagaattattagtatattatgaacattataacattttgaacactataatgcattatatattatgaacttttatgaactttatacatgagtaatagcttcctaaagtttataaaacattgtttaggttacataaagattaccaagtaagactcaaaattgcaaatataaacaaaagaaaaatccaactgaaaataacactaagtatttttgagtttctagaatgtccattttggtatttggttacattatcatatttactagtcactatcagcacaattaggttaataaagaagtgggtcattatattcaaagagtgctcaggaagttatgtgttcaaagttctctcataaataccatcgtctgcctgatactgctcttgtctaatagagggttgacattacaaaagaaaagatgtctgactcaagaactcagttgattctgtttgccttaagtttggktcagtgataggctgtcttctaacccctatactcctcttctctcctttaatagatgaggraactaagggcaaacagttcgttacacttacggga

SEQ ID NO: 706 - DNA, 575 bp, Homo sapiens
  misc_feature (20)..(20): n equals a,t,g, or c
  misc_feature (25)..(25): n equals a,t,g, or c
  misc_feature (30)..(30): n equals a,t,g, or c
  misc_feature (468)..(468): n equals a,t,g, or c
  misc_feature (512)..(512): n equals a,t,g, or c
  misc_feature (542)..(542): n equals a,t,g, or c
  misc_feature (550)..(550): n equals a,t,g, or c
  misc_feature (556)..(556): n equals a,t,g, or c
tccctatagggaaagctggnacgcntgcangtaccggtccggaattcccgggtcgacccacgcgtccgctctgaaaatgatctacagcacgatccagaagaaatgaactttgtgggaaaagaacaaaaggccacccaaagaggccaagctgtgatggaaaagaaaaccaacaggatgagatgaaaggggagattaacaagcwawataagaattgcaaggaaatgaaatgctaggcgacttacaatccttcttgggggcagtgagagcggtgatgctggatgtgaaatcagtgacatggaaggcaaactggaaaccctggatgaaagtgtatcatgcacagaataccaaaaaagataaatccagaagacacagagccagtgttggttttcctgaggaagagacagcttgaaaaaaggtctgtgtttgcagaccaatacctgaaagtaaatycaaaggaaacagatccgncactagacacatggtggcaaaaatgtttaataaccaagtgtcangggtagaaaaagaatggccagatagaatgngcgccctnccctgncccctctatcccaagaagg

SEQ ID NO: 707 - DNA, 948 bp, Homo sapiens
  misc_feature (8)..(8): n equals a,t,g, or c
  misc_feature (930)..(930): n equals a,t,g, or c
  misc_feature (936)..(936): n equals a,t,g, or c
  misc_feature (945)..(945): n equals a,t,g, or c
  misc_feature (948)..(948): n equals a,t,g, or c
cacgcgtncggtctcagaaaaaaagaaaattcaaggccagttaagacaaaatgctatgactttgaaattcacagaaagaaataacagtttagattaggtcttcaggtattcaggatagagataatctcctgaaaaacctgaatttcagagattcttagactggctgccaaaggatgaagctagtgaaggagaaaaagcttaaattccatcttgagctcttggattgtgataatacaatgatttcattaacttttcatttctgtatacctgttcatttggaatttaatgcttgacttctttgttcattttggatctaaacttctcttttcttccttccccattcacatctattagaagactgcatcaccatttctttggcccccttactctgttgtcctttcccttttctttcagtttttttaatcgcatgtctagtatattaagtctccatagccctcctgatgcagtagacagtgctatgctgtggatataataccaaccagaaattggcatttataaacctgttaagagactttaagcatgcttcaagaggcagttgacccactggaatttctataaggctggtacccttcccagagttacagaatcttrggtgccgtctctagtctgtgagggaggaactcccagcatccccattgcccacaaatggaatcctcactgtatccactaggagattagaaattaaggtttcttcactacttctatggtagggttgtctgaaattccctttcaggctgtgggtactggtcttgggttctagtcataaggggttccttataaggagcaggcggaggggagtacactttcatgtgatttaattttgatcctgccctctccagctgctccttcaaaagatacatcaaaagatagaaactctgggctgggcacagtggctacacactttgggangccaancgggggggnttn

SEQ ID NO: 708 - DNA, 1494 bp, Homo sapiens
  misc_feature (1494)..(1494): n equals a,t,g, or c
agatggtttgagcccaagagttcgaggctgcagtaagctatgatcgcatcactgcactccagcttgagcaaaagagagaccctgtctctaaaaaaaaaaaaaaaaaaaaaaaaagaaagaaaactggagtgctagaactattttaatattgaatatgttttttctagtaatgtttttcacccttcttacagatgttcgtgagcagcagtggattgccaccaagtccagttcccagtccaagacgattttcaagcaggagaagtcagagtccagtcaagtgcattagacccagtgttcttggtcctcttaaaagaaaaggtgaaatggagacagaaagtcagcccaagagactcttccaaggcactaccaatatgttatctccagatgccgcgcaactgtctgatctcagttcatgktcagatattttggatggcagtaktagcagcagtggcttatcctcagacccgctggctaaaggcagcgctaccgcagagtctccagtagcatgctccaattcatgctcttcgttcatcttgatggmtgatctctcacccaagtgacttaaccatttctgattcaacgttttaactgctgtttcctacataaaatgtttagtggggaacgcagagaactttgatccataatgaggattaaagttttacagatttcacacattctgatgctattattactctttggcatctctcttctccaaagttcaattttgtgagcctagtgaccttactagtatctggttttgctgatctcattttggatttagtgattaaatctcaaatgctgatttttgattgcttagaggaatcttttttcttagtgcctcaaaaaacacctattttgagtctatacatttaagaaaggcactgatgtgtattgcctttaatggtccttttccgcagcagtgatatgacagatttgatcagaaattctcttgcttgagagatttttttttgtcctctgttgactacatagtttcaaatctctctttatttcatgatgatatataaattgcttttaattatattaaatttttatttttctgcatcagcttcaagtacattattttgtttccctttcctgtttgagccgcttatgccatttctcacagaggggaagaaatacgtagttgctttcattactcttattgcttctttgctgttggggtgtgtgaagtgagcattgattttagtgctgagaatgtaaacggacttacaggatgcttggattagtcatcacaggttcttatgactttgctaccacagttgatatatttctcctcaaacctgttgccctaaggaatatataaaatattgttgatatttctaggtggtgttatcaaggagaagaaattcctgccttgaccagatgtgtggagcatctacaaatgaatgaatagttatttacacacaaaccactgtgtacaaaagcgtccatggagctgtcagtgtctcgagtggtattatgaggcctcaggtn

SEQ ID NO: 709 - DNA, 303 bp, Homo sapiens
  misc_feature (293)..(293): n equals a,t,g, or c
  misc_feature (295)..(295): n equals a,t,g, or c
  misc_feature (300)..(300): n equals a,t,g, or c
gaaagggttcaagtaaatgcaaatgatgttttggcaaccttttctcaaaagatwctgcattggaatacagactgtaatattaaactactatgtgtatattgtttctacasttgtatacaccgtartgtcttttacaggtatataaggtcaatggccctartctaattcagatttaaactagtgcttgccttgtaactctgcaagtgatcaataatctcttaatactgaaagtcmcaaaaaaaaaaaaaaaaaaaaaaaaaaaaaaaaaaaaaaaaaaaaaaaagggcggccgntntaaangag

SEQ ID NO: 710 - DNA, 547 bp, Homo sapiens
  misc_feature (540)..(540): n equals a,t,g, or c
gcaccaattctggaatgagcccaaactgagacgcaggggacctgagttctaggcctggctctgccgtggcttgctgaccttggagaattggagaagcttgtgccctgctggaaagtgggatggcagtacccgcttcatctagtagtcggggagatcaagagaggtatgggacctgaagaggatggcagactgtgcagtgcggtgcacaccggtctccaggttgttttcaccctcctgtctcctcccaggagctaacgtataaagctgaggctcggccagggactgtgatatacccacatccccggaactaggtgatcgcggtgcaggaaccaggtgtgccttcgcgggatccatgccttgaggcccaggaacgccccgccgccagcatgccgtgggacgcgcggcggcctgggggtggcgcggacggcgggcccgaggcctcgggcgcggcgcgctcgcgagcgcagaagcagtgccgcaagtcgtcgttcgccttctaccaggcggtgcgcgacctgctacccgtgtggctgcttggangatatgc

SEQ ID NO: 711 - DNA, 2401 bp, Homo sapiens
  misc_feature (583)..(583): n equals a,t,g, or c
  misc_feature (2342)..(2342): n equals a,t,g, or c
  misc_feature (2354)..(2354): n equals a,t,g, or c
ctacatccagtgacctatcagggatgcttgttattttatacaagctgctttgttatcatatcagcattctcttcagccagctccaaggcagatagtcacccctctctctgtgtggttggggtgggagcaggccccgtggagggagcggtgctgaggacatgtccctggcgttccgatgctgctccatcgaggaccccctggcctcaggaggaaggagcaggcgatgcagccccttagtgtggtcgtgttgactgacaggtggctgatgcctgagcgcgccctcttcttscrtcttaggagacaccgtggtgaagaggaagcctgcttctctgatggcccctctgaagcggaaggaggagttctccttgttcaaggtgtctratgatgaatataaagtaacaatctcgcctcasctgctcttggccacccagcgcttcctgtcccgaraagtggatgtattcagcccgctgcgcatctctgagaaggtcctgctgcacctgttgaagcatcccagtgtcaaccaggaagtgaggtttgacgagagcaaccggctggccacacaccactacctgtaccagcgcancagccggtggattacttcattctcatcctgcagggcagggttgaagtggagatcgggaaagagggtctgaagtttgagaatggggccttcacgtactatggagtgtcggccctaactgtgccatcctcggttcaccagtccccggtgtcctcgctccagcccatccgccatgacctgcagcccgacccaggtgacggcacgcattcatctgcgtattgtcccgactacaccgtgaggcgctctctgatctgcagctcatcaaggttacgcgactgcagtacctcaatgcactcctggctacccgagcccagaacctgccacagtcccctgagaacaccgacctgcagttattccaggcagccagaccaggctccttggtgagaagaccaccacagcggcagggtccagccacagcaggcccggcgtcccggtggaaggcagccctgggcggaacccaggcgtttaaacggstcactaggcagccccagatctggggaacaratgagcacgtggggagctggagtgagctgagcagaagttttgtgcccgcctgcccccatcccctccaggccacgttttagatggcccttgtagttgcgggtcctgggtgtcctcagaactagacatcaatgcctggatccttcagccggccctgccctcctttaggagacaggagtcaccagggcacagcctccaggcccgcctcaggaaggaatgaaaggaatgccatcatctctagttcccagggcccagccttccccttctcccccggggcagggacagtgcggcatattcagattcagacctctttgggctgagccaccttgtgagtgcagttactgcctttgtgtggccgtgacctctatttgtttgcttttaatttgccaacctatcgctgctggcagcactttttgagcaagccgagagcacccattttggctgggggttcagatcgatggccttgtccatgttgtcctttctggcttccctgatggtgtcatgtttcagcgcatgcgccccagcctttcccatgtgccaaaccagaagctccactgcccgtaggctgtccctgtagccctgctccctccctggaggctgctcttctgattctgagagctggcctagtggtgctgagggcccctttctgcttctctgcccacctgctgagttgccactcgcagtgttgtcagttcccgtgttctgagaagaggtcatgcctgggaggaagggatcgtcatgctgcatcgaatcctctctccgccgtgtggcccccaggagagtagctgcctgttgcacctgctccacacctccccacagcctccctgcaggtgctgtgtggccgtgatgtgcagagagcagtgagggagggttcatgaaccaggtggatcctctttaaaaaaaaaaaagtttttgttatatctctaraacatttcaagtcttttcctttytttctgttcctagctatggggttttagagaagtgggaacaggaaggcatttgtctttttcttctagtttactacattttccttccgtagttcttcagctgtgtggaaacgggcatcacaaggacataggatcatagattgggtagggagggaggaggatttctggaacttttctcaaaggaatttggacccttataaatgggactgaaggtcaaaacaacagtgatatccttgcttagaaattgtcctcaaggaataaactctgagagcaagcccgggttggaaacagatgctttaaaatcctctctccanaacagtggtttnttgtttgtttatttgagatggagtctcactctgtcacccaagctgga

SEQ ID NO: 712 - DNA, 716 bp, Homo sapiens
  misc_feature (654)..(654): n equals a,t,g, or c
  misc_feature (689)..(689): n equals a,t,g, or c
  misc_feature (702)..(702): n equals a,t,g, or c
  misc_feature (712)..(712): n equals a,t,g, or c
  misc_feature (716)..(716): n equals a,t,g, or c
gcttggcctatgaaaagatttagacaaccagacgataatagtgggaaatttcaacactccactgacagtgttagacagatcattgaggcagaaaactaacaaagaaatgctggacttaaactcagcacttaaccagttgaaactaatagacaaatacagaacactccacccaaaaggaatgcttatacattgttggtggaaatgtaaattagttcaggcactgaggaaagcagtttggagatttctcaaataatttaaaacagagctaccattccacctagcaatcccattattgattatatatccaaaggaaactagatcattataccaaaatgcactcatatgttcatcaccatgcaattcacaatagcaaagacatggaatcaagcgaggtgcccatcaatgatggattggatgaagaaaacatatatgctatggaatactacacagccctaaaaaaagaatgaaatcaagttgtttgcagcaacataaatagagctgaaggccatagtcctaagtaaattaatgcaggaacagaaaaccaaatactacatgttctcacttacaagtgggaactaaacattgagcacacatgaacataaacatgggaatgatttgacactgagcactactttgaggggaagagagagggangttgacatgggttgaaaaaacctacctattggggnacctatgtttgcntacctgggtncaan

SEQ ID NO: 713 - DNA, 411 bp, Homo sapiens
  misc_feature (331)..(331): n equals a,t,g, or c
  misc_feature (338)..(338): n equals a,t,g, or c
gatcctaaatgcttgggaccaaagtattttggattttttcagattttggaatatttgcattatactttaatgagcatttcctttgagcatcatgttggtgttctaaaagcttcagattttggagcatttcacattttggattttcagattagggatgctcagcccgtatagggaaactttagaacattatagaaatgaacaaaaagaaagcaaacttgaatgcagccatataggacatatacttttggtgaagttagagtaacagtggatttacttttcccttgaaatgacaaacaaaaaaaaaaatacagaaatatgaagcagtggtttncaggcgncagagtcaatgatgaaaaacaatggcctgagcccaatgttggctccagcttgagaatttctaggttgcctata

SEQ ID NO: 714 - DNA, 725 bp, Homo sapiens
  misc_feature (565)..(565): n equals a,t,g, or c
  misc_feature (698)..(698): n equals a,t,g, or c
ggacawtaccaggcaaatattgcagaactgactcatgcaaacaaccgagtggatcaaaatgaagcagaagtaaagaaactaagattacgagtggaagaactaaagcagggactcaatcaaaaagaagatgagcttgatgattccctgaatcagatccgtaagctccagaggtctctggatgaagagaaagaaagaaatgaaaacttagagactgaactcaggcacttgcaaaactggtaattttttcacaaaatatgctgaattaaagattagggccttaaagacatttccatatccttttcttaaatatcagtaaaattgtttttattaactagaaatattaatgaaaaaaacgtagacaatacacaaattaatgggcttcttcacttcttctaatttttgcctaacagatactgcatattctcaaaaagacaatttaaatgtcatttaaaaacaactttaattctaagatgtgtaaatattttgaaagtcaaaaagggctttcagaatactttttacataaaatctgaagagttataatatcggtaagaaaaagtagttgaanaccatacaagacgctgggtcattaataagaaaaccattgactttagtataaagtactggtttgtttaaagattggtaaacttttatgtacgtgttgtctatgtggtggggatggcaggttgtattaacaaaantgaatccttctagaggtgtaccattac

SEQ ID NO: 715 - DNA, 332 bp, Homo sapiens
  misc_feature (302)..(302): n equals a,t,g, or c
  misc_feature (306)..(306): n equals a,t,g, or c
  misc_feature (328)..(328): n equals a,t,g, or c
ggggcccacacccaggtgggggcccatggggtggagacagagaggtggctttaaaaaacacagctgtactaattcttcactccatgggcccacacccaggtgggggaggaggaagccactgcatctgttggctcagggccccagcctgtgcgagcagggcgcctgggctgttgtgtctcctgtctgtgccgatctctattaaaggactccctcttggtgggcaaaaaaaaaaaaaaaaaaaaaaaaaaaaaaaaaaaaaaaaaaaaaaaaaaaaaaaaaaaaaaaaaaaaaaaaaaaaaaangggnggccgttttaaaggatccaagnttac

SEQ ID NO: 716 - DNA, 726 bp, Homo sapiens
ggcagaggtgactgtcaaagcttgacccctgctttgattccctttgttgagacaggttcttataggacctggattctcaccacatcctctgttctgtttagggaacacaaaggtaagctcagctctgtgtccaggagtaccttatagtcctctcccttaactgtgtctgtttcaacttgatccaagatcaggattagtacaagcttgtaaaaaaaaaaaaaaaagtttwttttttacaaaatagaccagatgcactttgaagttaaagtgcatgcttaaccatctgcaattcctaaggttgagctcaatgcatcacatgtagtagatgttcaagaaatgtttgttaaatgggcagttgtaaacagagacagtgccgtgtttatttcgttttccagaaaggcacctgactccttgctttgcacataacaggtgctcaagaaatgttgaagaaaaaagcaaattgctttgaatgcagtgtatcctaaaaccagatttccaggttgccccagtactctgtacaggcctccattttggctgttaacacagtgtatcttttgttacattaaaatgggtccacgtttgcatctcctccgaaattataaactcctgggagtgcagggatgtgtctcatacattcttccttgacttttccacagcataccttagcacagagttggatatgtagtagatgttcaatggagaattactgaattttcttaaaaaaaa

SEQ ID NO: 717 - DNA, 553 bp, Homo sapiens
  misc_feature (325)..(325): n equals a,t,g, or c
  misc_feature (370)..(370): n equals a,t,g, or c
  misc_feature (520)..(520): n equals a,t,g, or c
  misc_feature (529)..(529): n equals a,t,g, or c
  misc_feature (531)..(531): n equals a,t,g, or c
gggttgggccaatgggtcaggcatccagtcagctctggctaaggggtgaaggagtcaggtgttaccaacgtggtggcaggggccaccttgaagctgtgttctgtgccatggaagaaggaagaggaggaggaagctaagctggaagggaaggctcctggagtcagtagttggaatctcagatgggaagaaaccttaaaagtcatctggtccagtattttccaaagcatgttccatgaacttgttttccagaaatggtttcctggtctggtgagtgggagytcsatgagagtggcagttgtctattttgttcaccgatgtatcttangtgactaaaacaatggttgtcacatggctggcccttcatatttgnttccagatggaagactctctttctagtggtggaacattagttttgcactgtgttgggacaacctgatgtagtgaaaacaagcctgggcaatgaaatcaacagattggaattcaattcctaattgggtcattggatgactttgtgaccttnggcaaaatnanttacctttttgaatttgaataa

SEQ ID NO: 718 - DNA, 255 bp, Homo sapiens
  misc_feature (243)..(243): n equals a,t,g, or c
  misc_feature (251)..(251): n equals a,t,g, or c
ggctgcaggcagcaacgcaagtcaggctgaacattcagtctccagagacagctgtgtggagcaaatcagagttcatgcccaagtccccaggttggaatggctgtgccaaaatccattcaaagggttttctttttcattactaggtcagaacattttgagtcaccttgggagattcaggatggggagagcaaatttgaacaaaaggtttttcttatatcctgagattgaggggtagggggtgtncaacctgnatag

SEQ ID NO: 719 - DNA, 1075 bp, Homo sapiens
ggccggcctccaggctgaagaaggacccgccccggccttgacccgggccccgcccctccagccggggcaccgagccccggccctagctgctcgcccctactcgccggcactcgcccggctcgcccgctttcgcacccagttcacgcgccacagctatgtgtccccgagccgcgcgggcgcccgcgacgctactcctcgccctgggcgcggtgctgtggcctgcggctggcgcctgggagcttacgattttgcacaccaacgacgtgcacagccggctggagcagaccagcgaggactccagcaagtgcgtcaacgccagccgctgcatgggtggcgtggctcggctcttcaccaaggttcagcagatccgccgcgccgaacccaacgtgctgctgctggacgccggcgaccagtaccagggcactatctggttcaccgtgtacaagggcgccgaggtggcgcacttcatgaacgccctgcgctacgatgccatggcactgggaaatcatgaatttgataatggtgtggaaggactgatcgagccactcctcaaagaggccaaatttccaattctgagtgcaaacattaaagcaaaggggccactagcatctcaaatatcaggactttatttgccatataaagttcttcctgytggtgatgaarttgtgggaatcgttggatacacttycaaagaaaccccttttctctcaaatccagggacaaatttagtgtttgaagatgaaatcactgcattacaacctgaagtagataagttaaaaactctaaatgtgaacaaaattattgcactgggacattcgggttttgaaatggataaactcatcgctcagaaagtgaggggtgtggacgtcgtggtgggaggacactccaacacatttctttacacaggtaattgtttcaaaaggattgcatgggccaggatgtccagataagcactgtgtctcttttgcctttgtaactgttattactctttttactgctatttaatatgtaatgtatattatatgatctataatatatatgtaatatacattaaatgggaacatgtgcaaatctt

SEQ ID NO: 720 - DNA, 753 bp, Homo sapiens
  misc_feature (706)..(706): n equals a,t,g, or c
  misc_feature (741)..(741): n equals a,t,g, or c
  misc_feature (746)..(746): n equals a,t,g, or c
gaattcggcacgagctcgtgccgaattcggcagacgataccaggtgctgcagaagggattccatgaggtgcgcaaaggccctacttccgctttcaccttggagacggcgactctctgcgtactgattggaacatccgcgaaatgatacgcctctctgcaatgctattggtcgaaatgcatgtcaatctcccagcgtctttatccgtgttccttgactctgggcaacttaaaagccctaatacttttactttcgccacacaaagaggttcttcttagtggagggagagcagatgtagggcatcctaccgagaatttccggaaccacgtgcgagatgatgccagtcatgaacgtctccgcgcttcctttcgctttggaaatatccttaagtagaaaagaaattttctgagctttgcctaaaactagaatctgtgttgaggtttttcaaaattaagtaacgccagagacatactgtgacgtgaggaaacgctcttaaatgaaattttaagatctatttgagaaacatgtactaaaaatgtactgacctcctattaatgccaggcgctatgctgaattctgggccttcacattgtccttccattattagaactgaagcccagattatttgaaacaaaaaataaacttcaataatttattaaaaaaaaaaaaaaaaaamctcgagggggggcccggtacccaattcgcccnaaagggaggcggattaaaattccctgggccggcgntttanaaaggcg

SEQ ID NO: 721 - DNA, 779 bp, Homo sapiens
  misc_feature (721)..(721): n equals a,t,g, or c
aaattaaccctcactaaagggaacaaaagctgggagctccaccgcggtgacgaccgctctagaactagtggatcccccgggctgcaggaattcggcacgaggaacagctcacactggctggcactgctaagcaggtgcggaggggagtcagagacccccggatggaggggtgtggtggacctcagttttgaggccgagagtcctctggcgccmcccacagagctcctggagagactgcccagctatgactggcttcttcaagggggcagaggacagatattcttcccacctttggaggccccagggaggccccaggagcaaaggtcctggccctcgttcctggaacacaggagatgccctccccagttggactgctgagggctttaccactaccgtggcctcagtttctcgcctgcacgttgaggaggctggctggcccgcgtragtccacaggcccttcccagaagcccccgcctctctgttcggtcccctgcagagtccctgcgaatgacggaggaggtggcccgggaaagccctcctcagctttgtggactstaagtgcctgctacagcgaakktggactggagacctcgtcatccaggagctgaagcggcagaccctctgcaggtaccgtctggagacctttagtgaatccaggataagcgaagtggacatttcaaccctttactaaaccactctgtggaatgggccgcaaagaggngcctcccccagggtcttgggacatcaaggtttcaaggtccttccgatgtttttcagga

SEQ ID NO: 722 - DNA, 570 bp, Homo sapiens
  misc_feature (296)..(296): n equals a,t,g, or c
  misc_feature (298)..(298): n equals a,t,g, or c
ccctcactaagggaacaaaagctggagctccaccgcggtggcggccgctctagaactagtggatcccccgggctgcaggaattcggcacgaggagccactgtgcccggcctgccttggttattttcataagatttctagaattaggttcactgagttaagtgatataaacatttttgaggcttttgctacatatttttagattgctctacaggagtggtctagtttatacacccctaccaggtcgccatgtatgtttctacacaatagccctgctcgcaacagatagtatattttncnctgttgcccaggctggagtgcagtggcgcaatctttcttggctcactgcagcttgaaatctcaggctcacaagtgatccttccgcctcagcctcccaagtaactgggactgcaggcatgcaccaccatgcctggctaatttttttttttttttgtagagatgggtttttgagaccagcctgggcaacatggcaaaactccgtctttactaataataccaaaattagctgggatagtggtatgtgcctgtaaatcccagctacttgggaggct

SEQ ID NO: 723 - DNA, 877 bp, Homo sapiens
gccttttactgtagaccctctccagagaaaggagctcgggtcttccctgagccaaggtgccagggtcccagaactcctttcactgcagaccctctccagagactggggagagggctctggagaacctggttcttgcttactgttctccctttgggccctccttcccaaacgcaaacaatccaggatccactcagcgtcaggcccaatggaaatagtgaagcagtgattttccctcccctgcctctccatagcctggtcttttgccctctcctttgctcttctcttcccccatagccacctcaaatacctgcagcctgatatcttcatcccttcatccagaccttttctctcctagtggtattgcaaactgaaagtggacaaagacttaaggtaaacctgctcctcatggtggaatgcttccaaatgctggaaggaggactttagggcagagttcactaaggaggcttgtgcttatagatcagtgggcctgaaagaagtttctctaggttctggttgtgtgctgtacgargtgtaggtagtaataatactcttgtcagccacagtgaagccccaagctagccgggataggggactgaccttgtacaggcagcatggagaaactaagacagagtgtcctgcccaagtgatggcactggggagcagtcactcaggtttatttccaccagggcccaagaaaaaaagaaatgaggcaacctaaaattccatcaagatagataccaatatccaaggtgcttggtcttagcggtgtgggacccacgttaaggctcttggtgggaaggtgggaggtgttttcagcatgagatagggttcaggctgtgaatcagagtctagagcctaagataaaaaaaaatgtgcc

SEQ ID NO: 724 - DNA, 656 bp, Homo sapiens
  misc_feature (496)..(496): n equals a,t,g, or c
  misc_feature (558)..(558): n equals a,t,g, or c
  misc_feature (592)..(592): n equals a,t,g, or c
  misc_feature (620)..(620): n equals a,t,g, or c
  misc_feature (644)..(644): n equals a,t,g, or c
  misc_feature (654)..(654): n equals a,t,g, or c
gtgttgtgcctgttaaaaattcagagccctgaactccatcctggtataaagcaaaaataaaattttaatccccttgaccatcccaatggccccttctcttggcaagggcattccaaagttaaatggaaaaactagttttagaccatgatgggaagggggtgttggaactccttccttttggaattactgatagaacagactttttaagtctgataagaaacatttacaatctattctcaaagtctgctaccaggaggcttcacctgcatgataaaaccttggtctccacaactccttatcttaacccagacagtcctaagtttttagacaataacctaactgkttcaatccatgccaatcaataagtctttaaatctgcctatgacttggaggcccttccttycaagtagttgkcctgcctttctggaccaaacgaatgtacatcctatgtgtatctgatagatgtctcatgtctcctaaaatctgtaaaactaanctgtccccaaccactttgggcacatgttctargactyctgaaggtgtgtacaaggccgtggncacttatattggcttaaaataatctcttcaaatntttaaaaaaaaaaaaaaaagggcggcgntttaaaggatccaacttacgtacncctgcattcnaa

SEQ ID NO: 725 - DNA, 1530 bp, Homo sapiens
  misc_feature (1)..(1): n equals a,t,g, or c
  misc_feature (11)..(11): n equals a,t,g, or c
  misc_feature (25)..(25): n equals a,t,g, or c
ncctcactaanggaacaaagctggngctccaccgcggtggcggccgctctagaactagtggatcccccgggctgcaggaattcggcamgacgcggtccgggtcgcccctagctgtttcctactcacccaaagccccgcacccgccttttctctctctcctctggcaggatgaggcgtgcaggcctgggtgaaggagtacctcctggcaactatgggaactatggctatgctaatagtgggtatagtgcctgtgaagaagaaaatgagaggctcactgaaagtctgagaagcaaagtaactgctataaaatctctttccattgaaataggccatgaagttaaaacccagaataaattattagctgaaatggattcacaatttgattccacaactggatttctaggtaaaactatgggcaaactgaagattttatccagagggagccaaacaaagctgctgtgctatatgatgctgttttctttatttgtcttttttatcatttattggattattaaactgaggtgatgcatgtaattgtgaatttggaatttgttccaacttaatggcttgcagtaccactttgataaaaatcagcatcaaaacattcctagtgttcaaatactgtggcattttccattgaaaattgctgaattttgcttattttataaatcacattagttaatacagtggtctttgaatactgtttcttaatgactcattttagcccctattttcaggggtagtgagagggtgtggctccactaatttccagtttgtttttctattgtttgccaactgtcagattaaatagcattataatattttgttgtaatcataaatgcaggtttatgtcccatgtaaggaaacttagtgggagagtaacagaatgcctggagagcctgactctgagctcttgaagtagtcagccagtttgtggtaaaatggtaattgaattttcctaactgcatcaactgtaatgatatactcccttctcctcctttatttagttaaaattgtaggctgatttctttttacctacaatcttcctaataatttttgatgataatgacccctcatttctttctgcccaaagacctcattctttaaataaaacttgttattttggcatatttctggtagggcccattgcacatgtgtatcagtatagttattatttcatattaactttatgaattctcttgacttggcttataatagttttatgatttttactacataggtagcacatttatcatttgtgacagaataatgtgaagttaagtaattactgaactttaaatggaaatagtatgcaagaaactcaggcattgaacttgaagataagagtattattgctttaatccagtgtatttgtttatggaaagaaaaacacaaaggcagactgttgagtaaaaaatattaaatattgttaaatattctgtattttggaatttatccatttataggcttcaaaagtaaatttttaaataaaatatattagtcgactgtgaaaaaaaaaaaaaaaaaaaa

SEQ ID NO: 726 - DNA, 742 bp, Homo sapiens
  misc_feature (709)..(709): n equals a,t,g, or c
tggctccaaaagggaattgggccttaagccaagaatccgccagagggggtaatcaactctgttacttctccccctgccagtcagaccggccttcggtgagaaggtgcgtctagaactgaggcgtgcggccaatccgactgttccgtttcgctgcctcgtgctacccctacagcctcgaacactgacatttaaaagggtaacagctgggaggcagggaaggggcagccgcacactttcggagtgcctcgcggtcccgtggccggtccgggcctcctggctcacgttccagcttgcggagctttgggacacatctttcctagtcagttgcgctcgttcctatggcaaaagagaacttcagcttcggttttccagctcccaaacagttaagtgacttcctgcaaacgctacagtcccagcaaccagccttccaatcaaaagtaagttggttgatgtcactggcattggctcggccaatcacaagggcgttccgaaagcaagcgctcgacacttgtaaacgcgaagagctgtagtgaaactggacacatctttgtattttgtgttgctggtagtaaatttgagttatggatgagaggacaggggtgatgaataaatgcagtgtgaatctataattaaaaaaaccccattatgtcaggataagtccaagaataaacacaaatgagtaagaaaaaaaaaaaaaaaaaaaaaaaanaaaaaaaaaaaaatgaaaaaaaaaaaaaaaaag

SEQ ID NO: 727 - DNA, 820 bp, Homo sapiens
  misc_feature (23)..(23): n equals a,t,g, or c
  misc_feature (41)..(41): n equals a,t,g, or c
  misc_feature (802)..(802): n equals a,t,g, or c
ctcactaagggaacaaagctggngctccaccgcggtggcgnccgctctagaactagtggatcccccgggctgcaggaattcggcacgagcccaatacaggcatgaaccactgcacccacctacttagatatttcatgtgctatagacattagagagatttttcatttttccatgacatttttcctctctgcaaatggcttagctacttgtgtttttcccttttggggcaagacagactcattaaatattctgtacattttttctttatcaaggagatatatcagtgttgtctcatagaactgcctggattccatttatgttttttctgattccatcctgtgtccccttcatccttgactcctttggtatttcactgaatttcaaacatttgtcagagaagaaaaaagtgaggactcaggaaaaataaataaataaaagaacagccttttcccttagtattaacagaaatgtttctgtgtcattaaccatctttaatcaatgtgacatgttgctctttggctgaaattcttcaacttggaaatgacacagacccacagaaggtgttcaaacacaacctactctgcaaaccttggtaaaggaaccagtcagctggccagatttcctcactacctgccatgcatacatgctgcgcatgttttcttcattcgtatgttagtaaagttttggttattatatatttaacatgtggaagaaaacaagacatgaaaagagtggtgacaaatcaagaataaacactggttgtagtcagttttgtttgttgaaaaaaaaaaaaaaaaaaaanctcggggggggccccgga

SEQ ID NO: 728 - DNA, 463 bp, Homo sapiens
  misc_feature (318)..(318): n equals a,t,g, or c
gcatacttaaaaagtacaaaagtccagttctccaggtacatgggcaattgtatttgtttatagtttagattcataacctttactgaatgtcagaaacacaaaaacttatrraaataaaatatatttgctcttgagatacatataatttattttaagtcaataatacatttttagttaaaggtgtatttatgatcagtttattgtacttgtgctataattttctttattattaaataaaattttgagacacttttaaaataataaaaaccaaaaagtggtattttaaactcagtttctaaatgatgattgactaaagtngtgtgtgtgtatgcagacatacgtaaatacacacatacatataggctatgatgatgacaactatttacttcaaattagatgccttctgtatgtatattgaccagaatacattgctcaagtgatttttaaatatttgtataatttt

SEQ ID NO: 729 - DNA, 540 bp, Homo sapiens
  misc_feature (153)..(155): n equals a,t,g, or c
tttactagtgtattatcttttatttattatgtaaagcttctttccttccttttccccaatcatgatatattagtgacaaaatattacagaaccggactatcagtcacttaaaaaaacagtataattctaatgctagtaaacatgtaatttaannnagttctggaggacagttgtctttgattaaagccccaccaaaacccatttaagtatttaatgtacatactattcatattattatggcctgtaaacactaatatctgagcaatcaaactgttttatctaccatttttgatgaaatttgaataaagtttaaaaacgtgtaagcctttgaacaaatgtatgaaagctttaaaagatcattagcacttttattttgtttacaaataagctgccatttaaaaaaataaaacctcactacttgaacataaagctcccaaacaatattgtattaaaatgtactatattgacctaggaggatataggaaattatattcacctgattaactggagcagtttcacatagtggaaatactttttgct

SEQ ID NO: 730 - DNA, 837 bp, Homo sapiens
gcggccgcctgcggactggagacccgggaggacggacgcggacgcgggctgctcgtcttttacggcccttcaacgcccaccacgacccactcctcttggagaccccgggcgacggtggggctcttgggcattctgagactgcgcttggtggagaccccgggcgacggtggagctcttgggcattctgagactgcgcttggtggagccccctactggccagactggatttctcagcctgcgactcagccccaggctacacgaaagaagccagacctgggtaattcttctagttcttttttttttttttttttaattgcactgggaaacttccccaatctcggccccagttctttctccaaactaaggagtcatggcctttcgcccgctagtccagtatgcacccgtaggcgcttcattttctctcctcttgtcagcttttactgcctcctgaggccttcgtcttgttcacactgagtgtccagtccctccaaatccggctacactctactggcaaggagcacctgggccatgttttagagatcatccgaggactaaccccaaaagtttatgaagagaaagcagaggccgagstgaagagatrgacccgggtcacacccaggtaaaggcaggatctaaactgaaactggtgtcagatctggttgccttgcacccctgatatcaggtgaagcaacmctgggcaggatagagcagagtgaggtcagagtgtgaagatccagcctgatgcccaaactgacgcctyttcattctcccskgctccatctgtaaacgtcmcggttaatccatctactttattgcattatatagagaaataaatga

SEQ ID NO: 731 - DNA, 738 bp, Homo sapiens
  misc_feature (736)..(736): n equals a,t,g, or c
  misc_feature (738)..(738): n equals a,t,g, or c
gttttctgctattaagttgagctgtttcaagatagaataccggattaggttttgagttacagtagtccctccttatctgtggggtgtaagacctacagtggatgcctgaaagagccaagagtattgaagccttgttttttcctatacatacgcaactgtgataaagtttaatttataaattaggcacagtaagattaacagcaataatgagaacatttataactagtaagttttgtgaatgtggtctgaaaatactgtactgtgggaaagtgaagccatggtaagggaggattactgtatatcttcattttggtcttaagctttagaattatgggtaactaagaagccgtttgagatggttatattccatgactaaacttacctgggaattgtattatttacggggaaggcagytattttaaaaatgcttgtttaaggaagcagttgctgtatttgaattaagataactttcattagagattattagtgaaggttggccatctggttggctatgtgcttatagaattatagaagtaagctatttgttgacaattttagagttaaatttgacaatcttggttacctaccaaactttaaaatagaagtcaggatttctgttacccaaccatgggagcyttggktgtcycatattcggtaagataatctctgktaaatagtggggtattagaacaaatggacttaagtaaaaatcttcaaatcatctttaaaaaaaaanan

SEQ ID NO: 732 - DNA, 506 bp, Homo sapiens
  misc_feature (394)..(394): n equals a,t,g, or c
  misc_feature (470)..(470): n equals a,t,g, or c
  misc_feature (481)..(481): n equals a,t,g, or c
  misc_feature (494)..(494): n equals a,t,g, or c
acaagtagctgcagtacggtacggaattacagggtagacccaagcgtacgtaaaatttaaaaacaaaggactatttaaaaatacagtttattaacaaacgtgaactactttctgttacattaggtgttccctagtgtttcttaatttctttttagaaagtgtatttttattagtatttttccggtgaacagaagatttgtttggatttaaacatttactaagacagtacctattaggaaaaccaaatattgcaaatggtcaattcgattttaatttctcaaaagatactctgttatccagaagattaaaatgcctacattgagtgcttaaaaaaaaaaaaacmactgtgatratktgagcagaatggccagtaagttaagcctttttggatccnggtaatccagggtatccatttaccatggaaaggggattccccaaactactggcccagagggaagtttggttttttnaaatttaaggnggggaaattttanccctataaaatt

SEQ ID NO: 733 - DNA, 540 bp, Homo sapiens
taaggggattctcccagctgctaaatttaaacagtaaatatcacattttgtcattaacacagctataacttgccgtggttctcagatttattttggactattttgatgccaagtgaatataagagyttgtactgaaaccatttatttctttctattttgctatttgcaaatgcttgttatcttccctacatgaagtggcagtaacctttttcacatttaagctacccttctacttttgaagtgatttgcagttactcatctgagacagcatcagtatttgactaaatcattgtttcacaactgaatagtcttgttcttttagtagcaatgaaatcctaagctcttgaggccattcacctgccaacctgaccatactgctttcaaaagtcttttctcatcagtagaatctattttggtcacttctagtcaatgaaaaatgtaaacttttaggagagaatgtttcctaggactcacccactccattcaatgttacatataaaatagtgtgatcaatcacaatgtccatctttaaacagttgg

SEQ ID NO: 734 - DNA, 448 bp, Homo sapiens
  misc_feature (419)..(419): n equals a,t,g, or c
cccacgcgtccggacccacgcgtccgccctgctctcctaagataacccagaaaggagtggtcatatactttggaggatagccatatagatacttatcagtggcctgtgattctttcctccagccccattcttcctagatgattggaaaaacacttaagggagcattaagaggctctgattgctactcagtgatatacgtcagtctgagaggacagggcctaggtaaaaaagacttgtaacgatgattcacaatgacccttactgtcacttcatgtaagtatagagggctcaggtataccaggctggcaactgatggataaacggcattatgctaaaatacaattttggatttcatattaaagtatctctagaatacccaggaataccttaaaaggaaggaatggcttcctgaacaaggntggggaacctactccttaatttgtttagt

SEQ ID NO: 735 - DNA, 1221 bp, Homo sapiens
  misc_feature (5)..(5): n equals a,t,g, or c
  misc_feature (19)..(20): n equals a,t,g, or c
  misc_feature (22)..(22): n equals a,t,g, or c
tattnctaggatatacccnnantaaagggacaaaagctggagtcaccgcggtggcggccgctctagaactagtggatcccccgggctgcaggaattggcacgagccgaaagggacacaatgtggcatgactaagtacttgctctctgagagcacagcgtttacatatttacctgtatttaagatttttgtaaaaagctacaaaaaactgcagtttgatcaaatttgggtatatgcagtatgctacccacagcgtcattttgaatcatcatgtgacgctttcaacaacgttcttagtttacttatacctctctcaaatctcatttggtacagtcagaatagttattctctaagaggaaactagtgtttgttaaaaacaaaaataaaaacaaaaccacacaaggagaacccaattttgtttcaacaatttttgatcaatgtatatgaagctcttgataggacttccttaagcatgacgggaaaaccaaacacgttccctaatcaggaaaaaaaaaaaaaaaaaaagtaagacacaaacaaaccattttttttctctttttttggagttgggggcccagggagaagggacaagacttttaaaagacttgttagccaacttcaagaattaatatttatgtctctgttattgttagttttaagccttaaggtagaaggcacatagaaataacatctcatctttctgctgaccattttagtgaggttgttccaaagacattcaggtctctacctccagccctgcaaaaatattggacctagcacagaggaatcaggaaaattaatttcagaaactccatttgatttttcttttgctgtgtctttttgagactgtaatatggtacactgtcctctaagggacatcctcattttatctcacctttttgggggtgagagctctagttcatttaactgtactctgcacaatagctaggatgactaagagaacattgcttcaagaaactggtggatttggatttccaaaatatgaaataaggaaaaaaatgtttttatttgtatgaattaaaagatccatgttgaacatttgcaaatatttattaataaacagatgtggtgataaacccaaaacaaatgacaggtscttattttccactaaacacagacacatgaaatgaaagtttagctagcccactatttgttgtaaattgaaaacgaagtgtgataaaataaatatgtagaaatcaaaa

SEQ ID NO: 736 - DNA, 220 bp, Homo sapiens
tgtctgtatttatttcttctccaaggaaacagcctacattttccatgtgtccatgtttctgaggccgtgggtgacagtgggaattgcactaatgggggcccascaggcctgggggctggtcttagcgctagaccttgaacaaggcacttcacctgctggtctccaattttctcctctgtwaaatgaaagakttgaactaagtgatctcaaaagtttccaa

SEQ ID NO: 737 - DNA, 894 bp, Homo sapiens
aattcggcacgagaggaaatggcgtcgtggcattgaggggcatccctcctagaacctccaggaaaagctcgcggaagacgaggttctgcggagagagaggctccaagcagtctgggaagtgtagtccagttggcttagcagtagtttcgttgggggggagccgaggttccgggaaggggctaggccggcttgaaaagagattatgactgtaccttttaactytgtagctggaacacaagaagtgtttgtttaatgaatgacgtacacatttaagatctgtttggacgcggaggataatcctgtgaattgctaatagttcactgggtttggcccttagtgttgacttcagtatgctgagacggaaaccaacacgcctagagctaaagcttgatgacattgaagagtttgagaacattcgaaaggacctggagacccgtaagaaacagaaggaagatgtggaagttgtaggaggcagtgatggagaaggagccattgggcttagcagtgatcccaagagccgggaacaaatgatcaatgatcggattggttataaaccccaacccaagcccaataatcgttcatctcaatttggaagtcttgaattttagagatggattatcttgcatgccagagcgctggaatggaataaaatgatggcagaagtacaaaccagatttagagaattgagtgcttgcagtcaagcagaatgtacctcctgcagagacaaatcttctgcatgagattactgatgcttcacttgcactctaagctggaatccaaactctggtttgtctcttgaaaatttgactctataaaactgatctgattttctgtttttaaaaataaatatatttttggaaaaaaaaaaaaaaaaaaaaaaaaaaaaaaaaaaaa

SEQ ID NO: 738 - DNA, 843 bp, Homo sapiens
  misc_feature (753)..(753): n equals a,t,g, or c
  misc_feature (788)..(788): n equals a,t,g, or c
  misc_feature (829)..(829): n equals a,t,g, or c
  misc_feature (832)..(832): n equals a,t,g, or c
gtgctcttgctccagaaagactcactgctcacagctgcccagctgaaagccaagggggagctgagctttgaacaggaccagctggtggctgggggccagctgggcgagctgcacaacgggacacagtatcgtgaggtccgccagttctgctcgggctctggccaccaccttgtgcgcttctacttcctcactcgtgtttactccgagtaccttgaggatgttctggaagagctgacatatggacctgccccggacctggtgatcatcaactcctgcctctgggatctctccagatatggtcgctgctcaatggagagctaccgggagaacctggagcgggtgtttgtgcgcatggaccaagtattgccagactcctgcctgctggtgtggaacatggcgatgcccctcggggaacgtatcactgggggtttcctcctgccagagctccagcccctggcaggctccctgcggcgggatgtggttgaagggaacttctacagtgctacgctggccggggaccactgctttgatgtcctagacctccactttcacttccggcatgcagtacagcaccgtcatcgggatggtgtccactgggaccagcatgcacaccgccacctctcacacctgcttctgacccatgtggctgacgcctggggcgtggagctgcccaagcgtggctatccccctggtgagccctaccataagtgggggggtagtgatgcactggggccctcagaggacagggctcanaaacagaatgggacacagccactcaagggaagtanaggtcccttgaaggactcctgtggcttctgcatgcaccttnctnaacccctgaga

SEQ ID NO: 739 - DNA, 752 bp, Homo sapiens
  misc_feature (696)..(696): n equals a,t,g, or c
  misc_feature (708)..(708): n equals a,t,g, or c
  misc_feature (728)..(728): n equals a,t,g, or c
  misc_feature (746)..(746): n equals a,t,g, or c
  misc_feature (751)..(751): n equals a,t,g, or c
caatgaacagacattttatatcactgtagatacaaaatattaaagcagtggtttcagccaattaaatcaatctgtgagagtggagcccaggcctgccatttttgttaaaagctccccaggtagttctaatatgagccaaagttgagaagcaaaagtattgtaaattatttctctcaaatttagagttattacagtttatatcaaattcaaaatgcttaatttgcttttgtgataaagagcaatagaaggtggtgagatttctaaaaattaggcctccaggtatgcatttcaaatgtagacttcttaaatgatcgggatcagmttgtgctgcctargtagtctgtttttttttttaatgtcatttacataatcattttccatttcctaagcacaaatgaagttaacatctgagttagcttttgaaagacacctttttgtggggtarggactactgttacaaatcataaactgarggttatgacattctcttatacttactccaagatgcagaaactgcttttcacatagttttactcatattttacaatgtgattaagggaggctaaggtagtttaatttcatatatgtacattttttacctaaaaatatctgattaaaggtattatttaataataattaaaatccgtgggcacagttttgaaccttctttaacttttcagtttaagctgggcccantgccttccaaantgctgggattcaggcatganccactggttctggccggnctacnt

SEQ ID NO: 740 - DNA, 1493 bp, Homo sapiens
  misc_feature (968)..(968): n equals a,t,g, or c
  misc_feature (971)..(971): n equals a,t,g, or c
ccctccctccctccctcactgcttccctccctctctctccctctccctttcttttctacattgaaatctgttcttacataatagagaacagggctattgaataaagacccaatcctaccagatctttagttctaaagggcaacttgactgtgagtaggagggcccccaagaaaggraggaaagtccacacccagctaaccacacaacagggcttcattatggaaatattttaacaaaagtacatgttattaccaaccaaagagatgcatgtgcaatagaagccttccttaaaaacaggctaaataacctcattttatgcagcagtttaatctgagaacagagggaaaggtgtgcagtggttccagaggggccttatattctatttttagtctagatattttttgtttataaattcccaaggaattgttaacactttggtgacacctaatggattctttttgaaattccaaggtgcttcagttctttgcccaagtgaactgtgccttttattgcatttctgttcgtctcttggtggctcttctgactttttggagaatacccatcttgttggaggcagacttaagttgttatgctgtgccacacaatttactgagacaatcatatcttcctaagcatttaaggaaagttgaaaaaaatagaattagctataaaatatgtatggcacatcttgtttaattttgcatgtaacttctcttttgtacattgatgaggttttagtgacattgtcatccaacactttacctttattgttcagggaatgccttcgtgattttttgtactggttttattattcagactatggcctggatttgagtatattgttattaccacctggttttttaattattcatcccagtaaacttatattttgtgaagcatttgtttctcagattaagacactgttagaacctaaagtagtagctgatgggtatctgtgaatttttttnttntttttttttttacttgaagtagattgtctgaataggcatcctcatctatatttacccaaaacctcgcttactgtcatgtgcactacaaattgcaatttggaaacctactgtattgaaattctgtcagtttatggttcttgaagactgatgtcctttcccaaacactggttactgcagcagcatttttaatgtgtaagtgaagaaaaaaggccactaaggccaaagattttttaagaatcattgtacaaatcattatgttaaactatctaagctttgctgtaatactgttttctcttcaatatgtgatggtacaggaaggatgttaaatgaaggggtggtattgcaggagagcattttaaatggcagaagtaaaaagttataatatttataattttgatgggtttaagtttatttttgtagggaagatttttctcccctaaaatagtttctagaatggcaaaattgtttccattattaaaaattgaagttattagttaaaaaaaaaaaaaaaaaraaaaaaaa

SEQ ID NO: 741 - DNA, 1057 bp, Homo sapiens
  misc_feature (1056)..(1057): n equals a,t,g, or c
gaaattattaaaaatttcaaggtggtggtcatagagcattaaaccaaatatgaggccattcccaacttgttttccgaggggaaaatggtaatacttgtgtggcacccggggttaaacagcagaggctccatgtggccagaggcagagattagtatcctggcactccagtgacccactgggtgactcactgatgccacagcacccgctaggaagctctgctgaaccttagtatttggtcctaaattttatgactccatggagttcccgtagtccatggctagttaggaagaaaggaggtgggataagggtcaggcccaggtgacccctaagaaccaggagatgggtaaaagtttttttttatattctgcttttctgatctgtgagtacctgtttgtctccaggccaaacctttgggcttaaatatctttttcctagacaggtttttgctagtgttgaattttcttcttcctctggcctccttctgtgcccctttccccaagcccaagactgcttaacttccaaagcaaattctagatagacactgtatttattggtatgggagtgggctctatggggtggtctgcacccatctgggactcttttccctaaatcctgcaccaaatgagtcaggaggcagggtgcacagcattagtttcaatgtggttatgcatcataagcttaacatcagaatgaaaatgaaactcgattttgatgtttctttaaaacccttcccctgtccaatccactcgccgcccccaccttgaatagctaaagtctcttatgaaacagagaagagttgttgacgtctaactccttccattaaattaataagtactgacctcctaatatttaagtgtttactatctattgctgtaaagttttgtatattttgtaaacttttttccccaaatagtagatgtctaaaatcattgtacatctgattcttttatattccattgttcagcacaaagtgtggtttttatttagaataaaaaaagaaatttgaaatgaaaaaaaaaaaaaaaaaaaaaaaaaaaaaaaaaaaaaaaaaaaaann

SEQ ID NO: 742 - DNA, 479 bp, Homo sapiens
  misc_feature (2)..(2): n equals a,t,g, or c
tnattatgagctgtgtaaccttggatacagtttcctcatctataaagttgtggtgggagaatggctgagaacagtgatctctcagctctccagctgtaaagatgttaattatgattttaactctcaagatcaggccacataaggaacaggggaattccaggggtgggacacagctgggggagtccagaccagggcagggaaaggagactcacaagccaaacagagctgctttggggaaagttcttatcagctggtgctgcttcctgagccatatgcccattcctcaagctgtacccctttcttggctatgtaggatgagttcctcctaggcccttgttaggagtggctattggattctaagcggttggggcatgagggaggatattttaaagggaagtatagctgattttaaaagaacctatacattcaagaacaaataaaaaacagcacttttctttaccaaraaaaaaaaaaaaaaa

SEQ ID NO: 743 - DNA, 1519 bp, Homo sapiens
  misc_feature (2)..(2): n equals a,t,g, or c
  misc_feature (19)..(19): n equals a,t,g, or c
  misc_feature (26)..(27): n equals a,t,g, or c
gntccccgaatctccctgnacctcgnngaacccaaccccaacctgggaacctccccaaaagtgctggggattaaccaggcgtggagcccaaccacgccccggcctcttttttttttaagctgccaatctttttggaaggaatattcttacctctactttgtcaccttctactggctccttaactaaaatctgccatttggctctctggttaacagtcccttcctgtaaagtctaaaatcttaattctaaatccacagtttaattcacaagctagtacttgactttttttctgtatttgacatttttgacaacccctactttaaagatttattcccttgacttcttacattttgctcactcctgaaccaccccccaccttttggcctcttcatttattccttaaatgttattcctcagacctccattttttttttctctcttaatcacaacaccacttctcacgcttgggtaattttaattcagcagttcctaaatccttatctttagccagactcctcaatccatctgcctgttgcacttttcttggttgtcccagagacacctgtgtgtgtcttaaaacattcattctctgcaaaacctactctaatgcctgtgtcccttactttggttaattttagaaccattatattctaagttttctaggctcattcctctcctccaccttcccctatcatttagtgtctaagttttactgattttatctccacctctctgatacatcactctttcatcttcattgctattattaataaatacctacagtactaacctgcctcctatacctagctggtctcctctctgttgctcaatgttaccacagcaggctttctagaagcactctgacagtgttactccctaatatccttcagtgacttcaggaactttcaggagaaagccaaactcctctgtttggtgtacaaggtcttctgatgtgtttcctccaccgaatgttctggtgaaacagacttacacttcttcagaagccacatttggccaggcctcccgccttggtaaatgctgtactctttgcatcaagtgtgctagtcatccttccccacttggaaaattcctatgcatcttgcaggcctgacataagcatttcctctgtgaaacctcctttgctccactcaaggagagtcatctaacttccactttcgtgtcaccactgtaattacaacctacctctattgtatgtcacttaaatcgtactgtattgttttatttttcaaaagtctttactagaatgtgagctccttaagggcaggaaaaggaacctttttattttttgcatctccatagcatagtttttggcatatgaatgtttaataaatgtttgttgaataaattgattttaaagtgacatctttattatattagaggtcctacctatattccaaatactttcactcccttcactttacagcaagggtcagtagagtcccaaggatttgtagactttagggggtcaataaagctgaaattgtattcaaaaaaaaaa

SEQ ID NO: 744 - DNA, 1449 bp, Homo sapiens
  misc_feature (200)..(200): n equals a,t,g, or c
  misc_feature (1431)..(1431): n equals a,t,g, or c
  misc_feature (1443)..(1443): n equals a,t,g, or c
ggccttttctctttcttaaaaaaaaaaagtttgcattagttactctaatggagacattgaatggattaatttatttactttttaattcaaattctccttttctttagcccattattcctatgtttacacaaaatattcgagaaggatttagatcacttggaggaacaaggttatttaggtggctttatgaaaaattccgntatccatttgctccaatgtatggaggttttccagtgaagttacggacctatttaggcgaccccattccgtatgacccacagataacagcggaagaattagctgaaaagacgargaatgctgttcaagctttgattgataagcaccaaagaataccaggaaacattatgagtgctttgttagaacgttttcattgataacaaagggtcaactagaagatgatttagtacatttatattaaatgtttgtatctaaggtactgtcttctgaattttgtaggtcctataattagtattttttaaaaaaatcatgttaataagcatctttcacagaattcgtttctttaaaatagtcaattttgtttttgcaattgtgtcaaatactaacaaattacacacctagtaattcagaaaaagatgtcttatttgtaaattcctaacaatttatgctaaacatatagattcttaagtttattaataacagcagtttaggttaaacaaacattcctggataatgcgttaaatttctgtatctgtcgccctgagctgattttgaaagatggtataagctaggggttagtatagttgtttaagttagaaaaaacatgctgttgtctgcccctcattcccttcatgaccttgggcaagtcacgtaatgtttttgtgcctcaacaattcactttttaaaaacatgatcgtatgatgaatgatattattttgttatttatatttactgtgattgataactgttgaaccaaaataataaaataattaatttaaacaatgtcaaaatcctttagcagttatgtatatattttctccattgtgtgtttaaattatgtcatgtccagttgccaagcacaatgaaaaagatgtattattttttaaattgaataaaaaattaggaaaaataaaatttctaattattatttttagtatgatattttkaacaagagtctataggcaaacaatatagggtgtgctgtgcattgtcagccctatactgtggtcttaataatgccagcttaaaaatcactgttgtgctctgcatttcgtgtgttagaagctgattctaggctgaggaaagcaagagttctctacttttgctcaatattgaggcttacccagtttgactctacagctagtgaagyggtttattgcttcaataaaaatatacttgaatgatgaatttatttatgttttgttttgtttttatttagagatggggttttgncaagttggccangcctgg

SEQ ID NO: 745 - DNA, 930 bp, Homo sapiens
gcggcacgagctctctctctctctctctctccagaagtggacttccctgtccccccaggcagaggcaggagtgtggagtctgtgcagagccagccccaggagcccgtgagtgtgccccagacactgactagcacgctggagcacattgtgggccagctggatgtcctcactcagacagtctccattctggagcagcggttgacactgacagaagacaagctgaagcagtgtctggagaaccagcagctaatcatgcagagagcaacaccatgatcaggggagcaggaatcaggagctcggtggatttgcaggtggcaggccagggatttgtaccrtgggacttgggtaaataaaggggactgaactctgtgggaatcacatccatactggagccctggatttttgcagttctgccctccaccttgctatctgcaccaggaggctctccacctggcagccagaggtccccagtgggccgggctcacacacaaatgatgcttcagacccgaatgagaggaccacattttgcttaatgtaaaggagccacttgaaaatgtctgctccttcggggtcctgagattgtggctccccctctggaggaggtggctccacgatgccttgattttcactcatcatttggacatgtgactggcttttcctacctctgccatggtgtagaaattgattgcacattgattggatgagccgggggttttctctaaatctgactaaaggcccaaagtgggcccatctgagtcaggtttgttgagaacaagccctctcaagtgggtggtggcttttcagtggccctgatttctgttccacacgtgttcactggagccaggtgacttcctccttgcgtgagtgagggcacaggaatctcaaaattaaacctgacttcattgcaaaaaaaaaaaaaaaaaaaaatct

SEQ ID NO: 746 - DNA, 914 bp, Homo sapiens
  misc_feature (894)..(894): n equals a,t,g, or c
ggcacgagctgaggcggcgcatgctggaggctgccgacttcgcggctcgcaagcaccggcagcagcggcggaaggaccccgaggggaccccctacatcaaccaccccatcggtgtggcacggatcctgacccacgaggcgggaatcactgacattgtggtgttacaggcggccctgctccatgacacggtggaggacacagacaccaccctggatgaggtggagctacactttggggcacaagtgcggcgcctggtggaggaggtaacagatgacaagactctgcccaagctggagagaaagaggctgcaggtggagcaagcgccccacagtagccccggggccaaactggtgaagctggcagacaagctgtacaatctgagggacctgaatcgctgcaccccagagggatggtcagaacatcgagtccaggaatacttcgagtgggcagcgcaggtggtgaaggggcttcagggaacaaaccggcaactggaagaggctctaaagcatctgttcaagcagcgggggctgacaatctgatcagtgcttgaagctatccagaggcacaactccagcctcgttcaggccggacaggattcatacgccatcttttctgtgtctcctgagctccctccatccttcccagatattagaggccaaaaaaagacttgcattttttctcagtctgaaggtctcctgctaactaagctgagccccgcgtggtgggaatcagatgtacccatccatttctgatgcactcaccgcctctccccaagtcttgggtctgtttgctattttgcatggtgggatctctggcccctcagggacttgagattatttaagtactagttcctaacacgttctggaaaataaaaataactctgggttaaggttnaaaaaaaaaaaaaaaaaaac

SEQ ID NO: 747 - DNA, 1227 bp, Homo sapiens
  misc_feature (37)..(37): n equals a,t,g, or c
gcaggaataattttaaactatttttgctgtaatgtgnagctttaatgtctcttttcagkayggacccataaaagtattcctatatcttgtgaataaagatcattcttgtggactagtacgtggatgcattcataggctttgggaagcagtggtgtgcgtatgtgtgtctatatcaatattttatgtttataactctgcgtattaagtttatatagaaaaaaataatgtctttctttagtgtttgggggactcaatggtaatatgaccattgcagtgtaatctgactgctcactctagagaacacttctgttatacacaatgcacatacaaacatacacccctaaagcgtagctaactgctcccactagataattgctgctaaaaacaaaacaaaacaaaacaatacaaaacaaaaaaaaccctaagtaatggaggaagaaatagcattcttttaaaaggggcttttctgaagagtaaaatgtaaatacaggacatgtggggagggtggggccgcctgcaaaatgtcctgaagatggacaaatagccttttaaattctactttttaaccatctttaccgtgtgtgcctatttgtattgcagatgtgaactactatttttggaggttgatatcagtatgttttgaaactgaattattacataaaatcagagtaacctctttctccatcctccttttccacactattcttgccaaatatttctactgaaacccagtttcagcaaggcaaaatgatgggactctcaaacctccctcctcatcttcccttcccctctgtcttatgcctggcctggccttttttgttgttgttggcttttcataagtaagaaaaatttattgtagtatttcaagactgcagaatttcaagtgtatatctataaatctttttttaaaatcttcggctacacagtaacatcaattaaaacagaagagtgagtctaagtctgtaatatgctgtaggaccagataagattttgaatgagactaaacttgactgccatattttaagaggaaattgaaactttatggtggagaatggatgagagcaagtctatgatatatatgtagtcattgtataattagaaacaccaaatgctgaatcctatcactgtgttcttgggggccaggccttggatttggttgtcatttaaactccttgaagattatatgtaattataatgagcagaaggcaaataaagtttttgaacaaa

SEQ ID NO: 748 - DNA, 775 bp, Homo sapiens
ggatcttcatgttttcacatcttgagatgcaatttgttagcacaggctgtcattccaagacacacaaatgtcattaaggcaaccgcttaaaggagtgtgatattttattgaggtagacaggacaatagataaatatttaatctgttacatgtttgctctgtgtggagccagggttggggctgcacaactctctggctgctatgtgtcttcctggaaaccctgtcaaaggccttaccgcctgcctggagaaacacagtgcctgcccttggcaaatatatgttggtgtatctgaaaaacagctcctggaagctttttctcattcaggctttaggggttaccccatctttccttatgtgtgtaatattggagaatgtacactctcactgaactggggatgtttgacttaaaatgatggacaataagatagtgagcagtaagtgtgctctaggctaggctacgagaggccatgagctcctcatctcttctctgttctgagctctctgatccactgcacttggggcagggggtgcattctctgtgcctctcctgagtctactttctgcatcattggttctcccagctcacttccataatgtcctcctaggctgcattggaattgtgtgttgtctagacccatggccaagactgtcattgcctgtgagggagaccaagctcaccaccaagggcttttgccagattgctttcatttacagaatttgcccattcatgtgtctttgtgtttatggattaaatggctttctgaccagcaaaaaaa

SEQ ID NO: 749 - DNA, 1437 bp, Homo sapiens
cggtgtaccgtgtcttaaagcccctgaaagawaacgctaataamgccaaaagcttactgctcactaccatacctcagatagggtccacagaatggtcagaaaccctccmtaacctgaagaatatggcccagttttctgttttattaccaagacattaaagtagcatggctgcccaggagaaaagaggacattctaattccagtcattttgggaattcctgcttaacttgaaaaaaataygggawagacatgcagctttcakgcccttgcctatcaaagagtatgttgtaagaaagacaagacattgtgtgtattagagactcctgaatgatttagacaacttcaaaatacagaagaaaagcaaatgactagtaaacatgtgggaaaaaatattacattttaagggggaaaaaaaaccccaccattctcttctccccctattaaatttgcaacaataaagggtggagggtaatctctactttcctatactgccaaagaatgtgaggaagaaatgggactctttggttatttattgatgcgactgtaaattggtacagtatttctggagggcaatttggtaaaatgcatcaaaagacttaaaaatacggacgtactttgtgctgggaactctacatctagcaatttctctttaaaaccatatcagagatgcatacaaagaattatatataaagaagggtgtttaataatgatagttataataataaataattgaaacaatctgaatcccttgcaattggaggtaaattatgtcttagttataattagattgtgaatcagccaactgaaaatcctttttgcatatttcaatgtcctaaaaagacacggttgctctatatatgargtgaaaaaaggatatggtagcattttatagtactagttttgctttaaaatgctatgtaaatatacaaaaaaactagaaagaaatatatataaccytgttattgtatttgggggagggawactgggataatttttattttctttgaatcyttctgtgtcttcmcatttttctacagtgaatttaatcaaatagtaaagttgttgtaaaaataaaagtggatttagaaagatccagttcttgaaaacactgtttctggtaatgaagcagaatttaagttggtaatattaaggtgaatgtcatttaagggagttacatctttattctgctaaagaagaggatcattgatttctgtacagtcagaacagtacttgggtttgcaacagctttctgagaaaagctaggtgtttaatagtttaactgaaagtttaactatttaaaagactaaatgcacattttatggtatctgatattttaaaaagtaatgtttgattctcctttttatgagttaaattattttatacgagttggtaatttttgctttttaataaagtgsaagcttgcttttttaaaaaaaaa

SEQ ID NO: 750 - DNA, 1389 bp, Homo sapiens
gggacggcgggcacagcgcagcactccccgctcgttggcccgggtatcccagcgcggacccacgcgatacgctgacgccccgacgccgatccggccgagccaagactcaacgatgactctgaataatgtcaccatgcgccagggcactgtgggcatgcagccacagcagcagcgctggagcatcccagctgatggcaggcatctgatggtccagaaagagccccaccagtacagccaccgcaaccgccattctgctacccctgaggaccactgccgccgaagctggtcctctgactccacagactcagtcatctcctctgagtcagggaacacctactaccgagtggtgctcataggggagcagggggtgggcaagtccactctggccaacatctttgcaggtgtgcatgacagcatggacagcgactgcraggtgctgggagaagatacatatgaacgaaccctgatggttgatggggaaagtgcaacgattatactcctggatatgtgggaaaataagggggaaaatgaatggctccatgaccactgcatgcaggtcggggacgcatacctgattgtctactcaatcacagaccgagcgagcttcgagaaggcatctgagctgcgaatccagctccgcagggcccggcagacagaggacattcccataattttggttggcaacaaaagtgacttagtgcggtgccgagaagtgtctgtatcagaagggagagcctgtgcagtggtgtttgactgcaagttcatcgagacctctgcagctgtccagcacaacgtgaaggagctgtttgagggcattgtgcgacaggtgcgccttcggcgggacagcaaggagaagaatgaacggcggctggcctaccagaaaaggaaggagagcatgcccaggaaagccaggcgcttctggggcaagatcgtggccaaaaacaacaagaatatggccttcaagctcaagtccaaatcctgccatgacctctctgtactctaggaacccagggtcacccagatgtccctttgatggccgttgttgaaggccattgggaccaataatctatattagattgaatacttaagttagatgtggtttcccccattgtagcagggagctagcgtattagccttgtgggcaacatgatgcatgggaaatgaaagatttttgtaaaaagtcagtatttatttccaggaaaagcctgaccttgctatttgaacacccaagactctttagaggatgtgtttggtgttcacatgkgtttyttytattttggatagtagrgaagtaaagcttacaaagaatgcctagaacaagaacttttcatcattaaaaatttttcccagtgttytgaaaaaaaaaaaaaaaaaaaaaaaaaaaaaaaa

SEQ ID NO: 751 - DNA, 852 bp, Homo sapiens
gtttcttgcgggggataaaaaagggcttgggagattcatgcgatgtgtccaatcggagacaaaagcagtttctctccaactccctctgggaaggtgacctggccagagccaagaaacactttcagaaaaacaaatgtgaaggggagagacaggggccgcccttggctcctgtccctgctgctcctctaggcctcactcaacaaccaagcgcctggaggacgggacagatggacagacagccaccctgagaacccctctgggaaaatctattcctgccaccactgggcaaacagaagaatttttctgtctttggagagtattttagaaactccaatgaaagacactgtttctcctgttggctcacagggctgaaaggggcttttgtcctcctgggtcagggagaacgcggggaccccagaaaggtcagccttcctgaggatgggcaacccccaggtctgcagctccaggtacatatcacgcgcacagcctggcagcctggccctcctggtgcccactcccgccagcccctgcctcgaggactgatactgcagtgactgccgtcagctccgactgccgctgagaagggttgatcctgcatctgggtttgtttacagcaattcctggactcgggggtattttggtcacagggtggttttggtttagggggtttgtttgttgggttgttttttgttttttggttttttttaatgacaatgaagtgacactttgacatttcctaccttttgaggacttgatccttctccaggaagaaggtgctttctgcttactgacttaggcaatacaccaagggcgagattttaaaaaaaaaaaaaaaaaaaaaaagaaaaaaaa

SEQ ID NO: 752 - DNA, 446 bp, Homo sapiens
  misc_feature (321)..(321): n equals a,t,g, or c
  misc_feature (372)..(372): n equals a,t,g, or c
ggcacgagaagccctggacacatggatttgagtcctaactctgtctcttagatttttgtatgcagttttaggtcttatggccagagagatttgaagatatttaatatctctaagctgcaatctttatctgcaaactggggttagtaatccaatcaaccttattgcggatattgtaagaaaaaatgagatgacaagtgtaaaaactcagaactatacttacaaggtaagcagacaaaatatgctattgttgtgattgttttctctctgaataaataaactctgctgaagaatttattagatatgtttctcgaatcgagaatncagttccagctctcatttctggcactgacatattggccaaatatgattctnatacaataatcagctgctttgctgtgagccttggagtggtcagctgttgatggmctgcttgtattcctattcag

SEQ ID NO: 753 - DNA, 892 bp, Homo sapiens
aattcctaaaattgcaaataatactcaactatgaagaattttattagttacagtgctattaaagaatatgtgctcctttttattatattatcagatacttatgtttaattgtacattttttaaatcctgaatatattgtgttttgttaacaaatgtaatcagtggaacccttcttacgttttgattattagcagttaaatacattttgtatacatgaagcttagattaattcccatcatcatcatctcctgtttttatatgtgtccctatgtgtttcatgcattcctctttgatcagattggaatttgagttaaaatttagctttgtacattacgtgtgagagttacagactagcaagtctaattactttgccttaccttgagtgtatgccacagggtcagataacacattaaacatttagttacactggattactcttccaaagctgacctcctgctaatgttcagaggtaactgcaatccggaaagaaataatatcactgcagaaagaatgtgactctaaaaataaaccaggacctccctgtgatttgccttgcctgcagatgaccagttgactcttgtgctgtcagccctggggttgctaaggaagctgcttcagggagttgggggttagttgcccgctctcaacaggaatgcctcctctactttgtcagagatgctgaacaaatatcaaactctgtggcagtcatgctggcctcctaagaataacctgtgagtcagagttgatgcacattatttttgtttttattttatttttttaaggaactgctccaagggttcattatagaacaggagtgtgtacggaggacttaggtccccacatagagtggccgttctgtaatgaacccttggagcagttccttaaaaaaaaa

SEQ ID NO: 754 - DNA, 700 bp, Homo sapiens
  misc_feature (175)..(175): n equals a,t,g, or c
  misc_feature (178)..(178): n equals a,t,g, or c
  misc_feature (249)..(249): n equals a,t,g, or c
  misc_feature (683)..(683): n equals a,t,g, or c
  misc_feature (692)..(692): n equals a,t,g, or c
  misc_feature (694)..(694): n equals a,t,g, or c
tgcaggtaccggtccggaattcccgggtcgacccacgcgtccgatttcaaaagctaatactataatacattttcataaaaatgatgttttaagggtaaaagaaaagaagtaagctattttcctagataaagctgcccagtctaacaagacataaaacatgtttttcggcctaggnttnttatcaatttagagtggtaatgctgggtcagatgttttgattaattaatctttgattaataagtataaganagctaattattagaagagaaggttgttttataaacatcatctttcaaaattcgagatttatggggaataaattaggagaaggtggttaaacctcttcaacaataaattgctctttggggacattttatgcacagaactgtgcaccctcctcagaacagcaggtctttaatggcccatgtgatgagaagggccccatcaaggcagcaggaatgggccactctcccacaccccatgggccaggccactgccactcctgctgccctgcatccccaggtttatggctgcatggtagaagtcacttctgtaagaaattcacctttctaaaataaagtatgctcttttttctgagacatctatagaataacttgtggcagagtgttttaaaaactgatttggattttttttatcctttaacccgtgtgaaaggatggaanggattttangnggaaga

SEQ ID NO: 755 - DNA, 442 bp, Homo sapiens
agcgagagggagacccagggggctgaaacttgaactctggttcttttaaaattaattttggttggtgttgggggaggcgcgagtgcgtgtgagaagaaccgacccaccccgcgcaaggggaagcctcctgtctcccctttccccgcgtccgagraggcggaaacccacagtgttacctgacttatgaaacttgaaaccgcctctggagccgccattctgcagagtatttggaaaaagaaaaaagggtttatgcttacgtctctggggtcggggggattatgtcacgagcgttcaaactgctggaaatctcaaaactgtactgtctttatttttgtatattgtatttatatataaaaagaaacgtctacgtatgcatgctaaattattatttagcgtctcccatcgcccacgatggaatgtaaaataaattggttttgtactg

SEQ ID NO: 756 - DNA, 1329 bp, Homo sapiens
tttactccaggtagatttccacaatatgcaaagtggtggtggggtcaagacagatgacaccagcactttaaactctttgtgtgggtatgcgtgggtgtatgtttgggaagaaaaacaaaggtgcagactatcttcctttttttcttcttcagcctccatccctggcctcctcccctcacacacactggacttggtacaaaatgtcggtgtggtcctagatgaagcattggggtgggggagggagagggagctttgtgttaagtgcctactggaaatgcactgtggggttttttcctgtatgggaaaccatttatgccaagcttttccccatttcccatatttatctcatctggttagctgcctctgcttccagctttgtgtaattctctttgccagctgcacaaagctgattttttccaaagtctaaagactgagctcacctggctagattgttgtgtgttttgttgaattttttcataatgtaatgccgtatttattgtttttaaaatgaaaggaatactaataagtcttaaaagttccttcatgcataagatttttttccagttactgggcttaactggtgtacattaattagatgtccatactgtattttgtttgcattaagtaattttctttttgacttagtatccggcacacaaagtgggttagtactacagtatttgcgttactttaagtactaagtatgcaggtttcctggtaccattgagttgctgctattaaagctcacacacgaaatggctaaaagttacaagtgtgcaaattatgactgcgtgagccttagaaaataaaatgtataaagggcaacacatgasctgtcaaacagtgttaggagtgtgtttatatgtacagagttgtgcatagcaatcgttttatttaagttgatatgtagtctactcacatttycattatttagcaattttgtacaaaaatagcmattaatttgtaaacactgccagaatactttctagctgctttgtaattttttaagagtgttattttgtttttgtttttctgttctttgttgtggctcttgttttcatttttgttgtacgtgtagatctgtaaataaaattgcagtatttaaagcttaagctttcaggaaaaagaaaataagaattcagtgtgtgcatgacaactcgtgtgtatgagaaggagggatatgaaggaagatggcttgcagagtaagtcgggtggcaattgtcagggtgtgatcttaccacttcaaatgggtgtaatttgaataaattttgtatggtaaaggatcaataaaatgattttttttaagaaaaaaaaaaaaaaaaaaaaaag

SEQ ID NO: 757 - DNA, 239 bp, Homo sapiens
  misc_feature (204)..(204): n equals a,t,g, or c
gagaacttctgaagtggtggatcaagtacaattctaataagggaccagggtaagtgacttggcaacaatttccttgggaagctgccaaaatcttatcttcagtctcaaaactcctatctgcagtcatagctagtctagaaaggtaagtcttgatttcttagctaaatgagtaaagtttgtattctacaaagaaaatagaatacnaataaaaataataatggagaagcaaacttaaattc

SEQ ID NO: 758 - DNA, 1589 bp, Homo sapiens
gctttagaagaacatttctagggaataatacaagaagatttaggaatcattgaagttataaatctttggaatgagcaaactcagaatggtgctacttgaagactctggatctgctgacttcagaagacattttgtcaacytgagtcccttcaccattactgtggtcttacttctcagtgcctgttttgtcaccagttctcttggaggaacagacaaggagctgaggctagtggatggtgaaaacaagtgtagcgggagagtggaagtgaaagtccaggaggagtggggaacggtgtgtaataatggctggagcatggaagcggtctctgtgatttgtaaccagctgggatgtccaactgctatcaaagcccctggatgggctaattccagtgcaggttctggacgcatttggatggatcatgtttcttgtcgtgggaatgagtcagctctttgggattgcaaacatgatggatggggaaagcatagtaactgtacccactgtgaacccagaaatgccacaccatggaagccacacactctgctgtctccttctgtcctcattcctgtccttctcacagtcagtccctcttggctcttcctagagtccctttcattccctcatttccacttcctgccgctgtactgtcacctgtggcctggatttgcactcttggtccaacaccctcaactycaacacctctgtctttctgccccatccactagacaaaagctgactctggaaaacattaggcactcagaatcaagggttctggggtcagatggataattgccatcatcctcaccaagttgccactggactttcttgcccctaaatccactgggcatttcattgctacctttcttgacttcttgattgtttttgtgatactgacacatcccccctttcagaacaccctctgcccttggattctgtgcacaggaagctagttgctcccctgaatacactctttcttccttgtaatacagcctctgattttgagcccaagaataaagactacagttctcagactccttcgcaaataaattttgtgactaaactctagtcaacagtaaggtcatgtagcagctcytggkaatctcctttaaaaagagagcttgtttatacctattgksatctctgttcttctgtgcccctkcttccattttgctgcctggaaagcagatgtgatggctgkaattccagtcaccattttggaccatgaggacaacaccctagagatgtggagtggctaaaagaagcctgtgttcctgagaacttagaggaccaggacctctattccaggcttggacacctacatttagactattatatgaggaagcaatcaacttctcacttgtttcaaccactttcacttgcagtcaaacctgaattgtaagtgaaattgctttcctgatagcaaacctgttggattttctccagaatccctgggccacttttagcagtcagattcgtctaatcctcctttaaagatggtggcagtgaaactggtacatgggacctgactgggctttgtttgcaactttctgataatttataattatttcaaaataaaaaaattttaaaaata

SEQ ID NO: 759 - DNA, 633 bp, Homo sapiens
  misc_feature (627)..(627): n equals a,t,g, or c
  misc_feature (632)..(632): n equals a,t,g, or c
attcatactagcatgctcatgaataaggcaatgtgttaagcactggcatacaaatgcagctaaaggtgctgaaggaaggcagtggggtggtgcaggcacacagcagggagctcttccccgtgacacgttagtcatcttctccacagagcascacccaaswgccttccttcagcacctttagctgcatttgtatgccagtgcttaacacattgccttattcatactagcatgctcatgaccaacacatacacgtcatagaagaaaatagtggtgcttctttctgatctctagtggagatctctttgactgctgtagtactaaagtgtacttaatgttactaagtttaatgcctggccattttccatttatatatattttttaagaggctagagtgcttttagccttttttaaaaactccatttatattacatttgtaaccatgatactttaatcagaagcttagccttgaaattgtgaactcttggaaatgttattagtgaagttcgcaactaaactaaacctgtaaaattatgatgattgtattcaaaagattaatgaaaaataaacatttctgtccccctgaaaaaaaaaaaaaaaaaaaaaaaaaaaaaaaaaaaaaaaaaaaanaaaana

SEQ ID NO: 760 - DNA, 967 bp, Homo sapiens
gggaggctctgaggaccaattggaagacccagcactaagtggtaaggcttgggagtgtgaaatggggaggaggggctgggatcttggtgggtggggccaggccctgagtccctctctgcttgcctttcagagcctggggaggaacctcagcrcccttccccctctgagcctggcacataggcacccagcctgcatctcccaggaggaagtggaggggacatcgctgttccccagaaacccactctatcctcaccctgttttgtgctcttcccctcgcctgctagggctgcggcttctgacttctagaagactaaggctggtctgtgtttgcttgtttgcccacctttggctgatacccagagaacctgggcacttgctgcctgatgcccacccctgccagtcattcctccattcacccagcgggaggtgggatgtgagacagcccacattggaaaatccagaaaaccgggaacagggatttgcccttcacaattctactccccagatcctctcccctggacacaggagacccacagggcaggaccctaagatctggggaaaggaggtcctgagaaccttgaggtacccttagatccttttctacccactttcctatggaggattccaagtcaccacttctctcaccggcttctaccagggtccaggactaaggcgtttttctccatagcctcaacattttgggaatcttcccttaatcacccttgctcctcctgggtgcctggaagatggactggcagagacctctttgttgcgttttgtgctttgatgccaggaatgccgcctagtttatgtccccggtggggcacacagcggggggcgccaggttttccttgtcccccagctgctctgcccctttccccttcttccctgactccaggcctgaacccctcccgtgctgtaataaatctttgtaaataaaaaaaaaaaaaaaaaaaaaaaaaaaaaa

SEQ ID NO: 761 - DNA, 695 bp, Homo sapiens
attcggcagagstgagtggataggaggtgcagcagtctttgggtagcagcctactcaagaaaagaatgataattacatactcacaatctttagccatcaagcacttatttcctcaactccccctccccctggcctattgccaaaccctaaatcctgtatcctatttacttcatgcctgttggttactaagtagttccatttagagtacacattcattgttgccttgaacttgctctgctgttatggcacctgaaaactagatgttcttggatgggggtcttccttcatcaaagcttcttcccatttgtacttcagttctaggacaaggcaagargaaagcaagaagctgtaaatcccattcctctgggtctcaatttcaccctcagttcaaggagctgagtaggcagaggcaaaggctatactcaacacacgtgcaattgaaagcaggcgaggcaaaaccagggcagaggaaaggaaaggggtgtgtgtaggtatggatttatgggtaggtgggtcggtaggttagttgaagaggaggttctaagcagtataacctaagcctcttttctctttcttctgcttcaaacaccttaagaactgctcagggtagactggagacaaaagcaacagctcagaagtgctaaatcttgaagagcagccaaagcatgggcaacaaagtgagaccccatctctac

SEQ ID NO: 762 - DNA, 390 bp, Homo sapiens
  misc_feature (370)..(370): n equals a,t,g, or c
aagcggccgtgaaagtgttgtgctatcgacaacggtatgcaggccgccttttttacgcgcccagctgacgggtagccaggtgcaaccattaagcatcgcaatctgttgctgtgccagttcagcagaactgswtgtcagaatgggcacttcgtcagcaccgatcaaacctgcctcatgctgttgaaaatctggcccccactcaagtcgcagataattaagatctccctttagttttgaaggggcactggtataaagcgctaaagtgaaatatcccagcaactgactactwaaattcgtccattttgggcgcttcagtggtaaataaggaagatcaagctggcgttcatgcagctgttttaccagagactgnccgtttggggcaatttcggg

SEQ ID NO: 763 - DNA, 508 bp, Homo sapiens
gcctgactggttcatcctccccggaacttcctagacgccgtacgtgccagatggtgttacctggagcttaaaaagctgcacgcaagtgttaaacttctgacaatggccaagaacaaattaagagggccgaagtccaggaatgtatttcacatagccagccaaaaaaactttaaggctaaaaacaaagcaaaaccagttaccactaatcttaagaagataaacattatgaatgaggaaaaagttaacagagtaaataaagcttttgtaaatgtacaaaaggaacttgcacatttcgcaaaaagcatttcacttgaacctctgcagaaagaactgattcctcagcagcgtcatgaaagcaaaccagttaatgttgatgaagctacaagattaatggctctgttgtaatatactggtgatgcatctaattctccacaaagaccaataaattgaatgttttatacaattttaaaatcttgtttatgtacgggcttgggcactttttaaaacc

SEQ ID NO: 764 - DNA, 1162 bp, Homo sapiens
tagttctagatcgcgagcggccgcccttttttttttttttttttttttttttttttaaagagagtgtgtatgtactttttctctctataagggccagggtgttggtcaaattcaccatcgattaatttatatcttctgttgtgatttttttcaactatataacaagtgccaactaattgtccatgggacaatctacttttccactcaatttatcgttttgagtagggaaaggttcatttattttcattacctggcattaagttaaagaattcattattttgcatacatttgagtcattctgtgacctataaagtgtttttgtaactatctaattctaatggttgcaaagcaaagcacatgactgtaaaaccaagcaaggtgttttagtaactttttccctgaatacttggtagtttccattgatactattccaaaacaaattctgctgttttaggttgtatatttactttgcttttgttctaagaaaaagccaaggactaaatcaacttgtttttgtgtttcagtaatcagtttaaaatctaagatttttttttaaattagactatttaatgaagtgccatgtaattgtagcttgctagtgtttaatgtttaatagactggttctgtaggtgttttaaccatttaacactctctgccatccctggagaaagtggttctactcttactgaacacattctctctgacaaaatcaccagctgctttatttttctatttattacagttaaacagttgatgaggtctgaatcttgaccaaaactgctcagctgagatgtttttcacaatagacactgtacaaagtgtgcgtgcaaaaggacacggttggtagtattttttcattaatgtgaacattgactaaaaaaaagcagtcctgccttttaaatcttgtggcagctcagaagggaggtgcttaagaaccttaactactatgtcagataacaaaatatttttttccattttggagattggttactgctcacacatgatgtatagggctaaatatatgcttgtttccttgcacctgtgtacttcccctctctccctccctttccttcccctgtaggcaataaatggccattttgcaactgcaaaaaaaaaaaaaaaaaaaaaaaaaaaaaaaaaaaaaaaaaaaaaaaaaaaaaaa

SEQ ID NO: 765 - DNA, 1087 bp, Homo sapiens
gcccacgcgtccggcgtcttgwggctgcggcctgcccctcagcctcctccgcgcggttacccctgtacccgccgccatccgtcctggcgctccggatgagtcaatgaggggcagggcccgaggagtggtcttcccaagaacccctggtggcctcccaaggccggtgctgtgtacctcctccccgacaaaaggggaaactgaggccccgaggggagtgggaagagccggctggacgtcaggcccagccgctggtgcagtggtccgtcccctctgccggggtgggcccctcgggtttcgcgtgtcctcgggaaagagactggcgggcctcgtgggctgtgcggctatcctggagacagatgacagctctccctwggatggctttgctggttccgcaccagccagcgcccccatttttcctgcagcaccctgatctgcactccctgaggggctcccactgtccgcggtgtgaggatgtccctggatagtccactgtgtgcagaggcatgggagttgtcatgttgggaacatgctagacctcagtatccttgagggatgctgccttgggtctggaaactgttagaggaaaccccaagaggtgcagscactgagcctctcaggacaatgacctggggtcccagctcccctggaggggcctcctcatgattgtttgggggttgatcacagaccaagagtgacgagtgatgtcaccctgtgactcatggccggaccttcttgcccctattgtctcagcacaacattattcgacttttccctcagcgtgggtgggcagaggaaaagccctgtggctctggggacttgggatccagagttgaagacccttcagctggctctgccctgccagtgccacagagtgccatggcccaggaagacaggttttcttccatctaggccaggccatccagtggccatcctccgtgtcctcccgcctcctcctggtgtgacttctgaaaaccaagaatttgttcctgttgactttttctgtgctatggaccattgtcctctcacccactcaataaatcttgaaacatgmaaaaaaaaaaaaaaaaaaaaaaaaaaaaaaaattac

SEQ ID NO: 766 - DNA, 803 bp, Homo sapiens
  misc_feature (773)..(773): n equals a,t,g, or c
gacgggtcatgagcgcggtattactgctggccctcctggggttcatcctcccactgccaggagtgcaggcgctgctctgccagtttgggacagttcagcatgtgtggaaggtgtccgacctgccccggcaatggacccctaagaacaccagctgcgacagcggcttggggtgccaggacacgttgatgctcattgagagcggaccccaagtgagcctggtgctctccaagggctgcacggaggccaaggaccaggagccccgcgtcactgagcaccggatgggccccggcctctccctgatctcctacaccttcgtgtgccgccaggaggacttctgcaacaacctcgttaactccctcccgctttgggccccacagcccccagcagacccaggatccttgaggtgcccagtctgcttgtctatggaaggctgtctggaggggacaacagaagagatctgccccaaggggaccacacactgttatgatggcctcctcaggctcaggggaggaggcatcttctccaatctgagagtccagggatgcatgccccagccaggttgcaacctgctcaatgggacacaggaaattgggcccgtgggtatgactgagaactgcaataggaaagattttctgacctgtcatcgggggaccaccattatgacacacggaaacttggctcaagaacccactgattggaccacatcgaattaccgagatgtgcgargtggggcaggtgtgtcakgaracgctgctgctcctagatgttaggantcacatcaaccctggtggggacaaaaggct

SEQ ID NO: 767 - DNA, 796 bp, Homo sapiens
ggcacgagggaagaagaaaaaaatggatgttggaaagttgtwgcatgtctctctggatagctcagaagtatcagttgtggttattscctcacttggcttttgtaagcatgaaaaagccagggacaatttcaactaccatttctgaccatcatcaaccacaaattttaggcaatttgttagaattttttttaaatgttcttaatagttgttgggtacctgggagatttcagagaaagtaatcacctttgtatatattattaatgtgtttataatagaaattaaattctttgggatgtacaggtaagataagctatgtgaagcatagctgttatccaagtcgtgtgcctttgaaatacttggaatttgaagaacaggacatgcagcttatgttataattaatttgcgagcaatatatggcatgatagtattttcttatctaaattctgagtgcattgaaagtttaaagcaaaggacaaaagcttcctttgttcatggcccatattccagtatatttttctgaaactgccaatattttctgatcggtactttcatttttctagttggttaccaaatactgttattggtattatttctatataaaaggctttaagaagactatagtataattttcttaagaaaaaagacatgattataagctaaaatatgccttcggttttgtgtgctacaaattgagggagattgagaatattttaaatcaagggcmgacattgagtaaaagcttatgactttggatggatttgaaacaygattaaatgacagagtaaataaaaaaaaa

SEQ ID NO: 768 - DNA, 335 bp, Homo sapiens
  misc_feature (271)..(271): n equals a,t,g, or c
  misc_feature (312)..(312): n equals a,t,g, or c
  misc_feature (316)..(316): n equals a,t,g, or c
aattcggcagagggttagaatcagtctagaaatcatgtcaaattcttatcacttgctatcaaactagctggttcaattccttattagtgatctgcaataagataaaatcttgtgctacaacataaagcaactatctcaataaacacagtttaattcagctaactttatttttttttgtagcaagawtttttcagtgaaataagtggtgtgttgatttatagtttggtgcaagctccctatcttcttgcagacctataaccattgtgccagngggtaagaaatggtccccagccccttcacccgtggcactgncccncacagggaacccctttggc

SEQ ID NO: 769 - DNA, 1019 bp, Homo sapiens
gtggtgagctgagatgacgccattgcactccagcctaggcaataagagcaaaactctgcctcaaaaaaaaaaaaaaaaaaaagtctaaaggcttaaagtttgatgcagctacctgaaatgatcttttatttatttattattagaaaaagcaaaggcatatgggcattgcttattagtttgaattctagagactagatcttaaagtagtggttctcaaagtgttgtgcccgcaccaacatcagaatggcctgcaaacttgtagcaaactctggggaggaggccagcattctgtattttaacaagcttccctcaggagattmtgatgcctgctaaattttgggaaccactgttttaaaggaaactttttttttctttaatagcatttaattgtatgasatgattgcttttacatgtgatttccttgcaaatgttctgaagttgaggcatcaccaaacaagtctgaacaattctttatgtgatttatttttaaagtagaccttttgaagagatctatgaatgggatataaagcaattttcagtgttacaggttttcttcttcttctcaaaactgtttgctgtaagtaactgcaatcagtacttactactttccatttgcttatgagtttcttgacaaatcaaggtgtagaaaaccagttattaagtgattttgtactttcctggtagttgtcactaaaataatttttgtggcatataaatatatttaataaaatgcaaaaattatcttcctgtctagtagaaaaaattacatgagtaaagtgaagcttctgtctttgttactgtaccaggtgacaacagmtgagtgtccctccatggacagtcactattggccttttgagtgagacagttctttaggataaaarcctgtcatcccattgcaggattcatttagcctttctggcccttacccastgatgctagtcattgtgaccaccccacctcccccaaataaaagtgtgccaaactaaaaaaaaaaaaaaaaaaaaaaaaaaaaaaaaaaa

SEQ ID NO: 770 - DNA, 1504 bp, Homo sapiens
  misc_feature (1383)..(1383): n equals a,t,g, or c
  misc_feature (1441)..(1441): n equals a,t,g, or c
ggtcgccggaaactccgggcggcggaggctggaccagagtcgagttccctcctcctgcaccaaagggagccgccaccgtctggtgtctaaaccgcctcggttccagaaagctgagtctgatctggattacattcaatacaggctggaatatgaaatcaagactaatcatcctgattcagcaagtgagctgtcaccactgactaaagaagagaaaactgcggcagagcaattcaaatttcacatgccagatttatgaagaaatggacttggaaaggaaattctaacagagaagagcttaattccggagaaatttaggaagatgtcttgttaacccttgatgtctagagattgggggctggtgaagggggtttggcttcaatgactggataatgatatctttcatgagagagattataagaagaagggcagataatatatgaataaagttcagccaaaaggatcaaatgagaataaaacgatttaaatatatgtacacacgcatgcacacacacacttagtcttgtaatttcaggccagaaattctcaacactattttgcatctgttttctttttctaagtcatgataatatagatgttctggtctatcataaaagaatgtttatgtacatttcagtcattcggtatgtggctttgtaaattaaagtataggcaaaacatttgtgttatacatgatatataatttcattttgtaaatgttgattgcacatgtggtcacattattgttgagactgcttttatgtgacctgtagtctcccacagaacctaaagtaataagctggcttttctgtgatagccacgtttgcgtatttctttccctatttcccttgcctgctaatgttgaacagcatgaacttgctttctgatgctgttttagactgtccctgttgtatctcaataatatctttgttttccttcagcctttattactataattgttcattctacatgaaagctaggaaactgraattagaagagcacttatctgctacttgccagttttgcgtgagtgtgttatatgtatgtgtcaatttccctttaaaataactatttattttaaaataactattggcaataaggaaactgttcaaagtagaggcagatcttgatagaaagatgttaatcacagggttgtttataatagcaatatacatacacatttggctagtactaggtgaataggaaaataaatcatgctgtatgtatacaataagaggtcaagttgccaataaattattactgttaatgttctgggraatgctgraactatgctaartgggggagagggraagcaggtattgcarttttgtartgaagattgggctttggagtcatatctgagatgtaagtagcagcttttaaatncctagctatgaccctgtgcagatcacttaacttttgagtggtcaggatgttggaaggncaagacaggaaagtggttttaataccagggtcccagtatttagtaagcctccaataagtgata

SEQ ID NO: 771 - DNA, 813 bp, Homo sapiens
gggccgaggcagggggatcacctgaggtcaggagtctctactaaaaatacaaaaattagacaggtgtggtggtgggcgccactcaggaggctgaggcaggagaatcacttgaacccgggaggcagaggttgcagtgagccagatcatgctgctgcactccagcccggccgctcaccgtgtgtgttgctgggtgctggggctgtgacttaycccctctcctttagccttgccataagtgtagtatcctatgaggctgagattgggaaaggttacatgcaggtaagccagtggacgtggccgatgcttcaggctccttccagccaggtccagcagtgttaccatctgcttctcctgggaggacaaaccaggcacccccaccatgaaggggctgcaggcaccatgaactatgttaacaaccccagtctgtactacagaaagggctgcagccacatgagaattcagtccacacaagccccatggccgtgttccccacttcagccacagggctcagggagccccatctggcgctaaggggaactgctggggtgtgggtgacacctggcctttggcgttctgccttggggaggtttctggttttgttacggggtggaagaataggacctgggggtctcggatgcaacctgcagaccccgtggctcacccaaccccaggttctgcctcccagaccagaacgggcatggcctggtccttggcaccgaggtgcctgctctgtaaatatcaagggattacaactttaataataaagcagaacttgaaaacaaaaaaaaaaaaaaaaaaaaaaaaaaaaaaaaa

SEQ ID NO: 772 - DNA, 2013 bp, Homo sapiens
  misc_feature (1976)..(1976): n equals a,t,g, or c
  misc_feature (1995)..(1995): n equals a,t,g, or c
  misc_feature (2004)..(2004): n equals a,t,g, or c
gcggccgctccaacatcagaatctgagctccgggtgacgcggctgcggtagctgcggatacaagccttccgcgggtcctgcctggcgaccccgacctcctcctgctgtctctccgctccgccaccccgaacccgccaaggtcctgtccttttcctcctgtcctttgccagcgttgggccggaccgggccgagccgggccgcccgggcgcagtctttaaccatggcgtccctcttcaagaagaaaaccgtggatgatgtaataaaggaacagaatcgagagttacgaggtacacagagggctataatcagagatcgagcagctttagagaaacaagaaaaacagctggaattagaaattaagaaaatggccaagattggtaataaggaagcttgcaaagttttagccaaacaacttgtgcatctacggaaacagaagacgagaacttttgctgtaagttcaaaagttacttctatgtctacacaaacaaaagtgatgaattcccaaatgaagatggctggagcaatgtctaccacagcaaaaacaatgcaggcagttaacaagaagatggatccacaaaagacattacaaacaatgcagaatttccagaaggaaaacatgaaaatggaaatgactgaagaaatgatcaatgatacacttgatgacatctttgacggttctgatgacgaagaagaaagccaggatattgtgaatcaagttcttgatgaaattggaattgaaatttctggaaagatggccaaagctccatcagctgctcgaagcttaccatctgcctctacttcaaaggctacaatctcagatgaagagattgaacggcaactcaaggctttaggagtagattagtcaaaagaagtcatactattttgcttacttataattatgtagtataaaccaagcacagtgcagatttcttttacaaaacacatgtattttgcaaaaaaaaaaaaaatgaagaccatgagtgaacagttgtttcctaacccatggctatttagaatcttttgccaaagaatgacaatgatgcaaaaatgggaacagtttggattttaattagaactgtttaggagtgatgatgtgtaaaaagttgacttctcttttgcatggcacagagaaattatattccttacttcatgtcagtttatgttctaaatctttttcactgaatataaaaatcttgttaaatgccattaggcaccaacttaaagagggttgtaaaaatattaaaagtatatcgttaattctgtatctgttgcttgtcttttgtaagtgattatgtgttatgaccataggtggttacagctgccaaattatttttaaatggtcaaaaagaagagtgctatttaaacatctgtcttaaacaaaaactgtcataacttttcttttttctttttccattaggagaacattctagttggtaaatttcaaaatgtgcttgacacctgccttaaatagcacagacctattgtgcacatctttaaattatttcagctggcagaaaagaattacatttaaaactgaaatcaaggcctcaatacaaagattatcctggctcttttctatctctgtgggcctaattgaaatatgtactcttattttagacacgcctctgttaaaacagaccaggttttcctggtctcagacctatgatgacttgtccctttgatgtcactactgtgaattgaatataattagtaaaaatagacgatgaataaataacactttatagtaagaaaacaatatattttggccatctaaaaatgagaattataattatatgaattataatttaaactgtttaattttgtttaatgtgtatattgaatcttccaaattgaagccattattctcaattaagtactacaactatgacaatgcttgacctacatttctaaaataaaaattcacattttttgataaataaactacagttttaccagaaaaaaaaaaaaaaaaaaancccgggggggggcccggtncccatttgngccccttgg

SEQ ID NO: 773 - DNA, 620 bp, Homo sapiens
  misc_feature (21)..(21): n equals a,t,g, or c
  misc_feature (596)..(596): n equals a,t,g, or c
cactgtgcctggccagatttntttttaagagattcatcataccttgacctgtgccccatttccctcctccacctgtctgacctggcattcctatttcgggagaccagaagtggggggaagagaagggatgactgkttctttgktttcaccattcctgcatgccatgcaaaggaaggaatattgcgcttttaaatatymgttttattaagtaagtggttactctttcaargacaaaaaaaatgcaaattgttacaaaactggcagtatttgtaagtgcaagcactacacgctgccttgttcttttaccaattgcatttgcattttaaggtactacttgtacagccatggtggagaacagtttggaggttcctctaaacactgaaaatagaggtgccacatgatccagcaatcccactgttggatatataccccagaaataagaaatgagtatatcgaagaaattatctgcactcccatgttggttgcaccactgttgacaatagctaagatttggaagcaacctaagtgtccatcaacagattaatgtattaaagaaaatgtggtagatacacacagtggagtattattcagcctanaaaagaatgagattcagtcatttg

SEQ ID NO: 774 - DNA, 1934 bp, Homo sapiens
ccatgcactccagcctgggtgacgagaaagactccgtctcaaaaaaaaaaaacaaactcttatttaatttttagttaaaattaaaacactagtacttcagaatatagatacaagtacaccatcttgaagaatttggagtttttcagggcaattcaaatgacctcattttttgttctttttgtattccagacagtgtttctgtcattggatctctgattggtagtgttaataaatattctttcagtgtgagccagattcataaaattaattttcttcattttagtagtaaaaagtagtctaatagctttttgtcagcttgatttttktgtgtgtgtaatattcaagggcagaatgacaggacagataagcaataagaaatgtatagaattagaaaatatagtagttccctcttacccatgggacatacgttccaagacccccagtgaacgtctgaaaccatggatagtatagacacctctatacactgttttttcctatacatatatacctatgataaagttctatttataaatcagggacagcaagagataaacaataactgcaaatagaacaattataacagtgcactgtaataaaagtgatgtaaatgtgatatgtctgtctctttctctyaaaatatcttattgtactgtactcacctgtaatcagactgtggttgaccgtgagtaacccgaaaccacagaaagcaaaatcgtggataaggggagactactctatatgaaacttaagttacaaaattctctgaagcatttgaaactagacgttttggaattataaaatagtccctttaaaatatccactagtagaaaaaaacttcatttgcagagaaaagattgcaataaaactcattcctaaacttttcaattttataaaattaaacattctttttttatccgtattaacaatttctagttacatagtttctagttacatattaccatatattactctttatctacaaataaatagctgatactcaaactgatyatattttgattgttaaacacttggatctctcaatacttctgtaagttaaagtgaacttaaacagtttcttgaaaaactccagtaggtggcagaatacctattgaatattcgttgctatactttgctgtttgtcattaaaacatctctacccatattcttgcaaaataatatttatattttaatggataggaaaatgatttgcaattagatgtttccattcttgaaagaaaaaagctgcaaataacattttcaagaatataaaaaaatgagtaaacaaagggaaggttgtttggtcatttatagacaattaagcacagactgtagatgtccttccaattcttgggaggctaaactgagtctaccatttcttacatttcttttacctattttttgagaattgccagttgtacagtgtttagcatgtggaatgtaccaaatatatctatgttgtgacttaagatattctaaatgtggataacttctgacctaggaaacatgaagtttgtagtgaagtaagtgaaaagaatgttcaggaaatttwttttcyccatctcttcagttggcatttattgagagttttatttgaatgcttattaaaagtatatgatttataatatttagaaaatagaagaaaaaagaaaactgtagatgttttatcttgttttaatactgtatgtttagtacgtatacatttatgttctagtgtatcaaaatttttcattttcattaaagtgaatccaattttccatattctaggtccattttaaaccatgaaaactttaatcacatattttgtaaagggctgaaagtatgatttaaactacagattgatatattttaattctaaatgaaaggtaatgtaaataagcatggatctgattgaataaagattttaaaatarwaaaaaaaaaaaaagggcggccgct

SEQ ID NO: 775 - DNA, 159 bp, Homo sapiens
  misc_feature (152)..(152): n equals a,t,g, or c
acctggcctctctattctctmcttcctctttctagaatttctattaggcggatgttgaatctcctgaattaatctctaattttcttcccttccctttcccttctccttcccttcccttccccttctctcccctcccctcccctmccttcccntcccctc

SEQ ID NO: 776 - DNA, 436 bp, Homo sapiens
  misc_feature (414)..(414): n equals a,t,g, or c
  misc_feature (426)..(426): n equals a,t,g, or c
  misc_feature (436)..(436): n equals a,t,g, or c
acccacgcgtcckcccagaatactgggtccaaatacagaatactaggtccaaaaggctgccatgcggctggccttcctgctgggaaggagtctgtctgtgtgtctgtctgtgtttaggaagggaggttgaggcagggcagggtcagagagcactgccgtggggaggagggtatccatttcctggtgatatccttccattcaaagcgggtatcccagaacaggtggccagggacgggtgagctggggagggccaggagagagatctctgcttgtgtgagaaaggatggccgagctggcctagaaccgctgctagactatctccaaagtttctgcagcaccctgaaggtgaaccagtgccttcagaccttccctgacacctaagccttggtcctaggaaaraaaaaaaaaaagggnggccgctctagngggtccaagn

SEQ ID NO: 777 - DNA, 752 bp, Homo sapiens
tcgacccacgcgtccgcccacgcgtccgggtgggtaaagggccatgagcccaaaccactaggttgttcaccttttcatctgaaaatgctttactctgactatgtgctattgggttttatttccagaaaatatagttctccttttttctgcatgaaggatacatcgtggtgccacatgctttaagcaatttaaacaagagagataagaggaaaatgcaaccaccacatctgacttgcccaatgtagactttcctctattagattgaagtacacaacctaatatgatatattattttgtagtatctcagactttgtaaataaataccattatttttatatggaaattttatagaagagctatttctgtatacgtaattactcctgattttctgaaattgcttctggtagataacagacaagtcctaagcagtgttccactaagggtggttccaggcctgcctgccgtggagttgactgggggaattttacagttttgcgatcctaggatgcgtcccagacgctcagtcagaagtgctggaggtggggcctgggaagctgtatttgtaatgaactctggtgttttttgtccattaaagtgtatctttgtccatcctataagattaaaggaaagaaaaagcatctcaaatgagtgtaagttgttcttgagaaaaaaatgtatcagacttttatgatttgaatgaaatgtattatagaaaaaaataaacactttaaaataatgttagtctcattaaa

SEQ ID NO: 778 - DNA, 492 bp, Homo sapiens
  misc_feature (435)..(435): n equals a,t,g, or c
  misc_feature (488)..(488): n equals a,t,g, or c
gcggccgcggggtggcgctgcaggtggtgcgggaagccagccaggagagcaagttgctgtsggtcatccgtgagaccagggcggcgagtggaagcacgggcggatcatcctgcccagctacgacatggagtaccagattgtgttcgagggagtgatagggaaaggacgttccggagagattgccattgatgacattcggataagcactgatgtcccactggagaactgcatggaacccatctcggcttttgcagggggcaccctcctgccagggaccgagcccacagtggacacggtgcccatgcagcccatcccagcctactggtattacgtaatggccgccgggggcgccgtgctggtgctggtctccgtcgcgctggccctggtgctccactaccaccggttccgctatgcggccaagaagaccgatcactncatcacctacaaaaccttccactacaccaacggggcccctctggcggtggaanccca

SEQ ID NO: 779 - DNA, 1174 bp, Homo sapiens
  misc_feature (2)..(2): n equals a,t,g, or c
  misc_feature (7)..(7): n equals a,t,g, or c
gnccacncgtccggtgacgtacatccggcgagtagctggcggtcccgggtgctgctggttagtgtgctctgagggagggtccgagccagccgctgttttgccggaggagcccctcaggccgtagtaagcattaataatgtctttcatctttgagtggatctacaatggcttcagcagtgtgctccagttcctaggactgtacaagaaatctggaaaacttgtattcttaggtttggataatgcaggcaaaaccactcttcttcacatgctcaaagatgacagattgggccaacatgttccaacactacatccgacatcagaagagctaacaattgctggaatgacctttacaacttttgatcttggtgggcacgagcaagcacgtcgcgtttggaaaaattatctcccagcaattaatgggattgtctttctggtggactgtgcagatcattctcgcctcgtggaatccaaagttgagcttaatgctttaatgactgatgaaacaatatccaatgtgccaatccttatcttgggtaacaaaattgacagaacagatgcaatcagtgaagaaaaactccgtgagatatttgggctttatggacagaccacaggaaaggggaatgtgaccctgaaggagctgaatgctcgccccatggaagtgttcatgtgcagtgtgctcaagaggcaaggttacggcgagggtttccgctggctctcccagtatattgactgatgtttggacggtgaaaataaaagagttttacttctctggactgatcctattcacagcttcctcatgaacttttctaatagaacaaggaaagctctccaaccatgtctggcgttgagaagccaagagtctctgtcaactctctcattgcccagtggtgacatgtgctcttctccacactgttgggaggtaatgctgccccacgtgctggtgcaggtcagtatcctgggacttggaagctggcaggatttgccgggtaaagctgtatgccatcatggggcacctgaaaagraaaacacgtctcaccactgtggttgattcaaaagaaagtgattctattttttaaagaaagcgttgttaatgtaattggtatccctcctaactttttgagttcasaatttacttggtcagattttctattcttttttttttttaaactaatga

SEQ ID NO: 780 - DNA, 2468 bp, Homo sapiens
gaaggaaggcatcctctttgtcacctacccagatggtaggccaacaggggacgcttttgtcctctttgcctgtgaggaatatgcacagaatgcgttgaggaagcataaagacttgttgggtaaaagatacattgaactcttcaggagcacagcagctgaagttcagcaggtgctgaatcgattctcctcggcccctctcattccacttccaacccctcccattattccagtactacctcagcaatttgtgccccctacaaatgttagagactgtatacgccttcgaggtcttccctatgcagccacaattgaggacatcctggatttcctgggggagttcgccacagatattcgtactcatggggttcacatggttttgaatcaccagggccgcccatcaggagatgcctttatccagatgaagtctgcggacagagcatttatggctgcacagaagtgtcataaaaaaaacatgaaggacagatatgttgaagtctttcagtgttcagctgaggagatgaactttgtgttaatggggggcactttaaatcgaaatggcttatccccaccgccatgcctgtctcctccctcctacacatttccagctcctgctgcarttattcctacagaagctgccatttaccagccctctgtgattttraatccacgagcactgcagccctccacagcgtactacccagcaggcactcagctcttcatgaactacacagcgtactatcccagccccccaggttcgcctaatagtcttggctacttccctacagctgctaatcttagcggtgtccctccacagcctggcacggtggtcagaatgcagggcctggcctacaatactggagttaaggaaattcttaacttcttccaaggttaccagtgtttgaaagatgtatggtgatcttgaaacctccagacacaagaaaacttctagcaaattcaggggaagtttgtctacactcaggctgcagtattttcagcaaacttgattggacaaacgggcctgtgccttatcttttggtggagtgaaaaaatttgagcyagtgaagccaaatcgtaacttacagcaagcagcatgcagcatacctggctctttgctgattgcaaataggcatttaaaatgtgaatttggaatcagatgtctccattacttccagttaaagtggcatcataggygtttcctaagttttaagtcttggataaaaactccaccagtgtctaccatctccaccatgaactctgttaaggaagcttcattttygtatattcccgctcttttctcttcatttccctgtcttctgcataatcatgccttcttgctaagtaattcaagcataagatcttggaataataaaatcacaatcttaggagaaagaataaaattgttattttcccagtctcttggccatgatgatatcttatgattaaaaacaaattaaattttaaaacacctgaagatawattagaagaaattgtgcaccctccacaaaacatacaaagtttaaaagtttggatctttttctcagcaggtatcagttgtaaataatgaattaggggccaaaatgcaaaacgaaaaatgaagcagctacatgtagttagtaatttctagtttgaactgtaattgaatattgtggcttcatatgtattattttatattgtacttttttcattattgatggtttggactttaataagagaaattccatagtttttaatatcccagaagtgagacaatttgaacagtgtattctagaaaacaatacactaactgaacagaagtgaatgcttatatatattatgatagccttaaacctttttcctctaatgccttaactgtcaaataattataaccttttaaagcataggactatagtcagcatgctagactgagaggtaaacactgatgcaattagaacaggtactgatgctgtcagtgtttaacactatgtttagctgtgtttatgctataaaagtgcaatattagacactagctagtactgctgcctcatgtaactccaaagaaaacaggatttcattaagtgcattgaatgtggmtatttctctaagttactcatattgtcctttgcttgaatgcaatgccgtgcagatttatgwggctgctatttttattttctgtgcattactttaacaccttaaagggagaagcaaacatttccttcttcagctgactggcaatggccctttaactgcaataggaagaaaaaaaaaaaggtttgtgtgaaaattggtgataactggcacttaagatcgaaaagaaatttctgtatacttgatgccttaagatgcccaaagctgcccaaagctctgaaagactttaagataggcagtaatgcttactacaatactactgagtttttgtagagttaacatttgataataaaacttgcctgtttaatctcaaaaaaaaaaaaaaaaaaaaaaaaaaaaaaaaa

SEQ ID NO: 781 - DNA, 1488 bp, Homo sapiens
tcgacccacgcgtccgcgggaagcgagccgcgcagcaacaaactcgccgccgccgcccttcagcgactggrgccgcctggaggcgcsatcctcagcggctggaagaccttctggcagtcagtgagcaaggagagggtggcgcgtacgacctcacgggaggaggtggatgaggcggccagcaccctgacgcggctgccgattgatgtacagctatatattttgtcctttctttcacctcatgatctgtgtcarttgggaagtacaaatcattattggaatgaaactgtaagagatccaattctgtggagatactttttgttgagggatcttccytccttggtcttctgttgactggaagtctcttccagatctaggaatcttaaaaaagcctatatctgaggycactgatggtgcatttttgactacatggcagtctatagaatgtgctgtccatacacaagaagagcttcaaaatccagccgtcctatgtatggagctgtcacttcttttttacactccctgatcattcagaatgaaccacgatttgctatgtttggaccaggtttggaagaattgaatacctctttggtgttgagcttgatgtcttcagaggaactttgcccaacagctggtttgcctcagaggcagattgatggtattggatcaggagtcaattttcagttgaacaaccaacataaattcaacattctaatcttatattcaactaccagaaaggaaagagatagagcaagggaagagcatacaagtgcagttaacaagatgttcagtcgacacaatgaaggtgatgatcaacaaggaagccggtacagtgtgattccacagattcaaaaagtgtgtgaagttgtagatgggttcatctatgttgcaaatgctgaagctcataaaagacatgaatggcaagatgaattttctcatattatggcaatgacagatccagcctttgggtcttcgggaagaccattgttggttttatcttgtatttctcaaggggatgtaaaaagaatgccctgtttttatttggctcatgagctgcatctgaatcttctaaatcacccatggctggtccaggatacagaggctgaaactctgactggttttttgaatggcattgagtggattcttgaagaagtggaatctaagcgtgcaagatgattctcttttcagatcttgggaactgaaaccatttgaaatttattactaaggtcgtgatgtgaatatttgctcagtcagcccaccttgtcctgcctttttgcagataggctttcatttggacagctataactgctgtgttttttatattatttttactctttaccataaatcaattacaagaaaagagtttcagtcctagtatttagccccaaaatgaacctttaaacatttttttggtaatttttatattttctgtctttttaaaaatattaaattctggaaaaaamaaaaaaaaaaaaaaaaaaaaaaaaaaaa

SEQ ID NO: 782 - DNA, 547 bp, Homo sapiens
  misc_feature (352)..(352): n equals a,t,g, or c
  misc_feature (534)..(535): n equals a,t,g, or c
  misc_feature (546)..(546): n equals a,t,g, or c
atttttgatagttcacaaaccactcacaaaagaatckgaaatttctccaagtgttaagagaaagcaagctatgaaatgctatatttgtaggcttaaaagtaaattagtgtgttttcttaaaaatctaaaccaagattaaaatgaatatagtcataggtatgaggggcatgtaatttatcttccgactggagatacctttgagagttaaaggaggagcaattaattgttattccaggacaacagatataaatcgagattatactaggtgaactgggacatatggtcatctttgtcatagcttaattcaggaaaaaaggagttagggaartctgaargtctaactcaaagtttngatgctttttaagcaagtttagggaacttgagatgacctgattgagacccctaaatctacagatgaggaaagcaagcctcaagcaaggggggcctgacctttccctgktccctgkgtattcctgkctgkggcaaarcccattgccttgattctcttctctttactttcattttgagaagtannttctttctgcng

SEQ ID NO: 783 - DNA, 1394 bp, Homo sapiens
gcaaatatagacatcatatgtagtttgtacatgtttcagaaacttgttttttctttgctctgtgtaacctatttcctattgctagttcagttggctttcttattcacttctgtgaccctgaaccagttctcagaccctagagtgtaagagcattgattttctacgctgtgtaatctagctcaatccctctgtcccctccgcctcaccgtcccccagccaccacattgtatagcaaaagcattacattcaatcctagaayaaaggtaaatacaacaaatcatctttgcagctggacaactaataatactttgcagcattaagagatcttctgtgttaccagtcactctgttgaaatgaactttccgaatctctttattcaggaaaacatggggttttgaaattcttgggccaagagacataactgaggggttcgcagagctaggcaagggtgcactaggaaagggccacattggtgggtggggggtaacagagaacagatggtgtcaggaagtttctctggagtaaataatgtggatattcttggtttccctctcctccgccagctgaagctgtgttagtgctgttgacactaatataaaatgtttggtccatttgaaatccttgtcattgccttatatgggggaaactcaatcccccagcctgtgttggaaatatcaccaaactgattgtaaatgtgcggctgtagcagacattttagtgtggtggtgtgcagccatttcggccctacacctgccarcctggctaccttacagttgtgttccgatttttgcgtctatgcttggtgtgcctcacttgctgcattttccagcatgcaaccaggagttgacgtaggaaaaagggatgctttcttactttggaagctctcagggaagttggtgtcaatttctcctccactgcctggcctaccctgcactcccaaagattttgtgcagatgggtagttccattttttaaaaattgtgcagatatggaaaattgtgacttacttcatgaccagaactatctagaatatgtgtgggggtataaacatcttgcttaaccaaatatctatgtaggcagaggtaaccaggagagaagcaagacttgctgcctaaaggagcccaccattttacttttcacatttaatctgccacgttgaatcaattggaataaaacctgactcgcaggtgactggacaggaaatcccaaagttccaccatttctatgcttaattttaacgtccccccgcttttttttttgtagaaaataaaaacaagaaaatcgttccaatgtaagatgtttgttatagaaactttaggcaatacaggtgtgtaataaaatgtttaataaacttctaaacacttttgtatttggataaaaaaaawaaaaataaaa

SEQ ID NO: 784 - DNA, 667 bp, Homo sapiens
agtcggtcccggagctgcctggaggcggccgcactcggggatcatggcccaagttgcaatgtccaccctccccgttgaagatgaggagtcctcggagagcaggatggtggtgacattcctcatgtcagctctcgagtccatgtgtaaagaactggccaagtccaaagccgaagtggcctgcattgcagtgtatgaaacagacgtgtttgtcgtcggaactgaaagaggacgtgcttttgtcaataccagaaaggattttcaaaaagattttgtaaaatattgtgttgaagaagaagaaaaagctgcagagatgcataaaatgaaatctacaacccaggcaaatcggatgagtgtagatgctgtagaaattgaaacactcagaaaaacagttgaggactatttctgcttttgctatgggaaagctttaggcaaatccacagtggtacctgtaccatatgagaagatgctgcgagaccagtcggctgtggtagtgcaggggcttccggaaggtgttgcctttaaacaccccgagaactatgatcttgcaaccctgaaatggattttggagaacaaagcagggatttcattcatcrtkaagagstgaagtgtttctccgttgtaccatcacagtgatcggataattgaaattagctacgttaatgattta

SEQ ID NO: 785 - DNA, 1610 bp, Homo sapiens
  misc_feature (465)..(465): n equals a,t,g, or c
gagagaaatagaaagaaaaagacaaagagaagaagagaggaggaaatggaaagaagaagagaaacgaaaaaggaaagatatagaaaagctaaagaagatagacagaattccagaaagggacaaattaaaggatgaaccaaagattaagctgctcaagaagccagaaaaaggagatgaaaaagaattggacaaaagagaaaaagccaagaaattggacaaagagaatctcagtgatgaaagagccagtgggcaaagttgtacattgcccaagcgttctgatagcgaacttaaagatgaaaaaccaaagagacctgaagatgagagcggcagagactwtagggagagggaacgggaatatgaacgagatcaggagcgcatacttcgagaaagagagaggctgaagcggcaagaagaagagcgccgtagargaaggagcgctatgagaaagagaagacttttaagagnaaagaagaagaaatgraaaaagagaaagacacacttcgggataaaggaaagaaggctgaaagtmcagaatcaataggcagctcagaaaaaactgaaaagaaagaagaagtggtcaagagagatcgaataagaaacaaggatcgtccagcgatgcagctttaccaaccaggagctcgaagccgaaatcgactctgtccccctgatgacagcaccaagtctggagattcagcagcagaaaggaagcaggaaagtggtattagccatagaaaagaaggaggagaggagtgataagtccagatggccttaggtgtcctgactgtctaggcagccaaagagcacacgttaagcaatccagaggtgccttcagggcaaagaatagagagaaagggagccgctgtgctggtggggtacactgcagaggagtaagtcttgtgtcaaagcaggaatctgatcagaggttcagaattggaagtacaatttcattgcttttgcaatttctacaaattaattttaaagtgtcagaaaaaggtgacggcaaggacatgcattgcaatttgcagggggaattgtcaagtgaggacttcatccatatgaccgagagaaaagtaagagctggttctaaaatcaaaagctgktgktcatctgaattgaattttctgaatttgggtggagcagagtcgctttgaagccttgttccgatctaattctattgtattgttgatgataagtgttgacattgggtagtgtagaagcaacaagcatgtccttgtagtacaggtacagtgaaggatagaacacactttcgttgatacaaaaatttaaatagttatgttacttctgtatccagtgtcctaaagttttaggattagttttagttttttgtttgcttatatgagcttagcgtaaagaatatttttaaacttcgtgttttgtcatcagcatcttttctattaagaggtaaaatgtagtccttgtttgactcttgacaatccagtgtgtttgatcttaggtctcatgatctgagtgcataccctctccaggaaggaaactgcaccagtgtctattcctgttaaatagcaacttttagtctcagcttgtttcgttttgatgtcaataaatagtaacagcaaaaaaaaaaaaaaaaa

SEQ ID NO: 786 - DNA, 555 bp, Homo sapiens
ggcacgaggaggttaggaaaccagttaaagctgttggatatggaacttatggacactatcatatcaaagtgggttggcattttcctggtgaaaatgacataaataaaattaaaagacttttttaaatgaatgcttggaaattgtaaaaactgtcatttcctctttttatttcttaacaggatggcttaaattccttggtccttgatttagattttcctgctttgaggaaaaacaagaacatagataatttcttaaatagatatgagaaaattgtgaaaaaaatcagaggtctacagatgaaggcagaagactatgatgttgtaaaagttattggaagaggtgyttttggtgaagtgcagttggtcgtcacaaggcatcgcagaaggtttatgctatgaagcttcttagtaagtttgaaatgataaaaagatcagattctgcctttttttggggaagaaagagatattatggcctttgcaatagcccctgggtggttcagcytttttatgcctttcaagatgataggtatctgtacakggtaatggagtacatgcc

SEQ ID NO: 787 - DNA, 221 bp, Homo sapiens
  misc_feature (37)..(37): n equals a,t,g, or c
ccctgtgcgataatattctttcatcatttcagtgggnttttggagggaggcggagatccaggtgatctgtctacactattcagtcagaaagctggatggtttttctcactgtttagctgtgactcatacttagaaagtggtttaaatgtgaatatcttagttctggttgtacaattgaggtaatcctcaattcaggttgctgtctggacatttcatgactg

SEQ ID NO: 788 - DNA, 760 bp, Homo sapiens
  misc_feature (134)..(134): n equals a,t,g, or c
  misc_feature (721)..(723): n equals a,t,g, or c
  misc_feature (746)..(746): n equals a,t,g, or c
  misc_feature (750)..(750): n equals a,t,g, or c
aatagaggttaattttacccagaagcaggatagagaaaatattacagagaaaatcacatatcacatgggctcgaaagatgtagaggtttttgacaaatgaagaacaaccataacaggtagagggaacaccatgnaaccagggcatgaaactgaagtgccataacatattctagagagagaagggtgtgggcatgagttagggctggaaaaacaggttggaaacagataagtaagggtctcaaatgcaatgtcaaagagcttgcagtttattttccaggcaatgagtaggcagccaaaaaaaaaaagtaaggatgttttttttttttttcccatggcatcatatttaagaggatggatttaaattgtgtgagaccaaagcatagagactagataagaggcgatcaaaatatttcaaaaagaaataatgaagatccaatgaaggaagtggaaattaaaatagggaagagagtagatggattagagagacatttaagagatggaatcaatagatcctgttactagataatggaagtaagaggtgaggaagagtggaaaagtcattaatgactctaaagatttctgcttggctgcttaccaagattggcaacawamsggwgggaraaaggtttggaaaaagaagagaaaggataatgaagtttgacttttacatagaaatgaaagggcctttccagatttggaaatcttttgggttaaataattnnnaaatttttgacctagaaaatttngganggaaaccttg

SEQ ID NO: 789 - DNA, 565 bp, Homo sapiens
  misc_feature (49)..(49): n equals a,t,g, or c
  misc_feature (132)..(132): n equals a,t,g, or c
tttattttaaaatatttattttatgtacaaaaaggtaacatggtttctntcattgggtgggtgccttagataatccattcgtggaagatcacttagtccaacttaatgaaatctatatccttcacgtatganggaaacactggtggcatgtaacgaggctcaatttccagatcagactgtgcccagtttcagcagacmcaatagcaagaaccctggctgacttttcgcgggtggctccagtagagctgctggtgaatcatcttgctttcaggagtgcgacagggcaaaaggaacaataattcttcatatccatctactacagtttcaaagcacttcagttacgctttttaaagttcatattcttccagtcttgaccagtgggaactgagctcctgaatccttgtgatatgacctggtattttccatactttcctttatgacaagatgccccatccaggctcattttgtacatttctaattccagacctagaatcagtcatcctccaagatgtcctgattcccttttagtgaaattatttttttaacattacatattcagacaaat

SEQ ID NO: 790 - DNA, 1386 bp, Homo sapiens
gctcagaggagcaatgacgaggtggcccgagaatttgtgaaactcaaatcagagtctcgttccacggaggaggggagctgaacaccttcgactcctgtgccaatcaggcagcagcaatttcacaaatcagggccagtgggagttagctgtgtaaccggcttagggtctttgcagtcaagaggctgaccccttcagttaaagatatttaaggaaaaatttggggtggtgataatatggcttttcacagaaagrgtcatgaagccctggcccaacaggactgtggtactaggggctgggatgtggggttaccacatggagagattttccattaagagagaaggacaaacatttctgagagtgtcagccattcttggtagacacctctccactcctcatcccacctctacccatctccatgccacaccttatccagttagacacatacataccaatcattagaagaacaagtttagaaggtgtggaacttgtgcctggctggctgggtagtcagctgagcctgttgctgagcccggtggtctggattggagtatggccagggcaggagtacacagaatagaatttagactgtcccttgagtagaatccactgattttctgtggctccagtgagaacaaggctttgaaactgaacaagataacttctagaaatgaactgtactaatccctttccccagattgtatcatgagtagaatcaggttcacgtggtgcttcaaagccctgagaagaatatttctttggaccccaggcactaggggccacctgcctgggagtctccctgcctcactcctctaggcaggggagtgatgcttcaggacgtgacaggctgttctaacatgtgtctacctgagggctagttgaaggatccaggagtattttcttcttgggtgggccctgaacaaagccaaaaattgtagaaaccagtctagaaaaagtcctgctcatctgtggccactgccttctagccgtcctccaccttgcagaaagaatctagcctttggtctctctctctctcatcggggtcatttgctattcccctctgatattcaaccctatagaaggagcctggactctgatccctctgtacaggctggatggaaggggccctccacacttcctgggaggtcagagacaaactgtttcagagagtcagatggacttcccaagacttgttgagagatgtgacatggttcttggatttcctctgtagcagcctcctggacttcctgaggactcgacattgtccacagatgtactggccattacatgaaacaagaaaccaagcatcttgcygttggtaattatataggggcctttttagggggtttaaggccgtccgaaaaaaatcactttaggggaaaaaaaaaa

SEQ ID NO: 791 - DNA, 1229 bp, Homo sapiens
  misc_feature (19)..(19): n equals a,t,g, or c
  misc_feature (305)..(305): n equals a,t,g, or c
gcccacgcgtccgcggacncgtgggctaaaaatgcctttaacattcatactactaccatctggtaaaggcaatctagttttttctatcacatccaccaaaattcttctartctctacccattatccaattccaaagcctttttcacattttaagacatttgttacagaagtacccaatccgtcccagttccacaatctgcattagattcccatggctgctgtaacaaattaccctctagcccagtggcttaaaacaatagaatttattatcttgttgttttggaagccaaaaktccaaaattgangggttggcagggctgaacgtcttctggagactctaagggaaacactcttcccgtgtcttccartttcttgtggctgccatcattccttggtttgtgactgcatctccctctcctctgtcttcacatcacttcccctctgtatatataatctacctctgcctctctcttataaggacacttgtgacgggacttagggcccatccagattacccatgataattcccttattccaagattcttaattatatctgaaaggaccttttttccaaataaggtactatcacaggttccagggagtaggatattgaatatcttttttggggagggggcaccatgcagctcactacactattcattgcacacaaatgaatttttcactttttaagatgcattcttggtgctcaaaccagatcgaagtttgtctctaaaagctattgtctgcacaggctgctgcatgctctgttgttaaatggatggacaggctattctaaattttggttgatacttttgctactatgggcaattaacttgaaaaaaataatcgatcccaactctgtgctctgatgtacctcttctgccccttttatgacacctttgaccaaatgccttctatggttcacagtgcaggcacaaaactacctctgatacagaagggttctttacaagcttattttacataccgtgaatccctcacctaaagggagaggtgaaagcaaagactgctttgaatgggtattgagggagattgtgtccataccaagccaccctgaagaagtatttcacttgcagtagaactgtggatttgtgctgtcatttcaccttggaataaacacctatctctaagcaggaccaagaatgacttgcaatctatatgtaatggctacttacttattcaataaagttaagatatacgttaaaaaaaaa

SEQ ID NO: 792 - DNA, 347 bp, Homo sapiens
  misc_feature (186)..(186): n equals a,t,g, or c
  misc_feature (302)..(302): n equals a,t,g, or c
  misc_feature (329)..(329): n equals a,t,g, or c
tatgtaaatatgtacacaaaaattgttcctccaaagacatttttcagtatcttagcatattctaagggtgcagatgtagaattatttctcttctctggctcagtagcatgtcagaatggaacataggtatagaatgttttttgtatagacaaagcttcactttcaggggcaaggtttgggaaatangctgatagtaaagtcatgtaacacttctgtgcaggttaacatttctggaccttgctttccttctcagtgtatgcatgagctattyttcatgcaccactggggggcccagtcttggnttaatctaccagttggaattttagganggacctgggcttgtttgg

SEQ ID NO: 793 - DNA, 295 bp, Homo sapiens
atttaaaaatgcaagtgtgctggcagaaaggggactgatgattctgtgactctgcagttgcagaagctccgtgtaggagattatttggacatagcgattacccctcttaatcaggtgccacctccttcagggcacatgagatcatattaaattctttttgagatagggtctcactatgttgcccaggctggtctttaactcctgggctcaagcaatcttcccacttcagcccgccaaagtgctgggattacaggcatgagccaccacaaccaacaaggtgggtattaaatctctt

SEQ ID NO: 794 - DNA, 734 bp, Homo sapiens
  misc_feature (100)..(100): n equals a,t,g, or c
  misc_feature (645)..(645): n equals a,t,g, or c
  misc_feature (663)..(663): n equals a,t,g, or c
  misc_feature (706)..(706): n equals a,t,g, or c
aattcggcacgagcggcacgagttgttgcctgggctggacgtggttttgtctgctgcgcccgctcttcgcgctctcgtttcattttctgcagcgcgccancaggatggcccacaagcagatctactactcggacaagtacttcgacgaacactacgagtaccggcatgttatgttacccagagaactttccaaacaagtacctaaaactcatctgatgtctgaagaggagtggaggagacttggtgtccaacagagtctaggctgggttcattacatgattcatgagccagaaccacatattcttctctttagacgacctcttccaaaagatcaacaaaaatgaagtttatctggggatcgtcaaatctttttcaaatttaatgtatatgtgtatataaggtagtattcagtgaatacttgagaaatgtacaaatctttcatccatacctgtgcatgagctgtattcttcacagcaacagagctcagttaaatgcaactgcaagtaggttactgtaagatgtttaagataaaagttcttccagtcagtttttctcttaagtgcctgtttgagtttactgaaacagtttacttttgttcaataaagtttgtatgttgcatttaaaaaaaaaaaaaaaaaaaagggncggccgccccaaaagggncccagcttacgtacccgggccatgcgacgtccaagcccctccnaaaggggcccccaaattccattccctgg

SEQ ID NO: 795 - DNA, 1311 bp, Homo sapiens
  misc_feature (1265)..(1265): n equals a,t,g, or c
  misc_feature (1291)..(1291): n equals a,t,g, or c
  misc_feature (1310)..(1310): n equals a,t,g, or c
ctggcccgactactttcgttccgtcttccatcgttttctctcgtgcaatggcgtccgggctggtaagattgctgcagcagggacatcgctgcctcctggctccagtcgcccccaagctggtccctccggttcggggagtgaagaagggattccgcgccgccttccgcttccagaaggagttagagcggcagcgcctttctgcggtgcccgccgccgcccgtgcgccgttcagagaagccgaactgggattaccatgcagaaatacaagcttttggacatcggttacaggaaaacttttccttagatcttctcaaaactgcatttgttaatagctgctatattaaaagtgaggaggccaaacgccaacaacttgggatagagaaagaagctgttcttctgaatcttaaaagtaatcaagaactatccgaacaagggacatctttttcacagacttgccttacacagtttcttgaagacgagtacccagacatgcccactgaaggcataaaaaatcttgttgactttctcactggtgaggaagtcgtgtgtcacgtggctagaaacttggctgtggagcagttaacactgagtgaagaattcccagtgcccccagctgtgttacagcagactttctttgcagttattggagccctgttacagagcagtggacctgagaggactgcacttttcatcagggacttcttaattactcaaatgactggaaaagagctctttgagatgtggaagataataaatcccatggggctattggtagaagaactgaagaaaaggaatgtttcagctcctgaatcaagacttactaggcagtctggtggcaccacagctttgcctttgtattttgttggcttatactgtgataaaaagttgattgcagaaggacctggggaaacagtattggttgcagaagaagaggctgctcgagtggcccttagaaaactttatggattcacagaaaatagacggccgtggaactattccaagcccaaagaaaccttgagagcagaaaagagcatcactgccagctagccgccatggatgcagcagcctgaaacttgagagcgaaagtgagataaatgtcaaaggtgtttcaagccagacattttcacaattgtgaagaaatagatgttttgtttctgttttttactgtgttcccaaaattaaataaatgttaaccaagtcacagtgtttttggttttgtttttctgaaatcttggttttgatcaaatctttttttttttctcttnagatggagtcttactctgtcgcccangcttggactgcaatgggtnc

SEQ ID NO: 796 - DNA, 633 bp, Homo sapiens
ttttttttttgacaagaagaaaagaatattgatcttatttatttgttttttgggttgataaataaagctaaatttaaaaatcygtaggtaatacactgtagtggcataaatatttaagatcagtaaaggaaatcatcaaactattgtcattcatacatgaaacgtacaaagcaaatagttatgatttaaagattttaatacataattaaaaatcaacaattattacatagttatataacattgatactgttagatatgtggatgtatatatttttctttccagtaaaatagtttcatgcttataaaagtcaccctaggtcaacttgggacaaagaaaacaatgtacagtagaaataaaccaagtattaaatagaatatataggtaaggaaaaaatattataaagcagttacatttttgacacacacacacacacaaataaatacacttttctattatttgaaggcaattcacaatcatttccaggaattccgtgagaatttaaggccatttgttctaaagaaatgctttaatttagacacaacttcacmaaactgtaattcttgtaaaaactgtacakgcaaaaacccyttacmattattcgtggacaggcaggtcagtatataggagtaggt

SEQ ID NO: 797 - DNA, 1017 bp, Homo sapiens
  misc_feature (235)..(235): n equals a,t,g, or c
  misc_feature (885)..(885): n equals a,t,g, or c
  misc_feature (971)..(971): n equals a,t,g, or c
aattcggcacgaggtcttttcagcctgtaattctttgggccccaaagaatgacaaaggaggcactcgttctcttttcttgctgtatgcctagaaagtggttgaaggattcttgatgccctaaaaccatcttgtaagctaaatggtcttgcatccagaaaggccagattttacctaccaagaaaaaaagatatttttccagagagttaggtatatcataattttccatttcaagtnctttttataagtctagtcattctgcaacgtgacatatcccccaaaatgaagttaccttccaagttggacacgtcccgtagttgggcatatgtctaactaaaagtttctgacttgtagtaaattcagcttaaatataagttgaaatttgggaaataatttccaagctcttggaaggggtaacagtgaaccgccctccatgggctccacatcttttcctttggcttccaaagtcaggtcccgcccaccctgcctaaggaactgcagagaggtggcaaatcagcaaaaaggacaccaggctcttcttggccacttgtaggaagatccctttacaattttgactaaggagattttttttttcacagttgagttagtttgtgaaaataaagaactctgtagctcaccaaggtggagaaacgcaattcagaaaagtaatttctccaaggtcacttctttttttatgtcttgccatcactttaaaggactagccccactcccccatgtgtatacacaaggaaattgcagaccaattagttgtcttggcctgactctaatgccttttgcaagtagctttccagaagtaaaagtcccagtgatgtattcccatagaaatatttttcagttgtttatgtcgtttactacaaaaaaaaagnttcagagtgggatgggagtacaactcttgrgtwtttttctagtccggattttttattaattaattcggtgctgccgggtcatggcnggctgcaactctcaacattcccttatttgggtcagcttttggcaaa

SEQ ID NO: 798 - DNA, 2718 bp, Homo sapiens
  misc_feature (57)..(57): n equals a,t,g, or c
  misc_feature (2713)..(2713): n equals a,t,g, or c
aattcggcacgagggtcttggtcgtatgaagccaaacacacttgtccttggatttangaaagattggttgcaagcagatatgagggatgtggatatgtatataaacttatttcatgatgcttttgacatacaatatggagtagtggttattcgcctaaaagaaggtctggatatatctcatcttcaaggacaagaagaattattgtcatcacaagagaaatctcctggcaccaaggatgtggtagtaagtgtggaatatagtaaaaagtccgatttagatacttccaaaccactcagtgaaaaaccaattacacacaaagttgaggaagaggatggcaagactgcaactcaaccactgttgaaaaaagaatccaaaggccctattgtgcctttaaatgtagctgaccaaaagcttcttgaagctagtacacagtttcagaaaaaacaaggaaagaatactattgatgtctggtggctttttgatgatggaggtttgaccttattgataccttaccttctgacgaccaagaaaaaatggaaagactgtaagatcagagtattcattggtggaaagataaacagaatagaccatgaccggagagcgatggctactttgcttagcaagttccggatagacttttctgatatcatggttctaggagatatcaataccaaaccaaagaaagaaaatattatagcttttgaggaaatcattgagccatacagacttcatgaagatgataaagagcaagatattgcagataaaatgaaagaagatgaaccatggcgaataacagataatgagcttgaactttataagaccaagacataccggcagatcaggttaaatgagttattaaaggaacattcaagcacagctaatattattgtcatgagtctcccagttgcacgaaaaggtgctgtgtctagtgctctctacatggcatggttagaagctctatctaaggacctaccaccaatcctcctagttcgtgggaatcatcagagtgtccttaccttctattcataaatgttctatacagtggacagccctccagaatggtacttcagtgcctagtgtagtaactgaaatcttcaatgacacattaacatcacaatggcgaatggtgacttttctttcacgatttcattaatttgaaagcacacaggaaagttgctccattgataacgtgtatggagacttcggttttagtcaattccatatctcaatcttaatggtgattcttctytgttgaactgaagtttgtgagagtagttttcctttgctacttgaatagcaataaaagcgtgttaactttttgattgatgaaagaagtacaaaaagcctttagccttgaggtgccttctgaaattaaccaaatttcatccatatatcctcttttataaacttatagaatgtcaaactttgccttcaactgtttttatttctagtctcttccactttaaaacaaaatgaacactgcttgtyttcttccattgaccatttagtgttgagtactgtatgtgttttgttaattctataaaggtatctgttagatattaarggtgagaattagggcaggttaatcaaaaatggggaaggggaaatggtaaccaaaaagtaaccccatggtaaggtttatatgagtatatgtgaatatagagctaggaaaaaaagcccccccaaatacctttttaacccctctgattggctattattactatatttattattatttattgaaaccttagggaagattgaagattcatcccatacttctatataccatgcttaaaaatcacgtcattctttaaacaaaaatactcaagatcattatatttatttggagagaaaactgtcctaatttagaatttccctcaaatctgagggacttttaagaaatgctaacagatttttctggaggaaatttagacaaaacaatgtcatttagtagaatatttcagtatttaagtggaatttcagtatactgtactatcctttataagtcattaaaataatgtttcatcaaatggttaaatggaccactggtttcttagagaaatgtttttaggcttaattcattcaattgtcaagtacacttagtcttaatacactcaggtttgaacagattattctgaatattaaaatttaatccattcttaatattttaaaacttttgttaagaaaaactgccagtttgtgcttttgaaatgtctgttttgacatcatagtctagtaaaattttgacagtgcatatgtactgttactaaaagctttatatgaaattattaatgtgaagtttttcatttataattcaaggaaggatttcctgaaaacatttcaagggatttatgtctacatatttgtgtgtgtgtgtgtatatatatgtaatatgcatacacagatgcatatgtgtatatataatgaaatttatgttgctggtattttgcattttaaagtgrtcaagattcattaggcaaactttggtttaagtaaacatatgttcaaatcagattaacagatacaggtttcatagagaacaaaggtgatcatttgaagggcatgctgtaatttcacacaattttccagttcaaaaatggagaatacttcgcctaaaatactgttaagtgggttaattgatacaagtttctgtggtggaaaatttatgcaggttttcacgaatccttttttttttttttttttttttggggngggtc

SEQ ID NO: 799 - DNA, 2630 bp, Homo sapiens
  misc_feature (1676)..(1676): n equals a,t,g, or c
gcaacacagagataagatgcaacaatccaaaaaccaggttgtaagttctacaaatggagagttaaacacagatgaccccaccgcaggacgttcaaatgcacccatcacagcccctactgaagtagaagtgatggatgaaaccaagtgctgctgttttttcaaacgaaggaaaaggaaaaccatacagcgccacaaatgactctggacacagacagatcctggggagttacttacatgttcatctgctgtcttgtgattaaaatcatctctgtagtgaccacgtatattttcaaggactcactcttagaaacaaaaatgtcatactttcatacttcattttgtggttgtcttacattctttttctttttttttttttctctaatttaacctttatggaagctttaaagttttgtcaaaacatgagtgctttgcccatcastgaayggaatggaccaatgaggtggtatcaatgaatatagttccatagaacattttccagaagttcttctgttgtagaaagcagtacagtatcttaagtgtcaaccagttatatacctaatctggttttttataacttctgtaagagcataatcaaacaggaattttcttttctcagtggataatacaacagagaaaacagagttgcccaaatatttaaaagaagttattccttgagaagttcatattttgtgacatctgcattgatttcagtattactgatggtactgttattcataagtcatattaacattctctccgtgaaatcatggtacagtcactgcccagaggtactgaggaaaaagcaatatgggttcggcagatggtggtggtaaaatgaatcttaaggagtgtggtaaatatgtgctccgcttttgttgcatcactatgtgaagtactgtgttgcagaagtggcaaaagcgcttatttttaaaaatgcaaaatatttgtacaatgtaactttatgcttccaaataataatgtatgttagacagcaagaaatgaatactttaaaaagtgatatatgttggagttataaagaaatacactaaggagaggtagtaaatgtgaaccttgttgcagtgtataaggtggaagcctaaagaaatctcaccgaaacttactgctgaatgattacattctcccttaagcagaaaactttggatgtgccatgcaatggtgtctgtgtaattattttgctctttgattaaaaaaaagacccccagcaataaaaagtgggtcactctatgccctctgtgcacattagtctcttgtattcaactttgctgattctctggaattttcctactctttagcataattttgatgattgaaaaatattttggaaaggatgggtcaggtgctttgcctccatagtcttttgaagtgcctgcatatgaacaacaacaacaacaacaaaaaattctgtaaaaaaggaagcccattccacttttcaagtatgctttgttttaagccataaagacacacatgtagttttgtcacattmtactagccaaaattttcaagaagggttaaaacaaagactggctagaaagataattattttgaataaatctmatattcatctttcatttatataattgttacttattcctcccatgcagtctcttcgttgctttaagtgtgtgcctccaggcatgcttatttatttttattgnctcaaggtaacatttaagatgtatattaaagtaaarctacatttttttacttcattattgcatttacagggatttaattgtactttgtaatttatttttcttattaaccaaaagtttaatgcatttttttttgatgaattaggcacccacatgaacaccacaaatcaggacattgtttatcattgttgctatgaatcctatgaatgatcttttttttattttaaagacctacacttaacctacaaaacatttgctgtataatttggtcaacagtttctatctatctgtatactgtcatgatgtcttaaactgcaggagttacatactgagtttatatttttatttgctttgagcaaggtagataaacattttggccattataatgtgaaaccacttcttctttctttacagtatttgaccaaacttgtgtgtctatgatatttgtaaatacatgcgaatatctgtatttcttatcataagcctatttagttttattctcagtagggttttttggattgtacagtgtttatatgatctgaactccttatacataagaaggtgtgtatattaatccaattatggacttaaaatattttaaaagtataaatacccttatttgctgcaaagaccagtgtgtaggcatttgctttttagcaatatttttaagtgctccattttaatgccgaggaataagtcttttggcaacacaaactggtcaataataggtaatgcaggtatgttcaggttaagccaacaatgttttgcatttttatgcttattttctgtcaacactaatgaagtcaacattgcctgaatgtctgaataatgaaacacatccctgtttaaaagtatgtaactgaaaaagaaataaaaaaaaataaaagtagtttttttaaaaaaaaaaaaaaaaaaaaaaaaaaaaaaaaaaaaaaaaaaaaaaaaaaaaaaaaaaaa

SEQ ID NO: 800 - DNA, 309 bp, Homo sapiens
  misc_feature (307)..(307): n equals a,t,g, or c
aattcggcacgaggaactagacaagttactctcttcatttaaaagtctgttagaagaaaaggagcaagcagagatacagatcaaagaagaatctaaaactgcagtggagatgcttcagaatcagttaaaggagctaaatgaggcagtagcagccttktgtggtgaccaagaaattatgaaggccacagracakagtctagacccaccaatagaggaaagagcatcatctgagaaatagcattgaaaagctgagagcccgcctagaaactgatgagtagaaccactctgtgtcttacaacaactgaanga

SEQ ID NO: 801 - DNA, 640 bp, Homo sapiens
tcgacccacgcgtccgggcctgagagtgcaggcttgagggaagcatggaggtccatggcaagcccaaggctagcccgagttgttcgtcgcccacccgggattcctcaggagtcccagtgtccaaggagctgctgacggcgggaagcgacggccgcggaggtatatgggacaggttgctcatcaactcccaacctaagtccagaaagacctccactcttcaaacagttcggatagagaggagtcccttattggaccaggtacagacatttctcccacagatggcacgggcaaatgaaaagctaagaaaagaaatggcagctgcaccacctggtcgtttcaatattgaaaacattgatgggcctcatagtaaagttatacaaatggatgtggctttgtttgagatgaatcagtcggattcaaaagaagtggacagttcagaagagagttcacaagacagttcagagaacagttcagaatcagaagacgaagatgacagcatcccatctgaagtcaccatagataacattaagcttcccaattctgaaggtggaaaaggcaagattgaagttttggacagtccagcaagtaaaaaaaagaaatagtcaaataaattatctgaaaagaaaaaaaaaaaaaaaaa

SEQ ID NO: 802 - DNA, 590 bp, Homo sapiens
  misc_feature (237)..(237): n equals a,t,g, or c
  misc_feature (267)..(267): n equals a,t,g, or c
  misc_feature (348)..(348): n equals a,t,g, or c
  misc_feature (548)..(548): n equals a,t,g, or c
  misc_feature (572)..(572): n equals a,t,g, or c
gagtagatggtggtccataggctgtaactggaaactatgcctgtcttatttagcatttcaaaacaaaaaccataaacaaacatttgtcttctgaatatttaagaaaaaaaaataagtgttaattatattgtagggtgttaccattttgtatttcaagttcctgagaagagaatttgaacagtttgctatttggaaattttagcaaccagctaccttgcctatggaaagattaaaaanaaaactttattttggaaatttaaagacatncacaaaagaggaacaatataattaacctctgttaactcatcaccaacaagactcatgaccacttttatacttcatgagtgnattgtatttgtatccactgttttctattattttcgagcaagtctcagacacaccatttaatctgtaaataattcagcatgtatctctaaaagacaaagacctcttaaataacagttcattagtataaaacaaattgggtaaacttttgttggtcatcaaactatattagcactggtccaatagtttaattttcattgagnctttcaagaggaccgaccagtctnttgctcaagacatgctct

SEQ ID NO: 803 - DNA, 459 bp, Homo sapiens
  misc_feature (41)..(41): n equals a,t,g, or c
  misc_feature (441)..(441): n equals a,t,g, or c
  misc_feature (447)..(447): n equals a,t,g, or c
ggccggacgacggcgccttaaggaagcggtgcggaagcagnggacaagaagccgcgggatctcttcggtcccccaggacctccasgwgcagaagtgaccgcggagactctgcttcacgagtttcaggagctgctgaaagaggccacggagcgccggttctcagggcttctggacccgctgctgccccagggggcgggcctgcggctggtgggcgaggcctttcactgccggctgcagggtccccgccgggtggacaagcggacgctggtggagctgcatggtttccaggctcctgctgcccaaggtgccttcctgcgaggctccggtctgagcctggcctcgggtcggttcacggcccccgtgtccggcatcttccarttytytgccartctgcamgtgggagccggatggggcagtgccgtgtgctgtgacggggctggngctganctttctgggggc

SEQ ID NO: 804 - DNA, 1664 bp, Homo sapiens
tgcagcaragcaggtaacagctcttgcacctgtttctcttgcacctgacgtgcagctgctcctacccacctctcctggctgagccttgcctgatacagcagcccggaggcaccacttgcttcccgagtctcaccctcccaggcagctcctacactcaactgcttctctaggaaaggtctcacctccagcctggagcagtcgggattacagaaagccccatccttggcttagggagcgccatgacgactgaaattggttggtggaagctgactttcctccggaaaaagaaatccactcccaaagtgctgtatgagatccctgacacctatgcccaaacagagggagatgcagaacccccgaggcctgacgctggaggccccaacagcgactttaacacccgcctggagaagattgtggacaagagcacaaagggcaagcacgtcaaggtctccaactcaggacgcttcaaggagaagaagaaagtgagagccacgctggcagagaaccctaacctctttgatgatcacgaggaaggacggtcatcaaagtgaagggctgaggagggtgctagcacctcttggctccctgccatcagccagatctgagacaggaccttgccacgctggcctctttggccatagctgaagctgtggggccagttgatacctgctggcaggaaatggctgttttttaggtttgtatttatgtgccgccacttttgtaaggcctgggagatcccagggtcctccaccctccccctgaccacatacaaaggcactctagttcaagrgtgaaaagtctcacccaggaggaacagccctccttgaagcaatggcagggcagcagggaggtgggcatggcagggaatggagagagtgagccagacagacttcacctccttactggacacagggtcaagggcgagtttcaattgctgctccctttactttctctacctgtgactactccctggaccaatcctgaggagggcacattttccagaagccacgtgataggggctggtttctgtggagccagaggcagagacactgaacttgagctcacctcctaacaccggcagtaaacttcctggaactttgccctcaggtgcggaggggacagaggaccctggcactctgttagggtgctgtagaagactagattgatggtagtttggcctgttagttcctgttttggccatgacttttgcagatggcaagtcacacaccctcaaagggaagctacacgggccaaatcgggggagtgggtggggaattttctcctctccctttcctactataatagtatttaagacatatcagctccagagatgagtcctggagccttgaattttgtttaacaaaataattgtaggtttctctctgtaataacaacgctggaaaggcmgagaacctcttttatgctcatgtcttgcatttattgagatgactgtttctcatgcctttatgttccttcatgtaagtaaagtggacctttgtgctcaaactgttcctttcaagcttcaggaaggggttcccaaggtgtgacaatgtaggaacctgggtcactaatttttaccatcaaacctagccttagtatggggatggggcaagcagaaggagctagttacacctcagtggtcagttctctccagtcaacagaga

SEQ ID NO: 805 - DNA, 1929 bp, Homo sapiens
  misc_feature (601)..(601): n equals a,t,g, or c
  misc_feature (655)..(655): n equals a,t,g, or c
gaaaaaaaaagatgtcagctcctccgctgtagtattgctccttaaaaacccctctctctgaaaatgacatgccctcgcaatgtaactccgaactcgtacgcggacccttggctgcgcccggcggaggagagcgctatagccggagcgcaggcatgtatatgcagtctgggagtgacttcaattgcggggtgatraggggctgcgggctcgcgccctcgctctccaagagggacgagggcagcagccccagcctcgccctcaacacctatccgtcctacctctcgcagctggactcctggggcgaccccaaagccgcctatcgcctggaacaacctgttggcaggccgctgtcctcctgctcctacccacctagtgtcaaggaggagaatgtctgctgcatgtacagcgcagagaagcgggcgaaaagtggccccgaggcagctctctactcccaccccttgccggagtcctgccttggggagcacgaggtacccgtgcccagctactaccgcgccagccgagctactccgcgctggacaagacgscccactgttctggggccaacgacttcgaagcccctttcgagcagcgggccagtctnaacccgcgcgccgaacatctggaatcgcctcagctggggggcaaagtgagtttncctgagacccccaagtccgacagccagacccccagccccaatgaaatcaagacggagcagagcctggcgggccctaaagggagcccctcggagagcgaaaaggagagggccaaagctgccgactccagcccagacacctcggataacgaagcgaaagaggagataaaggcagaaaacaccacaggaaattggctgacagcaaagagcggaaggaagaagaggtgcccctatactaracaccagacgctggaattggagaragaatttctgttcaatatgtatktgacgcgagagcmcgcctggagattagcaagaccattaaccttacagacagacaagtcraaatctggtttcaaaatcgcagaatgaaactcaagaaaatgaaccgagagaatcggatccgggaactgacctccaattttaatttcacctgagagcgcggcctctcctcctcccttcccgctccttcctctccccgcccctcctccctttgtgcctggtgatatatttttttttcctccctgagtataaatgcaatgcgactgaaaaaaggcaaagacctcagactctccttccaagggacctgtggttcgtgctgcgaagatgcttccacttaaagcatgagaaatggggtgccgggatgtggggtgtggtgtgtgccctcataratgggggtgggagtgtggctggtgtgtgtgtcaaaccctcactcacccacgcactcacacacagcattctgttctccatgcaaagttaagatcgaatccatccgcttgtaggggaaaaaaaggaaaaaaattaaccagagagggtctgtaatctcgcagagcacaggcagaatcgttccttccttgctgcatttcctccttagactaatagacgttttggaaagttcggctagtgttcgtgtgtttgtcgtagcacccagagcctccaccaaaccctctccatgtctttacctcccagtcgctctaagaatctgcttgaagtctcgtatttgtactgctttctgcttttctcccacccctcctagcacccccacatcccccatctagtaacatctcagaaatttcatccagaggaacaaaaaaattaaaaatagaacatagcaaagcaaagacagaatgcccccccccaaatattgtcctgtccctgtctgggagttgtgttatttaaagatattctgtatgttgtatcttttgcatgtagcttccttaatggagaaaaaaaaacctaataaatttccagaatcataatcctcaaaaaaaaaaaaa

SEQ ID NO: 806 - DNA, 463 bp, Homo sapiens
  misc_feature (15)..(15): n equals a,t,g, or c
  misc_feature (65)..(65): n equals a,t,g, or c
  misc_feature (389)..(389): n equals a,t,g, or c
  misc_feature (399)..(399): n equals a,t,g, or c
  misc_feature (439)..(439): n equals a,t,g, or c
tcactcaccgcggtncataagccctactagtgataatttgccaacgctggcagagtatacaccanatgtgctaggtgtctggttgccacccgcgttctaagcggcttacgcgtgcgtgctacaggcctgatttaatgcggctagtacgattttaggtgagtagtaatcccgataaatcacgttgccttggcgtgcgccacatccaggatattggtttatggctgcaaaaccgtaaccttggtggcctgcagttagtgcttgggcgcctgctgcttttgcgcctgctgcttattatactgctgttgctgctgctgctacttttactgaaccggcaamttaaccaacamgtccaccamgtccatcaccagagcccagggccgtgtgggcangaagtgttanaaactaattaatggacttacggggagggctaaataaccanagaaacctggatggtgggaaaaaa

SEQ ID NO: 807 - DNA, 1069 bp, Homo sapiens
gggcgggcaaaggagcgcaaagtgaacaagaagaaacagcagcagcaacagcccccacagccgccgatggcccacgacatcacggccaccccagccgggccatccctggggggcctgtgtcccagcaacaccagcctcctggccacctcctctccaatgcctgtgaaagaggagtttctgccatagccccatgcccagcctgtgcgccgggggacctggggactcgggtgctgggagtgtggctcctgtgggcccaggaggtctggtccgagtctcagccctgaccttctgggacatggtggacagtcacctatccaccctctgcatccccttggcccatctgtgcagtaagcctgttggataaagaccttccagctcctgtgttctagacctctgggggataagggagtccagggtggatgatctcaatctcccgtgggcatctcaagccccaaatggttgggggaggggcctagacaaggctccaggccccacctcctcctccatacgttcagrggtgcagctggaggctgctgtggggaccacactgatcctggagaaaagggatggagctgaaaaagatggaatgcttgcagagcatgacctgaggagggaggaacgtggtcaactcacacctgcctcttcctgcagcctcacctctacctgcccccatcataagggcactgagcccttcccaggctggatactaagcacaaagcccatagcactgggctctgatggctgctccactgggttacagaatcacagccctcatgatcattctcagtgagggctctggattgagagggaggccctgggaggagagaagggggcagagtcttccctaccaggtttctacacccccgccaggctgcccatcagggcccagggagcccccagaggactttattcggaccaagcagagctcacagctggacaggtgttgtatatagagtggaatctcttggatgcagcttcaagaataaatttttcttctcttttcaaaaatgtataaaaatcattatacatagcattaaagaaacatttttgagaagtamaaaaaaaaaaa

SEQ ID NO: 808 - DNA, 869 bp, Homo sapiens
ggtttcaccatgttgcccaggctggtcttgacctcccgacctcaagtgatctgcctgccccgacctcccaaagtgctgggattacaggcttgagccaccgtgccaggcctgttttgtttgtttttgtagagagatggggtttcgccatgttgcccaggctaatctcaaattcctgagctaaagcgatctgcccacctcggcctccgaaagtgctaggattacagatgtgaaccactgtgcctggcctgtttgtttgtttgtttaaaacatttctccatcactcattccaggtcccagagcaaactctctctgctctcggagcctgtgacactggctatgtgctccacagtttcagtcccaggtcatactctccaacagttttcagagctccatatatatgtagatgccatcctttctaaaaacttctcacgacctccyggaatattcctattgatctcattttatttagcatcagctcaagaaactaagtcttagtgcacagtatcacaacaaagaaaaagctttgtttttataactggtaaaaacaagaaaagattctcatcaaaatgaaaatataaaattaatcatttctcaccaaagagtatgcctgggagcctccagctgttaaaagacaatgctattactacttcttatcaaaaatctgtaatgccctgtgatttttatgatacttcttcaatacaaagtgttaatatgtgtcatcagtataataacaaccaacaaaatgccactttcagaaaactgtatgtaaattttttgtaacaatgtaaaaaagaaatggggagtaagtgttcacatcattaaaaggctttgaattcatggaaatamaaaaaaaaaaaaaaaaaaaaaaa

SEQ ID NO: 809 - DNA, 1158 bp, Homo sapiens
  misc_feature (336)..(336): n equals a,t,g, or c
  misc_feature (1153)..(1153): n equals a,t,g, or c
gggagaaggtgccttcccttgttttctggccttgttatatacagatggcagcttggatctcaggtacagctccaggggcaggcagtgcccagctggacctggtggccctttcctagtgcctctgctgggggaggagaacctctgtccacgtggaggctaggaggtactaccaggccctggcagcaccagagtgtggccgggcccgagtgtctcccctcggcctcagggtggggcacttagcacccagaagggaccaaaagcagggcatggcggtgcagaggagtttgggaggtgtaaacagccccatgcacgtggaggaggagactgtttcagccncagaccccacgctagcactttccacgstgcttgcccgctgttgatgtgcagttcccagtgcctgtgtgagccgacatctgctcagtcctatccctcgtcagcgtgtggagacccagctcctgcagccctcctgctcccacgcccccagacagcttggtggagggtcctgcatctgggccaggctggggtgcacccagcmaaagacaaagctgcctccacgtgcccaaggattcagatggtgcactggccccgggaggagtctgaccaaaaatggagcccgctctgtggggaagccccgactcccccacgagaaacggtcccacggtgcggatctcccccttcccttgtggggcacagctggcctgggcctccaatcctgcggagctttcctgggtgtggctttgacctcagaagtggctctggtttggcctcaggagtgtggcctggcccagcctgctgcagcctcctggggggcccttgatgccactaatcccccgaccccccgcatctgccaaactgcacagacacacgcattgtaaggccgcttgtggcctccagcgtgcactcttgtttacgtcattgtcatcttcaagaccagtcctttgtgattagttttgcttcgcgagccctggtgtggactgtggtctgtatgaatcgtgtgtaactgtggtgaggggcttgtcctgtatgtgagtctgtacccaggtggggtctgtgccctgcacaccgggcccctctgtatttatcgctgcctgaatgcaacagtaatttatatccaggacaaatacagtctgggcgtcactatcctaaaaaaaanaaaaa

SEQ ID NO: 810 - DNA, 1412 bp, Homo sapiens
  misc_feature (9)..(9): n equals a,t,g, or c
  misc_feature (15)..(15): n equals a,t,g, or c
ttttagggntattangtagcccattgggttacccgggattgaaatgtttgatatggcmagatrggtatggtaatttcaaagtgaattgggaattcctctggctcatagaacccttttttttttcctttaagtattcttgagatacaaaaaaaaaaagtaaatamaatttcaaaaaaaaagttccggatctgtttttaagctccatctggtcctcataacctgcaagatttttcttaaaacctttcagctgaaagtgggggtaaaggtggagtaatctgtggatttgtttctgttgtcttttaaaatgtcaaatatataatatgtaatttttttaaaaaccaccagatacagaaatgtgctttaacatcagttgaaacctaaattttcttatgttgtggtgattgtattaaaaagggataaaagaagagtgtcaaacatggttaaatatattgtactcatttatgttgaatacgtattaaaattaagacaaatggaaaattatactttgagtatataatttgttaaatattactttatatkgtaattttatgtataatttcatatattggtaaaattcaaaactacacttgagaatttttttatcttaagtttggggtgaatggggtggatgagactgattgaatagaaaagggctaatggcccaaacattatatagatttctttttttcagtcagaggccttatttgatattttataaataaatgacagtttttatttttaaactttttattgtttttgggaaagtattccttaatttaatgacacattcattcagatacttcttatccctgctaataaaggaaatctatttcaagctacaccattgagattaagtctgaggcagttcattgaggcagctctactataaaagcttacttgataaataattatttttgtaaacaagttgggttaacttattcttcgtctttttgcttggatatgaatttaaggtcttcatgtttaaagacatttactttgttatttagtgacacatttccatcctattttttttttttttttggttgttgttaaacagaaccttaagtttatgtttgaggtatgtactgcataggaacctattttattattaaagatgaatgattaaaattggtatggtctccaatttaatttgaaaagtgcttacccttattcttatatatggtttaattttaaggttttttgtctcttcttagtgcaaaactacttagcagtgacctctatctgtattccttaggaattagcagcttcttagtgtggatcctgcagaacttcttaccatttgtagtaggttgaatcatgtcccctagaaggtaagtctaagtcctaacttgatacacctgggaaggtgaccatatttggaaatagtctttacagatgtgattaggggatct

SEQ ID NO: 811 - DNA, 609 bp, Homo sapiens
  misc_feature (32)..(32): n equals a,t,g, or c
  misc_feature (600)..(601): n equals a,t,g, or c
  misc_feature (606)..(606): n equals a,t,g, or c
gtttattttggaattacagatgcaaagtatantggaaaagaaaatgaaamccargagaaatattgccargcattmcargaatamcccatcactaataactttcctttgcaaaaactgcagtgtgctagcctgttctggggaagatatccatgtaattgagaaaatgcatcacgtcaatatgaccccagaattcaaggaactttacattgtaagagaaaacaaarcactgcaaaagaagtgtgccgactatcaaataaatggtgaaatcatctgcaaatgtggccaggcttggggaacaatgatggtgcacaaaggcttagatttgccttgtctcaaaataaggaattttgtagtggttttcaaaaataattcaacaaagaaacaatacaaaaagtgggtagaattacctatcacatttcccaatcttgactattcagaatgctgtttatttagtgatgaggattagcacttgattgaagattcttttaaaatactatcagttaaacatttaatatgattatgattaatgtattcattatgctacagaactgacataagaatcaataaaatgattgttttactctgmaaaaaaaaaaaaanntattngcc

SEQ ID NO: 812 - DNA, 960 bp, Homo sapiens
  misc_feature (4)..(4): n equals a,t,g, or c
  misc_feature (31)..(31): n equals a,t,g, or c
  misc_feature (951)..(951): n equals a,t,g, or c
  misc_feature (956)..(956): n equals a,t,g, or c
aagnatagaaattaaccctcacgtaaagggnacaaaagctggagctccaccgcggtgcggccgctctagaactagtggatcccccgggctgcaggaattcggcacgagctcttccacccctgccaggcccagcagccaccacagcgcctgcttcctcggccctgaaatcatgcccctaggtctcctgtggctgggcctagccctgttgggggctctgcatgcccaggcccaggactccacctcagacctgatcccagccccacctctgagcaaggtccctctgcagcagaacttccaggacaaccaattccaggggaagtggtatgtggtaggcctggcagggaatgcaattctcagagaagacaaagacccgcaaaagatgtatgccaccatctatgagctgaaagaagacaagagctacaatgtcacctccgtcctgtttaggaaaaagaagtgtgactactggatcaggacttttgttccaggttgccagcccggcgagttcacgctgggcaacattaagagttaccctggattaacgagttacctcgtccgagtggtgagcaccaactacaaccagcatgctatggtgttcttcaagaaagtttctcaaaacagggagtacttcaagatcaccctctacgggagaaccaaggagctgacttcggaactaaaggagaacttcatccgcttctccaaatctctgggcctccctgaaaaccacatcgtcttccctgtcccaatcgaccagtgtatcgacggctgagtgcacaggtgccgccagctgccgcaccagcccgaacaccattgagggagctgggagaccctccccacagtgccacccatgcagctgctccccaggccaccccgctgatggagccccaccttgtctgctaaataaacatgtgccctcaggaaaaaaaaaaaaaaaaaaaaaaaaaaggggggggncccgntccc

SEQ ID NO: 813 - DNA, 708 bp, Homo sapiens
  misc_feature (692)..(692): n equals a,t,g, or c
cgagattgttgttggctgaacatcttttaattctgagttaccaacacgttgtgcgtgcattgatgacccggcttcctggcctgcccttggtgcctgagccccagtaatgattgccctctatgttgggagaagaagggagaaagtagtacaagtagtgaagaaaaaaatgtaggtggtgttggtggttgagagtacatggcacagaaaataaaggagccaggattacctgtgcctttggcttctccttcccctgctgctttttcttcctttttccatgtcagtgcttgggaaccctcacaactggcaggtaacggggtcgggataaaatgtaaacctgtgggtgtcttctgctgagtcattaggatctttgtagcaggctgcggataaatatgtggatgacatggggcaactaagagccccttttgcttgccacctcccacccctgctctggatggtgtctcctcttgctagactgccgggtacagatcacgtggcaattaaggcaaatgttaataaataccatgaaacagtggtttgcatagtcttctgaatagccatggctttggttartcagcaacaaagcctttcacccttaccctggataatcaagagttgacaacagccagaaagtactgggaatagtggcttttggccatgacatttctcattcttcattcatgtaatgggtcaantcagaagtaattctgg

SEQ ID NO: 814 - DNA, 588 bp, Homo sapiens
gaattcggcacgagggtaaaggaacagttgatgataaggaactgggtaaagacataaccttgtatagccacacttattctcatgcacatgtaattttwaactgtratggatagagtttggcgttccagggagcatcgatagcactgcatcatgaccttgctcttgtgttgcttagagatctgccgacagccggctcagttccatcttcagtcattgtgttgcacagtgatacgatcattgctggtctaaacattgccataaacatgtctgttccccaagctgaaagggggtttctgattctaagggaacaaaaggttttctggcttaaaagacttaagacatagtcttataatagcttctttaaaaatttcagtgggttataatgcatagggtttttaaaaaagagcyaatgtgcaatatatacaatagtctatcctactgacccaacttctcccttccagttctccctaaggacaattgttaatcagtttcctgtawacccttccagaaatatatgcagawgtggcawatgtccaattaaagaaacctgatacatactgttaaaaaaaaaaaaaaaaaaaaactcga

SEQ ID NO: 815 - DNA, 684 bp, Homo sapiens
  misc_feature (611)..(611): n equals a,t,g, or c
  misc_feature (644)..(644): n equals a,t,g, or c
  misc_feature (679)..(679): n equals a,t,g, or c
ttactgaaagtttatatagtmtagtctatgtagataaaaagtaccacttgtcttttctgtgaattatgactattcatttgttaaaaatacctaagagcaattatagtgggacatctaaggtcctctgtaaacagtgaattagcaaacctcagcctatgtgtttctaccctgatttttttcttttcatgggtatctgaagcctctaagttttttcaaaaatggagtatcacaaaattgagtgaaacacaatacttaatgtattgtactagattgccaaattcataaaatgttaatggaagctttttgatgtgattataatggcactattctggtcattatcctattttgattttatttaattttttaaagttgaagaattaaatattttaatggttctaatcttttgcattccatgttgcattaaacctgtttatatgagtagtcttctgttagaatcacatctgtgcttttcttgagtctgctgttgaactattagattaagtcataattcataaaattttagtttaatgtgctctttgtaaaatgaaattgtaaagaaaataccagtgtttctcatcccattgactcacaccacggtcatctgggatttngggattccctccakgcagccagctawagtgggngtttcccaaaacaacagggaatcccttcacccatnggggg

SEQ ID NO: 816 - DNA, 1204 bp, Homo sapiens
  misc_feature (4)..(4): n equals a,t,g, or c
  misc_feature (1033)..(1033): n equals a,t,g, or c
  misc_feature (1050)..(1050): n equals a,t,g, or c
tggngctccaccgcggtgacgaccgctctagaactagtggatcccccgggctgcaggaattcggcagaggcagwgccggcgtgggcggccggccgaggcggaggcgcaggaagggggckgcgagtcgtgcgaggctgcccttctcactcagcattatggatccaagcctgttgagagaaagggagctgttcaaaaaacgagctctttctactcctgtagtagaaaaacgttcagcatcttctgagtcatcatcatcatcgtcaaagaagaagaaaacaaaggtagaacatggaggatcgtcaggctctaaacaaaattctgatcatagcaatggatcatttaacttgaaagctttgtcaggaagctctggatataagtttggtgttcttgctaagattgtgaattacatgaagacacggcatcagcgaggagatacgcatcctctaaccttagatgaaattttggatgaaacacaacatttagatattggactcaagcagaaacaatggctaatgactgaggctttagtcaacaatcccaaaattgaagtaatagatgggaagtatgctttcaagcccaagtacaacgtgagagataagaaggccctacttaggctcttagatcagcatgaccagcgaggattaggaggaattcttttagaagacatagaagaagcactgcccaattcccagaaagctgtcaaggctttgggggaccagatactatttgtaaatcgtcccgataagaagaaaatacttttcttcaatgataagagctgtcagttttctgtggatgaagaatttcagaaactgtggaggagtgtcactgtagattccatggacgaggagaaaattgaagaatatctgaagcgacagggtatttcttccatgcaggaatctggaccaaagaaagtggcccctattcagagaaggaaaaagcctgcttcacagaaaaagcgacgctttaagactcataacgaacacttggctggagtgctgaaggattactctgacattacttccagcaatagggnacagttttgcctgggancagagttacagatacacawtcaagagtgktcttgctgatgctsggggtctgaagactgtgctcccaaccgcttcttgcggctgaggagaggagcctttcggtgtccgaagcagttggaagttccagatcaaggctttttggggagatgggccat

SEQ ID NO: 817 - DNA, 1327 bp, Homo sapiens
  misc_feature (11)..(11): n equals a,t,g, or c
ttgtgattttnctcaggctgttttgtcattttaaaatccagtggtagatgtagcttagcgacggtagttttttgttttggctatactaagacttggaaattattctctccagtgtcagcgaatccagaagggtatcagattaaacaccgaattcagccactggacttttaaaagtacttaagatggtttatctcgggttttttcttcagttaacaaaatcataaatatggtgccttataacatgaaaggaaaattagttgtgtatttcacgacgaaagcgacggaccaaaagaaatttcctgccccaagaagcatgggatccaggaaggggcgcgtagatgcttaacggtctcttcggaaatcctgcaaatagaaagataattctagatccggaatacctgtatctggtggaaaccatggatttctacaagctcgaattattcctcattgtatagcctgctttgtaaactagtttacaatttgcaggctgatcttaagatttttttatatctaattgctgctgccttcattttaggttcagcagttacttttaactaccttaatttattgccagaaggtatgagcctaacattctgatgagtccagaaaactacgttttgtcagtagcaatacactaggaagtaaaatatatttagaatttaaacattgtgtgccagtggtcctcgcgcttgactgcacatcagttacttgaagagccacacctcagatcaatgcagtcagaacctgggaagtaggtcccagacatcaggacctttttaaagctccccaagtgattctacgttccccaagtttgaggaccacttttctgtgcattggcttgcacaatttgaaaataatgcttttcctgagctggatcccagtgttgccttaacagggtgtctgtcgtgccgcagtagagcactgctgcttcctccaaccccaaaatttatgttcctaagtaagtcaggtccctaagccccgtcccaagaagtgacacaagtggccaacatccacactgtaggcttgcaggctacccgccctgagatttggtaaagaacactgccttgttccccatcagtaaacaaggttacctacctcaggaggctgcttgtgagagagcaaatgcagtatcttcagaatgatttatttttttaattaattgtaaagacttgtgccattggctgctctttctagtcccctaaatttctgttctagttttaaatttctctagaacttgcaatagttgggggttttataatgatgttttacaatgtttatttcttaaataaaaacttaaaaattcaaaaaaaaaaaaaaaaaaaaaaaa

SEQ ID NO: 818 - DNA, 685 bp, Homo sapiens
  misc_feature (598)..(598): n equals a,t,g, or c
  misc_feature (601)..(601): n equals a,t,g, or c
  misc_feature (613)..(613): n equals a,t,g, or c
  misc_feature (651)..(652): n equals a,t,g, or c
  misc_feature (679)..(679): n equals a,t,g, or c
gggcatcttgtgatgctatcttgctaggttttccagtagtgtgtcagataaatgttgaattgccagtaactggtgtctggttgattgcttgccactgcaggtgattctgaattgctgtgagggcagaacacccaaggagacaatagaaaatttgttgcacagaatgactgaagagaagacgctgactgctgagggtttggtaaaactcctccaggctgtgaagacgactttcccaaacctgggccttctgctagagaagttgcagaaatcagccactttgccaagcaccacaggtcatggagaagcttgtgaaacgtgactctggttcaggtggtttcaattctctgatatcagcagttctagaaaagcagactctctctgccacagccatttggcaactgctgctggtggttcaggagacaaagacctgtccattggacctgctcatggaggaaatacgaaggagcctggtgccgatgctttcttycgggcagtgaccaccccagaacatgccactttagaaacaatcctgaggcataaccagttgatcttggaggccatccaacagaagattgagtgcaagctctttacctcggangangagcacctgcanaaactgtgaaagagattctgagcattcctctgagacanncagccctgaaactttcctgaaaagcantgctga

SEQ ID NO: 819 - DNA, 857 bp, Homo sapiens
attccagctactcgggaggctgaggcgggagaatcgcttgaacctgggaggtggaggttgcagtgagccgagatcgcgccattgcactccagcctggacagcaagagcaaaactccgtctcaaaaaacaaaaacaaaaacaaacaaaaaaattcccctgagagaaaacctgtctttccagccagaggagcaggaaaaaatgaccctatggtctgaagaatgtggaaataatccatctttttttctctctctgctttctgcctgaggggcgttccttttggcaaaatgagcaggcagtgtaggcaggtaatcatcagagagaaagcccatctttctaagccagaggatgaggaaaaggggccccctgggtgccagggagtctggggggaaatcctgaagagcaaagacctgaaaagaggattctctaattctgtacatgagctgaattccgtgctcagcccagagctgcacatacaagagacagagcccaggcaacacagccacactctgaactgacactcggaccaccaccaccaaacagaaggcaacgcaggacctgcagactaaggctaacgaggctgattgcctgacaaaacagaaaaaaaagaaacattcttcagggaattttagcagaacacagagtctcccaacataaaacagacagtcctcactgcacagcagttcagaactgtaaaaatgaccttccaacctgaaactgccatgtgctgttcataatcattaatgggtaaaattgtgatttttttcctgtcttttgaaaattgtcaaaacattgataatcttgtactgttagaaatgtataaggaaacaataaagtaaatatttttgtaaaatgtaatt

SEQ ID NO: 820 - DNA, 291 bp, Homo sapiens
  misc_feature (261)..(261): n equals a,t,g, or c
  misc_feature (285)..(285): n equals a,t,g, or c
gatttagaggaaataattctgtactactttttgagtgtgttttttaatgcttttacttctggtgtgggcatgctggattttatatttctaaaaaccaataaaatttggaaggcattgcctctaaatgttacctaaaaaatagaaaacacaaccataaatatgcctagtaattagcacatattttatttcatagaaactgattcctggctggacctggtggctcacacctggtagtcccaacactttgggaggttgaagcanggggattgcttgaacctttgagtncaggag

SEQ ID NO: 821 - DNA, 965 bp, Homo sapiens
  misc_feature (168)..(168): n equals a,t,g, or c
  misc_feature (225)..(225): n equals a,t,g, or c
  misc_feature (965)..(965): n equals a,t,g, or c
tcactggaaaatgacaagatgagacttgagaaagatttatcattcaaagacactcaattaaaagagtacgaagaactcttggcatcagtgagagcaaataatcaccagcagcagcaaggacttcaagactcaagttcaaaatgccaggcattggaagaaaacaatctntctcttcgacatacactatcagacatggaatacagactaaaagaactggaatattgnaaacgtaatttagagcaagagaatcaaaaccttagaatgcaggtttctgagacttgcacaggcccaatgttgcaggctaaaatggatgarattggcaaccactacacggagatggtaaaaaacttgagaatggagaaagatagagagatctgcagactgaggtcccaattaaaccagtaccataaagatgtttcaaagagagaaggaagttgtagtgacttccaatttaagcttcatgaactgacaagcttgctggaagagaaggattccctcataaagcgtcagtcagaggaactctccaagttgcggcaagaaatatattcctctcataaccaaccctccactggtggaaggactactattaccactaaaaagtacaggacacaatatccaatcctaggcctcctatatgatgactacgaatatataccaccaggtagtgaaacacagactattgtgattgagaaaacagaagacaaatacacttgtccatgaatggrtccactttaaagtattacaactcaaagccgttttttttgtgtgtgtgtgtctctgcattagtactttgttatttttccatcactaaaggccaatcagaatttggaaccatgctgctacccaagaaatctaatggaatgaattagttctgtagatgacaatttcttcacccatttatgagacctaaatcttttccataacactcatgtattcagtatwacacatactaactggaagagggn

SEQ ID NO: 822 - DNA, 1561 bp, Homo sapiens
gcccacgcgtcgcccacgcgtcckgggagctgaattccggaagatccccacatcgatgaaagcaaagcgaagccaccaagccatcatcatgtccacgtcgctacgagtcagcccatccatccatggctaccacttcgacacagcctctcgtaagaaagccgtgggcaacatctttgaaaacacagaccaagaatcactagaaaggctcttcagaaactctggagacaagaaagcagaggagagagccaagatcatttttgccatagatcaagatgtggaggagaaaacgcgtgccctgatggccttgaagaagaggacaaaagacaagcttttccagtttctgaaactgcggaaatattccatcaaagttcactgaagagaagaggatggataaggacgttatccaagaatggacattcaaagaccaagtgagtttgtgagattctaacagatgcagcattttgctgctaccttacaagcttctcttctgtcaggactccagaggctggaaagggaccgggactggaaagggaccaggactgaacagactggttacaaagactccaaacaatttcatgccctgtgctgttacagaggagaacaaaatgctttcagcaaggatttgaaaactcttccgtccctgcaggaaaggattgatgctgatagaagagcctggacagatgtaatgagaactaaagaaaacagatggctggagatgacatttatccagggtcactttgtcaggccctaggacttaaatcgaagttgaacttttttttttttttaaccaaatagataggggaagggaggagggagagggaggacagggagagaaaataccatgcataaattgtttactgaatttttatatctgagtgttcaaaatatttccaagcctgagtattgtctattggtatagatttttagaaatcaataattgattatttatttgcacttattacaatgcctgaaaaagtgcaccacatggatgttaagtagaaattcaagaaagtaagatgtcttcagcaactcagtaaaaccttacgccaccttttggtttgtaaaaggttttttatacatttcaaacaggttgcacaaaagttaaaataatggggtcttttataaatccaaagtactgtgaaaacattttacatattttttaaatcttctgactaatgctaaaacgtaatctaattaaatttcatacagttactgcagtaagcattaggaagtgaatatgatatacaaaatagtttataaagactctatagtttctataatttattttactggcaaatgtcatgcaacaataataaattattgtaaactttgtggcttttggtctgtgatgcttggtctcaaaggaaaaaataagatggtaaatgttgatatttacaaacttttctaaagatgtgtctctaacaataaaagttaattttagagtagttttatattaattaccaaactttttcaaaacaaattcttacgtcaaatatctgggaagtttctctgtcccaatcttaaaatataaaatatagatatagaagttcaaaaaaaaaaa

SEQ ID NO: 823 - DNA, 941 bp, Homo sapiens
  misc_feature (6)..(6): n equals a,t,g, or c
  misc_feature (11)..(11): n equals a,t,g, or c
tacctntaggnaaagctgctgcaggtaccggtccggaattcccgggtcgacccacgcgtccgagacttcggagactgcagttgcagttgttccgtgtaggctgttgttgactctcgtatgaaagcccacgcgatccaagtgccctgcaggttttggtccagggaaaagttggtctctgcagatgactgtaaatgactacctggaggtcgattaaagtgcggtactgcgggattcagccgatttccttcttcctctgactgcccggaaatatcagccaaaggccagcgttctaaggacatatggaattggctatggataattcatatgctttcaatcaacgaagcacatgtaatggaattccatctgagaagaaaaacaacttccttgtatcagaagatcatggacaaaaaatcttaagtgtactacagaattttagagaacaaaatgtcttttatgatttcaaaataattatgaaagatgaaataatcccgtgtcatcgttgtgtgttagcagcatgcagtgactttttcagggctatgtttgaagtaaacatgaaagaaagagatgatggaagtgttaccattactaatttgtcctccaaggcagtaaaagcatttctcgattatgcctatactggaaaaacaaaaataacagatgataatgtggaaatgttcttccagttgtcatcatttcttcaagtttccttcctatccaaagcttgcagtgactttttaataaaaagtattaatcttgtmaattgtttacagttattatctatatcagatagctatggctccaccagtttgtttgatcatgcattacactttgtacaacatcacttttctttattatttaaatccagtgatttcttagagatgaattttggagtactacagaaatgtctggaatcagatgaattaaatgttcctgaagaagaaaaa

SEQ ID NO: 824 - DNA, 3692 bp, Homo sapiens
gctcgtgccgaattcggcacgagagactgacgagtgcggtgtcgctccagctcagagctcccggagccgcccggccagcgtccggcctccctgatcgtctctggccggcgccctcgccctcgcccggcgcgcaccgagcagccgcgggcgccgagcagccaccgtcccgaccaagcgccggccctgcccgcagcggcaggatgaatgatttcggaatcaagaatatggaccaggtagcccctgtggctaacagttacagagggacactcaagcgccagccagcctttgacacctttgatgggtccctgtttgctgtttttccttctctaaatgaagagcaaacactgcaagaagtgccaacaggcttggattccatttctcatgactccgccaactgtgaattgcctttgttaaccccgtgcagcaaggctgtgatgagtcaagccttaaaagctaccttcagtggcttcaaaaaggaacagcggcgcctgggcattccaaagaacccctggctgtggagtgagcaacaggtatgccagtggcttctctgggccaccaatgagttcagtctggtgaacgtgaatctgcagaggttcggcatgaatggccagatgctgtgtaaccttggcaaggaacgctttctggagctggcacctgactttgtgggtgacattctctgggaacatctggagcaaatgatcaaagaaaaccaagaaaagacagaagatcaatatgaagaaaattcacacctcacctccgttcctcattggattaacagcaatacattaggttttggcacagagcaggcgccctatggaatgcagacacagaattaccccaaaggcggcctcctggacagcatgtgtccggcctccacacccagcgtactcagctctgagcaggagtttcagatgttccccaagtctcggctcagctccgtcagcgtcacctactgctctgtcagtcaggacttcccaggcagcaacttgaatttgctcaccaacaattctgggacgcccaaagaccacgactcccctgagaacggtgcggacagcttcgagagctcagactccctcctccagtcctggaacagccagtcgtccttgctggatgtgcaacgggttccttccttcgagagcttcgaagatgactgcagccagtctctctgcctcaataagccaaccatgtctttcaaggattacatccaagagaggagtgacccggtggagcaaggcaaaccagttatacctgcagctgtgctggccggcttcacaggaagtggacctattcagctgtggcagtttctcctggagctgctatcagacaaatcctgccagtcattcatcagctggactggagacggatgggagtttaagctcgccgaccccgatgaggtggcccgccggtggggaaagaggaaaaataagcccaagatgaactacgagaagctgagccggggcttacgctactattacgacaagaacatcatccacaagacgtcggggaagcgctacgtgtaccgcttcgtgtgcgacctccagaacttgctggggttcacgcccgaggaactgcacgccatcctgggcgtccagcccgacacggaggactgaggtcgccgggaccaccctgagccggccccaggctcgtggactgagtgggaagcccatcctgaccagctgctccgaggacccaggaaaggcaggattgaaaatgtccaggaaagtggccaagaagcagtggccttattgcatcccaaaccacgcctcttgaccaggctgcctcccttgtggcagcaacggcacagctaattctactcacagtgcttttaagtgaaaatggtcgagaaagaggcaccrggaagccgtcctggcgcctggcagtccgtgggacgggatggttctggctgtttgagattctcaaaggagcgagcatgtcgtggacacacacagactatttttagattttcttttgccttttgcaaccaggaacagcaaatgcaaaaactctttgagagggtaggagggtgggaaggaaacaaccatgtcatttcagaagttagtttgtatatattatwataatcttataattgttctcagaatcccttaacagttgtatttaacagaaattgtatattgtaatttaaaataattatataactgtatttgaaataagaattcagacatctgaggttttatttcatttttcaatagcacatatggaattttgcaaagatttaatctgccaagggccgactaagagaagttgtaaagtatgtattattyacatttaatagacttacagggataaggcctgtggggggtaatccctgctttttgtgtttttttgtttgtttgtttgtttgtttttggggggttttcttgccttggttgtctggcaaggactttgtacatttgggagtttttatgagaaacttaaatgttattatctgggcttatatctggcctctgctttctcctttaattgtaaagtaaaagctataaagcagtatttttcttgacaaatggcatatgttttccacttctttgcatgcgtttaagtcagtttatacacaaaatggattttattttttagtttaactgtgtttctccgacagctcacctctcyctgaccasccagccatttccttcctgtgctccacgttcttctgtgtgattaaaataagaatattatttttggaaatatgcaactccttttcagagatcaggagggatttatgtagcagctatttttactgcaaaagtaattcactggaaaaaaaatgtaatttgtaagaaagctttatttttatctcagctctatgtaaagttaaagttactgtacagagctgaaggacggggggcggtaggggtcttgatgaaacctcttgaacgaagcacagtttgtcccatctttgttcactcgtgtgtctcaaccatcttaatagcatgctgctcctttttgctcagtgtccacagcaagatgacgtgattcttattttcttggacacagactattctgaggcacagagcggggacttaagatgggaaagagaaagcatcggagccattcattcggagaaaacgttttgatcaaaatggagacttttgtagtcgtttcaaaagagcacctgagtcatgtgtattcccggcctttataaatgacccggtcaagttggtttcaaagtycgacaggcttgtctgtttactagctgcgtggccttggacgggtggctgacatctgtaaagaatcctcctgtgatgaaactgaggaatcgggtggccgggcaagctgggaagagcaaagccagagctgcgctgcctcaatacccacaaaagaccattcccagtatacataagcacaggatgtttttctcaagagggatgtatttatcacttggacatctgtttataatataaacagacatgtgactgggaacatcttgctgccaaaagaatcctaggcagtggctcattgtatgtgaggttgaaccacgtgaaattgccaatattaggctggcttttatctacaaagaaggagtttcatggggttcagcctaacagttatggaaactacagtccttataaaccattggcatggtaataaacagatcttaagtataaaaattttgtaattgggcctttactctctcaataataaagtattttgtttatataaaaaaaaaaaaaaaaaat

SEQ ID NO: 825 - DNA, 1427 bp, Homo sapiens
ttttttttgaactctgaactttttattggcctcctgctccccaaagggtaccctgcttctgctggcttaatgcctcagaactttggtgtcattggtctcagacaccactttgccatccactatccggcgggtggtggtcttttggatggtttgcatggagttgctgctgtccaaggcatcaccaagattaaagtcctcgccatcttccagcaggcggcggtaggtggcgatctcagcctccagcttgaccttgatgttcagcagggcctcatactcctgggcctggcgctgtccctctgcccgggtctgtgccagctctgactcaaggtgcagcaggatcccgttgagctgctccatctgtagggcgtagcgggcctccacctccctcaggctgttctccaagctggccttcagatttctcatggagtccaggtcgatctccaaggactggactgtacgtctcagctctgtgagcgtcgtctcagcagctccaacctcagcagactgtgtggtgaccactgtggtgctctcctcaatctgctgagaccagtacttgtctagctcctctcggttcttccgagccagctcgtcatattgggcccggatgtctgccatgatcttggcgaggtcctgagatttgggggcatctacctccacggtcaacccagagctggcaatctgggcttgtaggccttttacttcctcttcgtggttcttcttcatgaagagcagctcctccttgagagcctcgatctctgtctccagctgcagtcgtgtgatattggtgtcatcaatgaccttgcggagcccatggatgtcgttctccacagactggcgcatggccagctctgtctcatacttgactctaaagtcatcagcagcaagacgggcattgtcaatctgcagaacgatgcgggcattgtccacagtatttgcgaagatctgagccctcaggtcctcgatgatcttgaagtaatggctccagtctctgacctggggtcccttcttctccaagtgctcccggattttgctctccagcctccggttctcggtctccaggctcctcactctgtccaggtaagaggccaggcggtcgttcaggctttgcatggtctccttctcgttctggatgcctcccattcctgccagacccccggctatcccggtggccaggcccccggaccccatgccgcccctgaagctggtggagcgggacacggagatccgggaaccagagcccccagcgcctgcatagacgctggccgcgctgctgaccggccgggcgccgtagctgggcgcctggacagagcccagggaccggtagttggtggagaaggtggagcgagtggtgaagctcatgctgtccggggagagagaaaggacaggactcaggctttgcggacgccgtgggcggacgcgtgggtcga

SEQ ID NO: 826 - DNA, 425 bp, Homo sapiens
aagctggtacgcctgcaggtaccggtccggaattcccgggtcgacccacgcgtccgctgatgacaagaacgatgaaaaatgcatgaaagttgacttagtatcttttcatcttcacctattatggttgataatgatagctctggtacaagtgataaggatcatagtgaaatacttgatggaattagtaacataaaactgaattcagaggaagtaacacagagccaattagattcctgtacaagtcatgatggtcatcaacagctaagtgaagttagtagcaaaagagagtgccctgcttccggccaaagtgaaccacgtaatggaggaaccaatgaggaaagcaactcatcggggaatacaaacacagacccaccagctgaggattcacagaagtcttcaggagcraaccaagcaaagacagacca

SEQ ID NO: 827 - DNA, 375 bp, Homo sapiens
gtaccggtccggaattcccgggtcgacccacgcgtccggggaggtctaggaagatcctgacacataagaactttggcttagagagctttccaggtgtagtgccaataaaaactgacctggaaagaaaacctgcccagcacggaacatgctttctgaactcacttgagagtgtatggtgtatgtcacttctcatatattcttgagtttagatttgtcttttatacaatttttagctcttttccagttcacttgtgctcgtctgtatattggtatttttaaatttttgtggtaaataatgaaaagagtgaaattatattttataattactcatttgtagttttttttttaatttaataaacttcctccaaaaagtgc

SEQ ID NO: 828 - DNA, 1216 bp, Homo sapiens
  misc_feature (1213)..(1215): n equals a,t,g, or c
ggggttaatagcctttgcgatatttaaatgtgtgggttaatttttttatccagtttaataactttttattcctccctctacttctttgctttctctttctgctctgaagccgtggatacagaaatctctgcaggcaagttgctccagagcatattgcaggacaagcctgtaacgaatagttaaattcacggcatctggattcctaatccttttccgaaatggcaggtgtgagtgcctgtataaaatattctatgtttaccttcaacttcttgttctggctatgtggtatcttgatcctagcattagcaatatgggtacgagtaagcaatgactctcaagcaatttttggttctgaagatgtaggctctagctcctacgttgctgtggacatattgattgctgtaggtgccatcatcatgattctgggcttcctgggatgctgcggtgctataaaagaaagtcgctgcatgcttctgttgtttttcataggcttgcttctgatcctgctcctgcaggtggcgacaggtatcctaggagctgttttcaaatctaagtctgatcgcattgtgaatgaaactctctatgaaaacacaaagcttttgagcgccacaggggaaagtgaaaaacaattccaggaagccataattgtgtttcaagaagagtttaaatgctgcggtttggtcaatggagctgctgattggggaaataattttcaacactatcctgaattatgtgcctgtctagataagcagagaccatgccaaagctataatggaaaacaagtttacaaagagacctgtatttctttcataaaagacttcttggcaaaaaatttgattatagttattggaatatcatttggactggcagttattgagatactgggtttggtgttttctatggtcctgtattgccagatcgggaacaaatgaatctgtggatgcatcaacctatcgtcagtcaaacccctttaaaatgttgctttggctttgtaaatttaaatatgtaagtgctatataagtcaggagcagctgtctttttaaaatgtctcggctagctagaccacagatatcttctagacatattgaacacatttaagatttgagggatataagggaaaatgatatgaatgtgtatttttactcaaaataaaagtaactgtttacgttgaaaaaaaaaaaaagggcggccgytytaragayccarcttactnnnc

SEQ ID NO: 829 - DNA, 1304 bp, Homo sapiens
aaaaaaaaaaaaaaaaaatctaagatagaggtttggtcaacagtgcttaataataaataagaacctcctgccattctaattttcctgctgcaccccatcccccacacacccctcacgaacattgatataagcagtattaacacagtataaagaatgttcaccttgcatatgtcatttcaggcacatggattcaggagaagcacagttgagtggaagaaatggtagacttgtgaggcttgccccaggccttgtgtacacgcaataagtggtgagccatgggtctctccgtcagcgcctccctccccgccaccacttcaggccaacaatttaaggtgctgagttgtaaggctcctccattgtcagtacagggctcgcctttgtagccctgatcactaccagtacacttttcaagacaactgagtatttttgtatgcctttgccttccctttgtccatgaaacatgaagagttgtttatggttcttgacttctctgagcagagtgtctgcatctcttggagagttacacatttcttcatgagccatttttctcattcttagatgcacctgtttttatcctttgcagaccatcttctgccttcttattttcctgtctgtcaaagacagaaattacaggagatagggagggttttttagcatctctttcaaaagatgtatgtcagaatttcctttgcacaccaagaactggagcttagagccccactattctctaagccaggttctagtgccttacactccagaatgtcagatggtgggtgcagattggaagaaagagaaaagttcatctcggtgtgtgggttcccatccgccccacatagcctctccttcttcggaacaatgggcgtggggtagaaagctctttcagtgaagggtgttctagcagctcagttaacactttactctccagtcaacacttgggacatataaaaatgccattgtaactactgtagagtcctgtgactcatcgtttgtgtttgtcartktgcagttcagcttagcccttccctgttcctgtgtagttacaatctggccctgaagacatccgaggcacttcagtaagtgggatcttttctagagatcctgggtgactttgggtgcacagggtgaccgagcatttctgcccctgtgaatgtggcactaacactgtgcactgtctccaccaagcaaggtttccactgagtttcttctcatgttactgggtttgtaaatgaataaacacattttaactactcttgcacggctgcttgtgaaaaaaaaaaagaataaaaaaaaaaaagtttgtcgac

SEQ ID NO: 830 - DNA, 994 bp, Homo sapiens
gcggccgcagagactgggtcgccttggattccctctgcctccgaggaccccaaaagacacccccaaccccaggccagccggccctgctctggcgcgtccaaaatactacctagcacaggcctctgctcgaggcacccccaaactacctatgtatccagccccagagggcctccattcccaggaagtccctatgtatcccaacactggcagacacccagcaccaccctcccagacccgcaagaaagtgaatctcactactacctactcccctaaaactacctattttgtgctggctggcttgcctgctacctagtgccgactgctcccaggcaagtcccctgctgcttacagcccgcagcttttggggtccctgaggctgccctgagaatgtgctgaggtccaggatcagggtattggcatctatttaaatcgaaaaataatatatttattccaaaaagcatcctaagtgcttgcaccctagaatcaatccctccttctctggcttggcacccacagctcaggcccatcaacccccacttcwggaggggaatgttcctgagctggctgcagatctgtgggttagcttctgcttagcaggactgtggagatgcttccagcttcgctgtcctttcctctggctcctgtatcttactgttcagctgtgttaaatatgtacgccctgatgtttcctataatagcagatactgtatatttgaacaagatttttwtttatcatttctatagtcttggagttcatttgtaaggcagtgtcttgacttggaaaggatgtgttaatggggtgactttgtagcatggtatgttgtcttgagttaactgtagtgggtggggaggtccaatgccctccgcaatgcccttcatctcctgtgttgtcctgtaccctgctcagctccatcctggggttcagggaaggcacacttcccagcccagctgtgttttatgtaaccgaaaataaagatgcgtggtgacaaagaaa

SEQ ID NO: 831 - DNA, 498 bp, Homo sapiens
caataggaacgtcaagttttgcaaatcatcctccagctgcaagactttttccagctaacaaggaacgtgaagaaatwcagactttaaaacagcaawtrgcagwtttacgggaagatttgaaaagwawggarwccaaatggtcaagtacacacagccgtctcagaagccagatacaaatgttagtcagagagaacacagacytccgggaagaaataaaagtgatggaaagattccgactggatgcctggaagagagcagaagccatagagagcagcctcgaggtggagaagaaggacaagcttgcgaacacatctgttcgatttcaaaacagtcagatttcttcaggaacccaggtagaaaaatacaagaaaaattatcttccaatgcaaggtaagaggctgcatgatctttttataaaacatttcagaatgtaaggaataaacaatttatacccaacttaataaaacatttcttaataaatgtttttgaacatttgaa

SEQ ID NO: 832 - DNA, 796 bp, Homo sapiens
accatgattacgccaagctcgaaattaaccctcactaaagggaacaaaagctggagctccaccgcggtggcggccgctctagaactagtggatcccccgggctgcaggaattcsgcacgmggtcraggtaatgaatacatacatttttctgtgataaaactcttaaaagttaattttaatgtattaatagtattcctaatgtgtgctgcagaaatggctatgagcctcttaaatttacatttgcaacttaaaggtagttttagaaggaagtacaaattggctttcatcttgcaaacaatcgttttttacttcattatcttaatttgctttgtcactcataaaaaggaaaccatacctgagttgtagacaatgaggaaacacttgaggcttctgctgtgtgttcttttgttattgttgttattgttgttactcagtaacttgaatattgtttaatgtgttgtaagacgtagagtttatctcaagctgttaaaaatggtaatgtacaaatgtgaatagacacttatctatataatatgggtaagttttgtttcgcctataatagatgtttataaaaacaagtgaggggacagttggtctttttatcttttctttctttttctttcttttctttttttcttttttttttttttttttttttttgcttccacaggttgcactattgaaaaatcgagattgtataaacctggtaaaaagctgcaagatgccaaaatcttgtagatgtcaaataaaaagttattatactaaaaaaaaaaawaaaaaaaaaaaaaaaaagcaa

SEQ ID NO: 833 - DNA, 503 bp, Homo sapiens
aatcgctgaaccaggagcggagttgcaggaggagaytcaccactcacttcagcctggtgacagrgggagctctktcttaaaaaaaaaaaaaaaatcatctgtaaaataaattccgggatagtcgttttgttcaaggaaatgttttgtaaattgagctcacactatataatctttattgtcctatcctgatgtataatacagcaggtataattacaccaagcgctatagttataaatatggcatgaagtgaactatggccttttatttccttccagtgtgaacacagcaggtgtgagatgtcatcttggaagacaggccttgcagaaataggcctacatccaaaatattatcttgtgactccatgaaccattcattaaccctttgtatctttgagtgaaaattttactcaaaagttgcatctggaagttcgaagaaattacttgaaataaaaataaagatttctatatagataaaaaaaaaaaaaaaaatgcggccgcgaattc

SEQ ID NO: 834 - DNA, 588 bp, Homo sapiens
  misc_feature (7)..(7): n equals a,t,g, or c
  misc_feature (555)..(555): n equals a,t,g, or c
  misc_feature (560)..(560): n equals a,t,g, or c
  misc_feature (570)..(570): n equals a,t,g, or c
gctggcncgcctgcaggtaccggtccggaattcccgggtcgacccacgcgtccgtttgaatcctttattatttttaattttagaaatatcacagttcacatkgcaatattccctttaatttactatttttaaaggggtattgtaaatatgaaagtatttataaagtgaattgctattttttctgttcagaaaagtacacacttaaaattgttattgttaacaatgtgtaaacacatttaaaattgttattgttaacaaagaaatcatggagaactgtagaggttttcacagtggatccattttctgacagttttctactatctattaaatcatatctgcttaaatatatagcttctatctgtctttaaatcttctcattaaaatgtataagcagtgaytttgatctcaaaaataggtaatttttctttgccgacctgtaaaagtgtgccaatacactaaatttgtgattttaaattaattcctccagctgttgaaatgaagtctgccaaatcttgctctaacaaataaaatgttatytaaatgaaaaaaaaaaangcgcnttaagaccantactcctctcacgctctt

SEQ ID NO: 835 - DNA, 965 bp, Homo sapiens
tgtttttatttttaaactatcaatgttgtttaaaataatcatgtacttgttgagttcctgaggtttggaacaaattacacataaaatttagaatactttatttctgaaaagcatatacatatatgttatgtttatttttccttgttgattagaaaggtgatggaatatgtgacaatgcaaaatkaattgataatttttctgtattttgagtgaaagttgtctgtaatatgtcaagcaagaatgttataattctacagtaatgtgtgacttcatgacagagctacattctgagaaatttgtcattaggtgatttcatcattgtgtgaacatcatgaagtgtacttacacaaacctaggtggtagagcctactgcacacctgggctagatggcaaagtctgtcgcttctgggctacagacctgtacagcatggtactgtattgaatactgtaggcaactgtaacacaatggtatctgtgtaatctaaacatagaacagataatacattgtgctacaatgtaacaatggctgtggcatcactaggtgataggaatttttcagttccattataatcttataggatctctgtcatatgtggtcaattgttgatcgaaacatgactgtatgtcgtattttcagaaaatggaataggtaatcatcacttgtgtgaattttaatcaaatgacttaggaaagaaactggatgtttcaaaagctgttgcatttattacaaatgtcacaaatacagctcttgccttttgagaatgttggagagatgtctttaaaaaatatgtttgtgtgtaaaaatgtgtctgtatgcaatagctagaaaaatgcctgtgtcttaagtcattactcatgttctaatttttgttctttgtactatttatctgtatgcttgttcttcagtatttcagactcaaaataaatttatttttttatgttaaaaaaaaaaaaaaaaaaaaaaa

SEQ ID NO: 836 - DNA, 454 bp, Homo sapiens
agtggcaggtgtgtggccctgccctggccccgtagtgagtgtggggcccacctgtgccctcatgggcagctgaagggggagctttctaccccaggttcctttccttactgaaaagtcttgagcaaacagttgccgctctccaccccctgctttttaaaaaaaattttttctcacgtaagaaaatgttatctgtgtgctggggaaaattttgaaaataacaaaaaccagaatacaaacacccataatcaatcacagagataaccactgttcataattccttccagtcttcttacttggcacatatacatttgtctttctttatatatgacatatggatattttacaaagttaggatcctactctatgcactgcttggtgatcggatctattcaatgtacaaaatattttgaaagtttctgtgattaaatgttctttgaaaacataaaaaaaaaaa

SEQ ID NO: 837 - DNA, 754 bp, Homo sapiens
  misc_feature (83)..(83): n equals a,t,g, or c
  misc_feature (502)..(502): n equals a,t,g, or c
  misc_feature (752)..(752): n equals a,t,g, or c
actatagggtaagctggtacgcctgcaggtaccggtccggaattcccgggtcgacccacgcgtccggtctttggattctaatnaactcagcatcaatttctcacctcagactacagtgaatttttatttcctatcagctgaaatatttcacagatggaagctcatgtttcagttttaatgactgccttgaataaacaagttgttgccacttgtttcaaacaaaagcctaaaaataatctacattcaattttaggctccattgactaatatggtgttgcttttggaagtactgtatatcctcacatggaagccaaattgttaaattatttgaaggacacaccactgtacagaaagtagtgtttcaaatataaatcgaagaacaaagagtgctccaaaaaataggtcattcttttattttcataaagtatctaaactgtactaacattcagtgttgtgtttcattctaaatttgcagctgaaataaatttatttgcgatarganaatatcttattattcatcctcagaaataaaggatttgaagggatagagattatatgataaatttatagaagactttcagaatttgaatgcattttgtttagtgttatgaaatgacaataggaaaaaagtctcgacttcaatttaaaagttacacaaacaaacaaatctacaggcmtgtctttatataccctcagggtcttaggttttccaaaggaaatttgttgggatataacttggcgggttaactccntt

SEQ ID NO: 838 - DNA, 1437 bp, Homo sapiens
  misc_feature (1433)..(1433): n equals a,t,g, or c
  misc_feature (1435)..(1435): n equals a,t,g, or c
aaggggagatcatctgagtccaccacacccttgaatgtttcccgcgagactcttcagcaacataaactgcttaaggtgattaggaagaagcttgttcgtaaaacgctggacatgatcaagaagattgctgatgataaatacaatgatactttttggaaagaatttggtaccaacatcaagcttggtgtgattgaagaccactcgaatcgaacacgtcttgctaaacttcttaggttccagtcttctcatcatccaactgacattactagcctagaccagtatgtggaaagaatgaaggaaaaacaagacaaaatctacttcatggctgggtccagcagaaaagaggctgaatcttctccatttgttgagcgacttctgaaaaagggctatgaagttatttacctcacagaacctgtggatgaatactgtattcaggcccttcccgaatttgatgggaagaggttccagaatgttgccaaggaaggagtgaagttcgatgaaagtgagaaaactaaggagagtcgtgaagcagttgagaaagaatttgagcctctgctgaattggatgaaagataaagcccttaaggacaagattgaaaaggctgtggtgtctcagcgcctgacagaatctccgtgtgctttggtggccagccagtacggatggtctggcaacatggagagaatcatgaaagcacaagcgtaccaaacgggcaaggacatctctacaaattactatgcgagtcagaagaaaacatttgaaattaatcccagacacccgctgatcagagacatgcttcgacgaattaaggaagatgaagatgataaaacagttttggatcttgctgtggttttgtttgaaacagcaacgcttcggtcagggtatcttttaccagacactaaagcatatggagatagaatagaaagaatgcttcgcctcagtttgaacattgaccctgatgcaaaggtggaagaagagcccgaagaagaacctgaagagacagcagaagacacaacagaagacacagagcaagacgaagatgaagaaatggatgtgggaacagatgaagaagaagaaacagcaaaggaatctacagctgaaaaagatgaattgtaaattatactctcaccatttggatcctgtgtggagagggaatgtgaaatttacatcatttctttttgggagagacttgttttggatgccccctaatccccttctcccctgcactgtaaaatgtgggattatgggtcacaggaaaaagtgggttttttagttgaattttttttaacattcctcatgaatgtaaatttgtactatttaactgactattcttgatgtaaaatcttgtcatgtgtataaaaataaaaaagatcccaaataaaaaaaaaaaaaaaaaaaaaaaaaaaaaaaaaaaaaaaaaaaaaaaaaaaaaaaananaa

SEQ ID NO: 839 - DNA, 973 bp, Homo sapiens
gtgaaacaacaacaacaacaacaaaatgtagtcttaggaagcagcaagttcactgacttgggatctttatgacagttttgttgttgccattgatattgttttgtttattttttgttttcagatgagaaagttttctacatgttatcttttttctaggagctcaaagtgtacatcattcctttattatagctaggtttactgactcatatactaaggaagtagctaaaattataaaaataatttgtttttaaaaccatatttaactaagggaactaagtaagttccaatgagcagtggtctcatgcraggtattttcaatattttaaaatttacagatgaatatttaaatatattataaaagttttaatcagctatctctaagaaaatacatttcttaaagggaaatgaaattcacttgactttaaataaaacaaatgaactcatttcatgtttttaactattatctaactcttccttactttatgrtgctggcaagctgttgagagccttgacatctccatctgcagaaaaatcacagtcttagaaatcctattaatcgtgtgaggtacctgggtcatagtagcagcttcatgcagtgttaaaattatatgatgattatatgcagtaacagatgaagaaaaaaagaaagaaagcaggagaaatgcaccacctcattcattgtaaatgcagtatagttgattttttaatttgttttatgtcctctagtgatctaagcatgaagcttgaattattataataaagaaaataaatgcaatgcagttggggatggcaaatgttaatgcttatctgtatcaaagactaacactgtcttcaggattatccttggtggattatccttggcagacacttaatgagcagagagaagctacaatgttgaaggacaaaagtcctttgtcatcttattatcgaaataatgtttaatacaaataaactttttaaattaaaaaaaaaa

SEQ ID NO: 840 - DNA, 814 bp, Homo sapiens
  misc_feature (619)..(619): n equals a,t,g, or c
  misc_feature (789)..(789): n equals a,t,g, or c
gccattcttgaggaaatatagagatgacatgttttcaccccaactatctggtgctattgaatgactaattcagtccctaaagttctgtgaaaacacaaaagtctaatgatttgagtgagtaaaaggtaatggtgcatttgaacaagtaaatgctgtcgtggtcagcaagatccgkgatttgaacatgtgatgactggaaaaaggtttgggttatttggaactctggctaaaacttctttcgggtgacatgtgatcgtttaaatggcattaagtgaataaagcacacagacagtgctactcttgaccactattttaccatttctttgcaaacagtgttcacattttcatattttttccctaactaaaccaccaaagaaagacattttgtatgtatatacagtgtgtgtgtatacaaaatcatgatatagtagaatgcaactactttctttttctaccaaacgaaaggttttatttgctgtgaaataaaccagaagtttaaaaaaccctgtagtgattaagcatacttaaccactccttatttgtagattcactttcaaccttaaaaattaataccagtttgcataaaccaatatctgaaaagaacaggaaatgttaatgncaagcaacagctattaatactgatgtgaatggatgcatttgttttgcagtggtgactggcctaggcaggtttgggatctgtgaaagaattgattcattttcaaaattattccataaagttaaaaagttacactttaaaggcaacaggtcatacagttctttaaaatctgnatccaactgtagctttatttaaaag

SEQ ID NO: 841 - DNA, 611 bp, Homo sapiens
  misc_feature (181)..(181): n equals a,t,g, or c
gcggaaatattccatcagcttttcaaagcggtgctgctccccacacacctgggtaaggggaatggctctcactgaggcccagtgacacacgtcctaagctaccttctggctgccacacctgtgcttcaacaggctcctctccagttaattctaagttgagccacgtcactcttctgctcanaacctccactccctctcaatctcccactctccctcactttttccactctggccacactggcatcctggcacattccmacccmagggcctttgcacttactgttccaactccctggagtgccctcactcccacaccaagtcccttgcttccttcacagctttgctgaaatctcacttgctcagtgaggccttccctgaccaccctgcaaccaattccccctccctctgcaacattgctggcttttttctcayagcatttatcatttcctaacatactatgtaatttgcttgtttattatatcgtttctgtctttccctatatggtttcctttgttcactgatgtgcccaagtgccctgttcctgacacatagtaggcactcaataaatattcattaaaggaatgaatgaatgaaaaaaaaaaaaaaaaaaa

SEQ ID NO: 842 - DNA, 588 bp, Homo sapiens
  misc_feature (8)..(8): n equals a,t,g, or c
ccaatttncacaggaaacagctatgaccatgattacgccaagctcgaaattaaccctcactaaagggaacaaaagctggagctccaccgcggtggcggccgctctagaactagtggatcccccgggctgcaggaattccttttttttttttttctgagacagggtctcactctgttgccctggctggagtgcagtggtgcaatctcagctcactgcagccttgagtcaggctcaggtgattctctcacctcagcctcccaagtagctgggaccacaggcccacaccaccaagcccagctaattttttgtatttttaagtagagacgggtttcatcatgttatgcaggctgctctcaaactcttgagctcaagcgatctgctggcctcagcctcccaaagttgggattataggcgtgagctaccagattttttcttattaatctaataattctttgtatagtcttgatattatccataaygtgtattgcaaatatcttctctaactctggctttgactggttatggtgtcctttttttttgggggggggtttttgaaacagggcttgctctgtacccagctggagtgtg

SEQ ID NO: 843 - DNA, 436 bp, Homo sapiens
gtgagaagccattctcttcttttactagtatgaagtcatcagacgtcttctccagcaaaggaatgacacgctggggggaatttgacgatctctatcgtattagtgagctggacaggacccagattcctatgtctgaaaaaaggaattcccaggaagactatttatcttatcacagcaacaccctgaagccacatgcaaaggatgaaccagactccccagtgctctatagaaccatgagtgaagcagctctggtgagaaaaaggatgaagcctctgatgatggacagaamagaaagacagaaaaatagagcctctattaatggacacttctataaccatgaaacatcaattttcattccagcctttgaatcasaaactaaggtcagagtamacagtamcatgagaactgaagaagtaataaagcaacttctccaaaa

SEQ ID NO: 844 - DNA, 1090 bp, Homo sapiens
  misc_feature (68)..(68): n equals a,t,g, or c
  misc_feature (184)..(184): n equals a,t,g, or c
aattcggcacgagcctgccttggcctttcaaagtgctgggattacaggcatgagccaccgcacctggnccttctaacgttttttcatcatagtcccaaaaaccaatactttacaagtggttttggaaaggcaccacttttgtggcatgttctggttgggagagggagtcacagttcctactccncccaccagctatgcttctgctctgagaaggtggttatttatacaaacatggacatactcactcccaagggctgatgagatgctgaattttctttgggggcattcattaattgtcccagctgcagcgactggagcaagtctggaagctgcctgtgctaagaccacccagctgtccctgggttctcatcctagggccttctttgcttccaggtcaggggacctgcttcaatgagaaagcaactgaattgaggctaggagaggtagggagagctgagttctgacttcacctgtgcagaactctctgcccccatgttacctggactggaacagactgtgaatatagcagaaggttccaagaactctggtgtctgacctagaagaggcacagttctctctactggaaagaaaacgatgtagccgattgcacaagggtgccaagggaagacccaggatggcccatcaaaggaacctgggggaggatgcaggaggctgaagggatgcacctggcatttctctcactgtgctcttaccgcatcagcaacccccaacttttgggcctactctgccccccatgcgtgaataccctgcttggatgctgtgcttttccggtttgtctctaagcccctttctccagggcatgttggtttccctggcctctcagtgtcctaactggagcccagagtgccttgttctgagccaggagacggctgagcactggccctccacacctaagcgtcctttacattaacttattggtcttgtataacacctggtgccattgccaagtggctgtgtcctcagctacagagctggaattgtgtggggtttagtgctaaatacttcaataaagtctgttttttgtgattggctgaaaaaaaaaaaaaaaaaaaaaaaaaaaaaaaaaaaa

SEQ ID NO: 845 - DNA, 960 bp, Homo sapiens
gggcactttgggggcggtggaattcaagacgctctggctgaagattcagaagtatctggtaactctcttttccttctgggcatcctctcctctgttctaatcctcccttacactcattcctggtccattgtattctgaccacatccttawtcatggtcaaaactattgagtcctgggcacattggtcatgaaggaacaagaaggcaatgagagactctcatgccaaccactgccctgaaagccctgctgttcagacagcaaaggggccagcactggccaagctcttatgcttgctctgaaaccttcttgggaggagtcaatagggtctccttttgaaagtgtccctggccttttgagaaagcagtgtggtggagggagatggttctggcaggggcgtgaatggttgttttctacttgggatttctttcctgctttaggagatctattgggaaactgattataaccactcgggcaccatcgatgcccacgagatgaggacagccctcaggaaggcaggtttcaccctcaacagccaggtgcagcagaccattgccctgcggtatgcgtgcagcaagctyggcatcaactttgacagcttcgtggcttgtatgatccgcctggagaccctcttcaaactattcagccttctggacgaagacaaggatggcatggttcagctctctctggccgagtggctgtgctgcgtgttggtctgacccggggtttcggacatcagtgacactccctgccccactgcttgcttcttgtcaccccttctctacaattttgtgaacatttatgctccagtggcattcactggttgttcatacctttcttgccctgggtctatttcagcagcactgagctatgagctatgtaagccgacccggtgggcccagtggagggaaagcaatcaattaaagttgtgagccagaawaaaaaaaaaaaaaaaaaaaaaaa

SEQ ID NO: 846 - DNA, 450 bp, Homo sapiens
  misc_feature (443)..(443): n equals a,t,g, or c
ggtgagccctgccacagacctgtgtgacagcagagctgtttggctgctgtatgagtgtcaccggccctgcatttttttcttttttaataaagacagagtcttgctgtgttacccaggctggcctccagttcctgggggctcaagtgatcctcacacctcggcctcctgagtggttcagactgcaggtacacaccaacacgcctggctaattttaaattttttgtaaagtgggggtctcactgtgtcactcaggctggtctcaaactcctgggctcaaacaatccacccgcctcggccagcactttgagaggccgacatgggtggatcacgaggttaagagattgagaccatcctggccaacatggtaaaaccctgtctctactaaaaataccaaaattagctggacgtggtggtgggcgcctgtagtcccagctactcagganggtgagg

SEQ ID NO: 847 - DNA, 1144 bp, Homo sapiens
  misc_feature (1123)..(1123): n equals a,t,g, or c
cgcccacgcgtccgagaaaatctgcctctgtggcaacatatttccttccaggcgttacctcctgagcttagggaacaaactgtccatgaggtcaccacagtaggcactgcagaatgcaggaaatggctgagcaggagtcgtactttgggagaactagaatctctgaacacagtactgtctgctttgcttgcagtatgtaattctgctggtgaagctttggatacaggaaaacaaactgcaattatcgaagttgtgagtcagctttgggcttttttaaacattaaacaggtagcagatcaaccttatgttcaacagacattcagccttttacttccactgttgggatttttcattcaaactctagatcctaaactgatacttcaggcagtaactttgcagacctcgctacttaaattagagcttcctgactatgttcgtttggcaatgttggattttgtatcttctttaggaaaactttttatacctgaagctatccaggacagaattctgcccaacctgtcctgtatgtttgccttactgctagctgacaggagttggctgctagaacaacataccttggaggcgtttactcagttcgctgagggaacaaatcatgaagagatagttccacagtgtctcagttctgaagaaactaagaacaaagttgtatcctttctggagaagactgggtttgtagatgaaactgaagctgccaaagtggaacgtgtgaaacaggaaaaaggtattttctgggaaccctttgctaatgtgactgtagaagaagcaaagaggtcatctttacagccttatgcaaaaagagctcgtcaggagttcccctgggaagaagagtacaggtcagcgctgcatacaatagcaggggctttggaagcaactgagtcactactccaaaagggtcctgctccagcctggctttcaatggaaatggaggcgctccaagaaaggatggataagctaaaacgttacatacatactctagggtgaaacttatcactaggcagaactgggtttgatgctttgtcaactgaaaatacttatgtctgtacattttctaacagatataaaacaaattttgtaaagttraaaaaaaaaaaaaaaaaaattnctgcggtccgcaagggaattc

SEQ ID NO: 848 - DNA, 274 bp, Homo sapiens
gggagcagcagctgaggcggggtggacgtgtggggggtcaaccttatgtttggagcactcaaagaccagccatccctatctctgtgctccttagcatttcctcagaggatctaagcgaaaacagagcgggcatgagaagtcagacctaggactcccaggctgtttaccagaaatgcatttcatttagaagagcctgtcttagctttgtttgggtaaaaaaaaaaaaaaaaaaaaaaaaaaaaaaaaaaaaaaaaaaaaaaaaaaaaaaaaaaaa

SEQ ID NO: 849 - DNA, 452 bp, Homo sapiens
  misc_feature (448)..(450): n equals a,t,g, or c
  misc_feature (452)..(452): n equals a,t,g, or c
ggaaaaaaacagaaagggacaggtgggtgaggtacaagatgaagcaccacttttgtgaaagtggttgaagttgacaaggacatgagggaggctgtgaagatcaatgtcaagtgtacgataaccagggctcctcttgaaaaatccaagggtattggccgggcatggtggctcaagcctgtaatcccagtactttgggaggccaaggagggcggataacctgaggttaggagttcgagaccagcctggccaacatggtgaaaccccatctctactaaaaatgcaaaaattagccatgtgtggtgctatgcgcctgtagttccagctactctggaggctgaggcaggagaatcgcttgaacccaggaggcggaggttgtggtgagccaagattgcaccactgcactccaacctggcaacagagcaagactctgtctcaaaaaaaaaaaaannnan

SEQ ID NO: 850 - DNA, 489 bp, Homo sapiens
aaattatatattgataagtaaatggcttgttgcatataccaactttagaatttattaactctaaagtttttattggttaaagccaaataaaataatataagctcatatttttttagatttttcatgtcctaaaatgaacatagttgtatactttatctcactaggataatttttatctttgcctatatgtgctgctggaccttgtaaaaatatgtatactttctagatttgtggtagaaatttagctatagaatcatttaatttgcaaactggaatgggcattagagaatcatacagtttttctttctcattttaccggtaaaatcactgatgtctcaatttgtgactaatttcctaaaggttgcaaagctgrgtagatagagctagaactaaatctagatcttttgtcttcttggtaactgataatgacatatttattccattgattctatgacatggacgaataaaagctgcttaaggccaggcgag

SEQ ID NO: 851 - DNA, 464 bp, Homo sapiens
  misc_feature (419)..(419): n equals a,t,g, or c
  misc_feature (425)..(425): n equals a,t,g, or c
  misc_feature (455)..(455): n equals a,t,g, or c
  misc_feature (462)..(462): n equals a,t,g, or c
gacttcactcaaaaagtgcagaattcacattcttttcaggaacacatggaacatttatatgtggtgggacataaaactaatcttaataaatctgaaactattttgatcacataaagttctttcattataaagaaattcaattgtaaacccaaaccagaagatatatagaaacacccataatatttggaaatgaaacagcacacttctaaatatcccatgaatcaaagaaaaacaatcagaagggaaactaggaagattttgaaatgaatgaaaatcaaaatacaacacatcaacatttatgagatgcagctaaagcagtactgagatgaaattttatagcactgagcagctatattattaaagaagacaagcctcaatgatctttctggctcaagaaaagggaaaaagaagggcaaacnaaactnaaggtaagcagaagaagaaagaaaaagtcngaaagantt

SEQ ID NO: 852 - DNA, 412 bp, Homo sapiens
cctggcccgtgtcttcatcggcatcaacgacctggagaaggagggcgccttcgtgtactctgaccactcccccatgcggaccttcaacaagtggcgcaggktgagcccaacaatgcctacgacgaggaggactgcgtggagatggtggcctcgggcggctggaacgacgtggcctgccacaccaccatgtacttcatgtgtgagtttgacaaggagaacatgtgagcctcaggctggggctgcccattkggggccccacatgttccctgccaggtttgggcagggacagagcccagaccattgtgccagccagggaggctgtccctttgttaagggtggaggctcacttagtagagggctgtgttctaaactgagaaatggcctatgcttaaggaggaaattgaaagtttct

SEQ ID NO: 853 - DNA, 565 bp, Homo sapiens
gaaaaaaaatgctaatgtgagaatataaattgtgggaaatgagtgagggcaaggtggtacttcctccttctgagctcttcacacgtaatgcaaaaacccggtcttaattgattttgttttttttctgagtatgcatatatgtggttgaatgaaccaatgtgtgattgtatcttttccattatgtgactgtttgacctgcatattaatttcaagatagcagtcaattcgataaggcattttcatagaggaaagtttacagaaacagtttatrtggttggatcaccaaattatcttaggtactaaggcctcaaaaataagaaaaactttattatttctcctcagtagagtttggacatacataaggagagaaggtacagtgatgaaggagaccataattctgtagtgttgatgatcctggattataatctttttctctttatctttcatagtttttttaaaaacatggactgtatcttatctaccactatatcccaaatacctaagatagtgcttacgttcagtgactattaaataaataaatggatgaattaaaaagtaaaaaaaa

SEQ ID NO: 854 - DNA, 571 bp, Homo sapiens
  misc_feature (254)..(254): n equals a,t,g, or c
  misc_feature (491)..(491): n equals a,t,g, or c
  misc_feature (501)..(501): n equals a,t,g, or c
  misc_feature (534)..(534): n equals a,t,g, or c
agcagaacaacacagtcctggtggaaggctgcttctgtcctgagggcaccatgaactacgctcctggctttgatgtctgcgtgaagacctgcggctgtktgggacctgacaatgtgcccagagagtttggggagcacttcgagttcgactgcaagaactgtgtctgcctggagggtggaagtggcatcatctgccaacccaagaggtgcagccagaagcccgttacccactgcgtggaagacggcacctacctngccacggaggtcaaccctgccgacacctgctgcaacwttaccgtytgcaagtgccaacaccagcctgtgcaaagagaagccctccgtgtgcccgctgggaattcgaagtggaagagcaagatggtgcctggtaagtgctgtccyttctactggtgtgaagtccaagggggtgtgtgttcacggggaatgctgagtaccagcccggttcttccagtttattcctccaagtggccaggncttgcgtgtnccaagggacaaggtgggacaacaacaaccctgnttcaacgttcattggcctggcaacccacggggggggg

SEQ ID NO: 855 - DNA, 678 bp, Homo sapiens
gggaagcttccagcccaacattttctaaagaaccaatgaaagtgcaagacagtgtattgatcaaagcagataacactatagaaggtgacaataatgagcaaaattatataaaggatgtgaaactagaggaccatctcttagctgggtcatgcttaaagcagagtagtaaaaacatttttactgaaagagctgaagatcaaattaaaataagtacaaggaagcagaagtctgtaaaagagatctcttcatatacaccaaaggactgtacttcaagaaatggtccagaaaggggatgtgacagaggaataatagtatcaacacgtttgttgactgattctagcactgatgctttggaaaaagtgtccacatcgaatgaagatttctctttaaaggatgatgctcttgctaaaacctcaaaacgaaaaactaaggtacagaaagatgaaatctgtgcaaagttatcacatgtaataaaraagcaacacaggaagagtactttggtcgataatactatcaatttagatgaaaatttgactgtatctaacattgagagtttctattcaaggaaagatacaggagttcagaaaggagatggtttcatacacaatctttctttagaccctagtggtgttctggatgataagaatggagaacaaaaatctcaaaacaatgtattgc

SEQ ID NO: 856 - DNA, 352 bp, Homo sapiens
  misc_feature (211)..(211): n equals a,t,g, or c
  misc_feature (225)..(225): n equals a,t,g, or c
  misc_feature (314)..(314): n equals a,t,g, or c
ggaaagatttaaggaaagaaaacttttcgatttcctttgaaaaatagaacacaaaactggcttgtaaatgtttttagaatgatgaataagtcattaattaattcagtgacgtatgttttctaggatccctctggctgttgtgctgagaacagaaggggtcaagggagtgggggagtaaaaatggaagcagggtgcgcatgcggagtcaganaaaatggtgttttntaggtggacacaaggaaggaagagtgattgatttttgagaagctaaaattgtgtggtaagtggatagtagcaaatatcccagtttgctncatgaagcaatacatatgttgaaacggaaacgttgcta

SEQ ID NO: 857 - DNA, 890 bp, Homo sapiens
ctcttttgcagcttgtgatttcttccagcttgggaggggctgctggaagtggcatttcgttcagagctgactttcagtgcacccaaactggatgacgtgccaatgtccatttgccttatgctttgtggagctgattaggctgggatttgaggtgataatccagtaagtctttcctcgttcctacttgtggaggatcagtagctgttatgatgccagaccatttggagaagtatcagaggcctgaccggacacataatacgacaaccacatttttcctcatcatccatgaggaaatggatgatttctcttttccatatgtcactgggggaaaggctgcctgtacctctcaagctttgcattttactggaaactgaggcgtcaagatggctgtggcagctagcaaaagcaaagatgctttgtgcatagccttgtgaaaaagtatctttctatgcaataagatgaattttcctcccagaatatttagaaatgtagaagggataacagttcacagccaggtaaaatttaactggtggcttaatgactctgcacctttttctcaggaattctgcctaagttgtctgccttttctaccaccaaaaagacttttagttttctatgctttctcctgaattttggtagggtaaggtatttctatgtcaaagcacagccttgatgatctcagggaaaaattttaatcactgtgtataatgatactgaaccttgattaataacagaaattcaggatgtaaagccacagaatgggatttattaatgtgggatacctcagactgtttgttttctttctgggaagaaaagtgtgttctataatgaataaatatagagtggtttttaaaaaaaaaaaaaaaaaaaaaaaaaaaaaaaaaaaaaaa

SEQ ID NO: 858 - DNA, 591 bp, Homo sapiens
  misc_feature (132)..(132): n equals a,t,g, or c
  misc_feature (542)..(542): n equals a,t,g, or c
  misc_feature (550)..(550): n equals a,t,g, or c
  misc_feature (579)..(579): n equals a,t,g, or c
  misc_feature (590)..(590): n equals a,t,g, or c
cgccgtgtccaacaggagatcgacgacgtgatagggcaggtgcggcgaccagagatgggtgaccaggctcacatgccctacaccactgccgtgattcatgaggtgcagcgctttggggacatcgtcccctgnggtgtgacccatatgacatcccgtgacatcgaagtacagggcttccgcatccctaagggaacgacactcatcaccaacctgtcatcggtgctgaaggatgaggccgtctgggagaagcccttccgcttccaccccgaacacttcctggatgcccagggccactttgtgaagccggaggccttcctgcctttctcagcaggccgccgtgcatgcctcggggagcccctggcccgcatggagctcttcctcttcttcacctccctgctgcagcacttcagcttctcggtgcccactggacagccccggcccagccaccatggtgtctttgctttcctggtgagcccatccccctatgagctttgtgctgtgccccgtagaatggggtacctagttcccagcctgctccctanccagaggntctaaatgtacaataaagcaatgtgggangttcaaaaaana

SEQ ID NO: 859 - DNA, 448 bp, Homo sapiens
gcgcaggtctctttcagtccctggatggcgagcgcagcccctgggaggccacacttagttctttattgtgaatctctcgctactcaagttcgttcgggaccagggcctcggatggcctcggttgcccgtaagtacgcgaaagaagaggtgaatccaatcgctggcctagaggatagtgatcagacaacccgaggattactaaacaaggggcggcggtgtccctgtctcatggggttggcgtggggcggggggtaggcagcaagatcctccaggctcctggatgcaaagagtgagaaagaaagcgcagcctctggcagcctgcttataaatgcagcctttcggaagatgaaacttgcagtcttaggttgtcctcctttatatccatgttccaatcctctgggctttcctcgaaatgaataaaattgtggaaatgaaaaaaaaaaaaaaa

SEQ ID NO: 860 - DNA, 536 bp, Homo sapiens
  misc_feature (496)..(496): n equals a,t,g, or c
gcggccgcctactactactaaattcgcgkccgctcgwcaaatggctggtaagcaggccgtttcagsatcaggcaagtggctggatggtattcgaaaatggtattacaatgctgcaggattcaataaactggggttaatgcgagatgatacaatatacgaggatgaagatgtaaaagaagccataagaagacttcctgagaacctttataatgacaggatgtttcgcattaagagggcactggacctgaacttgaagcatcagatcttgcctaaagagcagtggaccaaatatgaagaggaaaatttctaccttgaaccgtatctgaaagaggttattcgggaaagaaaagaaagagaagaatgggcaaagaagtaatcatgtagttgaagtctgtggatgcagctgttatgaagatggttaaacttgaaacaaacaattttaagaattatttggtctgaagatgtyttactttaaataaatgtctattgtaawggnaaaaaaaaaaagggsggccgcyctaraggatccaagctta

SEQ ID NO: 861 - DNA, 383 bp, Homo sapiens
acttataatccaaaagaccaccaggatgactaaatagtagaaagaagagctttattggtgatatcagttgcaagctggaagagaaagtctccagcatggaccaaagatgctctctcttcaaacaggggaaggacaggttgggtctcattcctctgagagtctgtattacacaatagagtcatacgtattcagcaggtttggggtagaagctatacatatttatgaggagagccaagcacaggagcaatgaataaacaaacatgtaatatacatcccatattcactttggggcaaaaggtgaactataggacacaaagacagtgtgtgtgcagcctctataagctggctgaaactggcttaaggtctgcaattgctcatcagaa

SEQ ID NO: 862 - DNA, 644 bp, Homo sapiens
  misc_feature (280)..(280): n equals a,t,g, or c
  misc_feature (527)..(527): n equals a,t,g, or c
  misc_feature (642)..(642): n equals a,t,g, or c
gctttacctgagctttgacctgcgtagcaatatgttgatttttaaggtatgttttgtaaattaaaaaaatgctattataaaataatgactttgaagagatggtaatatttctattgaacatattaatggaccactgctatcatgtagtttttaatttagaaggctcaattttagtttttattagaaagaatattgtttagtatcaaatgactattaaaagtatatagtgcaataaaaagaaagacgtgaaggaatgtggaamcattaaaacaaaatcgancctccttaagtagtagttatatcagatgtaattaaaagatgggatgtaatttgactatcaaatacttgaaccaatgcttttatttgtaatatatatatgtgtatatatgtttttgattaccaatattaaacmcaaagtgaaacmctattgatttgaagcactggcccatttaaaaataatttaaatgggtaccccagaaccttgtcgtaattttattggggatttttgtacaatatatagccctagnttcgtctccaacgttctcacctttaagaaagcatttacatttcctatcctctcccaactgggagaatatgcaaatattataaaataaaattctcttttagaaattaacaaaaagnaa

SEQ ID NO: 863 - DNA, 527 bp, Homo sapiens
  misc_feature (440)..(440): n equals a,t,g, or c
  misc_feature (449)..(449): n equals a,t,g, or c
  misc_feature (521)..(521): n equals a,t,g, or c
tttttttttttttttttttttttttttttttttttttttttaacaaatgtycagttttwttcattacaaatattaacatcatttttcttttatttatcctttatgcatcattttatacattcacacacacaaagaacattaaaaatatatccaattattcaattttggttgaattttcattaaaataagtgttaaaaatatttatttgttttctgttttgagaaggcttttattgttgtactccrgagtgttatttctggagacaaagttgcctgtgctttaatagggagattcctgggagaatctaaaccataagcaacaaaattttaagttaataaattcaagacaaagcagaaagtatagatttgctttcagcattcccgaggtgtttagatttttattagtcacctaattaamatattgttccaataattggttcntttcctccngaaaataagcagaaactcatacttacaccaaaacacttccataattttcttacacctaagggtttatcctcnggaatg

SEQ ID NO: 864 - DNA, 513 bp, Homo sapiens
aaaaaaaaaaacaatgaaagtagcctccacttacaaactaattactctttcttgaaaatattacactttttttcttctatatctctactcctagctctcaacacctttcttaagcccacatcataacctgtcttgcataactttgtgagtgcccaacgtttcactgtacaagattgtagagctgcatgcttcttaagaataaatccacactttaggtaccagtaaatccatgcaatgcctcagacgttataaccaaataatgcctggaaaatcgacatgaatttatgtgaagcataagcctttaatttttttaaagaaaagtagattgctgtttttccacatcatttcagagccgttctctagttttgcatgccctttactgcagaaccatacagattttgttctccatttcatacatcatttgttgaaatgccctttaaaatgtaacggaatatagagctttatgggaaaaaatgctgtagaaaataaattatcttctctctttgtattggg

SEQ ID NO: 865 - DNA, 434 bp, Homo sapiens
  misc_feature (430)..(430): n equals a,t,g, or c
  misc_feature (432)..(432): n equals a,t,g, or c
gtcttcayctccgtatctggccttatgtttttatgcatttcaaggtagcagacatcagtacattttacacctagattcgtttacatgcatagcattagagttcaatagttgcttactgtatttaggtaaacttttcatacagtgaaacgcaaaatctcaaatgtacctttcaatgaattttgatgcatgtacacacctttataactcaaatcactatscagatgtagaacatgaccatcacaccagaggccctcctgccccttctcagttgattctaatatccactcccgaaagcaaccacagttctgatttttttcaccatagattggtttgactaactttttgaacttcatataaatggaatcaaacagtatgtactgcttcacataaggcttctctcactcagcataatgtttttgagatccgttgngntg

SEQ ID NO: 866 - DNA, 1432 bp, Homo sapiens
gcaatgctatcggttttgacaggaagcacgatggtaagaataccactaacgaaaacctttgtggtgtctcaatgacaaatatgcagatgccaccctcctttgtctaatgtacggtgctttagggcaactatttaatataaagcaactcagaacttgtttcaggaagtgttgctctttcgccttacatgccaaggttctagggaaaaagctgaccatatgtaaaaacattgatgctcaagcacataaagaattcattctttaaacatagagtacataggrtcaagtctctgcacaataattgagatgtgttatagggaaagtgagccagtgctattgtycacttagtcttggtgaatgtgcagtaggctcacccctaaggaatctcatgttgcctgcagtaaaaataaaaatggactgctacaatgacatactgagagagttttaaatcatgctttacaaactgacattctgagctctgagacagcagaaaatgtatcaccagagcaagggaggaggcaaatgttctgaacaataattgaaatggttgtgattttatttggagttggcacagatccaagtgaccaaaggagttcaaggcccaaaatttagttatgctggattaattctgagagtaacaagcacatagattataatctaagaaaaccctttgtagctatgcatgtcgggagagcatctaacactaatggtgatgtttcccatgcagagactcagattacagtgactcttccagtgaagacagatgaaagccattgggcattgtacctttgttaatcaagctaaactaaccaaggatataggggtgtgtatgtgtctgtgtgtgtgtgtttgtgtgtgtgtacacatacatctataggtatgaatgagacaaaaagctgctgacttacagcttaggaaatgcaaagtcaagtttttcttttcaccctgaggcactcagtgcataaaggttcaagttttaaaactaagaatgtttccaaaagaccagcaatgttaaaagagtatttcgtgtatactagacgtgcctttaagcaataaaaattccaagagctgatcattattgtgcttccattttagaaaagtttatttagtaacaaacttcccagtgtagggaggtttttccttgcccttttgaacatgttaggttattttcttcctatcctggggccttaccaatgtgtaatgctttcaaagtttctatgaagcctgtgtggattctattttagcttatttatatattctcatttattttgaaggatattatacttaatttggttcagagtagtcgccaggttttgcacctgacaatggcacatattttttgtataactttttctaggtccttacccttttccacactttacatttgtacagtgaaagcaactgccagtggaggcctgaaatgtccaaaaaaaaa

SEQ ID NO: 867 - DNA, 1140 bp, Homo sapiens
ctttggggaatctggagtacaggcctctccgcccctgaccaccgaaacgtgcaggcattctcactcacactgggcagcccgctgtcgggtctctctaggcctatgaaccacaaagcagggaagtgggcacgttctctcggggtggctcacagctttgaacctgccaaaggacccctcgactggccacagcccagcccagcctgacgtggatgtggctgcccaggaaaagacttaactgtgaaaaagtactgagaacccacctgacccaggcttgccccaagcagaggctagagaagaggctcctcttctcagtgtttcccaaaggggcggctcttgtggtttcaaaatctctggcaccatcttgacctcttggctctctctgcactttgccccctgtctcaaaaatgtccctcatgtccatttcctgtccaggagactcatgaggactgtgtgacctgcacaagcccacacctgggcaggctgttggtgtctccttggtccttaggcagatactcccctgagtccccgatctagggccagctgcagagggctctctctaggcagagcgttcctggccagagctctacctctttgcctcctgctgacccctgacagcgtcccgtrgcatttctttcatgtctgcatattgcatagccttgtcctcctgtgtgcctgagctcctcccttttcaataagattattagtcgtgcatgtctgtgagctgcctttcatcaccatttttcctgagtagggcttagttttattctggaaagacatctccaaggtgaggtccacccccacagcagacctcaagtagaaattgcccaatttttaccagctggagggacacccttgggtttttgtacgaagctatttaatgagcctgtgtcttggggactcagcaggctggagcttggggcctggtggaccatcacctggtgtctgtaggtggacccggtctcccacaggtgacatcaacctgagggtggcgtctttagagacaggcacatgggcagctctgttcccttcgcctctactgcgaggcctggggagatgttgttttcatgctgcttccaccatcacactggggtttctggatgggaaataaaaaaataaaggcagttcatttccccaaaaaaa

SEQ ID NO: 868 - DNA, 532 bp, Homo sapiens
  misc_feature (365)..(365): n equals a,t,g, or c
  misc_feature (372)..(372): n equals a,t,g, or c
ttggaacgcccgcgtccgcttgtatcaaaaggtccagacctaaggggaaattttatctctttctttctttctttctttttttttgacacagagttttgctcttgttgcccaggctggagtgcaatgacacgatctcggttcactgcaacctctgcctcctgggttcaagcgattctcctgcctcagcctcccgagtagctgggattacaggcgcccgccatcacgcccgggtaatttttttgtattgttggtagagacggtgattcactatgttggccaggctagtcacgaactcctgacctcgtgatccgcccacctcggcctccaaagtgctgggattacaggtgtgaaccaccgtgcccggnctctttntattaattcctaaaatattaccttgaggccaaattctgcgcttaaggagaatgtgcaccaagtgctggggtgggggctggttataaacgaggccacaaatcatgcttgttaataaattgtgtggttcaaatctgaaaaaaaaaaaaaacaaaagagtttt

SEQ ID NO: 869 - DNA, 391 bp, Homo sapiens
  misc_feature (28)..(28): n equals a,t,g, or c
  misc_feature (31)..(31): n equals a,t,g, or c
  misc_feature (357)..(357): n equals a,t,g, or c
ggctttattcagaggtcaaacttccttnaanaccagaaaattcatactgaagagaagctctatgaatgtagtcagtatgggagagattttaactcaactacaaacgttaaaaataatcaaagggttcaccaagagggactctccttgagtaaggcccccatacatttgggtgagaggtctgtagataagggggaacacacaggtaacttataaaataattactttcccgcccagtgagtgatgtttggaaatgcgtggaattaggattcatgtggtttctaagatttggacatgtcagaattttgtgagtcatggatggggctgcttttgcagcgggtgccacctgccactgtgcanccctactcggctcagcccttctcctcagctgtga

SEQ ID NO: 870 - DNA, 567 bp, Homo sapiens
  misc_feature (501)..(501): n equals a,t,g, or c
  misc_feature (509)..(509): n equals a,t,g, or c
  misc_feature (517)..(517): n equals a,t,g, or c
  misc_feature (536)..(536): n equals a,t,g, or c
gtcctattcctcgtggcagcccaagccagctgctggcccggaggggagcttaccttctcaaagaggcccaggagttttatagcctccttgaaacctttgtttctatggacagaaagttcatgatgcagatgctaagtttctcttaacctgtttctttttatttacctttgccattctggatgaaaatgctgatcgttgggcactttctagcaagaacggcccttgtacctttgacccataaaacaagactgttatcatttatagacacttccattaaaaaaagatttaaggaccgggcacggtggctcacgcccgtaatcccagcactttgggaggctgaggcgggtggatcacctgaggttgggagttcgagaccagcctgaccaacatggagaaaccccgtctctactaaaaaattagccaggcatggtggcgcatgcctgtaatcccagctactcaagaagctgaggcaggagaatcacttgaacccgggaggcggangttgcggngagctganattgcaccaccgactccancctgggcaacaagagtgaaactccgcttaaa

SEQ ID NO: 871 - DNA, 664 bp, Homo sapiens
  misc_feature (39)..(39): n equals a,t,g, or c
acccattattgagaatacacctgaggagaagacctcaangatagwatggctcatgcaatgaatgaatacccagactcctgtgcagtactggtcagacgtcatggagtatatgtgtgggggaaacatgggagaaggccaaaaccatgtgtgagtgttatgactatttatttgatattgccgtatcaatgaagaaagtaggacttgatccttcacagctcccagttggagaaaatggaattgtctaagccaaaagaaagtctaattatatacagagataaagctaaacgtaattattatttaaatgaaagctatttttttaaatgaattgaaatttttcatgatgctactaatttgccactaaatactgcaaatggtcaccctgaatctcttctgacattggatgttatttgcttatattcttataattttaaatgagggcacagtgaaatgaaaattttatactctatgtttctgtttatttttaaatccttaacagcaaaatatttgcctttaatttcttttttatatatactctcagagaattcctcttaatttttaaagatgctggtgataataaaattcattagaaaatttcctcattgtggaatgagcattctcttgttttaatgttggtgtcagaaaataaatatgaaacattaagtcc

SEQ ID NO: 872 - DNA, 803 bp, Homo sapiens
  misc_feature (705)..(705): n equals a,t,g, or c
  misc_feature (754)..(754): n equals a,t,g, or c
  misc_feature (761)..(761): n equals a,t,g, or c
  misc_feature (768)..(768): n equals a,t,g, or c
  misc_feature (791)..(791): n equals a,t,g, or c
  misc_feature (796)..(796): n equals a,t,g, or c
gctagaatctcagtcttattttaactactgattttgatttcccctaatatcaatttttaaaactgctaagggaaaatgaaatactagacatgagattttttttctctttattttcacccaacaaaccatttggaatcaggtataaagggtatcaatcaggaaaaaacagaaggccaggagacagagcccaataagggagacccatcccagggagcctgggagtcagcgggcctggatgcacctcccagttctgcctcttattagccagctgtgtgttaacccctcatctggtttgctcaaggtaacatgaccatcacaaaagcaacagaaacagattatttactttcagattaacttgtgaaaatgacaagttgaatattgtcatttcagtattcaagttgaatactatcaattcaatattcaagttgaatattgkcacaagttgaaagattaacttgtgaaaatgacagttggttgaatattggtattttctgcctccaattgttgcatttgttatttgcaacttttaatgcaccataaaagcatttttgttttgttttaaaagcatttgttttaacgcaccttacaagcatttttgttttgttttaaaagcgtttgtttacaaatttgtgttttgtgacttctgggatgatttaacaacttttaatgtaccttaatacttctctgttagcttttgagattaanaactattctaatgcaatttagccattatgaaaattgatgatattagtanaggtaanagatatngaatagaagttaaataagccaangactntaagaga

SEQ ID NO: 873 - DNA, 633 bp, Homo sapiens
gactggcttagagacattgggcagccaacatctgtatttcctcgtcaggaagtgggcatggcgttgttgggagattaaacggggtgtgggtgaagatccagtgagcgtttccagctgtgttgtagatgtaaacctagcagttaatgtggcaggctgtgtctcatgcctgctgagcaactgctggcttccccgtcattctgtcctcttggawttctctgaattycattaggcctttatttaatccttgcacagtgctcccctgccccaaatgctcttccccattggtcttttttaacctgtatcttaactattcttccttggccgttagctggcacttaagggacacttagcctcctgttgaggctaaggattactagaggaggagaacttcagagtagcaaataatcagacctccatccaggaagatggacgtgggtggtctgacatgggagcctagtattttraaagctccttaggtgattctaatgtcagcagggctgaaaatccccctccttaagcacatgggcacttaggagggggtctaggttacattgtggccaagtctgcagtttacagttctggacaagaaccccaacccccaatttatgctatggtgatagctgtgctctggtt

SEQ ID NO: 874 - DNA, 507 bp, Homo sapiens
tttttttttttttttttttttttttttttttttttttttttttttttaaggaccagatatagcctttaattcctaatgttcaaaaacaatcctgtcttctaaatcacaacttttcgagttacaagatttatccacttcaaataaggataccttttataaagtactttcttgtggttttacagatttcaaggtgcttctacgtggcttcagcaattctcacaacaaaccctcagtgggtcagggtcttctaagattaaaatgttaacaccaatgcgtgtgaagtacagtgaagtacagtgaggttaaggctcagtggcaaacgttaaagaggcccacacaacacaccagggatcagagccaggtcaaattcttgctccccacctccaccccacctcaagaagaaatttattttttgtttttatttttagaaacagtctcactcggtcacccaggctggaggcatgtcacgatcacagcttactgaacttaaccctgtgtgacccttga

SEQ ID NO: 875 - DNA, 304 bp, Homo sapiens
  misc_feature (302)..(302): n equals a,t,g, or c
gcatatattgatacaaccatatggttttcctgcttacttaataatttacagaatatcaccaattcctgttaaactactcttatatttctgggctaaccactgcttgtcatagtgtgtttactcttttaattttcaacttgctttgacttgccgagattttgtttaggattattttaaatgtattcaaaagtatggttgccctttagatctttggggggtgctgtcttgaacagttttagtaatagagcaactttttattttttaatagaactgctatttaatttttatttcttaattggcangt

SEQ ID NO: 876 - DNA, 1711 bp, Homo sapiens
acctctattcttgatgacctttttaaaagtcatggaacagtcccacacaactgccaaagaaagttctttcagggcccatggaaaaagcaaaacagagaccaaaagatttctgggacatcttgaatgagcagaatgatgagagtcttagtaaactcacagacttggcagtaatagagactctgtgtgaaaaagcacctctagcagcaccctttaaaaggagagaagagccagcaacttctctttggaaatcaaatgagaaatttttatggaagaaatttagcccaagtgatacagatgaaaacgcaaccaatacacagagtaccacataagcatataaatgaattactgcaccagtaaactgctgccatcactgtttacggcactggattccacactgattctattatcttgaacacagttgttgacatatatttttattaaattattgctttaggattttttgaagtctaaagtattgtcatggatctgtttttcttgatatttgatttgatctttcaagaatatgattggatttatagtataaacctctgttatgaattagaaaagattctaggtttgttaataggagacctgggacatctttcttactatattacataatgatgtgacacttgccccggtgagcattgtttcccagtatgaaagatgaagagtctgtaccgaatcagcatgagtgtccttccagtttaaaaaagctttcktcgctctcctaatggctcataggctgaatcatgtctgcccctcaaatcaggtgtataccaatgtgttttttactagcacttgggaaagttattaagtattttctttttccctgggcatcatgttctattattattttagaaaaaagtcataattggtactgaatatatggtatatataatattaaaatggtaattttgcaacagctcaaaattaaaaggttaatgttatacactttactatatgagctgtgattactaccattagccacagataccagtgcctcaactttttatgtacctattgtgatttaatgtaaataaaggtttgtatagtacttttgtagttcttaagtatgaagaaatgggtaaactttttattttgttagaaactgttatattttgagtgtaatatttatggtttatagcaaaatgaatgtgcttattgttgaatgcatgtatttagaagcctttactcagcccctgtgttctgtgctaggagcttgagctctacaggtaaggcagagctaccggtgaatgaaaggaaatcatgtcagtgaaaaatcatggtggaaagcccctggcatcacatgtgcatgctgtaggcaggacctgagctgcctccgctgcaggttcagatgcaccgctgcagctgtccttcagttagttcacagggctgcaagaggaggacacatccctccagaaaacagcctgagccgggaactggctgtgctaaagagcactgctatcaagttgaggagagagggcttccgtgtactcaggatgtagagtcattgctcagaagtgaacaaaaaatcaaaaacaaaagtcttctcaagggactgatcggccaagtatgcttttctttagagcaatgttttgccctagagaattgtaaaatttatgtcatgactcagtacatatgtgttcgtacatatatgattggaataaaatgtttatgaaataaaaaaattttttaaaaaaaaaaaaaa

SEQ ID NO: 877 - DNA, 567 bp, Homo sapiens
gcagcatctataagctaggaaggaggccctcaccagacttggaatctgctggcttcctgatcttggcctttctagcctccagaactgaacatggatgaagctggaggccattatccttagcaaactaacacaagaacagaaaaccaaataccgcatgttcttccttataagtgggagctacatgatgagatgagaacattgcccaaaggaaccaagtgaaattaccaaattagaagtgataagaggttgactctctccagaaatttattgtaattagcaagaggtaatggtgtctaaataagatgaaagaagatattttaaagatgataataacaaaaactactagaatgaggtgaagccagaaaggaagagtcataatcaaagaagagagtgatcaagaatccaaaatagacagagagagcaggctcttagagaaatgggagaactaccgcactgactctgcacgtaggagacaggcaggagaggagcgccccagccagagctcaacatgcgcaaacaggaagtgtgtccgaggttttctggagctcacaggagccggggaccaca

SEQ ID NO: 878 - DNA, 322 bp, Homo sapiens
  misc_feature (268)..(268): n equals a,t,g, or c
ggaaaaaaagaaaagaatagagctacagaaggaagttcaagcctaaattaatttgccactgaaaaaatacattttgttattttctctgtgtcaactgcatgattaaaaccggctgttaagtgagctctggggatgtgctcgtaaaagatttatgagtaatattcaatgtgatattcaaagtgagtcatgaatatcaggataattgctctcagtgctggctcttttactaggcaggagtttgkcaactgccccataaatatttgcctantctcatgtaaaaaagacmatttcatcttctgcatttttattacctagtataatg

SEQ ID NO: 879 - DNA, 237 bp, Homo sapiens
  misc_feature (225)..(225): n equals a,t,g, or c
  misc_feature (227)..(227): n equals a,t,g, or c
ccgggtcgacccacgcgtccgattgcaggtgtgaaccactgtgcccagccctgatttttatatgtcagaactaattcgggtctcttaaaatgctctgtggggccaaacaaattgtgtgccagatgtggccctcaagttgccagtcctgtctgtaccaggatgcttcgttattgacaaactctcacattgcaactggagtggaaacggtgttagccactaaactgngngggtttcata

SEQ ID NO: 880 - DNA, 523 bp, Homo sapiens
  misc_feature (45)..(45): n equals a,t,g, or c
  misc_feature (57)..(57): n equals a,t,g, or c
  misc_feature (62)..(62): n equals a,t,g, or c
  misc_feature (91)..(91): n equals a,t,g, or c
  misc_feature (516)..(516): n equals a,t,g, or c
  misc_feature (519)..(519): n equals a,t,g, or c
  misc_feature (523)..(523): n equals a,t,g, or c
ggaagggggaagatctggatccaaccgtgggtgatggtacccggngcccccaggttnggatngggatggaccaaaatcccatctgggccancggctctatggaaaattkggcttaagtaattatttccagtattccattgtattccattgtcccttcgtgttccataagttaaatgactgtctaatttttccaaaaatttatttctgacttgagaataagtgtgtcatgattttcccagtgtaaagacactgatataactgtagataccagacattttatgtagtgtctatgacacattttagtatgtatgagccaacaatagacatgtctttgtcttgaggagtgtccatctgaattgaaaatgtgtcagcttttttttaacatcatcaacagacttcttaattaagctgccaatacatactgccaatacactgtgtgctgtctgagaaatgcattgtgtaagtgctatttccatcttattaaataaacaatgttgctctgtataaaaaaaaaanaanaaan

SEQ ID NO: 881 - DNA, 1172 bp, Homo sapiens
  misc_feature (174)..(174): n equals a,t,g, or c
gaagccaggtctgctgtgggcaagtatagcctaaccctagtcttgtaaaataagccagaaagggttactgagccaccttaagctagtacctatatagtaggcaaaaagtacagaaatagatgcaataagtgtggtgagtctttgagcctacgagtcatgccaccagccataagntgacctatcacttgagaacctcctcagcaaagatgccagaaaacattcaatcaagttggcaaatgacacagggaagcttggccctcttgaccatcttcctggcaaacctggactggaagggccatttgcagcactgtcctggagctaatacactgtttcactgcctctgccatataatgatgccagcactagccagctggtgggtatttggaggaatcctgcatgaggattgcccaataaggggcaggtacacatacctggcaaagtgatgatgatgtgaattgtttccagtgaggggattgagtcaaaacttggatctcaggtacctcaatttttcccccmatttctggctactactaaaagccagaaagaacagaacagtggcctcaggagatctgagtttgaatccttgctctctaggatgcaggtggcttgaagcagaatgccacacctgcaagttgattagaactgcctttcttcccaggcttgacataggtattaagtcraaattacatgaaacccagtggtaaaaaagcctctgaaagctgtaacacccycagtaataacaaaagggatttttatttcmcagctaaagggaaaataggtggagaagttaaaaaataatgtctgatcctgttcctaagttccaaactatagccaacactctgatgctgctctttttcttgtaggaccaaccgtcccagtttgcctgggactttctcatttttacagagtcccaaatcctaggaaactggagcaactggtacaactggtcacctactcttgcccctctgtaaatcaagccaactgtgaccatccaatgtgccatcttacagggaaaagttataaccactattcccctataacataatgctaatgattgtacttagtacatttttatacttttatgatattttactgattggaaatgtcatcctttattaaaaataaacatggttttccatagttgcctgccaaaaaaaaaaaaaaaaaacatt

SEQ ID NO: 882 - DNA, 511 bp, Homo sapiens
  misc_feature (35)..(35): n equals a,t,g, or c
  misc_feature (205)..(205): n equals a,t,g, or c
gaaaggccgagatctgtccagctgcggtgagaggnacgctgaatcgccgaagagaattggctgcgcttccttgtttgtgagctagaattagaatggcgatcagtccacgaagcgatgcaactttctccagtcagaaatcaacaccttcagagagtcctcgaacaaagaaatttccactaactgaagaggaaatattttatatganttgtagagctgcctacttaactgtcttcaaaagcagcttggaaaacattatttctaaagatcaactttacttagctcttcagcatgcaggaagaaatccatcccaaaagaccattaataagtattggactcctcaaactgccaaactgaattttgatgatttttgtataattttaaggaaggaaaaacctacttcaaaagcagaactactaaaatcatttaagcaattagatgtaaatgatgatggctgtattttacacactgacctttataaatttctaacaaagagaggtgagaagatgactcg

SEQ ID NO: 883 - DNA, 464 bp, Homo sapiens
  misc_feature (338)..(338): n equals a,t,g, or c
  misc_feature (391)..(391): n equals a,t,g, or c
  misc_feature (437)..(437): n equals a,t,g, or c
  misc_feature (459)..(459): n equals a,t,g, or c
gggctttgctgtgcagaagcagcagttatatcggtcccttcaagaaactgcctgcagagattcctggagtcatctgcctggagcattgsccactcacctcctcaactcacctcctggctgctccacgtcattcttccaatctcatcttaaatgttatttccttaaagaaacctttcctgacccagagtaaaatcagtaccttcgggtattcactctcacaacaccttgacttttttccttcatagcacttagcacagtttgcacttatatttattttagtgttttctggcttaaaacctgtttgccctatcactcatgaaactataaaccagaccctntctattttactcaccactgtataactagtacctaacagagcatggcataaagnggctactaagtaaatgaataatgaataaatgaatgaacatacctgnttgcctaactaaaggatctagncattt

SEQ ID NO: 884 - DNA, 88 bp, Homo sapiens
tctttttgcctttacaaatccacttgcagctgcgctaatccaagtgtagattcctggcaacatgaatctttgatcccaggttacaatt

SEQ ID NO: 885 - DNA, 617 bp, Homo sapiens
  misc_feature (533)..(533): n equals a,t,g, or c
  misc_feature (565)..(565): n equals a,t,g, or c
  misc_feature (572)..(572): n equals a,t,g, or c
  misc_feature (578)..(578): n equals a,t,g, or c
  misc_feature (596)..(596): n equals a,t,g, or c
gcggccgctgggcctgagtgtcgccttcgccgccatggacgccaccgggcgctgacagacctatggagagtcagggtgtgcctcccgggccttatcgggccaccaagctgtggaatgaagttaccacatcttttcgagcaggaatgcctctaagaaaacacagacaacactttaaaaaatatggcaattgtttcacagcaggagaagcagtggattggctttatgacctattaagaaataatagcaattttggtcctgaagttacaaggcaacagactatccaactgttgaggaaatttcttaagaatcatgtaattgaagatatcaaagggaggtggggatcagaaaatgttgatgataacaaccagctcttcagatttcctgcaacttcgccacttaaaactctaccacgaaggtatccagaattgagaaaaaacaacatagagaacttttccaaagataaagatagcatttttaaattacgaaacttatctcgtagaactcctaaaaggcatggattacatttatctcangaaaatggcgagaaaataaacatgaaataatnaatgaanatcaanaaaatgcaattgatatanaaactaaccagaaaatgttga

SEQ ID NO: 886 - DNA, 295 bp, Homo sapiens
  misc_feature (271)..(271): n equals a,t,g, or c
  misc_feature (295)..(295): n equals a,t,g, or c
ggcagtttcaattttactatataaggtgtctaattatacccattagataaaacaacctcatcagtcattagacatcaaaaactgaattaagctacagaaaacgttgatttttgaaagcagcctattatcactgtcagctttccatgacgctgatgtttgactatagtaaaacaaatataatatgtatatccctgatctactatctatattgtataaagtggcaatgactaaaggggcaaacaagtattatattatatacttggcatttctncttcatgaaatgatgtgggtctgn

SEQ ID NO: 887 - DNA, 652 bp, Homo sapiens
  misc_feature (154)..(154): n equals a,t,g, or c
  misc_feature (159)..(159): n equals a,t,g, or c
cacacatagaccaaacttgtatacacacagacatctacactgacataccccatgtacacacacagatctagacgtgctccacatatgtgtgaatatgcgcacatacaggcctaccacaaacacaaaacccacctgcaaaggtttcacggaacgnggagnctctcctggcctcccgtccctcctcccagcctgtttgttgtgcctctgtagagagcgcttcggagagagaggcgaagtaggaagtgggattttctcttccctctcctgggcccgtttgcccctaccctcgcccagcaagctgcgcccaaattctattctgcctctggaaactgctggaccatccaaggtcagctgcctgccctgacccctaccccagggccagcttgtcctcctgggaggcgggacaggccccagtgaggttccgttgtgcgctgtgcctatctctcgattccagggcagatgagccacaacatcaccaccctgccacttacaaggtgggggacctgggtctggggtctcaggcgcaaactggaggccctcacagcccactaggccccctcccaaccccagtaccctcagtccctcagtcaggtggtgctagtagagctatctctgacgstgcaggccccaggtagatgggcagggcccgtgg

SEQ ID NO: 888 - DNA, 431 bp, Homo sapiens
ggaagaaatttgatttcagaaatgtcctatatttaaataagcaaagccattgaaattgaagcacatttcttatttgaagcatctgggaaatacaactgttaagtatctctcaaatattcagtatatggaatttatacccacatttgtttgtatatctatctgtaagctgttgcttagaagaattgagagtttggattatttcagaatacaactattacagttttccatagttgattgaaagtttttaaactcaaactttcattggtagaatatctggaaggcatgtttgcaatataatgtggcttgtaggatctctcctacttttttatgctctgttttgccagttctcaaaagtaaatacctgaagtcctagaggtactataaacattttggtaaacattctttgagactttttctcatgtacatgtaaa

SEQ ID NO: 889 - DNA, 370 bp, Homo sapiens
  misc_feature (370)..(370): n equals a,t,g, or c
aagtcggaggtccccaaatctgccgtgtatgtggggacaggccctggtatcacttcaatgtcatgacatgtgaaggatgcaarggctttttcaggtagagttacccatcagccttcacccacgtgccaccactgacccactgggtaacrtctcagggcctcagcttgacctrtcccccaggttcagagtgtgggctggtggcccacccaaaggccttgtaattagtctcaagggagccatttatatcccagaggaatccttcatcttcagtcttcctgttctacccaggaaaggtctccttccattaagatatcccttggtttctccatgtgctcttgaataaaatggaaaatgactcagtgaaaaaaan

SEQ ID NO: 890 - DNA, 326 bp, Homo sapiens
  misc_feature (208)..(208): n equals a,t,g, or c
  misc_feature (298)..(298): n equals a,t,g, or c
  misc_feature (312)..(312): n equals a,t,g, or c
gcggacgcgtgggcgcgctccttcctggtggactcgctagtgctgcgcgaggcgggcgagaagaaggcgcccgagggcagcccgccgccgctcttcccctacgctgtgcccccgccgcacgcgctgcacggtctctcgcctggcgcctgccacgcgcgcaaggctgggctgctgtgcgtgtgcccgctctgcgtcaccgcctcgcagntgcatgggccccccgggccgccgcgctgcctctactcaaggcttccttcccacccttcggctcgcagtactgcacgcgcccctgggccgncagcactctgctgngtcgcccggggtcg

SEQ ID NO: 891 - DNA, 1315 bp, Homo sapiens
  misc_feature (1283)..(1283): n equals a,t,g, or c
agaggctcaggcttacacagcttacctctcaggaatgctacgttttgaacatcaagaatggaaagctgccattgaggcttttaacaaatgcaaaactatctatgagaagctagccagtgctttcacagaggagcaggctgtgctgtataaccaacgtgtggaagagatttcacccaacatccgctattgtgcatataatattggggaccagtcagccatcaatgaactcatgcagatgagattgaggtctgggggcactgagggtctcttggctgaaaaattggaggctttgatcactcagactcgagccaaacaggcagctaccatgagtgaagtggagtggagagggagaacggttccagtgaagattgacaaagtgcgcattttcttattaggactggctgataacgaagcagctattgtccaggctgaaagcgaagaaactaaggagcgcctgtttgaatcaatgctcagcgagtgtcgggacgccatccaggtggttcgggaggagctcaagccagatcagaaacagagagattatatccttgaaggagagccagggaaggtgtctaatcttcaatacttgcatagctacctgacttacatcaagctatcaacggcaatcaagcgtaatgagaacatggccaaaggtctgcagagggctctgctgcagcagcagccagaggatgacagcaagcgctcaccccggccccaggacctgatccgactctatgacatcatcttacagaatctggtggaattgctccagcttcctggtttagaggaagacaaagccttccagaaagagataggcctcaagactctggtgttcaaagcttacaggtgttttttcattgctcagtcctatgtgctggtgaagaagtggagcgaagccyttgtcctgtatgacagagtcctgaaatatgcaaatgaagtaaattctgatgctggcgccttcaagaacagcctaaaggacctgcctgatgtgcaagagctcatcactcaagtgcggtcagagaagtgctccctgcaggccgcagccatccttgatgcaaacgacgctcatcaaacagagacctcctcctcccaagtcaaggacaataagcctctggttgaacggtttgagacattctgcctgggacccttcccttgttcaccaagcaagccaaccttgtggcacttcccaccagsgtttcagccctttccctggcaaggcttttgttctttggactgggccytcaaaccatgtgggcttttcccaccccttgagggacaagtttggnacaggaaggaccaagagtgggctcactgggta

SEQ ID NO: 892 - DNA, 988 bp, Homo sapiens
  misc_feature (550)..(550): n equals a,t,g, or c
  misc_feature (977)..(977): n equals a,t,g, or c
gatcctctggttttagaaagacgcagtggagacagggacctggagccagattggctagcgcaacttcggaggcagctggagcaaaaggtagcaggagacattggggatcctcatcctactcgctcagatatttcgggagccggaggaacaacaacagaaaacactttctaccaggacttttctggatgtcaaggctactctgaagcccctgggtaccgctcagctctgtggctgacacctgagcagacctgcctgctccagcccagcccacagcagccctttcccctccagccgggctcctacccagcaggagggggtgcagggcagacagggacaccgaggcctttttactcagttcctgagacccatctaccagggactggcagcagcgtggcagtgacagaggccactggaggaacagtctgggaggaaatgctgcagacacacctgggccctggasasaacacagtgtctcaagaaacttcccagcctcctgatggccaagaggtcatttccaaaccacagacaccattggctgctasaccacgantatttctgagagttccgccagttcagccaaggaggatgagaaggagtcctctgatgaggctgataaaaactctccccgaaatactgcccagagaggcaagctcggagatgggaaggagcatacaaagagctcagggtttggctggttcagctggtttcgatcgaagcccaccaagaacgcatccccckctggagacgaggactcctcagacagccctgactctgaggagacccccagagcatyttctccccaccaggctggcctgggcctttcactgacaccttcccctgagtccccacctyttgccggatgttagtgccttyttccaggggcakaggtggggggtgaargcckaggatyccgcatccagcggggggagcagttgcgggggcgcttggggtttggaggtttttttggaaccagaganttttttctttt

SEQ ID NO: 893 - DNA, 440 bp, Homo sapiens
  misc_feature (435)..(435): n equals a,t,g, or c
gctggacgtgaattttggggacactgttcagcacactccacctagagccccaaggggccagagtggttggaaggcggaaggccccagcacagtggaaagtccgcgcttgaggagtgactctcttgtccstgaggtgtttccagggctggggcaggggcccgtcagccctgaggttccgggatgccctccatctccacattcccatgttccccacgctgggcaggctcttctctccagggacactgcgttcatggggagacatcgtcctctgagtcaggagccagaggttggagggttggccgcrtcmcagaggagggggaagatcccgttcccacgtgcgtttggccactgggggcgtccctgggcccgtcagcaggatggctttarcacyggckgagtctcccttcagcctcggggtggatggtttccatggcngaatt

SEQ ID NO: 894 - DNA, 491 bp, Homo sapiens
  misc_feature (174)..(174): n equals a,t,g, or c
  misc_feature (462)..(462): n equals a,t,g, or c
gtcaaaattgagccagaggatctggacatcattcaggtcaccgtcccagacccctcgccaacctctgaggaaatgacagactcgatgcctgggcacctgccatcggaggattctggttatgggatggagatgctgacagacaaaggtctgagtgaggacgcgcggcccgagganaggcccgtggaggacagccacggtgacgtgatccggcccctgcggaagcaggtggagctgctcttcaacacacgatacgccaaggccattggcatctcggagcccgtcaaggtgccgtactccaagtttctgatgcacccggaggagctgtttgtggtgggactgcctgaaggcatctccctccgcaggcccaactgcttcgggatcgccaagctccggaagattctggaggccagcaacagcatccagtttgtcatcaagaggcccgagctgctcactgaggagtcnaagagcccatcatggatagtcaacgaacc

SEQ ID NO: 895 - DNA, 865 bp, Homo sapiens
  misc_feature (683)..(683): n equals a,t,g, or c
  misc_feature (720)..(720): n equals a,t,g, or c
  misc_feature (781)..(781): n equals a,t,g, or c
  misc_feature (817)..(817): n equals a,t,g, or c
  misc_feature (827)..(827): n equals a,t,g, or c
  misc_feature (852)..(852): n equals a,t,g, or c
caagcccacgtgcaatgagctgatcaaaaccatcatcatccagcatgagaacatcttcccaagccccagggwgctggagggccctgtctacagcagaggaggaagcatggaggattactgtgatagccctcatggagagactacctcggttgaagactcaacccaggatgtgaccgcagagcaccacacgagcgatgacgaatgtgagcccatcgaggccattgccaagtttgactacgtgggccggacagcccgagagctrtcctttaagaagggagcatccctgctgctttaccagcgggcttccgacgactggtgggaaggccggcacaatggcatcgacggactcatcccccatcagtacatcgtggtccaagacaccgaggacggtgtcgtggagaggtccagccccaagtctgagattgaggtcatttctgagccacctgaagaaaaggtgacagccagagcgggggccagctgtcccagtgggggtcatgtagcccgatatttatcttgcaaacatcaacaagcaaaggaagcgtccagaatctgggaagcatccgaaaacttttcggagtgacagccatgggcttgagcagttccctgactgactcctccttcccaggggtgggggctagctgccgccatctccagccatcatgagccagagccttccaaagaanggccagataagtggttcattaatgggcacggagcctnaacttcattaaccgcaatcatccttgaagaatcggctggatagtccacagatccggaagantggcacaacgggaaggtcaaaaggttcaataccatnggccatgganccttaggcaatggtcaagatattgnggaacaatgaact

SEQ ID NO: 896 - DNA, 1006 bp, Homo sapiens
  misc_feature (138)..(138): n equals a,t,g, or c
  misc_feature (159)..(159): n equals a,t,g, or c
  misc_feature (1006)..(1006): n equals a,t,g, or c
ggcacgagctcgtgccgaattcggcacgagctcaaccaacctgcatctagaaagtgaattggatgcattggcaagcctggaaaaccatgtgaaaactgaacctgcagatatgaatgaaagctgcaaacagtcagggcncagcagccttgttaatggaangtccccaattcgaagcctcatgcacaggtcggcaaggattggaggagwtggcaacaataaagatgatgacccaaatgaagactggtgtgctgtctgccaaaacggaggagatctcttgtgctgcgaaaaatgtccaaaggtctttcatctaacttgtcatgttccaacactacttagctttccaagtggggactggatatgcacattttgtagagatattggaaagccagaagttgaatatgattgtgataatttgcaacatagtaagaaggggaaaactgcgcaggggttaagccccgtggaccaaaggaaatgtgaacgtcttctgctttacctctattgccatgaattaagtattgaattccaggagcctgttcctgcttcgataccaaactactataaaattataaagaaaccaatggatttatccaccgtgaaaaagaagcttcagaaaaaacattcccaacactaccaaatcccggatgactttgtggccgatgtccgtttgatcttcaagaactgtgaaaggtttaatgaaatgatgaaagttgttcaagtttatgcagacacacaagagattaatttgaaggctgattcagaagtagctcaggcagggaaagcagttgcattgtactttgaagataaactcacagagatctactcagacaggaccttcgcacctttgccagagtttgagcaggaagaggatgatggtgaggtaactgaggactctgatgaagactttatacagccccgcagaaaacgcctaaagtcagatgagagaccagtacatataaagtaaaatgacatggatttaaatcaattgtttaaaaaaaaaamaacgaan

SEQ ID NO: 897 - DNA, 602 bp, Homo sapiens
  misc_feature (47)..(47): n equals a,t,g, or c
  misc_feature (109)..(110): n equals a,t,g, or c
accaaccctcactaaagggaacaaaagctggagctccaccgcggtgncggccgctctagaactagtggatcccccgggctgcaggaattcggcacgagaacaagcggannggggaaccgggccgccaatgaagaggaaacgwaaaacaaacccaaattgaacattcaaataaaaactttggcagatgatgtgcgtgaccgaattacaagttttagaaaatctactgtcaaaaaagaaaaacctcttattcaacatcctattgattctcaagtcgcgatgagtgagtttcctgcagctcagccattatatgatgaacgatctttgaatttgtcagaaaaggaagtattggatctctttgaaaaaatgatggaggacatgaaccttaacgaagagaaaaaagctcctttacgaaacaaagactttaccaccaaacgtgagatggttgtccagtatatttctgccactgccaaatctatagttggaagtaaagttacgggtgggctgaaaaacagcaaacatgaatgcaccctgtcttcacaagaatatgttcatgaattacgatcgggtattttcagatgaggaaacttcttaaattgcctagg

SEQ ID NO: 898 - DNA, 800 bp, Homo sapiens
  misc_feature (623)..(623): n equals a,t,g, or c
cacacacacaggagagaagtcctatgtgtgcagtgtgtgtgggcgaggcttcagcctcaaggccaacctcctcagacaccagaggacacactcaggagagaagccttttctgtgcaaggtgtgtggacgaggctataccagtaagtcatacctcactgtgcatgagagaacacacacaggagagaagccttatgaatgccaggagtgtgggcgaaggtttaacgataagtcctcatacaacaagcacttgaaggcgcattcaggggagaagccttttgtgtgcaaggagtgtgggcgaggctatactaataagtcatacttcgttgtgcacaagagaatacactcaggagagaagccttacagatgccaggagtgtggccgaggctttagcaataagtcacaccttatcacacaccagaggacacactcaggggagaagccctttgcgtgcaggcagtgtaagcaaagttttagcgtgaaaggaagtctcctcagacaccagagaacacactcaggggagaagccttttgtgtgcaaggattgtgagcgaagctttagccaaaagtcaactcttgtctaccaccagagaacacactcaggggagaaaccttttgtttgtagangaatgtgggcaaggatttattcagaagtcaacccttgggaaacatmagatcacacactcagaggagaagccttttgtgtgcaaggctgtggacaagctttatccaaaagtcaacttcactttcaccagaggacacactcagaggagaagccttatggatgtcgggagtgtgggcgaa

SEQ ID NO: 899 - DNA, 387 bp, Homo sapiens
gctctttatgtctctattggaagatactttgtctaaacaaaagaatccagatgtgcgcaatattgttcaacagcagttctgtggagaatatgcctatgtaactgtttgcaaccagtgtggcagagagtctaagcttttgtcaaaattttatgagctggagttaaatatccaaggccacaaacagttaacagattgtatctcggaatttttgaaggaagaaaaattagaaggagacaatcgctatttttgcgagaactgtcaaagcaaacagaatgcaacaagaaagattcgacttcttagccttccttgcactctgaacttgcagctaatgcgttttgtctttgacaggcaaactggacataagaaaaagctgaatacctacattgg

SEQ ID NO: 900 - DNA, 385 bp, Homo sapiens
  misc_feature (311)..(311): n equals a,t,g, or c
  misc_feature (327)..(327): n equals a,t,g, or c
  misc_feature (350)..(350): n equals a,t,g, or c
ggcaggaggtcaacggggaggtgcggagtcggagagacagcatctgcagcagcgtgtccttggagagctctgcagcagaaacacaggaggagatgctgcaggtgctcaaagagaaaatgcgactcgaaggacagctggaaccttgtcactggaggcgagtcaggcacttaaagagaaggctgagctgcaggcccagctggccgccctcagcacgaagctgcaggcgcaggtggagtgcagccacagcagccagcagcggcaggattcgctgagctcggaggtggacaccctgaagcagtcgtgctgggacntggagcgagccatgantgaccttgcagaacatgctggangcaaaaaatgccagctggcgtcgttccaacaacga

SEQ ID NO: 901 - DNA, 448 bp, Homo sapiens
  misc_feature (385)..(385): n equals a,t,g, or c
  misc_feature (412)..(412): n equals a,t,g, or c
  misc_feature (444)..(444): n equals a,t,g, or c
aaaccttacaaatgtgatgtatgtcacaaatccttcaggtatggttcctcccttactgtacatcaaaggattcataccggagaaaaaccatatgaatgtgatgtttgcagaaaagccttcagccatcatgcatcactcactcaacatcaaagagtacattctggagaaaagccttttaagtaaagagtgcggaaaagcttttaggcagaatatacaccttgccagtcatttaaggattcatactggggagaagccttttgaatgtgyggagtgtggaaaatccttcagcatcagttctcagcttgccactcatcagagaatccatactgkagagaagccctatgaatgtaaggtttgtagtaaagcgttcacccagaaggttcanctgcacagctcagaaaaccctacaggngaggaaaccttatgagtgcaaggattgcggtnaagc

SEQ ID NO: 902 - DNA, 336 bp, Homo sapiens
  misc_feature (11)..(11): n equals a,t,g, or c
ggaacagttgntaagaataatgtgagttcctatctgaaatagaatggtacattaccacttttaagttttaaaaattgatagatgttcagatgtatctcaaactcagttttatttttattccaaatattgtgaatgagaagccattgtcctaaactttggccatttttgtgctataaacatgcatttttaagttataaggtgaatcaaacaatatgtaatacagtattaggatgtaatctttgcttttgtagtactgttaaaatagagaattatgttgtttgcaccgtcttaattaaaattcttgatttttactagttgctttgcaaaaaaaaaaaa

SEQ ID NO: 903 - DNA, 1555 bp, Homo sapiens
gcggacggtgggtcgacccacgcgtccgctactaacaacttaccacagtgcggagactgctttctgaaaaggccactcacgtgaacactagggatgaagatgagtrtacccctcttcatcgagcagcctacagtggacacttagatattgttcaggagctcattgcacagggggccgatgttcatgcagtgactgtggatggctggacgcccctgcacagtgcttgtaagtggaataataccagagtggcttctttcttactgcagcatgatgcagatatcaatgcccaaacaaaaggcctcttgacccccttgcatcttgctgctgggaacagagacagcaaggataccctagaactcctcctgatgaaccgttacgtcaaaccagggctgaaaaacaacttggaagaaactgcatttgatattgccaggaggacaagtatctatcactacctctttgaaattgtggaaggctgtacaaattcttcacctcagtcttaacaattctagtaattttcctaagtttctaaataccagtgcctcctgtgtgtgagatgtattcccataatcaaagttgacgtcaaacatcttactacaaaaattcagtgacattcattataacattcttccaagtgaattgcctgactttratgtcaaaatgtatttgaaagtaatttgcatatatctttaattatttctgtggagtttgtgatttttttatcagaaataattttaatgtgtgtatacttaaaaacttgacacgggttgtacagaaactggtatttttggtgctgatacaagagaaatgtatttttaaatatcccacatcctggatctttgttgggtatttagtatattgacatatatttttataaggtgaggtaactcagaacttaatttaaaagtcttaaatattctgatacaattcagctgtcttctctaccttaccatagccagttgctttcattttaaaccagagcaagtaacatattagtgacttgaatcttcataagttaaagtaaaaaacagcaaaaaacctagatctttgtcttttagaacacagaccattttcaggaaagcagttagctaagtgtttaattcatgaatattgtatactgcatcccctaccacaatttacacaatcctgtggatagtcctacctcaccctggtcaacctacatgatccttaagctaatggcgaatcacgatgaccttgtagacatgcacacaactatacctttgtccaacagatcataatatatctgctatccaactggttttacctgcctaatcctactgatttgggcactgcttgtatagtctctcaagttcacaggaaatgttgattttctaaggtcctcatttttacagagtatacaggcaaagtgacaggggaaaaggaattagtctaagagtaaggggatgattattatattgaggctaaaaccacaaagtggctcaggctttaaaaaaaaaacactgtggataatgacaaaaagcataagtaaaaatatttgagaaaaataaagtacaagttttgamcaacaaaaaaaaaa

SEQ ID NO: 904 - DNA, 743 bp, Homo sapiens
  misc_feature (5)..(5): n equals a,t,g, or c
  misc_feature (14)..(14): n equals a,t,g, or c
  misc_feature (68)..(68): n equals a,t,g, or c
  misc_feature (75)..(75): n equals a,t,g, or c
actcncgggttagntggtacgcccgcaggtaccggtccggaattcccgggtcgacccacgcgtccggnaaaaaanatggaaaaagacccaagcagattgcttctttgggctgctgaaaaaaatcgggtaaaaaaaaaaattacagagggaagtgtgacagtaggaaaagcactgggttcaagccagaagacctgcctttactgttatggccatcatacctatctcttgattgtgaggaccaaatgagacaatgtacatgaaagcacatattaagctgcaaagtgtcatgctagcttaccacaatttacacaatcctgtggatagtcctacctcaccctggtcaacctacatgatccttaagctaatggcgaatcacgatgaccttgtagacatgcacacaactatacctttgtccaacagatcataatatatctgctatccaactggttttacctgcctaatcctactgatttgggcactgcttgtatagtctctcaagttcacaggaaatgttgattttctaaggtcctcatttttacagagtatacaggcaaagtgacaggggaaaaggaattagtctaagagtaaggggatgattattatattgaggctaaaaccacaaagtggctcaggctttaaaaaaaaaacactgtggataatgacaaaaagcataagtaaaaatatttgagaaaaataaagtacaagttttgaacaacamaaaaaaaaaaaaaaaaaaaaaaaaa

SEQ ID NO: 905 - DNA, 158 bp, Homo sapiens
gaggcagccttgggtgagggcttccccacccgcttgcccgacttgaaggcggctcgctgcttgccccccagtttgtctgggggtgcaggggtggtggtcaggcctgggggtccgggcgtgcggggctcactcagggccgtgagagaacgagtacacat

SEQ ID NO: 906 - DNA, 333 bp, Homo sapiens
  misc_feature (298)..(298): n equals a,t,g, or c
gatactgagcgtgcgccccgggttctcgccgccttctctccgccgagcagcccttcggccaccctttgcccttaaaaatctgcagactgcgcctcctctccgcgggagcgagacctagcaggcccggggctgggcgtgccctcgcctgccacgctgcgcgctgcyctcagccgggccgctggggccgtgcagtgcaccgggcacgccgcgccaggctgggggcaggcaccgagcctccgtgggaggtcccgaggcagcttcgctgctcgccctggctccagccctcacctgccgcagncttagctgarcagmcgcgmcactgggcgcccccgt

SEQ ID NO: 907 - DNA, 696 bp, Homo sapiens
  misc_feature (4)..(4): n equals a,t,g, or c
gatngagggccagacggctgctacccaggtatcctttctctttggaattgaaatgcagagaacattattaaacagcctatttgctgtgagtgtggaagtgtttccacagacacctttttgggaaaaagaaaagggcaagaatcaacctgaaaactacagaggatatattagccacggtttgcacgcattctgcttatggatctttcagtgactccagtgaggggccatctgtcccatccagtgcctgagtgcagcccccacccccacctttggtccagagaagtctttgccccaagaatctgcccagagttggggcatcagcccctacaggtgtgggtccttcttcaggactgtgtggaacttttccttttgaagaactttcctggggatgaccactctgcttggagtctggggtggagcctggtgtgagggagccagcgtagggtttgggtgcctgccccaccctcagaagcaggagcccagcagcccttggactgaccggtgctgttytggggctcccactggctccttccactgtggagcactcccgtgaacactgctttggtttgagtaccagtacaagtgttgggtgtatgttcctgaccttgaggcattyttgattgkgcagttacctagggtatgcttgtgtctgacatgatcattttttttttttaataaaaaatggcatggaaaaaa

SEQ ID NO: 908 - DNA, 450 bp, Homo sapiens
  misc_feature (332)..(332): n equals a,t,g, or c
gcattggccttgggctggtaactgttgaagtcaggtgatggggacagaaaggttcattgttctatttttgttccttttatatggctcatcacagagcttcaacagcatggcccaggtgacacagagcagggtcctcagggcttgtggcttgtggcagcatcaccctcagactgacactgctgaggagccgggggcggttagctgcaggtgtgcctggctgggtactgagtggaaagccttgggcagaatcttcatagaagtctagagttggggagagttggagggtatgttaagtgaaaggtgtatacacctggaggcttccccaggccctncactctcgctctgctcttcggttgaggcagatggcactgctggctgtggagggcctgatttgtaccaccttccccggckttatgatggagcagggacgacaggctctggctttgggac

SEQ ID NO: 909 - DNA, 827 bp, Homo sapiens
ggaagaatccgatggtggctggcgagggccaagtctcttacgccttcccctcgtttctccctccccgcctcctccgcagaagccgagcgccaaactcaaactttatcaggacccggacctctcaggctaatcccgagggccgggcctgttgggcttttctgcacaccagccgaggcagcgagccaacatgagccaagtgctgttccaccaactagtcccgttgcaggtgaaatgcaaagactgtgaggagaggagagtaagtataagaatgagcattgaactacaatcagtttctaatccagttcacagaaaggacttagytattcgtctgactgatgacacggatccatttttttatataaccttgttatatctgaggaagattttcaaagkttaaaattccagcaaggtcttctggtagacttcttagctttccacaaaaatttatagatctmcttcagcaatgtactcaagaacatgccaaagaaattccaaggtttttgctacagttagytctccagcagctattktggataactcacctgcattwkkaaatgtggtagagacaaatccttttaagcatcttacacacctctcactaaaacttttacctggaaatgatgtggagataaagaaatttctcgcaggctgtttgaaatgtagcaaggaagaaaaattatcattgatgcaatcactagatgatgctactaagcaactggactttacacgaaagacattagcagaaaaaaaacaagaattagataagttacggaatgaatgggcgtcacatacagcagccttgacaaacaagcattctcaggaactga

SEQ ID NO: 910 - DNA, 755 bp, Homo sapiens
  misc_feature (650)..(650): n equals a,t,g, or c
  misc_feature (680)..(680): n equals a,t,g, or c
  misc_feature (719)..(719): n equals a,t,g, or c
  misc_feature (725)..(725): n equals a,t,g, or c
  misc_feature (737)..(737): n equals a,t,g, or c
gtcccttaaattctgatcatgtaggacattcttctttgccctgggcctgggaaaatgcagcatgtccagagcaaaagtcctaatgagggaactaaaccagtgggacccaaaccaatgtcctggctcactgagsacccgttagaaccaaatctctgggtgtggacaggctcccatacttwtcaaaaattcccctgatgactaatgaacaaccagrggtaagaaccagtggcccagaggaataaccagcccagctgttgtacgagctcgctaagctggctcaggtcaatgttgaattctctgctaggcagctcctcataagaactggcagagatggttcttacacaacaacaggtgacaactccagactctgccggaagttccaggatctgggttcccggacaatgcatgacactcagtccrgcattgcaggtggaagagcgacggtgaaaagaccraagtcaattaaaatgtgttaaccaaaacaggaaacatgagtgaggtgattgagagtgtgtttaacttagatgtgtgattttatcaatactttcattgttcaaaaactcttattttttaaagatattttcaaaacaaatccaaactttacttttcattccaaaaaaaaaaaaaaagggcggccgttctagaggatncaaagcttacgtacgcgtgcatgcgacgtnatagctcttctatagtgtccctaaattcaattcctggcngtccgntttacaacgtcntgactgggaaaaccctgg

SEQ ID NO: 911 - DNA, 659 bp, Homo sapiens
  misc_feature (564)..(564): n equals a,t,g, or c
  misc_feature (634)..(634): n equals a,t,g, or c
  misc_feature (655)..(655): n equals a,t,g, or c
aattcggcacgagccgccgccgggymgccaaggssaccctctactgccgcgtcttcctgctcgacgggaccgaagtgagcgtggacctgccgaaacatgccaaaggccaggatttgtttgatcagattgtgtaccacttggaccttgtggaaacagattactttggcctccagttcctcgactctgcccaggttgcgcactggctggatcatgccaaacccataaaaaagcagatgaaaattggacctgcttatgctttacactttcgagttaaatactattcttcagaaccaaacaaccttcgtgaggagtttacaaggtacctgtttgttttacaactcaggcatgacattctttctggaaaattgaaatgcccttatgaaacagctgtggaattagctgctctctgtctacaagcggactttgtgtgagtgcgagcttccagaacacacaccagagcttgtgtctgagtttcggttcattccaaatcagacagaagcaatggaatttgatatcttccagagatggaaagagtgcaggggaaagagccctgcccagggcggnaactctcctatctggaatgaaagcgaagttggctgggaaatgtatgggggtagacatggcacgtttgttnaggggggaaggagatgggctnttga

SEQ ID NO: 912 - DNA, 597 bp, Homo sapiens
gtattgaccagaaataaacttttaaatgatctgtgatgtttacaaggatatgtctaaaacgtttattacattattttcctcttaatgtgaattctccacgtttgaaactgtaactcgttttctcattttttgttcttcttgttacttcctcatattgtgtacttggaaattacctttgtaaatacttgagaaattcgttcttatatataattaatataaaaagtttgcatttctcaaaaacatctctatcaaagcctgtgttctcacgagtttaatatcaaagtcttaataaaataatcacaactacccaaatgcttataaaatatgttcgattactggatttttattcattaaacagaattaattttatttgacatatttaaaggcgccatttagaaataaaawtgcttattatgttgcaatactgtatctatttcagcctctacaccgttttcttttttgtttcacctgaaactagttttcccttccgttttttttcttgttctatcaagctaatatatatatcaacatacagtaatggggtgctggtttttgtaagttaaatatgtacctgcattaaataaatagtaaacatgt

SEQ ID NO: 913 - DNA, 319 bp, Homo sapiens
  misc_feature (1)..(1): n equals a,t,g, or c
  misc_feature (274)..(274): n equals a,t,g, or c
  misc_feature (307)..(307): n equals a,t,g, or c
  misc_feature (312)..(312): n equals a,t,g, or c
nactaccattgagaaacaagatcctcatgttgtcctttgacttgagagtgggtggcctgggccccaaggccgaccgtttggaggagcttgtggaggagctggaagcagccccttgctgtccgcttttggaggtggggtctgttttggacctcctggttcagctggcagggagtggtccccctcaagttctgccgagaaaacgagactacttccttaacaacaagcatgtggggagaaacgttccgtacagcggctatgattgcgacgacctgantgtgtttgagatggacgttcaatctctgatctncaganaagagtg

SEQ ID NO: 914 - DNA, 653 bp, Homo sapiens
  misc_feature (165)..(165): n equals a,t,g, or c
  misc_feature (205)..(205): n equals a,t,g, or c
  misc_feature (554)..(554): n equals a,t,g, or c
  misc_feature (575)..(575): n equals a,t,g, or c
  misc_feature (588)..(588): n equals a,t,g, or c
  misc_feature (642)..(642): n equals a,t,g, or c
aagtcaagatcaacaggaaaactgcatttggaactacaactcttgtcttgactgattttagcaataaatccagtactttggaaagaaaaacaaagcaaaaccagatactagatgaggagtttcaaaactctcctcctgctagtgtgtgtttgaatgatatacagnacccctccaagaagacaacaaacgatataactcaactatncagcatagtaaacatatcacctacaatcagttcagaatctaaattatttagtccagcacataaaaaaccgaaaacagcccactactcatcaccagagcttaaaagctgcaaccctggatattctaacagtgaacttcaaattaatatgacagatggccctcgtaccttaaatcctgacagccctcgctgcagtaaacacaaccgcctctgcattctccgagttgtgaggaaggatggggaaaacaagggcagggcagttttatgcctgtcctcttacctaggaggaaggcacaatgtgggatttttttggaatggggcagattttgttcctttccctttctggcaaccnggggcaaggcgtttcccaccntggaaaacagttnttggaaggtttgggaccttaacattggggaaaggattttttttttgttgtggtnccctttggggg

SEQ ID NO: 915 - DNA, 727 bp, Homo sapiens
cacggtggaagggctggggccacggggcagagaagaaaggttatctctgcttgttggacaaacagaggggagattataaaacatacccggcagtggacaccatgcattctgcaagccaccctggggtgcagctgagctagacatgggacggcgagacgcccagctcctggcagcgctcctcgtcctggggctatgtgccctggcggggagtgagaaaccctccccctgccagtgctccaggctgagcccccataacaggacgaactgcggcttccctggaatcaccagtgaccagtgttttgacaatggatgctgtttcgactccagtgtcactggggtcccctggtgtttccaccccctcccaaagcaagagtcggatcagtgcgtcatggaggtctcagaccgaagaaactgtggctacccgggcatcagccccgaggaatgcgcctctcggaagtgctgcttctccaacttcatctttgaagtgccctggtgcttcttcccgaagtctgtggaagactgccattactaagagaggctggttccagaggatgcatctggctcaccgggtgttccgaaaccaaagaagaaacttcgccttatcagcttcatacttcatgaaatcctgggttttcttaaccatcttttcctcattttcaatggtttaacatataatttctttaaataaaacccttaaaatctaaaaaaaaaaaaaaaaaaaaaaaaa

SEQ ID NO: 916 - DNA, 778 bp, Homo sapiens
  misc_feature (3)..(3): n equals a,t,g, or c
  misc_feature (23)..(23): n equals a,t,g, or c
  misc_feature (25)..(25): n equals a,t,g, or c
  misc_feature (608)..(608): n equals a,t,g, or c
  misc_feature (659)..(659): n equals a,t,g, or c
  misc_feature (731)..(731): n equals a,t,g, or c
  misc_feature (754)..(754): n equals a,t,g, or c
  misc_feature (761)..(761): n equals a,t,g, or c
  misc_feature (775)..(775): n equals a,t,g, or c
agnccatgtccaaggcgtgcttntntaacttattccattaatactctttttcacttaggtacatctctctgtctttggagcttccaacatttttcccttttaattttatttaaaaatgttttcttccttcatttattttccccccataaaacagtatgacaaagggtttgattcagggagagaaaggatatatgaagacacattcttccctcttctattctcttccctggttagaaataaataggcatatagtcctgtttattatgggcaggaaggtaggtaaagatcacctaagtgcttatggcgtgttggctttggcacatggagaatgagtttttgatcttgttttctcggcatgtctgtttcatgagatgagcctgtaggaagagttactaggctccctgactaagcagcccggagtcttgaccwwywkcaggctgtcaacaatcctaaatagcatatttattacggactcaaaatgaaatcttraaaaacaaaaacacaatatatatgtcactgcatggacatccatcactttttctgagcctgtattgcctctgcaaaacattatagcagttacttagagggaaggatttttttctagcctnctggtaacaggctccattcagaactttctcgacatcttatatcaatacttnctacatctacaagccccagaaatctctatggtctacttggtaatggctatttaaaagcttgaggcacagcgnaaaaagctaaccataagaaaagnaatttgnttcttctaaatttnaag

SEQ ID NO: 917 - DNA, 569 bp, Homo sapiens
  misc_feature (569)..(569): n equals a,t,g, or c
gagccagattgcccactgcactccacctgtgcgacagaggggcctgtctcaaacaacacaaacaaaaaaaagagcaggktcataatcacacagcagtgccttatatagttgccataagacttcagtgcagtacaacataattttacagctacatatcagggcatattctatatggtgtatttgtgttagaataacacattaaatgtctttaaacataaaaataagaatgtttgcatgtttcagttttcaagaaccaaatgagtaattagctatagattccactggccttaaacatacaattaagtgtatacatgatatagtgcacacacaaaagccacctttaattattgaaataacctgtattctttttggaaatcatttaagtttggtattgaagtactatattttttgtgcatcaatgtatttttctatttacaagcctatgtaaaagtgaagtgtatcttcagtgaaccatgtgccaattaagctgtaataaaaaagtggtctagtctgtcaaaaaaaaaaaaaaaaaaaaaaaaaaaaaaaaaaaaaaaaaaaaaaaaaaaaan

SEQ ID NO: 918 - DNA, 378 bp, Homo sapiens
gtttgcagttagaagcaggtgttgtaacatctattaaatgattttataaatcttgggttttatcacatttgattaaatgctgctaagccactgatggtcaattccagaggaaaaaaaaagtttaatgactacagtttataaaattaatcaccaggcaaaactacatatttaaaatgtcaaaaggcttgaatcatgaaaagaattcctcaaccttgttaccaaattattgttttcaggattcacaaagcatgttatatatccatttatatttcagtttatacatatgactggtttctattcctgagacttaagtaagtacttggtgcgctttttcttttgttacaggtcagaaataaatcaggataatgaaaaatagaa

SEQ ID NO: 919 - DNA, 693 bp, Homo sapiens
aattcggcacgagagaaaaagaaaaagaaggttaatccttcagttatggaggtgggatgaatagagcttgtttgatgttaaagtgggtaaggagggagtggccttgagacacttgtattccaaactctcctggaggtttccagtagcactactgttcctaaaagggtttcatttttaacttcatctgttttgttaacatccagtccaattgaggtgatctcagaggtgcatcaggacatctagcactggggaggccaccttgcccagatagttgaaaagaaaattggtctgggcagcctgttgtcttttgtcttcatgtaatgttttttctttgttttaaaggactaatgtttattacagtgttaaataaaagtgtaagatactaagtgtgtagaataaaagtgcaataacaaaagacaatgactttggcacacacttcagtctttatcctctctcctttcttgtgctacctggctctttccataatattgttacagcaggaccgtcttaattgtgtgcattttgaagagatgcgactctgggttaatcttcattagtgtaatattgaagggttgggtttggttttatagagtattctgtatacttgttgggatacacaaataccagatgtgctgtataataaagatcacattaacgtttwaaaaaaaaaaaaaaaaaaaaaaaaaaaagaaa

SEQ ID NO: 920 - DNA, 371 bp, Homo sapiens
  misc_feature (281)..(281): n equals a,t,g, or c
  misc_feature (351)..(351): n equals a,t,g, or c
  misc_feature (364)..(364): n equals a,t,g, or c
ggcacgagctgacccggaatggaggaggcggaggagctgctcttggaggggaagaaggcgctgcaactcgcccgcgagccgcgcctgggcctggacttaggatggaacccttccggagaaggctgtacgcagggcctcaaagacgtcccacccgagccgacccgagacatcctcgctttaaagagccttccccggggcttggcccttggcccctcactcgccaaggaacagcgcttgggggtctggtgtgtcggggamcccctgcagcccrgcygcatggntacctggccaagaagttacacagccccagtgatcagttcccacccagagcaaagaacccagagctggaanccaacagtctggntttccta

SEQ ID NO: 921 - DNA, 684 bp, Homo sapiens
  misc_feature (583)..(583): n equals a,t,g, or c
  misc_feature (676)..(676): n equals a,t,g, or c
ggaacttcttaattgtaggttcctctgaagcgatttcatgtagatatgtgagtgttttaaacaagtctgaaagtgttacatacttttaggttacaggggtgctggggagacagctgaggaaaggaagaatatgtggaagacaccacggagttcaaagttttaccctgagttctatcttccatgtatgttttgcttaaggcatttctcatgtgacattagaaaagctatatccaaaggtamattttttgtggcaaagatttattttacactttaacttttgggattttatttgtttcagcaaaataaagagcactgaactttaaacttgaattttttctgcacttttttaggtmatgaaaactttttattatcatttaatccacatkgctcagtttaaaccaagtgatacatgtgtataaaacataccaaaatcatgaatatgctgctagctgtaccttaaataaactgatcagttttaaaacctttaatagggttttatatagatwtwwaaaatagtaaaataatctgctgtatgtttcagtgttcttggtcttaaattattgcaacactttcagatttgatntaagatcatacagtaacatgttatatttatacatactgctagaaaatatacttttagttttaaaatggaatttttataaatgtactttaattntaaaatgg

SEQ ID NO: 922 - DNA, 471 bp, Homo sapiens
  misc_feature (398)..(398): n equals a,t,g, or c
  misc_feature (423)..(423): n equals a,t,g, or c
  misc_feature (457)..(457): n equals a,t,g, or c
  misc_feature (468)..(468): n equals a,t,g, or c
ggtgaaccccaagttaaaaccttccaagggcttcccaatgctcttaatataaaatccaaactgtcccatatgatctgacctctcccaaactctccagcctacttttatgccactttcccctttactctctatagtttggccatatttgactcctctcacttcctcacccctgtkttctcacagtacaatgtacatacgtttataacattgatcccactgtactgtattctctggtttgcctttcctcactagaatgtaagctcctcagaaggcagtgagaccatgctttatattacccttgcactcctagtttccggcagtgttgactcaaacatttgttgagtaactgagcaaataaagaaaaatagaaaagacaggagaaggaagaggtaggctangggaagataattttgtttttaaacnttaagttttaggtggcactggtttagtggaatanaaatgcacaanaac

SEQ ID NO: 923 - DNA, 604 bp, Homo sapiens
  misc_feature (12)..(12): n equals a,t,g, or c
  misc_feature (545)..(545): n equals a,t,g, or c
gcgcgacaccanccctcactaagggaacaaagctggagctccaccgcggtggcggccgctctagaactagtggatcccccgggctgcaggaattcggcacgagtaactatagcagctaagcatttgaatcagacttctcatagcaatgttatgggctgtctgatatattcaggatttgttgagcagataagctgtgtgtgatcttactcattctcagccatgccgcagacatacccatttccctttagtaattttttaatacagagaatgctattaactgttactggatatcaaataattttatttttctaatagtattttccaaatatttcttaaaattcttaaaatttaggttaaagtttgctggtctcttacatttaataaagctgggacttgaagacttaccatagttttcaactgcctttgcaagttcataaacttctaagggtaaaaagtgaataagataaattcagagttttaaggtaaaggctttatattagctttttttttttttaaaggttttttgtggggtttttttgtttttntttttttttgggatggagtctcgctctgtcacccaggctggagtgcagtggcacgatct

SEQ ID NO: 924 - DNA, 367 bp, Homo sapiens
  misc_feature (317)..(317): n equals a,t,g, or c
  misc_feature (346)..(346): n equals a,t,g, or c
  misc_feature (362)..(362): n equals a,t,g, or c
ccccacaatcctaggcctacccgccgcartactgatcattctatttccccctctattgatccccacctccaaatatctcatcaacaaccgactaatcaccacccaacaatgactaatcaaactaacctcaaaacaaatgataaccatacacaacactaaaggacgaacctgatctcttatactagtatccttaatcatttttattgccacaactaacctcctcggactcctgcctcactcatttacaccaaccaccccaactatctataaacctagccatggccatccccttatgagcgggcgcagtgattataggntttcgctctaagattaaaaatggcctagnccattcttaccaaaanggaaa

SEQ ID NO: 925 - DNA, 286 bp, Homo sapiens
  misc_feature (178)..(178): n equals a,t,g, or c
  misc_feature (248)..(248): n equals a,t,g, or c
gaactttgcattttgtastaaaaaataggtttcttaatatatgtgattgtaatggcatacaaggcttttaaattcatgtgcatataagataaattttaaatattcttagagggttttcatgaaatatcaccttcacatatttcatcagttcagtacaaaatgcaaaaatgtctattgnataaaacgggagatttaatcacgaccacgttaggaatctcccagttacccctgggaacacagccccccanagtggagacatgcttagactggcattctggttcaacat

SEQ ID NO: 926 - DNA, 1060 bp, Homo sapiens
  misc_feature (684)..(684): n equals a,t,g, or c
  misc_feature (819)..(819): n equals a,t,g, or c
  misc_feature (842)..(842): n equals a,t,g, or c
gctcccgcagcgctgtcatggcgtcctgcggcgccggaaggactggaacgtgcgcctgcaggccttcttcaccagtgacacggggcttgaatacgaagcccccaagctgtaccctgccattcccgcagcccgaaggcggcccattcgagtcctgtcattgtttgatggcatcgcgacaggctacctagtcctcaaagagttgggcataaaggtaggaaagtacgtcgcttctgaagtgtgtgaggagtccattgctgttggaaccgtgaagcacgaggggaatatcaaatacgtgaacgaygtgaggaacatcacaaagaaaaatattgaagaatggggcccatttgacttggtgattggcggaagcccatgcaacgatctctcaaatgtgaatccagccaggaaaggcctgtatgagggtacaggccggctcttcttcgaattttaccacctgctgaattactcacgccccaaggagggtgatgaccggccgttcttctggatgkttgagaatgttgwasccatgaaggttggcgacaagagggacatctcacggttcctggagtgtaatccagtgatgattgatgccatcaaagtttctgctgctcacagggcccgatacttctggggcaacctacccgggatgaacaggcccgtgatagcatcaaagaatgataaactcgngctgcaggactgcttggaatacaataggatagccaagttaaagaaagtacagacaataaccaccaagtcgaactcgatcaaacaggggaaaaaccaacttttccctgttgtcatgaatggcaaagaagatgtttngtggtgcactgagctcgaaaggntctttggctttcctgtgcactacacagacgtgtccaacatgggccgtggtgcccgccagaagctgctgggaaggtcctggagcgtgcctgtcatccgacacctcttcgcccctctgaaggactactttgcatgtgaatagttccagccagggcccaagcccactggggtgtgtggcagagcaggacccaggaggtgtgattctgaaggcatccccagg

SEQ ID NO: 927 - DNA, 713 bp, Homo sapiens
  misc_feature (258)..(258): n equals a,t,g, or c
  misc_feature (676)..(676): n equals a,t,g, or c
  misc_feature (694)..(694): n equals a,t,g, or c
  misc_feature (703)..(703): n equals a,t,g, or c
gggcatcttccttccttgattttaagtcttcagcttcttggccaacttagtttgccacagagattgttcttttgcttaagcccctttggaatctcccatttggaggggatttgtaaaggacactcagtccttgaacaggggaatgtggcctcaagtgcacagactagccttagtcatctccagttgaggctgggtatgaggggtacagacttggccctcacaccaggtaggttctgagacacttggaagaagctttgnggctcccaagccacaagtagtcattcttagccttgcttttgtaaagttaggtgacaagttattccatgtgatgcttgtgagaattgagaaaatatgcatggaaatatccagatgaatttcttacacagattcttamgggatgcctaaattgcatcctgtaacttctgtccaaaaagaacaggatgatgtacaaattgctcttccaggtaatccaccacggttaactggaaaagcactttcagtctcctataaccctcccaccagctgctgcttcaggtataatgttacagcagtttgccaaggcggggacctaactggtgacaattgagcctcttgactggtactcagaatttagtgacacgtggtcctgattttttttggagacggggtcttgctctcacccaggctgggagtgcantggcacactgactacagncttgacctncccaggctca

SEQ ID NO: 928 - DNA, 595 bp, Homo sapiens
  misc_feature (3)..(3): n equals a,t,g, or c
  misc_feature (6)..(6): n equals a,t,g, or c
  misc_feature (18)..(18): n equals a,t,g, or c
  misc_feature (32)..(32): n equals a,t,g, or c
  misc_feature (566)..(566): n equals a,t,g, or c
ganacnaccctcactaanggaacaaagctggngctccaccgcggtggcggccgctctagaactagtggatcccccgggctgcaggaattcggcacgagctgaattagacatattctttaaaaataagatccgttgtcagccatctaaaatgtttttataaattcatacttacattcttttttgccggttgcagtcagcctttagtgccaagagagaacattacagcatggatgaatgcaattggtttgatcatcactgccctaccagtgagttaataattgtgatttgtacttagtgatgaaatacagccagctgttccatgtcagcaaaaagaaaaagatgcatataggatgcccttgtacgggacgtcatgcaaattaatgaagtattttatgtttttaaagttttttcatattattactgctttaaaaatctacagtgactagtttttgcttttctgtattagatctaaatatatctatgtgacttacgggtctctgcattttctggtaccaccttacctatccaactttagtttttacataatagcttgatctactcttggncacttaacgtgttgtatatctacagcctt

SEQ ID NO: 929 - DNA, 278 bp, Homo sapiens
  misc_feature (180)..(180): n equals a,t,g, or c
  misc_feature (238)..(238): n equals a,t,g, or c
ggcagagcttggctagatttgaagtgtaatagattaaggaaagaaaatcrgttatattcttcasaatagtttgtctgagttcatgcttcatgactgtcatgtgttgagttatctttctggcaagtggaaatgacggaggagccttaacacgtgtctactgtggaatgttgttgctaaagngtaggagagagctggccaggcgccgtggctcacgcctgtgaatcccagcactttgggnggccgaggcgggaagatcacctgagatcaagagtttgaga

SEQ ID NO: 930 - DNA, 347 bp, Homo sapiens
gggatgcggaccaccttttgcagaactcatatctcgagcagtttaaattgcttgtgcctgttaacaagaatactgaccagaatgctcttcatgtagcttatacagttggttcacttcatgcggttcttgacatgtttatttctacccttaatgcaatgaaatgtttcattaataaaaaaccactttatataaaattgctctagaagtcatatgtcattggatgtcctgttgtttatggagtttccctggaaagatgttccttgacagatgcagccctgagtcacacacttgggccatgtctgatctagagttcgctgtagtggacagttacaatcagccctcgtgcc

SEQ ID NO: 931 - DNA, 153 bp, Homo sapiens
gttgtgaagcatgcacgggaaaggcacccaggtcaggggggatccccgaggagatgcctgagctgaaggattgtggttggggaaagcgtagtcccagcaaggaagcagtttgtgggtaagtgctgggaggtgagtggagtgagcttgtcaggg

SEQ ID NO: 932 - DNA, 930 bp, Homo sapiens
  misc_feature (758)..(758): n equals a,t,g, or c
  misc_feature (761)..(761): n equals a,t,g, or c
  misc_feature (885)..(885): n equals a,t,g, or c
ttttttttttttttttttttttttaatttaaaggtttagtttatacaattgataattctgcaaaccacaatatgtcaataactacatactgtaataaaaataaacaaagtcatacttaattctataatgcattaagaataacctaaaaaaacaaattgtgaataaaggcatatttaataaattagggaacatcttaacttctaatagactgggggaaatttttaagttttctatgtacacaaaggcagtgggaacaaatgaaaaaaacaaattactacattgttgcagcacattaaagactggatggtgtatattattcacaattacatcctctttcccatagcctggcagaggaaagtagttaccaagcacaggaacaatttcaacatctcactggagtctccaaaagcaagcagatactgcaggatgtcattaagcaacttactgtcacttcacaccatatgtggcagtaagaaacttaaaaaaaaaattaaaaggcacgcataagctgatttcaaatattttaagtccaggctactctctttagatacaatgttttgaacacttgtatagaacagtttttaaataaacatttctatacaagtgttcaaaacattgtatctaaagagagtagcctggacttaaaatatttgaaatcagcttatgcgtgccttttaattttaaaattaagtttcttactgccacatatggtgtgaagtgacagtaagttgcttaatgacatcctgcagtatctgctnggnttttggagactccagtgagatgttgaaattgttccgtgctggtaactactttcctctgccaggctatgggaaagaggatgtaattgtgaataatatacaccatccagtctttaaggtgcggcancaaggtggtaattggtttttaccattggtccccacggccttgggg

SEQ ID NO: 933 - DNA, 1358 bp, Homo sapiens
  misc_feature (681)..(681): n equals a,t,g, or c
tcctaccacaaattctacatcaagaagaaagttttaaagttagactggatttatttgtgattttatggagcacaataaggtacattgagatagcatactaaaggaggccaaatacaggaagcatcatcttttcttattctcttactgcctggattttcccactgacctggaattgtgcacagttctacaaaggacaattgacattgttttccttttactaagtagtgggttttccttaaggtccagactgaattttgagacctgtaccaggattgccttctgtgtgactttttcttgcaggatctgacatcattacctatgggtccatatatttgtgatactttggtttcgggaacatcacttttagaatgttgacataaaatgcacccacagaatgccgtatttatcaaaagtaactttctagcaaaatctacagcagtaggcatttggaatctgcatttgagacctctgcagtcatttggtcattccagcaatctatgtccaggttgtcaatttcagaggtctyattartctatacaggtaccaatgagctttcagatgttcaacacctacccctggcctaactgctgataaccaaccataacccttgcagatgcatgcwtgttttctgcaccttgctatcatttttcartccatttttcacatgtatacatagtgatnatttttaaatgcaaccctgatttcacatgcctcatgttgaaatatcgtgtggcttattgkggactwaaagkgtaacattcyccytawggtakgtaaggacttttgtayaaaccaatgcctatctatcyawcatttctgaaaactttttccycctakgcaatattttctggcctctgtgaacaacttgtagttccttgagattyctattatcacttawgkttttgcaaatctgcaattgaaatgcccttgttccttgttaatgcctattgaatctatatgaacctgtacgtgtgtttctcactgtgataatataatcattgcatgttttatctttcccactagaaagcttctagaaagctagkactatcttttttgtctgtgtaatttttgcatcacaagctatatttaaatgtgggtgcagtgagtggctgttttctgccacatggagaaacatggtctgcagtgagagagaagaatgaagccatgatgaaagcaaaatcaagaaagagtcccgattgtgttccagtacctggttcttctggtcttcatgttcaggtccacctctgcccttttcatgtcttgattgttgaattcttctgtgagatactccaaatatcctaataaattctcatgtttgcttcaaaaaaaaaaaaaaaaaaaaaaaaaaaaaaaaaaaa

SEQ ID NO: 934 - DNA, 79 bp, Homo sapiens
gcccackcgtccgcaagacactcatgccctggcaatgtggctgccagaaactggtgggttagcaacaacattctctggc

SEQ ID NO: 935 - DNA, 1426 bp, Homo sapiens
  misc_feature (1350)..(1350): n equals a,t,g, or c
  misc_feature (1391)..(1391): n equals a,t,g, or c
tcttcactctgatgagggctcagacttgataacgcccgtggtgccccatccctataggagctggtgagattgcagcctgctgcctcccctccatcagccacagctattggatttcccacccagaatctttaggtaaatgagatcatgattctggaaggaggtggtgtaatgaatctcaaccccggcaacaacctccttcaccagccgccagcctggacagacagctactccacgtgcaatgtttccagtgggttttttggaggccagtggcatgaaattcatcctcagtactggaccaagtaccaggtgtgggagtggctccagcacctcctggacaccaaccagctggatgccaattgtatccctttccaagagttcgacatcaacggcgagcacctttgcagcatgagtttgcaggagttcacccgggcggcagggacggcggggcagctcctctacagcaacttgcagcatctgaagtggaacggccagtgcagtagtgacctgttccagtccacacacaatgtcattgtcaagactgaacaaactgagccttccatcatgaacacctggaaagacgagaactatttatatgacaccaactatggtagcacagtagatttgttggacagcaaaactttctgccgggctcagatctccatgacaaccaccagtcaccttcctgttgagtcacctgatatgaaaaaggagcaagacccccctgccaagtgccacaccaaaaagcacaacccgagagggactcacttatgggaattcatccgcgacatcctcttgaacccagacaagaacccaggattaataaaatgggaagaccgatctgagggcgtcttcaggttcttgaaatcagaggcagtggctcagctatggggtaaaaagaagamcaacagcagcatgacctatgaaaagctcagccgagctatgagatattactacaaaagagaaattctggagcgtgtggatggacgaagactggtatataaatttgggaagaatgcccgaggatggagagaaaatgaaaactgaagctgccaatactttggacacaaaccaaaacacacaccaaataatcagaaacaaagaactcctggacgtaaatatttcaaagactacttttctctgatatttatgtaccatgaggggaacaagaaactacttctaacgggaagaagaaacactacagtcgattaaaaaaattattttgttacttcgaagtatgtcctatatggggaaaaaacgtacacagttttctgtgaaatatgatgctgtatgtggttgtgattttttttcacctctattgtgaattctttttcactgcaagagtaaccaggntttgtagccttgtgcttcttgcctaagagaaaggaaaaacnaaatcagagggcattaaatggttttgtatggtgac

SEQ ID NO: 936 - DNA, 724 bp, Homo sapiens
  misc_feature (1)..(1): n equals a,t,g, or c
  misc_feature (704)..(704): n equals a,t,g, or c
  misc_feature (714)..(714): n equals a,t,g, or c
ngaggaccagtattttgttaaaaagggcatgcaggamaycttctctgcctcctaccctttctcatctccggctccatctccagctggcccccagatcctgtggcgacggttccccatggcagccacctgctgacctatcaggactcyctatagaggaagtgtccaagtcactacggttcattggtttgtccgaagatgtcatatcattctttgttactgaaaagattgatgggaacctgcttgttcagctaacggaagaaatcctctcagaggatttcaaattgagcaaattgcaggtgaagaagataatgcaattcattaatggctggaggcccaaaatatagccaaataacccccggccagcatggaacaaaactgatcaatgcgtgtgctagaaggggtgggctgggacacaatttcatgtttttgcactaaaaaccttctctgtaaatagggataagagaaactcttactatgcagattacgtttttgaatggtgaacaggctattttgtacatcaataaaaatgctgtacagaacacttggaggtgtgccttgtacgtcactcaacaaacactcagcagctgctaaaagaaaaaaaggcatgtgcagagaaatcattcttacccaagtaggtttatgtgagaaggtatgatatttattacaaaatagccaaagctgaaagacataaaaatctttaaaanaaaaataaangggcggcccg

SEQ ID NO: 937 - DNA, 641 bp, Homo sapiens
  misc_feature (2)..(2): n equals a,t,g, or c
tnaataacatcaatgatgactcctacagtatatttagtaaaagtgagaatgagtgaaaaagccctactatgtttttaaatagcaagtgtaagctcagtgctagagtggatatacacaccgcatgttttcatatgtggcacttttatgtatcatgttgggttattgttctagactggactgttaaatactatgtttgaggctgggttgtcatttttataactgtcttggtgttttatggccattatttattacttttgatacacagaatgagctgcatgcatttatagagcaataagaggatgtatttaatgtgccttgtttttaactgaataagaactggaagcatgaatcaataaaactgattaaaatggtctatttgctagcattttgatgttacttgcagtcagataactttgattactgttgaagtttaaaaaaagtttgaaaatatttttacaaactgtgtttttgatgacacaaaagtgaaatatctacagagatagatgtaattttataagactgccagaattatttgtattaatttgttgctgtagcctttagggcatgacttctgtatttgtgcaatcctattctacaattacattcatcctattacaactcaaaaaaaaaaagtcgacgcg

SEQ ID NO: 938 - DNA, 245 bp, Homo sapiens
  misc_feature (239)..(239): n equals a,t,g, or c
cagctcccaccatggcggagaccaagctccagctgtttgtcaaggcgagtgaggacggggagagcgtgggtcactgcccctcctacctggacagcgcgatgcaggagaaagagttcaaatacacgtgtccgcacagcgccgagatcctggcggcctaccggcccyccgtgcacccccgctagcgccccaccccgcgtctatcgcccaataaaggcatctttgycgggaaaaaaaaaagnaaggaa

SEQ ID NO: 939 - DNA, 297 bp, Homo sapiens
  misc_feature (24)..(24): n equals a,t,g, or c
agagcgagactccatttcaaaaanaaaaaaaaaaaaaaaaaatcacttgtagtcttggtgtggtatcaaagaatagccacaattagctgaaaaggctattttaaaaacttttccaactgcgtatctgtgtgaagtcaacttacttcaacaaaaaagtttggatgtagaagcagctgtaagaattcaactgtttattataacaagatactaaagagactgtaaaatgccacccttctccttggwttgttttggaagttattcttcataaaaaatgttaacgtgggctgggcatggtgg

SEQ ID NO: 940 - DNA, 579 bp, Homo sapiens
  misc_feature (474)..(474): n equals a,t,g, or c
  misc_feature (499)..(499): n equals a,t,g, or c
  misc_feature (571)..(572): n equals a,t,g, or c
gctcgtgccgttgagaattgtataaggactgtattgtatattgtatgagattgtagatccaggatgagtcacagtatttttgaagttgtagtaaatggaatgaactagaaagatagaagttaatgttcggaaggcaggagacttaaaagttagattgtaaaaatttgcaattaggagtaataacgtggtttgagctgagatcatgagattgaatagctagatactgaagatagcaagtacattggaaatgatgaggtcaaatgtcaaagaagataagtaatttaaatgagacatcaaaataatggcagttaagtcaggttgtaaagactgcaaagaatgagggaaagtgactaaacattgggagagtgatcaatataatcaaatagtatgagattccaagctggaggggtttgaggagaaggaagtagaagtattctgcaagaggacacttattttacttctagaggcagtggntagagcactgagggttgagaactantctgcacttaaggggcgacatgagaagcagcagcatcagtgagagacagatgaccataagaatgaaaatgtnnagggaaa

SEQ ID NO: 941 - DNA, 670 bp, Homo sapiens
gtttgaactttgaaaactgggcaacggggagaacctgctgtgaaacagacagctttctattgtgtctagagtagcgcagactttctaagaaatggatgtggatagagtatgtattggtggcatgcgcctgtagtcccagccacttggaggctgaggcaggaggatcatttgagtccaggagcttgaagctataatgcgccaccatgtctgtgaatagccactgcactccagtctgggcaacatagcaggaccttttctcttaaaaacaaaaaagagttccggtgaaatggataaagcagactgggaaggacgaagcctgtkgggctggtggggctgagtcccaaccagcttcatcagtggtgatccttttgaacttgtaccaaagtttccagaacagaggcggcatggatttacccttgtgtgatgctcgatctcagagatgggactctgtgattggcctttgttgaactgacaggtatttgaatgtgcacatcctacgtaggacatcgcattgagtgtaggcatagtgccagggcagcttgcctcatcgttaccaaacgcgtttcctgggatctgtcattctgtccattgtgctttctcctgttactctagcagttcagtgaatgtaagattactactctgtatatggaactttgaaaacaagaatgaa

SEQ ID NO: 942 - DNA, 1755 bp, Homo sapiens
  misc_feature (8)..(8): n equals a,t,g, or c
gactaggngaagatgctctagaatttamccaggtttttaaatcagtaatttargatttctaaccattkgaacaaattttacttacatgtatgcacatgtcatttttcgtgtttctatttttatgttctcaaaggtaggataagggaaggaaggaggaaacagcccatttggggttcaagagctagctctgctaagggcttgtaagctatttctattctgccctttggtctttttcttgtttgtcttgtctttatttttaaatgaaattcttgaagctatgtattgaattttctagtatagaggatgtgacttccacctccaaattccatttaactgattcttttaaaagaaagataggcgtatatacaccacgccaaaataataataaggtacctatgtgagaattgcaaattataccccagggtagcatttaggcagcgtcggcaaaaagtgagttaataaatcagaagctacatattaaaaaaaaaatcagtcaatccgtcgtgtgtttaawtcttgcctaaagtaaatggagatattgttttgctttggtaaccagcaatttttaatttttttttattgcccgcaaattgagattgttttgttaaaatctgttgatctagcagcaagtagaattattcaactggaatcttgtattctattcagagcttaattttccgttaaggaaaaaaatgagcttcagtttgtgttgtgatgtgtataatttgcatgctgaatcacaacatgcttggagagattgtagagactctttggtaaataatctaacctttacaatttyccgtttatatgttaacmtttttctataatatgagtgcctttccaatgcacagatattttttatggctgtaatttctctgtaaaaataatttttaagcatacattttattctttttttgcaacaaccgagatttttccaagattgttctgtttcccctcgccctcctagctcccgcccccgtcacttcggcgcttgtattttctaattattcatgggtgccatgttgagtgtttgtaatttgaccaccacaggtaagcttcctgtttacttgaacactcagcctcatctccggtgaatgaagggaaaagcacagatgggtttctcccaggcacagctcactccaaaggtgtcttcatagagccaacccagcctttctcaagggagcatttccccacttaatgtgtttatcagcatctttcttccgccaagaattcaagagcattttcaaaattgatagattttggtgcagttttgcaagtttccgtggaaggctgtctcccgcttctgggatccacccccatgtcgggaccagatcggctgcagggagtcatgtttatgaaatgttggtggtttttttttttttttcattcatactagaagtgtttttataacgaaaatctgcactttacaactctgcaggccatgcatgcaatggtgatttacagccttgtttacgtgtaattcctccaggtgatttatcccaatttatgcaaagatcctattttaaacagacacggagaagtggtaaccgtttcctaacagcagcaagaatgccccttccgtttgcctggtgaaaagaactgacattaacagcagcttggaggcttcgaggaggtggggacgtggcctgagctcgggacgggggcccagtgcgggttgtcggagcgtggctgcccggcgatgtctctgtatttatcaataaatctcccggttgctctgggaaaaaaaaaaaaaaa

SEQ ID NO: 943 - DNA, 690 bp, Homo sapiens
  misc_feature (31)..(31): n equals a,t,g, or c
  misc_feature (38)..(39): n equals a,t,g, or c
  misc_feature (687)..(687): n equals a,t,g, or c
  misc_feature (690)..(690): n equals a,t,g, or c
tttccacgcgtccgcccacgcgtccgcccangcgtccnngcagggcagagaatccccccaattcctgcctgaaatctctggcctcacccctgctgggggttggactgaaaaccctcctccccaatttggggggtgttgccccatcactgcccagctcctctgactgccccccctgaatttagggtgggggtactagtcactgccaatgtgtgtatgggacttgctggaaaacggggatgcttgcccctctccaggactattgagcccagagagagctgtcctctcattgggtgaactgattgaggaagggtctattgtctttttaaatggcacaattttaagggtttgagggtacagtcccttaacctgccacgggagggggcccccaaactttcttccccccacacttctggttttctgtgtggagggggagcagggatatctaagctgtggtgtgaaagggtaggagagatgctggaggtgggggtgctgtgttctagaccccccatattatcccagtgtcccctgcccccctcttcccccaccccatgcccccaattctgtggcgcatccagattgtgaaaatgtacaataaatgtgtaatgagtaaaaaaaaaaaaaaaaaaaaaaaaaaaaaaaaaaaaaaaaaaaaaaaaaaaaaaaaaaaaaaaaaaaaaaaaaaaaaanttn

SEQ ID NO: 944 - DNA, 1711 bp, Homo sapiens
cgagatgtaccggtacagcgaggacgaggactcggagggcgaagagaagagcgatggggagttggtggtgctcacagactgatcccggctgggtgggccyggccccttctcctctggggaagaccttgtcccaactcgatgggcacagccagccaacctaagactatgttggtacttggacttgttcgtgccccagagatgggcaaagctgtgcacttgcagatacattcatgaggggagaggcgccctcccttcctgaggagctgttggcctgggtgggcaggaactgcagtatggycatgggctgagcaggctgagcacctcagcctttagggcttatggccaggggacactgtatgactctcctctcctgcaggtgtctatccacctggggtatggcatctaccgacctgtctccctggggtcacatgctttgtttccattcttgtcctggctggaccagccactgtgggaccaacacccctyccacactcccccagactgctcgtctatcaccaggatcgctttgtactttgtgcaaaagggtctggctgtcccttgctgttttcatctctgcaagcctattgtgcctctggctgctgtatgtgtgcgcgtgcacgtgtgtgtgtttcatctgktcattcactgcacaagatatttawtgagtgcccactacgtgccaggcactgttgctgagttcctgtgggtgtgtctctcgatgccactcctgcttctctgggggcctctttctgtgcttctctttgtccccaaattgctacctctttgtcagtctgggtgtctcaggttctgtgtgtccttgtgtgcatttctgtctctctctgtcctcgtctctctgcaaggccctctatttctctctttcttggtgtctgtcctttgccccctgtgccctctggattctctgggtctatgtaggcccctggtctgccctggctcatcagccttcctgacctcctcctgccctccccttcactccctcctgctctgcagtcggttcccacggagccatttttagctctgatcagcatgggaatgtgcctcggcctccaaggggctttgtcctggtgcccccgcccctggtcccaacctgatcccacgagggagttgggacaggaggattgatggtgctccccttcctgccagcgtcagargccctggagaggggctgtccatggcagctggtctttattcctccctcatgagcacagggtcgggggggtccccattcttggaagaggttgagaagactcctgggcttcagcctctcccacccagccctgcccctcacctgcctgccctcccctcccccactctatactagggactggatctcagcctctgatcagtttcacaaagtttgttccctaaggaaatcaaatcccattgtcacctaactctgaagatctaaatagcccttggatcagtaygggaaccccaaatyccacagggccagatgtggagtctgtgtctgcccccgtcttctctccatcctcaaagcccccacttctctccaggctgtttctttttttatgactgtaaacatagatagtgctttattttgttaataataagataatgatgagtaacttaaccagcacatttctcctgtttacactcgggggatttttttgttttctgatgacataataaagacagatcatttcaraaaaaaaaaaaaaaaaaaaaaaaaaag

SEQ ID NO: 945 - DNA, 870 bp, Homo sapiens
  misc_feature (48)..(48): n equals a,t,g, or c
tgaatctttcattcttacctgaataatttcacactctccattactctnggtcctcctaaggtctcctgtggagagtgaatatttccatcgcacttacttgctactttcaatgttctcaatgtcctattggactcactagggcttagctctgtggttgacacatagrtatgcagmttttcaaatgtctggaatgtgttactctactacatgttttttgaaatggaaacagatggaatgactggctactgtaataatactacagcagctccataatgcatgaaatcctaaaaagtatgtaatattataagtatcttttcaatacaggtttcattgctattattcatcagtttccgtttagattacctgttccgatttaataacctttgataaatttgaaaaatttgtctttcaaacagagcctgttagtattaatgaagaaaatgagggatttgaacataacacacaagttagaaatcaaggaattatagctttgagttaccgtgactgggaggtaaagctctgcctgttgcccctgcatagttctgactctgccttcacttgcagtaagcccagtgcctaaatgttcattattgtctgccaggagattgtgaagacctttgagatttcagagcctgtgattactccaagtcagaggcagcagaagccaagtgcttgatgctagctgaaggactcaaatggatagtgaagtccaaaacggaaagcggcatgtattgtacatattgtatgattcaacatttttaaaggcagattgtttttagtaaaatgtagcttttgatagttaataaatttgtcatggttgtctttgattaaaggaaactcaccgccatattcacaaaaaaaaaaaaaaaa

SEQ ID NO: 946 - DNA, 443 bp, Homo sapiens
  misc_feature (29)..(29): n equals a,t,g, or c
  misc_feature (403)..(403): n equals a,t,g, or c
aagggaatcttaaatgggaaattcgtcantgccctaccggtccggaattcccgggtcgacccacgcgtcctagtttcaatkaactcgaatgcggctgagtgcctgagagcacctgttgctgtgggtatcatcaccgtgtgtgttttctgtcttctcatccacttttctttgtgcagtctgcacacacaccattaaaggctgatgacagcatttttacgaattgcaaacagaggccagcgcggtggctcccagcactttgggaggccgaggcgggtggatcacgaggtcaggagttcgagaacagcctggccaagatggtgaagccccgtctctactgaaaatgcaaagattagctgggtgtggtggcatgccccctgtggtcccagctactcaggaggctgangcagagaattgcttaaaaacccgggaggtggaagttgcag

SEQ ID NO: 947 - DNA, 490 bp, Homo sapiens
agctggagaggaagggatgaaaccagctgctgttgcaaaggcwgcttgtcattgatagaaggactcacgggcttggattgattaagactaaacatggagttggcaaactttcttcaagtattgagttctgttcaatgcattggacatgtgatttaagggaaaagtgtgaatgcttatagatgatgaaaacctggtgggctgcagagcccagtttagaagaagtgagttgggggttggggacagatttggtggtggtatttcccaactgtttcctcccctaaattcagaggaatgcagctatgccagaagccagagaagagccactcgtagcttctgctttggggacaactggtcagttgaaagtcccaggagttcctttgtggctttctgtatacttttgcctggttaaagtctgtggctwaaaaatagtcgaacctttcttgagaactctgtaacaaagtatgtttttgattaaaagagaaagccaact

SEQ ID NO: 948 - DNA, 1165 bp, Homo sapiens
  misc_feature (1135)..(1135): n equals a,t,g, or c
  misc_feature (1143)..(1143): n equals a,t,g, or c
  misc_feature (1149)..(1149): n equals a,t,g, or c
  misc_feature (1151)..(1151): n equals a,t,g, or c
  misc_feature (1156)..(1156): n equals a,t,g, or c
ttttttttttttttacttccattcaaacagctttctgatttattaaatactgtcaaaatactcatgttagaaatatatggattatggcaaataaaataattcaaaaatcagtacattaacaaggatatcatcaaacttatgataacttaatgaattttaattctatactaagttatcaatttgtgtctttacagaaattgcttcagttttatggttaaaaaccttaataagagatgagcagtgaaaacaaaactatggtagcagtattatcagatgaacttttaaacgtttcattttctttgaaaagatgaccagcagaaagtcaaatctgaaaacctggggttatctgaaagtcgaaggtaacatctcactacatgcttcagcagacgggcagaaggctctttggatagctgcaggaccatcttacccaagatcatggcaacatgggagaaacgctcatacgtctgacatatataagccaaaccagtgtcatctaacaagatcttctggaggatgaatgtggcaactgttttagaaagttcacttccagattccataattcgcaaacataaagggataatttctgttgttaataaaaagttgattacttcttgttcatctgttttcaccagggccccaataactccaaggctggtgagccggagatactcaaagggacgtgttttgctgacagtgtgcaaaaaggggtacaaaaaaagtgggatgtgtgctgcgagaaacgctgacctggtttctggatgtgatgctacacattgcagtaatgccagagcattgcaaactctgttagactggtgtgctgtcaaggtgggtgggttgatagatggataaatatttacaatttcctgtaaaagtgctgcaatagtaccaaatgaatgccacagcatgggtgcaaggtcaggaacagattctcgcttcttacttagctccagcaaagcattttccctagtctcaggactggacagctcattgatccactgatagatcttttctctatccacttgtgccagtgtagtaggcacaggcgcagccgtcgccaggctgtgcatgttgtgagcggccgccgctctcttccacagccggacgcgtccgacccgcgtcccccttgcagcgtcgnactggccngaattncngtacngtgactgtc

SEQ ID NO: 949 - DNA, 448 bp, Homo sapiens
tccgtctcctagtgtccggaatcggctgtcagctccctggctgttagtaccttctttcccggagtcctggtccacgagttggatttactgctgtcgcgggtgggcctcacgccattccctgtccctcggccccctgagtgagtccggtctcccggcgaaagtgagcgaggtttgcccggagcgcgcacgaggggaaaatgcctaaaaaaaagactggtgcgaggaagaaggctgagaaccgccgagaacgtgaaaaacaactaagagcatcaagaagcactatagatttagctaaacatccatgtaatgcctcaatggtatcagctttttttgatatcagttggtagttggaaaaactatatactattttatctgacgtatacctgaataaaattttagtgaagacagtgttttttggcattatagtttgttggtgaatttagtatct

SEQ ID NO: 950 - DNA, 932 bp, Homo sapiens
  misc_feature (897)..(897): n equals a,t,g, or c
  misc_feature (929)..(929): n equals a,t,g, or c
gagagtattcagcacaataatgttcttaaacccatcaacctactttcacagcaaatgaagccaggcatgaaaagacaaaggagtttatacagagaaatcctcttcttatcattagtgtctctaggaagagagaatattgatattgaggcatttgacaatgaatatggaattgcatacaatagtctgtcttcagagattcttgaaaggttgcagaaaattgatgctccaccaagtgccagtgtcgagtggtgcaggaagtgttttggagcgcctctcatttaaatagagattcactagaatgttgacacacaaggcttggggattagatttcatctggaaacattcaagtttttttttccaaatcgtaagaactggtgaatacggaattgaagtaactcttggggacaatatataatgaattatgattcatattgcattaccttgaaatatgaagtgccatttgaatgtcccagggcttattaatattgaagattttcaacccctgaactgcttttctgcctctgtggaaaactactttgggattcttcagtatttgtagtagtttgatagaaataatgaggaaccatattcattctaggcattgtttatatttgaagttactgagtttgaggaatggcaaattaaatttgcctaacccccaaaacaaatgaaatatctcaattataaaagcaacatggccgggcacggtggctcaggcctgttaatcccagcactttgggaggctgagcaaggtgggtggatcacttgaggccaggagttcgagaccagcctggccaacacggtgagaccctgtctttactaaaaatacaaaaattagccaggcgcaccactgtagtcccagctacttcaggctgaggcaggagaatcgcttgaacngaggcagaggttacatggagtggtgatcacgncat

SEQ ID NO: 951 - DNA, 735 bp, Homo sapiens
  misc_feature (640)..(640): n equals a,t,g, or c
gtggcacatgaaatttctcagatcactaatgatcttgcacagattattattcctaaagataactcatctctcttgaaaaggttggcatgtatagctgcatttttttgtggactcctcatcttatcatccattcaagataaatcaaaacattaggttccaaaaattctaaaaaacctaaactcttcaggctacctttgtgtgtctctagaagagaaaagcatctatctggagatataaatgtgtatgtaaatataaacgtttgtggcaagaggacagttctgtgacatctgttgaacatatgtggttgtatatattggaaatgtacatatccaatatgaaatactaaracaaacaaacaamcaaaaaaccagaatgcattgtataggattgcatgtgaagtcttttctactgaatctatatttccatttgtaagtgattttaagttaacatatgaaggcagggaaatgattacctttccagtaaaaagtatagataatttaattaacttagtgacaccaccaagtgttttgaatataactaaatttgtggtaataagactgtctgcacctgtattcattgtggaacttcctctttcmttggaaactttcttactcaagaatgacggcagtattgttttctnatatgtgccaatgaaagtgggatgataaacagtatgcctttaatttataatgtgtccttgttcctgaatgttgtttcctggaaatgaattttcct

SEQ ID NO: 952 - DNA, 858 bp, Homo sapiens
ggcacgagtgcgtctccagcgtctccagccgtagtctgaagggagcagggtggcgactctggtgacagggcgatgccagtccctccactccagaggagaacgaaaccacgacaaccagcgccttcaccatccaggagtactttgccaagcggatggcagcactgaagaacaagccccaggttccagttccagggtctgacatttctgagacgcaggtggaacgtaaaagggggaagaaaagaaataaagaggccacaggtaaagatgtggaaagttacctccagcctaaggccaagaggcacacggagggaaagcccgagagggccgaggcccagcgagcgagtggccaagaagaagagcgcgccagcagaagagcagctcagaggcccctgctgggaccagagttccaaggcctctgctcaggatgcaggggaccatgtgcagccgcctgagggccgggacttcaccctgaagcccaaaaagaggagagggaagaaaaagctgcaaaaaccagtagagatagcagaggacgctacactagaagaaacgctagtgaaaaagaagaagaagaaagattccaaatgaatccttcccagccggggccttccgaccactcagctgtcagggcactgcgggggcagacacctctggcctgaagtcacagcagagttcaccccagagcgcctgggcgcatcttgtggcatgcccatgggctgccgagtcctgccctctcgccacatttcccccaagttacattcccaggaggacctttttaatgttctcaatcgtggctctcagacacaaataaatttttttgtaaactctgaaaaaaaaaaaaaaaaaaaaaaaaaaaaaaaa

SEQ ID NO: 953 - DNA, 1345 bp, Homo sapiens
  misc_feature (773)..(773): n equals a,t,g, or c
  misc_feature (968)..(968): n equals a,t,g, or c
  misc_feature (1154)..(1154): n equals a,t,g, or c
  misc_feature (1206)..(1206): n equals a,t,g, or c
  misc_feature (1299)..(1299): n equals a,t,g, or c
  misc_feature (1316)..(1316): n equals a,t,g, or c
  misc_feature (1322)..(1322): n equals a,t,g, or c
  misc_feature (1339)..(1339): n equals a,t,g, or c
cccgtccacaatgcagcagactcttcccaaggccacctagcaagcaaggttgatcggatcatctaaactggccgcctcctgaatatttcactgaatcctggcgttcatgttgaagcagacaaaatgagaaaggaggagggcattgctcacctctcaatagcttttttcgttcaagttctatgtctttatcagctcttgcctgtgattttaccccaattcaaccttgggagtgggaagaatatgaacagataacccttggcctaacagctccatcaaacctccttgagagcaactacctaggccaggctagtgagtgctttgtgaggaagctggtcagaaggttccctcaactccttcctggtcctcctggacactgcagaaaagacttaggggatccccagcagaggccaattgctctccttccttccctgccccaccaggaaaggaataacgtccacagacttgaagcagatagtgaagtagatctgtgagaggttctaggtacttagtgtgtagactttgacgaatatttctcaagttgggagcccttgttaaaaatgatgtttaagggagtggttggggggaagatgaaggcatggaggaggaagaagagaaggaagcccttgccatataaaattcatgcagactaaacagtttccctgacagaataaataaagtggatgctaccccactccagaatcaaaagcaatttaattaaagtctcttaagttgtaaagagttttaaatgatccgtgttgaaggcgaatsctgcnaaatgcagtgggtctgacgtcagctgccgggcctgggctgggaggccatttgctattctgtttaaggcaggctggattgtcttattttggaaccagcttggtggggggtttgctttgctactgcttctgagccctgagcttcaaaggctgaaattaatggtgaacaaaattgtgcggctctggccatcccatgcngggcaagcccattgagggttatcattaagtaaagaaataaagagggggaaaaaagcctgcctgttccaaaaacctcatcagataatgacctcagtgattgggttttcattaccaaacagcatccagagattatcaacccatagaagaagggaggggaaaaaaaaraaaraaaggaaaagcaactgnctttctctcctctctttctccttttttttgcacatcttttctttaaaactgncagatcatttcaagtatttcaaatccgaggaaaacagcctggctgctgctggatttgaagtggaatgggggcaaaaagcccactggctgacanccgcagtcccaaagggnttattnaatcttaaaacttgccnggaata

SEQ ID NO: 954 - DNA, 1829 bp, Homo sapiens
  misc_feature (601)..(601): n equals a,t,g, or c
  misc_feature (918)..(918): n equals a,t,g, or c
  misc_feature (1411)..(1411): n equals a,t,g, or c
gaattcggcacgagatttattattatttaactcctgcagtgagcaaatgtgagtaacatttgaatgaaaataaattttcagcttatttacatgaggtaataaacttgactttatcaagtaattgtgggagtggggaataaacctcatctggggatgggaaataaacaccactataaagaaaccactaagatttgaatgccttgcttgttttaagtttgttgatgcaggtattgcattgattatgcatcagggaactggaaaccaaggcattcgttcttttaagaaaatagattcttaagcataggagtctcatgttttaagaactatttctaagttcaactaagatcgagtttttctgtctctattggcaaktwtyaagaggcataaactttaaagaaaaagggaaaatgtgataaattaatggaatagactccataggcttttattccaacttttatatgatgcaagtctatgtgcttctgtctgactcacttatttctgtwatcaagatgaactagtgaagggaatttctctctcaatgctaaattaattacatgcattggggatagtcatccagagagagggaaggtgaccttctgangttgtcacycagwaaataattgcctgagctgagaatggcatgtgggtcacagaattggtgtttctggatttaggaaatacttcctattttttttccactcctgctggctaagccaagaatggcaaatatgtgttcatgctgctgcattcccttccaggcccataaggacgttggcaatccttcatagccttctcacaggcggaacctggattaatttaagaacccttttgtgcctggcttttcaggaagccagtaccaatcaattggtgctggcatgaagcatgaaactatttgccatctctgagttatgccagtanaattggcatgcttctggtttccatgcataccactacctttcatgggttttattgtgcacaaactttgcatgcctttagaatgatatacctacgcaggtatataatttgtcaccctgatccaaaaagggkaagawgccmagaccatagtgagcctcttattagaaagctcttggcttcagtttttgacacttccctgactctttatattcacgttatcataagctgccaaattcttgactctataaattgccctttaacagcttattaggaattccaactactgtattctagcaccaactacagcatattcagagcctctgcaattcctaaaagtacacttaaaccaaatacatgggccagcctgcatcttttaaaatacattttatgcctttacacttcgtattaagttgggtgagaattatgttttaatctacactctatcttgaattgtcttacattttattctgcttaccagggttcargttcttatccnaaaatgaagttaaatttttttctcttagatagttgcattccckgaagcaattaraacagcatgatccccttggtgtttattgacattctcatcattgtctcattgggctttaggtttaacatgcctcatgatgacaacaacaaatgtaaagaagaaggagttaagagtccccagcatgtcatggctccaacactgaacttctacaccaacccctggatgtggtcaaagtgtagtcgaaaatatatcactgagtttttagagtaagacttgaacattcttttagcacaaacttctagtgcctggcctacatgtagtgaactaattgtgggaaagacaatatgaagtcaaacattccttttgagttatttttgttgacattccttggagaaggcaaaaaaaaaaaaaaaaaaaaactcga

SEQ ID NO: 955 - DNA, 388 bp, Homo sapiens
  misc_feature (337)..(337): n equals a,t,g, or c
aaaaaaaaaaaaatgaaagaaacttgcccttttactttatatattcccatagtcacacacctagacctctgtttggccagattaccagatatgtatgcaaagagaatttgtagtgaaaactgtcgagtcatattcaaatcctttctgtaatgaaaagctttttcctaaaatctgttggaaattgctcattggttaactacttctgtaaaagtatttggttgaaattccagagttttatgaggtgarggataaaaagrtggctcaaggcctactaaagtcaacctgcatcattagtccctttcagaagacargracckgggttwtgggaaagattccngtttkctgratctgctatkagtttctgctgcctcacttggccaacaatttt

SEQ ID NO: 956 - DNA, 637 bp, Homo sapiens
  misc_feature (8)..(8): n equals a,t,g, or c
  misc_feature (11)..(11): n equals a,t,g, or c
  misc_feature (26)..(26): n equals a,t,g, or c
  misc_feature (618)..(618): n equals a,t,g, or c
cctcactnaanggaacaaaagctggngctccaccgcggtggcggccgctctagaactagtggatcccccgggctgcaggaattcggcacgagcggccgcctccatgaagcggaaaagcgagcggcggtcgagctgggccgccgcgcccccctgctcgcggcgctgctcgtcgacctcgccgggtgtgaagaagatccgcagctccacgcagcaagacccgcgccgccgggacccccaggacgacgtgtacctggacatcaccgatcgcctttgttttgccattctctacagcagaccaaagagtgcatcaaatgtacattatttcagcatagataatgaacttgaatatgagaacttctacgcagattttggaccactcaatctggcaatggtttacagatattgttgcaagatcaataagaaattaaagtccattacaatgttaaggaagaaaattgttcattttactggctctgatcagagaaaacaagcaaatgctgccttccttgttggatgctacatggttatatatttggggagaaccccagaagaagcatatagaatattaatctttggagagacatcctatattcctttcagagatgctgcctatggmangtgcamtyctacatwaccc

SEQ ID NO: 957 - DNA, 753 bp, Homo sapiens
  misc_feature (746)..(746): n equals a,t,g, or c
ccacagtcgcagccccggcgccccgaagcgggaaaaaggctgggtgccgccgtcccccagctgcgcaaccctaggaactctcggcaaaaaaaagagcatgaggaatttgaagactgagagatgagttgtgtagcaccaacattttctttctgcctgaccttcatacctgatgaattaaaagcataggatgtttggaagagtgagataagggacacattgaaaacagagaggcaatctgaaggctaccttgacgcatctgcaaagctcccagattctgactttcacaagacttgctttctgtttctgggcctcgcctaaacagactgccagtcatccgaaccgtggcaggatggagatgtttgtgtaaggtagactcaagtttgcaagactcaagaaggaaaccaccaaactaatttwactttcacttaaaccagattgaaaccaagacttgaagaattaaaaactttgacattaaccattgattcactccaatgaaataattgtgttatagccagaatcatggtgaaattggaacaaggcttttgatgggatttttaattgagggacttatattaaattggatattttctttaatgaacagcatgtggccaaaattctattttcattaaagtatattaagcatcatgacaactcatattaaacctgcaacaaatgattaatgacatttagagacttcaaatgtcatgagacaccttaaatattaagaatcaaaaagaacacctcanagttgtg

SEQ ID NO: 958 - DNA, 912 bp, Homo sapiens
  misc_feature (757)..(757): n equals a,t,g, or c
gctcgtgccgaattcggcacgaggttagttgccgaaatatactagttctctgagggttaaagaagtaaaatacctttttaaagttaaatatcactagaaaaatcagtgttattacaagggaagaaatgaacccagtttaagaatttgccatcagtagcagtattaagcagtggttaatgtcttaraagtcagacttctttttcaaggtcttcagaaccacacttgatttctgttttgttgcagctgtaattgacacacactaggcagctgactccttgaatatccagtgtgacccataaaatagtctgttaataccggatcttaatttttatgttattcattaagattttaactatattcagtacgtaatttggagacaaactagcatcatcaaaactgcctgtaaataaggtgtttagtctttctataaaaacagaatagagcagttacctaccagttaaaatatcttatatgaagaaaatagaataaagatccagtcatatatgtaaataagatgtactgattgtacgtaaatgaaaaatggaccctttaaaaattatttttacctgaagcttgtcataatttttttaaagcaaatatatatatggtgatggtacttttcaaagtgtgtattagtggtgatcacctcaaacataaacctctgttgtgaatcatttgtgtccttttcaactgtctttcagaggaaaggtaaaaaatcattaaacctgaaattcattgttaaaatcaaatatttgtnagcagtaactcaagctcatggttctcaagcagaaaaaggtttgggargacttaaaaatggagtccaggttgtacatgggagactgcttaactcccttggggtaggcatgggccttgccttcagcaaaccagtgcatttccccatgtcttagtttc

SEQ ID NO: 959 - DNA, 440 bp, Homo sapiens
  misc_feature (392)..(392): n equals a,t,g, or c
  misc_feature (405)..(405): n equals a,t,g, or c
  misc_feature (416)..(416): n equals a,t,g, or c
  misc_feature (435)..(435): n equals a,t,g, or c
gcagtgagccgagatttcaccagtgcactccagcctgggtgacagagcaagactccatctcaaaaaaaaaataaataaaaaaaaatgcagctgcaggagtgaggcgcttggaggtaccttgacccaaagagcagggcagagggtggcagtggcacataggcaagtgtctttgcatgacatcttctcagagcttcacaataatgtcagggaccacatttaatgctttttaatctcccatagtgcctggctcacaggaagtgctcagatatgttaagtaataaaaagttaatgtggtgggtgcagtggctcacgcctgtaatcccagcactttgggaggctgaggtgagtggattacaaggtcaggagttccagaccagcctggctaatatggngaaacctcggctntactaaaaatnccaaaattactggcatggnggtgc

SEQ ID NO: 960 - DNA, 1006 bp, Homo sapiens
  misc_feature (408)..(408): n equals a,t,g, or c
attttcaaaaggaaactaatttatttttctataaaatatcgcaaaggaatcgaatacatttttattctatgtaaataataatataattttcacatttaggaggcaatagcaaatctgggaagcagttattctaagttggaagagcattatcccaatgcattgaaaacatttgatgactattttttatgtcttctttattttgatgattataataatgttctaactgggtggccttcgtttttcactctagtcagtccatcttgtttactatgtcaattgttctccaaaaagtagaaatgtcattgttttggggccatakaacatttcagaagctttccagtatctatgcagtaacagtccaaacccctcaacataacacatttacacctgcaagtatggccccaaatnttcaagtggcttctgtcactactccatagtacataccctttgttacagctgtttcacaaatacaggttgaatatcccttatctaaaatgtttgggactamaagtttcagatttcagatatgtttggattttggaatatttgtacatgtataatgagrtactcttagagttgggacccaagtctaaacaaaattcatttatgtttcatatataccttatacacataacctgaaggtaatttatttttcccttgggaacactgaatagactatatgttgtgcacctacattttgactgtgacctatcacatgaagtcaggtgtggaattttccatttgtggcatcatgtcagtactcaaaaagttttggattttggattttgaattttcagattagagatgctcagcctaatagcaaatgttcccatgttatacacctcaacctcccattcccattggctggaacatctctgcttatattaaatgtcttttatgtgaaatctgtgttctcatagccttttgtatagttctctaccatctcatggctcacattgtattgtacttatttgattmaatatctggatcatctactgtgaaaaaa

SEQ ID NO: 961 - DNA, 1302 bp, Homo sapiens
aaagaaccaatgcaagtttggtttctatccagaaaaaatacaggaacagaggaaacaaagcaggatgatgactgaatcttggattatggggtgaagaggagtacagactaggttccagttttctcctaacacgtgccaagcccaggagcagttcttccctatggatacagattttcttttgtccttgtccattaccccaagactttcttctagatatatctctcactatccgttattcaaccttagctctgctttctattactttttaggctttagtatattatctaaagtttggcttttgatgtggatgatgtgagcttcatgtgtcttaaaatctactacaagcattacctaacatggtgatctgcaagtagtaggcacccaataaatatttgttgaatttagttaaatgaaactgaacagtgtttggccatgtgtatatttatatcatgtttaccaaatctgtttagtgttccacatatatgtatatgtatattttaatgactataatgtaataaagtttatatcatgttggtgtatatcattatagaaatcattttctaaaggagtgaattctaagttttaggggaaaaaatgcaatttattttcagactcccaaagtaagaattaacatatcatgctaagaaaatagtgactattttgaagtatgctacttccctttcagaaatatagaatacacgtttctgttattaaagtatttgattactaattcaaatcatatggcaattataattcttctaaaatgctatcatttgtaactgtatcccctgtattaaatctcattaaccacaggcagctgttacagaaagctgcattgtttcacattgagctgttacattagttcaggctaaatgttgggmgctccaaccacatccaagaataaatctggaaacacactgctgggatactgctgttagagcccttcttggccttgtattcccagaaatgagctccctttccttagcttagaagaatgtgattatatccaggacatcatgttcagaaaacttagtttactttcagcatagaatgcattactgttggaataattggcctctagctcttaaatgtctctgataacttattaatatctatctttataaaatagagtgcaactacttttgtgtaaaaatgtttgcctttaaatttagtatttcatatcagcacatcgatatatgtataaatgttccatgttaatgtgtaaaagagtctgtaataaattatttttttcacgtgtctctatacagtttttatttcmataaaaatattaacattaaaaaa

SEQ ID NO: 962 - DNA, 471 bp, Homo sapiens
  misc_feature (65)..(65): n equals a,t,g, or c
  misc_feature (393)..(393): n equals a,t,g, or c
  misc_feature (442)..(442): n equals a,t,g, or c
  misc_feature (471)..(471): n equals a,t,g, or c
ctgtaaccttttcacgcgctatctgctaaaaatgttgccgatgtgaagtaaacatggatgtagtnacctgacgtgccaggcgaggagtgagtgtgaaagcgragaagsaggaaactgccgcgaccatgaaagackttgccctcaaggsaaaagtctctacagcgaccgtctcccgagcattaatgaatcccgataaagtctcccaggccacccgtaatcgggttgaaaaagcggcccgggaagtgggttatttaccgcagcctatggggcgcaacgtcaagcgtaatgaatcccgcaccattctggtgattgtcccggatatctgcgatcccttctttagcgaaattattcgcggtatcgaagttacggcggcaaatcacggatatctggtgntgattggcgactgtgcgcatcaaaatcagcaggaaaaaacctttatcgntttgatcatcaccaagcaaattgattggn

SEQ ID NO: 963 - DNA, 918 bp, Homo sapiens
  misc_feature (862)..(862): n equals a,t,g, or c
  misc_feature (871)..(871): n equals a,t,g, or c
  misc_feature (881)..(881): n equals a,t,g, or c
  misc_feature (903)..(903): n equals a,t,g, or c
  misc_feature (916)..(916): n equals a,t,g, or c
cggcacgcgtgggcctactttcacgcttcctcccctccccctcctcccttatcccttcgctttcgctcttttccgtcgaggccgacccctgagttgtgagtctggggtctggttggtgaaaaagagcccttgaagctggaagacgggagaggacaaaagcatgtcttcccttcctgggtgcattggtttggatgcagcaacagctacagtggagtctgaagagattgcagagctgcaacaggcagtggttgaggaactgggtatctctatggaggaacttcggcatttcatcgatgaggaactggagaagatggattgtgtacagcaacgcaagaagcagctagcagagttagagacatgggtaatacagaaagaatctgaggtggctcacgttgaccaactctttgatgatgcatccagggcagtgactaattgtgagtctttggtgaaggacttctactccaagctgggactacaataccgggacagtagctctgaggacgaatcttcccggcctacagaaataattgagattcctgatgaagatgatgatgtcctcagtattgattcaggtgatgctgggagcagaactccaaaagaccagaagctccgtgaagctatggctgccttaagaaagtcagctcaagatgttcagaagttcatggatgctgtcaacaagaagagcagttcccaggatctgcataaaggaaccttgagtcagatgtctggagaactaagcaaagatggtgacctgatagtcagcatgcgaattctgggcaagaagagaactaagacttggcacaaaggccccttattgccatycagacagttggaccaaggaagcacgcaagcgccggtgaanagcgccttncaggcccaanaaaggaaggagaatcatttaangacttttattccnaa

SEQ ID NO: 964 - DNA, 1683 bp, Homo sapiens
  misc_feature (5)..(5): n equals a,t,g, or c
  misc_feature (344)..(344): n equals a,t,g, or c
  misc_feature (1604)..(1604): n equals a,t,g, or c
cgctnttcccccccacacccgtgtggccagggatccccgcatggcccatcttagaaactcaactatttggtggatgctaaacacttcacttcaggcaatcccaaggcatttgctccagggtatccgatgagattacagctgttaagcttgctttccatttcataacttgctgtgcagctagttaccacccccatgctgaagagtaaagcaaagtgccgtggttcggcagtggaatccacccccagcactctgctcgcactggagcgttcaagtccggttatgtgagaacagactaggactctcttgctgcctctaattgcatttcactgtcaccctccccagtnttctgatggtgtgcatgtgaggagaagatgaggttaggactgagaagtgcagaagttggaacagtggtaaggctgttttaaaataagatgttttgttttaataatatgctcctggcacaaagctaggagtaaatgtgactccaaagggagttcagttaatctctgaaatgcacaaaacctagctattttctccctctcatcacagtctgagtctggtccattgctaccccaattctctggggacataaaaccaggctggaaagggaccaggaagtttgaaatagtgacatatcatccactagtcccaagggctaaggaatagtgagtttattctggaaggaactgggaagcttagtctaattagtgcctggggatgacctatgcaatcacaccgcttatgaccatcctagagagggccctgagcaccagcttgatcttagggatttccaaagtaacctgctttttgcctggatagggttaaaatagacctttcttgcctatccttgccttaacctatctgcctgaggttggcctgagattgtgagtcaacgactttgctatcttttcctcagtgttgaactttcattaagaaataaagtcctagcttcttacagagaggggtccaaatggtgaatgctcatcctgcctggattcaaggrattagctcagagrttggcccctagcttttctgcctttgtagggacagcaaaaggggaaaatttgctgcagaaaattccaaaagattgctgtagctctcacagggaagtggtaaagatcagctaaacctgggttggggtgctttctgcccagtgggtcttggcataagtagattaatcctgctcttttaagaaaaggcaacttattcaggcagtctggaaagggggttctcagaaaactcagtttctttattccttcttttctcccaactactgttactggttatagaggtctttggactctaaagaccaatgtttggccactaactggactaatatgtatctttctgtgatttcatcatagaggtctgttttgtgagggtttggggtgcagaaaactttgattaaatcttaatgggaggctgggtgacctggattatctacagtgagcagacttaaatggaacagaagtttatgtgtccaaatgatggaatcattaaacctgagtgacttgacctgtgtggttccttaatagtatctatatatctagacaaaaatagattgtgaatgtaaatggtgaatgaaaaggatggaaataatgttntcatatgttaatccatgagcttgaatccagggaggaatacctcggtgctttaaccaccttagttataacacatttctta

SEQ ID NO: 965 - DNA, 119 bp, Homo sapiens
acctcctcgccctgggctgccccgcctgggtctgggggacctgaacctcctcgmcctgggctgccccgactgggtctgggggacctgaatctcctcaccctgggctgccccagctgggt

SEQ ID NO: 966 - DNA, 351 bp, Homo sapiens
aaaactctgtaggctgattaatgaagatgtgaatgagcaggttatgcaggtattaggacctgaagacctccagagcattatctacaaattsgaagaacacgaggaatttttcccagcatttcaggcatttactaatgatctacttgaaatcttagaaattgatgacytggatgccattgtacctgcagtaaagaaattaaaagtactttcatactgaaaacaaatcaaatcatttttactgtgtaaattgtattcttaacattttgtattttgtaggattgatcttattttgagacaagggttgtaaaatgtatttgctctcagaattcatccccttcttagtattaggtc

SEQ ID NO: 967 - DNA, 375 bp, Homo sapiens
  misc_feature (299)..(299): n equals a,t,g, or c
  misc_feature (361)..(361): n equals a,t,g, or c
  misc_feature (374)..(374): n equals a,t,g, or c
aattcggcacgagcttaccaaaagtatctaatggcccaatgccttcaaaccaagttttttcaattactatattttaagttatacattcaagttaaaatatacctaggacattctgattatagcctaggctttagttctatccagagaacaagaaaaactttttgaaaaaggtaaggaatcgatcccatacctgatcaggacccataggcatgccagacatgggcatggggttcatgttcatctgtcccatgtgaccactgctgccattcatgtgcaccatactatacactgcaggattnccctggtgggcaaacttgctgctggggaaaggagtttaagtaaacaaatggtatattacctntggagcacttagng

SEQ ID NO: 968 - DNA, 557 bp, Homo sapiens
cagcagacaagaatgagattttgttttctgaattcaacatcaactataataatgagctgccgatgtataggaaagggactgtgttgatatggcagaaggtggatgaagtgatgacaaaagaaattaagctgccaacagaaatggaaggaaaaaagatggcagtgacccggaccaggacaaagccagtgcccttgcactgcgatatcatcggggatgctttctggaaggaacatccagagattctagatgaagacagctgacccttttgcgcttcagttctggtgtgcttaaccatgcaagccctcccacctcccagggctccttgccttaggtggctgtagcatccctaccacccaggacactggtgcgaatgacacaactcaagttgggaggggaacagggaaggaagggatggatgggggtggtgtatcttactctgtttaagcagaacaccttgtttgcggtgttggaacatggttcctttggcagaagtgctttttttttaatcgcagtactatttttataaagcmagaactattccatgccctgggggatga

SEQ ID NO: 969 - DNA, 346 bp, Homo sapiens
  misc_feature (274)..(274): n equals a,t,g, or c
ggcacaggaatgacttcaaaggggtgtgagccaggcctcttcccacaccagacttcatgaaccatgcctggtattgtgcatgtttttgtgagcagccgtgaatagggctgggggagagagatgttcagccaagaaagtctaaaatagaaagggaatgttcagttataacaaaacaaatttttgtaattagagtgctgggttgtgctcagcatcattggggttaaatgtggagcagtggcttacacttgtaatcccagcactttggggaaactgnggtggggcggatcccttgaggtccaggagttcgaggccaccctggggcaacatggtggaactcccatcttct

SEQ ID NO: 970 - DNA, 774 bp, Homo sapiens
  misc_feature (2)..(2): n equals a,t,g, or c
  misc_feature (4)..(4): n equals a,t,g, or c
  misc_feature (13)..(13): n equals a,t,g, or c
  misc_feature (750)..(750): n equals a,t,g, or c
gntnaaatccctncccaaggtatgtaatcagaatcccatcatgaggcacacccaaatgagggacattctacaaaataactaccttgcaatcttcatagagtgaagattatgaaagtcaaggaataatgaggaactgttccagactgagggaaagaaaatatttgacaagcagatggtattcgtgcttctgaactgaattcttttgctctaataaaagacattttgggcacagttttctgattctgatgawtgkawtgkgawtatgtaagagaawgtaggaaaagkattcaggggtagtgtgggacaggtcagcaactcactctgaaatggttcaggaaaatcagttctttatgctgtattttcaatccttgtataaattcgtgtttgtttcaaagattaaaaaaagararaaaatggaggggaaaatacctggtaggcaaatgaacaaaagacatgaataggcaattcatttaaaaattaaaataggtcttaaaatatttaaaaaaattcagcatcactgataattagagaaatgcaaattaaaactgcaatgaaatattctcatctgtcatgagaaggttgtggctgagttaagagattggcaaatccccacccaccctgcccaaaagcaactgtaaatgccattctgtaaacaaaaggaatcaaggaacccttggtgatgtgactgatttcagactggggcagataaagtacaagctgactcagaaaagtgaagttgtgccagaaggntaaggaagtggctcaaaaaatgaa

SEQ ID NO: 971 - DNA, 901 bp, Homo sapiens
  misc_feature (774)..(774): n equals a,t,g, or c
  misc_feature (831)..(831): n equals a,t,g, or c
  misc_feature (867)..(867): n equals a,t,g, or c
  misc_feature (888)..(888): n equals a,t,g, or c
ggcacgagcttagtaccaaatcctctgtttgggattgagcgctgctcctggttaatcattcctactacaaaaaaaaataactcccagggctagttaaattgtaaaccaaggctcagcagtctcacaacacatggaccagaggtgacacacagccatttcctttgccatgtggcccagttgctgctgccatgcctccatttccacactggatgcctacggcagtgagatttcactgccggggtaagagttcagcctggatgattttatagctctgttcctagcacttctcatcatccttccagcccagaatcagcggtcattctgcatattcccaccaaccctctacccccaaacacttcagtgtacctcattttaagagttgctgatccctgattctaggacgtttttacccatagttcttgtctttccaaaatctgaaattcttttttttgctcagaactgggtagccaagggttattttatttttatctttaaaataatcaaggcagtcgctagagtttctccttgtgaatagatcactctagcattttaatgaaaaagaaaaaaatctttctggggtatgttgtatcatagtaatggctcagtaaccacatattttgtcctttccatgtcactgattccttcatatgagactatttggcttgactaccctgtatattgtgtagaaatcaaagttcttatctgtacatttctggtccaatacctgtcttattagttgtccttccccactaaagtttgcaaaacagaaaatgntactatttctgggtatttaatgacaatgaaaggtttgggtcatatttcatagtgcantaaccgataaggaggggggctcaaggttgcttttgnggttcttctaagctttggtcntggattttaagac

SEQ ID NO: 972 - DNA, 1452 bp, Homo sapiens
  misc_feature (3)..(3): n equals a,t,g, or c
  misc_feature (6)..(6): n equals a,t,g, or c
canggnggaagcttaagaccaacttttgtttgagtacacaagtgatatttacattttcatatactagtgatatgcctgttgcatacttggcaaaataaaactgagattccgtctcaaaaaaaaaaagaaaaggaaaaaaaaatagcattatacctcttccttgtctcaaccgccatgaaaattctgaacactccaaattcagttgaataatccaaaacaaaatttataagtataaaataattttacttcttatagtaatagtatactttaaaaagcctcagggtatattatcttctaaacagctacaattcagtgcagctacattaaccaactatgttctctagttgagaacaactaggcctatttcactgctgtgtagcctcagtgcctaacatgggtgccaaataaatattcgtagaattacactgaattgtaaaaaccattcgtttttgtttacaattgccaaaaatctcaaaaggccctgtatttatgtaattctttgaaattattattttattttgatttctcagttattgactggctgggtgtgacttagtacataagtactcaatattataaaaacctcaaataattgacttgattttacacaacatccttcccttttctacaagttaatttttttacaaatcatttgggttatctcctaaataggttatattttattgcttctagaaacaatgtttcaaaatatatgtgcattatcagtaataatttgtataaatatttcccacaacaattttcataattttcaaagactaatttcttgactgaagatattttgctagggaagtgaaactttaaaattttgtagattttaaaaaatattgttgaatggtgtcatgcaaaggatttatatagtgtgctcccactaactgtgtacagatcaggacacatatttttagacatctaagtctgtagcttaaatggaggttactcttccatcatctagaattgtttacttagtaattgttgtttcttttattattatagacttactatcagttttattttgccaagtatgcaacaggyatatcactagtatatgaaaatgtaaatatcacttgtgtactcaaacaaaagttggtcttaagcttccaccttgagcagccttggaaacctaacctgcctcttttagcataatcacattttctaaatgattttctttgttcctgaaaaagtgatttgtattagttttacatttgttttttggaagattatatttgtatatgtatcatcataaaatatttaaataaaaagtatctttagagtgaccctttccccatagatttttatttctctattatattttacaaggaatataactcagtttgttagggagagtgccttaaaggcaggtgtttcttggactttgttatttaattagatctgcttgcaataaaaaaagttatcggttaaaaaaaaaaaaaaaaa

SEQ ID NO: 973 - DNA, 423 bp, Homo sapiens
  misc_feature (421)..(421): n equals a,t,g, or c
  misc_feature (423)..(423): n equals a,t,g, or c
tgaattttttatttctgatttcatgtttttaatatccaattaactccttattttggtaatgtttcttttttatagtattccaatcagtcagcattcacttaaaaaaaaaaaacagaaataactccagatattttaagcaaaaagggatttggtggaaggggttgactatagtaatgtcaggaaggctggttgagccaaagagaagaggatgctgcccaaagatcaggaagctcccagtgcccacccccactgctgctctgctggaagcatagccctgccaccattgcattgaactgtaccactgccgctgagcaaagtcaggatccccaactctgaccattgtatcatgcccggctggctctgcaatgtcattttgatgtgtcttcagtatggatttttttttttttttttctgagtcaanan

SEQ ID NO: 974 - DNA, 786 bp, Homo sapiens
  misc_feature (610)..(610): n equals a,t,g, or c
  misc_feature (663)..(663): n equals a,t,g, or c
  misc_feature (698)..(698): n equals a,t,g, or c
  misc_feature (706)..(706): n equals a,t,g, or c
  misc_feature (737)..(737): n equals a,t,g, or c
  misc_feature (740)..(740): n equals a,t,g, or c
  misc_feature (762)..(762): n equals a,t,g, or c
taagctggtacgcctgcaggtaccggtccggaattcccgggtcgacccacgcgtccggaaaatgcattcagaatcttcagagtcaggtgaaaagctttggccatgattggccttggcattggttgtgctggacagcgggaccaggcgcccccttacctggctcccccctcccaggagcccggtgatgctgcgaaggctgtgaacaggggaggcggcactgtgggggctgccggcagccggggctggggagagacatgtggacacgtggcctctatggctcccgcctgccagatcctccgctgggccctcgccctggggctgggcctcatgttcgaggtcacgcacgccttccggtctcaaggtaggggaagtctggtggtggcggtggggagggagcgaaaaatgtaagagaccagttgggctccaacagaaagaggcatcagggggctgggatgggggtcaatgggggaaggccctggggtcaataggcgggagccttgcagccaactccctggatttcgggggtcaagtgaggccagcatcacttgctccagcagcctaacagccaggacacaggggtccaataagaccagggcccaccccargcctntgacccttacccacagatgarttctgtccagtctggaaaagctatgagatcgnctttcccamccgcgtggaccacaacggggcactgntkgccttnttggcaacttcttcccggaagcagcggccgnggnaccggggggccacaggccaatnccggctttttttacaaaggggctt

SEQ ID NO: 975 - DNA, 1340 bp, Homo sapiens
  misc_feature (7)..(7): n equals a,t,g, or c
ggtccantaaaagagaggaggtttggagcggtggcctgtggagttgctatggagctgtatgtgtttgggggagtccgaagtcgtgaggacgcccagggtagcgagatggtaacttgcaagtccgagttctaccatgatgagtttaaaaggtggatctatcttaacgaccagaatttatgcatccccgccagttcctcttttgtttatggagctgtacctataggagccagtatttatgttattggagatcttgatacaggtaccaattacgactacgtgcgtgagtttaaaagaagcacaggaacctggcaccasastaaaccactccttccatccgaccttcgccgtacaggatgtgcagccttacgcattgcgaattgcaagcttttccgcctgcagcttcagcaaggcttattccgtattcgtgttcattccccttgaggaggaagcagagcagagtgcgagatcctgacccaagagcaccataacatagctccgaaagggagagcagagatggcagctgaaactcactctgtgctgggctttggtatggtaactctttggtggttttatgatgcttacaaacttgagctttactccttgtttgggagaacacgtaactgttgaaaaactacctgggaggagtgagttcctccagttaaatgtggctgtagatgttggaggctaaggaggctagtaaatatcaaaaggaaaagggagtgggaattgctatcatgtaaaatatcaaagttaaaatactaaggtgcattttccctgaagggaactcagtctgactgctgtattcaaatacgtagctttggtaacaaacaaaatccgtatatgcaaatcaacatatccaaacatgccaagactgcttttccactgcacttggaaggatatattatgcctaagcctgcccaacaaattaaggtttgtgcctaaaatgttagattggactgtatgccagttagtctccatttattcctagtactctgtcctaagaatctttttaaaactatatcatgatgaatagaaatgaagataaaattgctcttttgtaactttatcttagtaatgtaaagattcagtaaattgatgagtcaggttgcagccctcatgtgaactgaaagaagttgctcgcttctgtgttgacttagatcaagacacgtcacgcatcctttctggggtagtacctgtggagccgggaagggtctcctgcagtgccattctgccttctcaatgagcaaaaccattttctaagtatgaggatattagtgagtaggagattttataaaagaaagacctgagtcagacaaataataaaggtctgctgtggctaa

SEQ ID NO: 976 - DNA, 884 bp, Homo sapiens
  misc_feature (77)..(77): n equals a,t,g, or c
  misc_feature (771)..(771): n equals a,t,g, or c
  misc_feature (796)..(796): n equals a,t,g, or c
aggggtttataggcacgagaccctgcacccaacctagagttgccttttttaagcaaagcagtttctagttaatgtancatcttggactttggggcgtcattcttaagcttgttgtgcccggtaaccatggtcctcttgctctgattaacccttccttcaatgggcttcttcacccagacaccaaggtatgagatggccctgccaagtgtcggcctctcctgttaaacaaaaacattctaaagccattgttcttgcttcatggacaagaggcagccagagagagtgccagggtgccctggtctgagctggcatccccatgtcttctgtgtccgagggcagcatggtttctcgtgcagtgctcagacacagcctgccctagtcctaccagctcacagcagcacctgctctccttggcagctatggccatgacaaccccagagaagcagcttcagggaccgagtcagattctgttttgtctacatgcctctgccgggtgccggtattgaggcacccagggagctgttactggcgtggaaataggtgatgctgctacctctgctgctgcactcacagccacacttgatacacgatgacaccttgcttgtttggaaacatctaaacatctagtagatgacttgcaggctgttggctaccagtttcctgtctgaggtgtatatgttaacttcgtgatcagtttgtatgtttgggactcttgtcctatgtaaagttaaggtgggccgggtgcagtggctcacgcctgtaatcctaacnctgggaggccgaggcgggtggatcncctgatggtgaaacctcatctctacttgaaaatacaaaaattagctgagtggtgaaaaaaaaaaaaaaaaaaaaaaaactcgaggggg

SEQ ID NO: 977 - DNA, 1632 bp, Homo sapiens
aaattgaaacttctaataaaaatgatatgactatagatatattacatgctgatggtgaaagacctaatgttctagaaaacctagacaactcaaaggaaaagactgttggatcagaagcagcaaaaactgaagatacagttctctgcagcagtgatacagatgaggagtgtttaatcattkwtacagaatgtaaaaataatagtgatggaaagacagctgttgtgggttctaacttaagttccagaccagctagtccaaattcttcctcaggacaggcttctgtaggaaaccagactaatactgcttgtwgtcctgaagagtcatgtgttttaaaaaaacctatcaaacgagtatataaaaaatttgatccagttggagagattttaaaaatgcaggatgagctcttwaagccaatttccagaaaagtaccagaattgcccttaatgaatttagaaaattctaaacagccttctgtttctgagcaattgtctggtccttcagactcctctagttggccgaaatctggatggccttctgcatttcagaagccaaaaggacgattgccatatgaacttcaggactatgttgaagatacatcggaatacctagctcctcaggaaggaaattttgtttataagttatttagcctgcaagacctgttgttactcgtacgctgcagtgtccagaggatagagacaagaccacgttctaaaaaacggaagawwatyagaagacaatttccagtttatgtactaccaaaagtagagtatcaagcttgttatggagttgaagctctgactgaaagtgaactttgtcgcttatggactgaaagtttattgcattccaacagctcattttatgttgggcatatcgatgcatttacttcaaaactttttctactggaagaaattacctcagaagaattaaaagaaaagctttcagcactcaagatttccaatttatttaacatcctccaacacattctaaagaaactaagtagcttgcaggagggttcctacttgttatctcatgcagcagaagattcttcactcctgatttataaggcctctgatggaaaagttactaggacagcatacaatttgtataaaacacattgcggccttcctggtgtaccttccagtctctcagttccctgggtcccattagatcccagcctgttattaccatatcatatccatcatggaagaataccttgtacttttccaccgaaatcactggataccacaacacaacaaaagattggtggaacgagaatgcctacacgcagccacaggaatccagtttccatggaaaccaaaagcagttgcttgcctgctcagcaagttgaaactgaaggagtggctccacataaaagaaaaataacttgaggactgtaccatggaaaactaaatttaaaaaaacagttataacagtgtttaatttagataagtttgagggaaaataatcagtaggcaagaggaacatttttcctgtagtagctagagtgccttgaaaaaatgtgttggctatgtgaaggaatatttcaactaaaatggaatggtatgcttttcacccttgaagtttgaggaggatcttgatatgttttaacattatcatggcagggaaatatat

SEQ ID NO: 978 - DNA, 1592 bp, Homo sapiens
  misc_feature (1581)..(1581): n equals a,t,g, or c
  misc_feature (1589)..(1589): n equals a,t,g, or c
gctgtattcccccttccagttttttcttccccttttcttatttctttcttgctctcctctttcagcccttcaggatttccctgctacttgggttcttgtcttgaaacttccttacacttttactgttttttttttacttccctttttcttaatcttcatctctttcctcaattttctttccttatcttccctacccttcttattatctttcttgtttgtccatgtaatttcttctccctgtttaccacctctgaccttcttgtatttcctttcgctccctccctattactccttcctttttcttgtccttcagtttaattatttcaaacacatcacacataaggcctgtcattcccttgatttctaatttatcttttcaacctctaataaatttracacagaraatatttccccattcactttgctccccatctactcagatctatcaacttctctgatggttatttgaaagtttagtacttaaaaatgtgtcagattaaaacttgtttagaaacagccagctagctggagatgaaaaatatataagagcttatttgcaaggtggttaatacatgtataaatactacagagttgactgtatataggtatgttgtagatacattaagctattctgttctctgcttcatctcttagattggtggaacgagaatgcctacacgcagccacaggaatccagtttccatggaaaccaaaagcagttgcttgcctgctcagcaagttgaaactgaaggagtggctccacataaaagaaaaataacttgaggactgtaccatggaaaactaaatttaaaaaamcagttataacagtgtttaatttaggataagtttgagggaaaataatcagtaggcaagaggaacatttttcctgtagtagctagagtgccttgaaaaaatgtgttggctatgtgaaggaatatttcaactaaaatggaatggtatgcttttcacccttaaagtttgaggaggatcttgatatgttttaacattatcatggcagggaaatatataaagaagaaaaatatttttacattaaaccttttctaaaaattgtaaatagaaaaataatttggttttttatcaagaacaacacttatcgttatgtattgtgttagttatattgccagtctgttgcgactgactcaaaaagttaaatgttgccactgctgaagatgattatgagcatcgcaaactttgtttctgacccattttgacagtttttatatactcctttaaaatgatgaatgttacaggttaataaagttaatacctttaaaaacttggtgaaattccattacagaagccaaaaataaaaactccctgcctctgaaaagtcagattactgacttcttgtttggcaaccatcagtttgtttaataaaagaaaaaatttggtggtataacatgtttgatgacagatgcctctatctctagattcaagctgagtgttgaaatacactgctgaaagcaaagagataggtatgttttccagaaaaaaagtcagtgtcattgctccagatgacaaggttaatgtggtaaagcataagcttttttttttttttgnaagggagnctc

SEQ ID NO: 979 - DNA, 1931 bp, Homo sapiens
ttttttttttttttttttgtattcttgccagtacagtatatggtttttctaccccaattacatactgggttttgtaccacatcactaaaggcccaaatcattgaagatacaaaaccgtacatgcaggctggttgtctggttagtcaatggctgatttgcttcaactgtctagtatgtatgtgcagcctgaaactggctccttaaaaggaaagccgggtcagtcatcttgaaaaaatgacatgtaaaagtaaatcgataattgttttgagagacggtacatgttttaaaggttggccttaagcttcagtaacattgtcattttgtgaccttttgttgtcacacctgtaccctaacctgacaggaattaactactgtttttttgtggggcagaaagcaaaacctggtgttgtgacttttatcctaatggttcttaggcaaggttagtgagaagaaacacaaacccagatgcatgcattgtgcattattttgtagacaagctactttttcttctgtccctttaacaaatttgcagcaattaccctccctttggggtctagagtgaaagctaatttgtgggtagatgagattgcagaagaatggatgtccatggctgtgaacactgcacactgcacatccatctccagtgctcacactgtgcagctaccactccctggctgcgtgccatgctgtcgggttgcagatttgcacacataaattcctcaggaagagtttgcatgagcatcacctcgcaatattctgtactgaccaaacaagggatttgaacgtttttcagcacaaaaggataacttccgagtggtggtctgtacgcatactagcaaaggtaatggtgatctagcaaacaaaattggtttctgcagttagaagtgagcaggagcacttgtattatagtatttaaataatcctggttaatctctttttaagccgagtaacccctccagattttgcctttttattattgaggctggctttattttcttctactttttttcccgttttatagcagttaattatttttgtgattattatgcaagaagcattgcccttgagttaaactgttattgtttcataagcagctattaaaataactgagcattgttttatgaacatacactaatctgagatactgaaaagctttgcaactaaaaagcaaaacaacctacattagtgcatctagccattgtttggatgttttgagttgattttttatggtgcctcttttagcttggaatattacgtttactttaatccaagtctaggccttttaaagggtccttaaaattaaagttcagaatgtgaatccctttgacatctattacaggtttataggacctttttggttgtgattactgttttcaatacgattgtataaatgaagttaactttgtcagaagttaaaatggaggtcataggagttcctggagaaatggctctcctgtttctttcattaccccactgaagttcaccccagtttctggccacaagaatatgagaaaggaaccctgttgttttccaagggaaatcattcctctctgtccccactgttgattaactaaagtcctggacaccttccttcctccactggccaagacccaccttgacccaccttgaacctcttttcagagccgagtggcatgaatatgtgtactgtttctgcttctgttgatggagtggctgtgggagaattaaaggaaatgctaatttgagcttcattcataggggaacctactatatattgcatccctgctggttggaaattatcttcatctctggactgcattgtttagaaaaatgttaatggcttacaattctgagaactttattgtgtggctctggggttaagaattctgtggtttgaaaaaaaataaatattttgtattgattcaaaaaaaaaaaaaaaaaaaaaaaaaaaa

SEQ ID NO: 980 - DNA, 743 bp, Homo sapiens
tctaactgtggagtggattaaggagatttgcaaasgacaaagggakgaattccttactttaatctgttatcatttttcctatgtttccytctttgttcagaagcccagatgcatttttataactcagttttaaaaactttaaaatagttaccttgccttttaggatgttcttatcccacccataatgagagttgaaaggggatggatagctgctccccatgcccttcccactttttggaataggccgtgagggtgtgaggaagaaggctgtcttttgtacataaggacaaaattgtttgttttacataaattttgttacatatttttgctaatggctttgtatgtaacaagaagcgagttgccaaactacctgttgtacttttgaattttctgattgaattacagactgcgaacaacggctttcagaatgagggacttccatcagactctaatgataatagtagcacaaattgaaaacttccccaaagctttcacagaatattttctcataataaaatccaagtgaacagataattagaagaaacccttttccttcagggaaccaagcaactctattttagtactgacatgcattattttcactgtgaattcacttttttattgcatgttcagatgtccctctttgttttttttttttgtaacattaactgcaatgatgttcttcctggaattcatgaaaatataattaaaacacatttttaaacaaaaaaaaaaaaaaaaaa

SEQ ID NO: 981 - DNA, 567 bp, Homo sapiens
  misc_feature (48)..(48): n equals a,t,g, or c
  misc_feature (68)..(68): n equals a,t,g, or c
  misc_feature (73)..(73): n equals a,t,g, or c
  misc_feature (545)..(545): n equals a,t,g, or c
  misc_feature (547)..(547): n equals a,t,g, or c
  misc_feature (562)..(562): n equals a,t,g, or c
cctggggaaccaaagcccacccctaggggaaaaccagggcaaacgggnggaccccctagctggtatcngccgncaaaattgattgccttgcytggtggtggggaaaaaactcccacacatttggtcagagaagttttctgtctttattgtggtgtgagagcagaggaaaaaagtttgttttttccgctcagactttgttttaaggaacaggggagagggaagttctgtggtttttgaagttcttagatacgtgtgtgtagctttgtgtggcattatatatagcattatattattttctacccttatctactcatacagaaattgcacagtaaaaacatcaaagtttattcataaaatgtggatctattgcagtcactaaaaatgttgcagaacagattttaatgactgaaagtgttcatgataatatattcaatgaaaatatggttaaaaaaaaaaaaaaaaaaaaaaaaaaaaaaaaaaaaaaaaaaaaaaaaaaaaaaaaaaaaaaaaaaaaaaaaaaaaaataaaaaaaaaaaaaacaaaananaaaaaaaaaaaaaanaaaaa

SEQ ID NO: 982 - DNA, 366 bp, Homo sapiens
  misc_feature (261)..(261): n equals a,t,g, or c
  misc_feature (343)..(343): n equals a,t,g, or c
  misc_feature (360)..(360): n equals a,t,g, or c
agtgagaactaaacggggaatacagatagcagagattaaataggctataagaaaaaaaagggatgataataagaccatggtagtacataaaaaatttaaatgatctgggtaaatacatttttaaaaacttactaagtgcccagtgcggtggctcaggcctgcaatcccagcactttgggaggctgaggtgggtgggtcacttgaggccaggagtttgagaacagcctggccaacatggcgaaaccccgtctctactataantacaaaatttaaccaggcgtggtggtgggcacctgtagtcccagcttacttgggagacttgagccatgaggaatcacttgancccagttgggtgggagntttggg

SEQ ID NO: 983 - DNA, 411 bp, Homo sapiens
  misc_feature (45)..(45): n equals a,t,g, or c
  misc_feature (300)..(300): n equals a,t,g, or c
  misc_feature (406)..(406): n equals a,t,g, or c
gaacagggggttttgttttgttttgaaagaacgtctctgtctgtngcccaggctggagtgtagtggcatgatctcggctcactgcagccttaacctcctggctcaaacaagccccctgcctctgcctaccaagtagctgagactacaggcacctaccaccgtgcctgtctaatttttaaaattttttataaagatgaggtctctctttgttgcccaggctggtctcaaactcctaacctcaagcaatctgcccacgtcgggcttccaaagtgctgagattataggcgtgaccacccgtgnccaattgtgatcgtttttcccaaagaatgtatcacatgctaacaaaccatatatttatgtatttcattgttcatagtaactacaatttaaaaactaaaagaacaancaggc

SEQ ID NO: 984 - DNA, 943 bp, Homo sapiens
  misc_feature (5)..(5): n equals a,t,g, or c
  misc_feature (933)..(933): n equals a,t,g, or c
  misc_feature (937)..(937): n equals a,t,g, or c
gtttntgaggttcagtcttaaacatttgctttaagaaaacagtcttgaatttcacatgctgctatttttatattttgccattttacagtactgttttgttttgaattcatgcatatcattgaaaatttctcgttttcattttcttagatgacttcttgtctgagacagaaaaatttcctactacagcagtgcagtccagaggttaagatgtattagaattatacaatatcagtttaaaaatctgtatgcataaagaatgcaccactcaacttttttattcataagctaatatttttttaaagttacattaagattttttctcttttgcagctacatttgaaagtgatagaataaagagattttaatgagttatcactttttcagctgatatattcattttaatggcttttttgaaagttcctttttcatgaacacacccgagaaatcttaaatagacactttgcaatatttaagaacctaatgctgtttaattttggtacagcttccacattgcatgttcactttagtatttgcaatttgatatatttcatggtggcaaaatattagctctgttttgggacattttaaaatagaactatccttgttcgatagcataggaaaatgttctggtgattgtcagggtctcctaatatttatctcaattcttttataagtctatggaaattatttaattattttaaaacgtacacacttttcttgtaaatatgtcacatctgagttcaaaaaaattactttgaataccttaatatttgctgcatttttttccgtatatataacatgtcttctttcagaatgggaatatatgtgtgcctcccaacatttactgttaaagtgtgttatctttatatgtcaaactggttgaacactgtaatgagaataaactgcacagagtttaaaaaaaaaaaaaaaaancccngggggg

SEQ ID NO: 985 - DNA, 719 bp, Homo sapiens
  misc_feature (703)..(703): n equals a,t,g, or c
gccctgatcaacatgagatgaccgccgtgtggtaaactgatgaaccccgaccctgatgaacatgagatgaccgccgtgtggtaaactgatgaaccccgaccctgatcaacatgagatgaccgccgtgtggtaaactgatgaaccccgaccctgatcaacatgagatgaccgccgtgtggtaaactgatgaaccctgacccattaggctttggctacagaatgtggaaataagttgtgttactacatgtgtgtaatcctagggtgcaggacaccggccgggaggttccatagagtgatgggttctgcaggtaactcatcctctagtcctctgtaagctcctagaaggaagaaattatgtcctttagactaataaaattcctccaaaccaaatacagcacctactgtgaagacacaaagatacttttagaatagtaaaaactttatccattgagaaattccttaatgaaacagtatccaagaagtcatttgccagcagatttcttagaggtgcgataaagaagaggacattgccagtcgtcacagcagctgcaatagctcctctctattgttaaacagtgggatatcttgtgcaggttttcagttgacaatcaattttaaagattagtttcggtccccatcaatcaattatttattaacccatcaataaaaatttaaatgctctgtgaggtacaatagctwttwnaaaaaaaaaaaaaaaa

SEQ ID NO: 986 - DNA, 480 bp, Homo sapiens
  misc_feature (200)..(201): n equals a,t,g, or c
tgtttcatttacagcagcttttagaacgtaagccagataattatatgacattatctcgtttgattgatctcctaagaagatgtggaaaactcgaggatgtcccaagatttttctcaatggctgagaaacgtaactccagagcaaaattggaaccaggatttcagtattgtaaaggactgtatctttggtacactggaganncaaatgatgcccttcgacattttaataaagctcggaaagatcgtgactggggccaaaatgccctttataatatgatagagaatctgtttgaatccagataatgaaactgttggaggtgaagtatttgaaaacctggatggagacctgggtaattcaactgagaagcaagaatctgtgcaactggcagtaagaacagcagaaaaacttcttaaggaactaaaacctcagactgttcagggtcacgtacagcttcgcataatggaaaactattgggggggg

SEQ ID NO: 987 - DNA, 1994 bp, Homo sapiens
  misc_feature (231)..(231): n equals a,t,g, or c
ctctgttctctggaatgccatgatccatccactgtgcaatatgactctgaaaggggtagtatggtaccagggggagtccaatataaattataacacggatctgtacaattgcacattccctgcactcatcgaagactggcgtgaaaccttccaccgtggttcccaggggcagacggagcgtttcttcccatttggacttgtccagttatcttcagatttgtctaagaaganctcagacgatggatttccccagatccgttggcatcaaacagcagacttcggctatgtccccaacccaaagatgcccaatactttcatggctgtagctatggatctctgtgatagagactcgccttttggcagcatccaccctcgagataaacagaactgtggcttatcggctgcatttgggggcccgtgctctggcttatggtgagaakaatttgacctttgaaggaccactgcctgagaagatagaactcttggctcacaaggggctgctcaatctcacatattaccagcaaatccaggtgcagaaaaaggacaacaagatatttgagatctcctgttgcagtgaccatcgatgcaagtggcttccagcttctatgaacaccgtctccacccagtccctgaccctggcgatcgattcttgtcatggcactgtggttgctctccgctatgcttggaccacrtggccttgtgaatataagcagtgtcccctataccaccccagtagtgccctgccagcccctcccttcattgctttcattacagaccagggtcctggacatcagagcaatgttgctaaatgactgtttcagtatgatcagaacttagatataaggatgggtccttcagattttagcatttaggagtttcaataataaccattgcttttaaaggaaattaatagaaagcctcattgaatggctttcagctagcacatggctgtttctatattctgatgagcccaggctyataggtaacttgaaatgcttgctttttgttccctagttggtctaagggtctgtattggactaattctgaactacagacaaattggacctcaatgtcatttatttccctcatattaatgggagtgaaatgtctaatacttttgcccctttttatccagagttgtgggatctcaggattggaagagattttaaaggccacataggccagctagtgttcatgtgttctttataaaatttctcccatccaagtactaaccaggcccgaccctgcttagcttccgagatcagatgagatcaggcgcgttcagggtgatatggccgtagacgtctttacaaaattcctgacaggtggttactgaatctctctatgaactttccattcaaaactttccaagtttttccttatgtggaaccgaaatctttctttctcccgtgaaactttactactatcagataattgaagacagatctctttgtattctcttcaagcccaaaccaattctgttccttcaatctaaatagtggtaatatgaatgtttaagaaatgaaataagaaacatgtgcaggcactttggaaggtgctaagtgactgccctaaggaatgaaaagcaagggccaggtgggagtagcccagcgaaggcacttgggctgccaggaacaggaggcgtgggaaactctggcttaggaaaacatgaacacaggggcaacagaggcaaactgttgttcgagttaaatataaatctcaggctctttaaaggtaaaaggtttaaggataatccatttggaagaagaaaagagtgaggctgaaagtaaagccacatgacaagcatataaaaaaaaatgcagatgatacaaatatgaaagaggccttcagtgtttgtttattaagaatcttaatgcagtttactgatggattaaaaacagctaacattgtctgaaaattatgttacctataagaagttggaaataaataaaagcataatcactaaaaaaaaaaaaaaaaaaaaaaaaaaaaaa

SEQ ID NO: 988 - DNA, 611 bp, Homo sapiens
  misc_feature (105)..(105): n equals a,t,g, or c
  misc_feature (108)..(108): n equals a,t,g, or c
  misc_feature (279)..(279): n equals a,t,g, or c
tcgtcctgcctctgctccccaaagtgctgggcctgagacaccacacccagcctaaactaaaagccatttttagtaactcccaccaatgtggttactgttacaaanttntatggttcctgggtcatatttggtatcaraatgtgtatgtatatccttataaatatggaatgtagaactgataatagtttacctatcagatttgcaaaaataaggaaagatttttagcagcttgtaacaaacatatacatacttggataaataatttagaattttaacccnatggctcatatgctcttacaatattctctttgagggtaaaacatactttattcttaaacttaaagaacctttgataagccgtgaattatgatctcagtgactacatttctttttaggagttatatgtgggggaaggaaagaagtagctagcagggttaacatggaaagcaggagattatagacaagcatcatttgagcctttggatactacaaataatcttcaaaaatgacaggttttttggctttttgtttttcctttcctttagtgctagttgcagaatcctatcatattgtggttagatttcaataaagaatgtttaagattaaaaaaa

SEQ ID NO: 989 - DNA, 2497 bp, Homo sapiens
gaattcccggcgctgaggtcggaacgtytgcgtgtgtgcgggctggttttgtggcggctgctgctagagctggagcatttgccggtcagtataaaagattaaactctacagaagaatgcaatcaagtgatggcttttcctttagaatttgaatatggaggctacaggaacagatgaagttgacaagctaaaaaccaaatttatatctgcttggaacaacatgaaatatagttgggtgttgaaaacaaagacgtattttagtagaaattctcctgtattattgcttggaaaatgttaccattttaaatatgaagatgaagataaaacgttacctgcagagtcgggatgtacaatagaggatcacgtaattgcaggaaatgtagaagaatttcgtaaagatttcatttctagaatatggctgacctacagggaagaattccctcaaatagaaggctcagctttgacaacagactgtgggtggggctgcacattgagaactggccagatgctcttggctcaaggactcatactacactttcttggtagagcttggacctggcctgatgctttgaatattgaaaattcagactctgaatcatggacttcccacactgtcaaaaaatttactgcatcatttgaagcatcactttcaggggaaagagaattcaaaaccccaacaatttctctgaaggaaacaattgggaaatattctgatgatcatgaaatgcgaaatgaagtttatcataggaaaatcatctcttggtttggtgattcccccttggctctttttggcttacatcaactaatagaatatggaaagaagtctgggaaaaaagcaggagattggtatggaccagctgtggttgctcacattttaagaaaagcagttgaagaagcaaggcatcctgatttacaaggaataactatttatgttgcacaagattgtacagttcctgttagacttggtggagaaagaaccaacaccgactacttagaatttgtgaagggtattttaagcctggaatattgtgtgggtattattggtggcaaacctaaacagtcatattactttgctggatttcaagatgacagtttgatttacatggatcctcattactgccaatcttttgtagatgtcagcataaaggatttccctcttgagacattccactgcccttctcccaraaagatgtcttttcgaaaaatggatcccagctgtacaataggattttactgtcgaaatgttcaggacttcaaacgagcttctgaagaaatcaccaagatgctgaaattttcttctaaggagaaatatcccttatttacttttgtaaatggtcattccagagactatgattttacatctactacaaccaatgaagaagaccttttttcagaggatgaaaagaaacaattaaaaagatttagcacggaagagtttgtcttgctttaaagattagcacatttgtgcttgataagaagaattccattgaaaggggaaaaatgaagagaaacaagtatatctgaaatgtttattttcacaaatatcttaattttatatgttctttaaaaaagaacatttgaaaatataacagttaaagatatttttctaaaagagaaatgatttaatgaatcttgctttctaataaataaattgagtgattctggttgcattcctatttccctaagatctactagtgataattctaccttaactgtaagccttttagtcttcaaagtcttccacctgagcccattgttctcatggaggttttgtgatattaaccctcccccaaagactgggatcaccaaatagtttcaaaattctcagtttgtactraagaccagaagatcagagaaggaaactttaatgctgtctagcctcctgctattaatgcaatcaaagaatacttttgcatatgtcttgataattaaatagtatttgttaactgkgatatgcatacacttatataagcagaattatgagttaaagtaatacttrgcaatatgattttataatggctcctcattatgcttgctgttgaaccttttatgaggagtgaatataaagtattggttttccctcacaaatttaaagattatgttattaatactattataactgcatcaatcaagtcagataaaggcaactataaaatagtagtagtgtttgtttcctatctcaagggcgaaattttatgggaactcaatttattatgcagtttttaagtttaaaataccaagaaagatgtcactagattctcttctatgtgatttttgttttttatataaagcagtgtagtggtgtttagaagctgaggccacctgtaaggcaaatctgccttaagtgtattatgtgttacttaaaggcaaatttgtgatctaaaagtacaagagtgatttttgagctaggattataaaatacataataaagatgtgagaagataaaaaaaaaaaaaaaaggaattcgatatcaagcttatcgataccgtcgacctcga

SEQ ID NO: 990 - DNA, 652 bp, Homo sapiens
  misc_feature (19)..(19): n equals a,t,g, or c
ggaaggaggtttgttgttncatcaatgtttgtgaaatgatttccatacataaaaaatgtaatttacctgaactttgtcttaagactcttacattggattataggataacagataaataaactgtatagatacattcagtatcatacaacattttggaatgtgtatgctttcaggcttccaagataattaaattactgtcatgatacatttcatgcattttttatgacttcagtataaaacattcaggtgtgttagccttccctgggaagggtaaacttgtatgtgctttggtaaagtacttaaattccaatgtyccctatagtgcttgcattcattttgtgaaaagttttgttgtattgttagaacaattttcaaaggctgattttatgccttatctgatagaaatatagaatagatagttctttaattgcttactttttaaaagtaatataatatttaagttgcatttttattaatagtaagattaacatttaagtctgcatttctttaaatgttttaaatgtttatagcattcaatgtgtagttggwtttacttgactaaaaattagccctttaacgtttatatttgktgkatttatatttaataaaggcatctaatcttwartaaaaaaaaaaggcggccgtctagagt

SEQ ID NO: 991 - DNA, 323 bp, Homo sapiens
  misc_feature (309)..(309): n equals a,t,g, or c
ggagatatcttctaaaagtgaactggatgaattgcaggaagaggtattatggcctgtcagcattccctgtgccctcmaaaccttaggcctagaatgcggagctgccaacataacattcacccttttgaacagatggagtcaggcacactaacacagccttctgtcctcaataacacagccattattgccacttgctcagtcgtcaatgtaaaccctcagagtcagctgaactattttaggccaaacatactgtttttgtaaagtatttttcattaataaatctataagacagttctatttaaaaaaaanaaaaaaaaaaaaaa

SEQ ID NO: 992 - DNA, 403 bp, Homo sapiens
  misc_feature (376)..(376): n equals a,t,g, or c
  misc_feature (386)..(386): n equals a,t,g, or c
  misc_feature (395)..(395): n equals a,t,g, or c
tacaaggctttggccgaccaagtgtgtaccatgctgctattgtcmkcttccttgaattctttgcgtggggcctkttgacaactccaatgttgactgttctacatgaaacattttctcaacacacattcctcatgaatggtctcattcaaggtgtaaagggcctgctctcttttttgagtgccccactcattggtgccctgtctgatgtgtgggggaggaagccctttctcctcggsactgtattctttamctgsttcccaatcccactgatgaggatcagcccatgttttttaaaaaagaaaacacatcagtggacgtgaatgcaatgatgtcttatgaatgctcacacagaagcttccattcgtgaggaatgcanggaaaagcanaagatggantaagaagt

SEQ ID NO: 993 - DNA, 768 bp, Homo sapiens
  misc_feature (14)..(14): n equals a,t,g, or c
  misc_feature (40)..(40): n equals a,t,g, or c
  misc_feature (676)..(676): n equals a,t,g, or c
  misc_feature (707)..(707): n equals a,t,g, or c
ccaggccctataancccggcaccttggggaggctgaggcnggaagcaccacggagccccaggagttggggacccggctgggccacatagcmagaccctgtctatttttttaaaaaagtaaaaaatagaaattatctcactacttaaatcccatttttttcacttcatatgaaagaacatattgatagtatattctatattatttcatagatctgtctgaaagagattgggaacaaaaatatctaattgagatattctttaattttttacatagcagctttattttttttattctgtagtatcagcgaaatcagtcatgtttataccttgaatataaatatcaggaatcatgcaattatttctactatgtatttagtagtatcttatatttgtataacattattacattttgcaaattagtatcacaactgctaagtagatgtttctgagtattagaaaaatcagtgttattacctgcaggatattaaaaaacatttgaaaaagagaaaaagaaaaatcagtgtttagaaatgttgatagttattgaatctttgaattgaattttaaaaatccattctagtaatcagagtatactttttttatagaacaaggtggcaggtggggagccctttacccttctggtgaagttaaaccataggaagtttacaatttgsctnttcacaaacmttagcagtccsgggcatggtnggctkragcctgtgratycccrgcatgttggggaggcccgagttggggagggttgcctgag

SEQ ID NO: 994 - DNA, 134 bp, Homo sapiens
  misc_feature (131)..(131): n equals a,t,g, or c
cctgatatacaaatacaactatacaaaattacaaaacatagtttgkatgaaaaccaaaaatttagtccctaacatttgacttgcactgttgccattgcacttcatgcagcttataggcacctttccagggnaag

SEQ ID NO: 995 - DNA, 1134 bp, Homo sapiens
  misc_feature (1120)..(1120): n equals a,t,g, or c
  misc_feature (1127)..(1127): n equals a,t,g, or c
gtcggacaaagccctcgcgtcggacccttgccagaactcaattaatggatgcctcgaagttgacgtacatatatattcagaaatgttttgccacctgagacctatgaggaggttatgtctagagaagatatttccacactggtttcccttttcaagagctttatcgggagctgaagcagtcaatgccttgaggcctttctattttgcagtacatccagatttctttggacagcaccccgtagaaagggatgatacatggaagagttttcaatgccctagtgatttttccttatgatgcatgctgctggaccactcccctacaacatcagttaatgtgtgctccaggaatacaaactgatatgaaaaatgacttatggtagatgtagttaagacagtcaatatattttaacattagaaaatacagtcagtccttcatatccatgggttttacatccatggattcaaccaacctcagactgaaaatattaggggaaaaaaatacatctgtactacacatgaacaaacttctctttcttgtcattattccctgaacaacacaggataacaactacttacatagcacttacattatattagatattataagtaatctagaaatgacttaaagtatatgggaggatacacataggttatttgcaaatactacactattttatatgagagacttgagcattcgcagatttcggtatccacgggaggtcctggaaccaatcccctatggataccaagggactgctatgtattacaaagccacatgctttggaattacttcagtgttccttctattttcattaacactgatatctagtttaatatgaaaaggaacttgaaatcttgaaaattagaacatcgttatttttttctacttgcaatggaaaatctattttgcttttttgcttctaggaaaatattckgattatgatatgtgatatgttggctactcaaagtcagaacttttcaaagtaatcagtaaattgratcaacagaaaaatattcattaactcggggatgcawtaataaagtttttaaattcaaaatgtatagaaaaatcaagcttagtaatactttaatattattctaccaatgtatttttttttangttaaangacttcc

SEQ ID NO: 996 - DNA, 747 bp, Homo sapiens
ataaatatttgtgagcgagttgtagaacccmttcmagratggcaatttttgaactagtttctaaacmaagggrattgtatcttcamcagaaaatattatgtgagctttctgggcatatkgatctttttgtagatgtgaataagcatctctttgatggagaagtgtgtgccatcaatcactttgtcaagttgctaaaggatataataatctgtttcttaaatatcagagctaaaaatgttgcacagaatcctttaaaacatcattcagagagaactgatatgaaaactttatcaaggaaacactggtcatctgtacaggattataaatgttcaagttttgctaataccagtagtaaattcaggcatttgctaagtaacgatggatatccattcaaatgagagacctaaaatatattaacattttaattaagaatacttgatcaacattttttgaagttcaatttaccatattttataaattgcgcattctgcacagtggacaagtttgcaattctgacttattaaaatttcaaattctgcatatcacaaaatctccttatacttttggtatggcttgcagcatttatgagttttccaaaatatagaaagcagtaggtcagtaggagcaaactagccaacaggtactgtctttgaatttactactgtaagactaagcagtgttactggacacagttttaacttgtkcaatctgcttcaaaaacaagaaaaacaacaactatgagttatc

SEQ ID NO: 997 - DNA, 610 bp, Homo sapiens
ggcacgagggaaatctagacctccaagtgtatgcagcagagtctcctccatcttgaaacaaacaaaacattaggctcctgttgtatcttggtttagtaacaggcccttaattaacttatttgtacatgagtcttccagagaacactgttttatattaactttcagttgaaatctttcagatattttgaatctctgaacaaccattgtcagttgtgaatgatggtaaattttttggcatcaagtctcataaccccaactgatagaactgttgcttatctgtcttccttaagtattttttagggttttgtttttttttttgtttgtttgtttgtttgtcttcacttttcccccaggtctgttgagctgtatgagattcattcatacttcatttattcattcaactaatatttgttgaacacttacatgtaccagacattattaagtgctgggtatatggtaatgaacagaatagacaaggcccctgcccttttaggggagacagatgagaagtaaattmcgggttatgagaaatgttatgaaggaaaggmcaacaacagacatgtcttagtctagggtacatggctttataggaaagtaacattctctatct

SEQ ID NO: 998 - DNA, 394 bp, Homo sapiens
ttgaaaattgatacaaacagaatcaggacagaaaatggttccattttgcccagtgttgtaccacaagaacacaacaccttgccagtatctcaggcaccttccaaaccaaatctgacaagtgaacatacttcatatggcttaattttaacaaaaccatacgtcagaccattgcctcccagttaccttgatgaacggtatcttaktatgccaaaacgcagaaaatttctgactgatagagtakatgcctgttctgatcaagataacgtgtataaaaaatcagtgaaaagattaagatgtggcaaatgcctgaccacctactgtaatgcagragcacttgaggctcatcttgcacaaaagaaatgtcagacactctttgggatttgattcagatgat

SEQ ID NO: 999 - DNA, 1481 bp, Homo sapiens
  misc_feature (1)..(1): n equals a,t,g, or c
  misc_feature (223)..(223): n equals a,t,g, or c
  misc_feature (1059)..(1059): n equals a,t,g, or c
nccccccccttkttttttttttttytttttttttcaggtctgaaatggactttaattggcttttgtctctagaattacccacccgttcctgcgctctacggttctccatgccccctccagtttgggggtctaaaccraacaggagaggtgcaggggaccaggaggtgtcctggcacaaaggttcgggggtctccctggcaaggggtcccagggcctggagccnraggcccagccaaaagcacacagcatcaaaacatgtttttagtgggaagctccaggccctgcccctccccgggggcctcgaggtcggggagcaggtgggcgtctgtctgcctccaggtcatggcagtgcaggcggtgagctgggggccggcaggggcgcggacagtgcggcgtggtcgaacagagggttgcgcacctccatttccccggtcggggccaggcccgggcactcgtacaccgtgaagtctccgtcctcattctcctcatccgaggaggccgtgtccagctccttgggtggctctttatgccgctccaggcacagcatctgttgccgttggtgctggtagtggtacatctccgcgctctgtgccagccgctggtccccaggcgagatccggggagctgcaggtgagccaggggccttcgcagtggcgtagtcggccttctgagtcaggcggatctcacgctgcagcctgcaccagcagagggaggctacggagagggcggctgcaccggccacacagaacgccaggatcagcacaagggcgaggccgtcgccttgccctccccggggctccaggggcgacatgtgcaccgggtcggatgacacaggggagcccagggaggtgtggggcgtgggcgtgggggttcctggagtggaggggaggcccagmtccagcccctgccccctgccgagaagcccagggtggcaggctccgggagccgctgtcggtccttgggtaggggcggagttgagtgtccagactccttccgggcaagctcctgggccaggaagtcaatctcatcttccagtctgggctggggccggcccccscntggaggccggcgcatcctgggcacacagagcccttgctggtcctcctggaagggctgaaggcagggcccacaggcatgtgcaccaggaggacaccttgcccgcctcttcagggcacagtccaggctcccgggacaggcggctacatccgggtggccggcggcggctccacgcagggcggcgccgaggacgaggccggagagcagcagccgcagcagccgcaggtgccgcggggagggcggaggcagcggcgtcgccatccttcagcgccgccgccggggcagcatggcaccgcgaggccaggggctcggcgcgggctccgggctccgcgtcgggagcagcggaggcagcgggggaggacgcaggaggaagaagaggcggatgccaaggaggagraggaggaagaggaaaggcacgggcggcg

SEQ ID NO: 1000 - DNA, 415 bp, Homo sapiens
  misc_feature (25)..(25): n equals a,t,g, or c
  misc_feature (30)..(30): n equals a,t,g, or c
  misc_feature (252)..(252): n equals a,t,g, or c
ccacgcgtccgcggaacgctggtcnctgancgttctgtgtggccggtgcagccgccctctccgtagcctccctctgctggtgcaggctgcagcgtgagatccgcctgactcagaaggccgactacgccactgcgaaggcccctggctcacctgcagctccccggatctcgcctggggaccagcggctggcacagagcgcggagatgtaccactaccagcaccaacggcaacagatgctgtgcctggagcggnctgaggtgggcygastgcccacttccagactgggccactggcacctcgagggcatggggaggacccagcgatccccccccacccaggcataaagagccacccaaggagctggacacggctcctcggatgaggagaatgaggacggagacttcacggtgtacga

SEQ ID NO: 1001 - DNA, 1280 bp, Homo sapiens
agcaccatctggagtcttcctgtagtggcaaaaaagaacagtgttgaaattggaaaggactttgtgttatttaggttgttagaatgagccttaccaataataagagccctgagcccagaaaaaaggactgtatagtttaaagggaggattgaaagggaggtaaaaaatcagattagaccagttcttggcctatgataagttccaaaaataccatttatctactatttgaaaaaagaagaggatatcccttcctacagtaaagggtatgtcagctacatgaagttgtaagaaaagcttccagtagagcttcttatattaaagaagttgatggatatttttgaatttctggtttgcctgaatccacctgcagttaccccgatccgtttgcaagaaccagatcgtacttgaaactatagtggccacactctgccttcctgagtcccttccagtcatgtgtgcatcatgtctctttgccaagggaggggagaaaggaacttttaaactgcagttttaactttttctaagctgtttcttgatgggagaggttctgtgcaaaactaccacattctgtccccaaaatgtggaatgcatccaaataggagtcttctgcctcttaacttaaaagaacataggaattttgtttttggtttctttatcatgctacagagagtgaatacactggaattcagacaccgactctgagctgctaggaacctcatttgtccatgtgcaaacgctgtattccaaggcctgtgaatggcagcctgaggaagttttgcatgcaggctgtgttttcgagcaggactaacaactgggaaataagcaaaaaactgcatcgatccccagcctggtgttgttcttccctatacttcacactgaactcaggatgggaagaaaaaggaaacaagctttggctttttccatctcaaaagtattgtggcacctcaacatttcagtgttttgctttttaaaaaatgccctattgtaagttgttggtttatactgtataagtaacactagtagctgttttgaataacataggtgctcttcctcatctcatctcctacaccgtggtgagcatacagagtgtcctgatttgtgttaagtgactgagaagatgttaattacttttgaaaaaggatcatggtttttgctctactttataatcaagacaagtgtttattaaaatactgttttggaatgttggctgtaatgtaacagcaattttcataataaaaggcattcatctttaaaaaaaaaaaaaaaaaaaaaaaaaaaaa

SEQ ID NO: 1002 - DNA, 1057 bp, Homo sapiens
  misc_feature (989)..(989): n equals a,t,g, or c
  misc_feature (994)..(994): n equals a,t,g, or c
  misc_feature (1012)..(1012): n equals a,t,g, or c
gctttatgacaaagaatataattgggaggatgaagtgtcttaaaaattgtagagaccagctcactggaatgtttttccatccctgtattcatggcttgactttgtgactgctctacactgcatgtctgacattgcagagtgagctatgttgaggtaaactggttggttgtcattattttgcaatcagcctggtctctcccatgaagatgtcgtgtgcataagcacaatcatcactgattagaagatcacagcagaatacccttggattagagagaagttcgtaccttgcatttctctgaattctagtctctcataagcactgctttgctggatgattttcactgctttgtgttaatgactttgagcgatctctcacatgatggggttctttagtacatggtaacagccatgtcatcttacacacctagcattgtgaatgctgtagtgacatcctttataggcaccttacagctcaaaacttttgtttcatttcatgccttacttatcaaaaaggcaggaaagtaggtatgatctctaaagtaaaaaaaaaaaaaaaaaaaaaaactttttatagaaagctcataaataatcatgtcattttgcaattttgttaccaaaatttcccccaagagttttcaaatattagttctgcaatgtggctatgaaatatgcactgaaatataccttttaatttgagaaccagtggttagaataagctgtgatataaagtattttcagtgtacttttaaaggaactataaggccctccagcataaacgctaaaagaatagatggtagcacaggccatgagggctgggggagagaagcagagtgaaccttagaaagatggctcagctatttggagcactggatattttactgaagttatttactgaggcaccatcactgttttgactgtacagtatagtttttcataaatttcatcacatttactttgttcagaatctgggcttgaatctttgagttggncaaangcctatggtttcttttanaaagtttcatcttgagctaatgctacagtttaaataaaatgtatg

SEQ ID NO: 1003 - DNA, 1095 bp, Homo sapiens
  misc_feature (1043)..(1043): n equals a,t,g, or c
  misc_feature (1058)..(1058): n equals a,t,g, or c
cactcagctctggtggtcctgagcgtggggaccctcagctccctgacactgccctgtctccacaggcccataacgacctgtgcgcacgtatkaggcaaagctgctggccttcgggatccctctggacaacgtgggcttcaagcccttggaaacagctgtgatcggacagacgctgggccagggccccgcgggactggtgggcaccccgacgtagctgcccccctggggggccacagcccagagaaccagcctaggaacactcgggatgacaccccttatcacaccaaggacagcaagttttttagattttatcatcagcaaatgaaagcttttcacatgttcttgccatcctctttcctggctctgtggaggagaaccacctgcaggactctcacccatggtgtccctgtcgctcccttccctgggtgccgcacgtccagcctgtgtccaggcctactccctggtctcacctccgaccacagtcggcggcaccttctcagagtgccccgcctcacctgggggttggggcagtgcgcgctgtgctgcctgtcttcgcgccactgttgtcccaccgaatggacagctttgcaggtgctggcactaacttcattgacacctgagtcacagctgcccagtgggattctccagggggccgggacttccctaggaagtggtgagccaatgctccctgatgagcacaaagcccgctctgttgagggctgggtgggtgcagccagcgtgcgggaaagggcaggcagcctcccgctgccagtcttcgctctaactccctcggtaggtgatgtaggaccaggggcacgtggaacttctgggccttgctggtgatggttaaaacaacctgagatggagaggccaggagagagtataaggggatagcagcaaaccacctatctggccccaacacacctgagagaattcagcagcccagactgagggtctgggatggggtgaaccttccgcaccagagggacactccacagaagccacagcccagtaagtcaggcgcttctgcggcggctccagtntggggtgaggcagtnaggttaggcccagagagctggagttggctcagatgaa

SEQ ID NO: 1004 - DNA, 378 bp, Homo sapiens
ggcacgagctggtctcgaactcctgacctcaggtgattcatccatctcagcctcccaaagtgctgggattacaggcgtgagcactgcgctgggccaggtacatttgtgtatgcagtcttctttttaaatatttttaaaaatattattttaaaaaatattttgtagagacaagctttcactatgtttcccaggctggtctcgaacttctggcctcaagcgattcttttgcctcagcctccaaaactactgggattacagcatgagccatcatgcccagctatacagccttctaatttactaaataacgttratgtgcttgatcatgttccctggaaaacagaccctgagaaggagatttgcatgcaggaatatttattc

SEQ ID NO: 1005 - DNA, 440 bp, Homo sapiens
  misc_feature (395)..(395): n equals a,t,g, or c
  misc_feature (418)..(418): n equals a,t,g, or c
  misc_feature (433)..(433): n equals a,t,g, or c
tggaactccgggacatccctctgcgtccccaccctcccgacccccaagctcctcaacgccgaagcgcccccgaactgccggaaggaatcctaaaaggaggcagtcttccccaggaagacccaccaacctggtctgaggaagaagatggggcctccgagcgagggaatgtggtggtggaaacactccacagggcccggcttcggggccagcttccctcctccccaacccatgctgactctgccggggaaagcccctgggagtcctcaggggaggaggaagaagaggggcctctgttcctgaaagctggccacacatccctgcgcccaatgcgggctgaggacatgctcagagagatccgggaggagctggccagccaaaggattgagggggccgangagccccgggacagcaggccacngaagctgaatcgggnccagctg

SEQ ID NO: 1006 - DNA, 222 bp, Homo sapiens
  misc_feature (222)..(222): n equals a,t,g, or c
gtgggttgataccccttcgaattacccctaaaggacaaaacggacccacgcggggggccgctctagamtagtggatccccgggctgcagaattcggcacagccagattgggttccctttgcaaaacatcccccttcctggagatgatgatgccatcgaagcccgggccagggcctgacctgcaggcacacacctggccagtggctctgaggtccccgggacn

SEQ ID NO: 1007 - DNA, 772 bp, Homo sapiens
  misc_feature (769)..(769): n equals a,t,g, or c
gtgcagcatcaacgggaccctgtaccagcccggcgccgtggtctcctcgagcctgtgcgaaacctgcaggtgtgagctgccgggtggccccccatcggacgcgtttgtggtcagctgtgagacccagatctgcaacacacactgccctgtgggcttcgagtaccaggagcagagcgggcagtgctgtggcacctgtgtgcaggtcgcctgtgtcaccaacaccagcaagagccccgcccacctcttctaccctggcgagacctggtcagacgcagggaaccactgtgtgacccaccagtgtgagaagcaccaggatgggctcgtggtggtcaccacgaagaaggcgtgccccccgctcarctgttctctggacgaggcccgcatgagcaaggacggctgctgccgcttctgcccgcygccccsgcccccgtaccagaaccagtcgacctgtgctgtgtaccataggagcctgatcatccagcagcagggctgcagctcctcggagcccgtgcgcctggcttactgccgggggaactgtggggacagctcttccatgtactcgctcgagggcaacacggtggagcacaggtgccagtgctgccaggagctgcggacctcgctgaggaatgtgaccctgcactgcaccgacggctccagccgggccttcagctacaccgaggtggaagagtgcggctgcatgggccggcgstgccctgcgccgggcgacacccagcactcggaggaggcggaacccgagcccagccaggangca

SEQ ID NO: 1008 - DNA, 552 bp, Homo sapiens
  misc_feature (429)..(429): n equals a,t,g, or c
  misc_feature (510)..(510): n equals a,t,g, or c
  misc_feature (548)..(548): n equals a,t,g, or c
ggatgttggaaactggctgtagagccgcagtggttcctgatattaaagaaatgttgtttaaagctgtttttcttacaccctatttgcctttgaaattttaaaagcattcactttacacatctgttttgcctttttacaaaactttttttaaagagagccctctgccaccaaaatatgcttgacctcatcatcctgagatcactgctatcaaaatatttggtgtatattttttccctagctaatttgtgtgtgtatatacattctatataattgttttattgtgtacaatttgtgtaactattatctgctttaaaggtttaacagtacctttttctgtcattaaatagtgtgcaaaagcatgtgtagtaactgcactatatgactgtctctggtccagagcataaatttcttcactggtctcctgtacangggtctgcaaacttttaagttggctagcctaatacatatttttagactttgctggtgatatggtctcctgtcctaactacnggaccctggtttttttttaagaacaaaaaacgccgcangctt

SEQ ID NO: 1009 - DNA, 681 bp, Homo sapiens
aattcggcagaggcagtggagcgcaacttggtgcgggttgccgaggtctggctggatgagtataaggagctgttctatggccatggagaccacctcatcgaccaagggctagatgttggcaacctcacccagcaaagggagctgcgaaagaaactgaagtgcaaaagtttcaaatggtacttggagaatgtctttcctgacttaagggctcccattgtgagagctagtggtgtgcttattaatgtggctttgggtaaatgcatttccattgaaaacactacagtcattctggaagactgcgatgggagcaaagagcttcaacaatttaattacacctggttaagacttattaaatgtggagaatggtgtatagcccccatccctgataaaggagccgtaaggctgcacccttgtgataacagaaacaaagggctaaaatggctgcataaatcaacatcagtctttcatccagaactggtgaatcacattgtttttgaaaacaatcagcaattattatgcttggaaggaaatttttctcaaaagatcctgaaagtagctgcctgtgacccagtgaagccatatcaaaagtggaaatttgaaaaatattatgaagcctgaagtgtaactgatgtttttatatagtaaacccattaaatactgtgaaaataaaaaaaaaaaaaa

SEQ ID NO: 1010 - DNA, 689 bp, Homo sapiens
  misc_feature (639)..(639): n equals a,t,g, or c
  misc_feature (653)..(653): n equals a,t,g, or c
  misc_feature (672)..(672): n equals a,t,g, or c
  misc_feature (686)..(686): n equals a,t,g, or c
gcgtggggccgggcggtgcggtcgcgggctggggcagtgcagtgagtagcggtcttggggtgtgcgatctcgctgagcctcctcacacggttcgtcgtctcgggttcgagcccagtggcttagccactcgccatggactcccagaaagaagctctacagaggatcatttcaactctggcaaataaaaatgatgaaattcagaactttattgatacactacatcatacactaaaaggagttcaggaaaattcgtccaacatactctcagagttagatgaagaatttgatagtttatactctatactggatgaagtaaaagaaagtatgattaactgtatcaagcaggaacaagctcgtaaatcccaagagttacagagtcagattagtcaatgtaataatgccctggagaactctgaagaactattagaatttgcaacaaggtcattagatataaaggaacctgaagaattttcaaaggctgccagacagatcaaggatagagtcacaatggcttcagcctttcgcctttctttgaaaccaaaggtcagtgacaacatgactcatttaatggtggatttctcacaggaaagacagatgctgcaaactttgaagttttttgccagtccccaaarctccaanatagatccagttanaattgtttgggtgggcaanataacttcctgttncaa

SEQ ID NO: 1011 - DNA, 543 bp, Homo sapiens
  misc_feature (537)..(537): n equals a,t,g, or c
gatgattgttaggatattttaacaatgaagtatttttaaattaaggtatgtattttcttaggcataatgctattgcacacttagtaaactacagtatagtataaacgcaacttacatgcactgggaaactgaaaaaattatgtgacttgctttattgagatactcactttattgtggtggcctgaaaccaaacccgcagtacctgtgagcatgcctatatttgatacaataggaactatattgcaggtagtaaaaaatgatgaatagtgttagttcaaagcgatagatgatttgtatgtccaaattaaagaaaagcatgtatgggaaaaagattgtcatttttatgtaaatrataaagtgctttctgaattgtatttaaagaaaagaagattttataagtccaaagaatcacttaatacaatgaataaagggtaataatttaccacttttggattacctttwatttaagacataaatttttcaactcataagctwtttaaaawcttttcacttaaraaacccggtggaaaatttggnttaagg

SEQ ID NO: 1012 - DNA, 469 bp, Homo sapiens
aacctttccacactataaatgatatgactactgtttggggtttctgggcccccatccgtgtacgtatgtggcatttccaggtatgactgagtgtgagagacatgtcagaggctcttcagtgatttcttgctattgaccgatgcttcactgtgccaaaagagaaaaaaaatgttgggttttgtaattaaattatttatatatttttgaaacccgaattgaaaatgttgcaggcaacgggctacagctttattagtggttctctaactgtggtctccttgggccaagcaatttctttaaaggaaaagttgattatgtatgtggggtgccaggaccactgccttgaaagcaagtgtgatttttatttttaatattattttatttgtgtctgtgtacatattcatgtataaattttatgaaacccaagcatagtgcttattttttaataaaacaactgacttaaaaaaaaaaa

SEQ ID NO: 1013 - DNA, 543 bp, Homo sapiens
  misc_feature (454)..(454): n equals a,t,g, or c
  misc_feature (485)..(485): n equals a,t,g, or c
  misc_feature (533)..(533): n equals a,t,g, or c
aattttttttttttttttttaaacggtcaacacaagtttatttattctcacataacaatactgagtggatatttaggtcagtaaggcacagttctcctccacttaggaatctcccatcttcaggccttgccttctccagagcctggtcaccatctgcttccagttggcagaaggagtaacagcacaggggagcacctgttggaggtctgtatgggccaggcctgggaaactgcacacctcttctggtcactttccgctggggagagcataggcacagagccacacttaaattttactttgagggaatgcagtgtaggtgtatgtccgacaaagaaaacaataattcggtagacaaataagtctccactccaatatttcaattacttacttaacttatgctctgggtatgtctccaaatttaacctaggataggaawtggaactctggaatyttnccactttccttcmagtttttttcactcactncaktgggcttcattttyccttccagttgctttaggswtacwtttgaangttttcccgg

SEQ ID NO: 1014 - DNA, 895 bp, Homo sapiens
tgtcttcatttttcctcctgtctgcattcctctctctctctctccctctctctcctgttcctctctttcttcctccctctccctgcctttccattttccgttccttgggtttgtgtgtctgcatctccatcttaccccttgcctgactgtaccccgtagacccctgtttctcctcctgcacctgtgtccccatctgcccttcttgttgctcctgtcatgtgtcaccatcttccctcctgtctgccttcttcctccacttgtgtcagcttgcatttttttattcctgactgagtcaccacacccctctcccctgatcaaagggaatattagtttttaatttggatcgactgaggtgccaggagaaactgcagtcccaggtatccagacagccaccaggatggtccctcgccccacccccaccgcctctccccaccttttccaacgtgttgcatgctgggagctggggggtgtgggggaaggggctgccggcttctttcaggaggctgaggtttggaggcaaaatcaacctgggagaccaccccggccgcggcgcctcagtggacaggtgggaggaaaagaaaacttcttaccttggaggagggacatcccgcttccttatccttagcttttttgttgctcctccccactgccccttttaatttatttggttgtttgcggagggaggggggaggggggtaggctgggccgggaactgtccgaggtgctgagctggggcgggaccggaatcctcccggtagggtcccagggactgagttggcctggggccgtgtccaaggtgccaatgatgcgggccgacagagcgggccgcactgtctgtctgtccgtctgtcccggaaagaactataaagcgctggaagcgcctgcaaaaaaaaaa

SEQ ID NO: 1015 - DNA, 763 bp, Homo sapiens
gggggcttcatcgctcatagaatatgttattttcaaagaagttcaagaattttcaagttgagcctttgaaaatcccataaattggttttagctaaacacttactagtagtgtctttaaattatttaatcaaccttgtcttttcaaggaaattacccacttaaagagatagttggtaaataaacatctatgccttttctcagaaatgatttgctgaactatgtccatattttacagcttagataatagtttatatggaaactattatacatctgctattgtgcaatgattgttaaattatactgaagtagctctagaaagacacatgtatacaaggcactattgtacacactttgctgaatattttgtcagttgtatttacaaagaaaggtactttcttaagagcatatatgttattaatatttgatatgattttaaagtcagaatagtacagattgctgagtattatactttaggctagattaattaaaattgaatactgaaagagattttttgagttgcaaaaagtttataaatgcaaagcaaaaagaaaacatttattttctgagtctgcaggagaaacaaactaaacattatagttttatagctgctatcttgttaaccaaacaggktgttcataatattaaaaatcttacgtagttgtgttaaactgaaccagttcattataccttatgcattaaattaaatatgttataaggtggctttacttgtctttataaaaataaatatatctactaaacatga

SEQ ID NO: 1016 - DNA, 353 bp, Homo sapiens
  misc_feature (205)..(205): n equals a,t,g, or c
  misc_feature (275)..(275): n equals a,t,g, or c
  misc_feature (303)..(303): n equals a,t,g, or c
ctcactaaagggaacaaaagctggagctccaccgcggtggcggccgctctagaactagtggatcccccgggctgcaggaattcggcacgagattttttgtgtatgtgtttcttcccagatagctacattattggttacttgccaacaaccccatatacttactattttcaaaatctaagcagatagcaaaaagctcaccacagancataaaatgaatggattgcttttttaaaaaaagtggataattgaatgaataaatacatttattgtctctnattgaacctgcttgtaagccctacatantgcccatacagcctacaaattcacattccacatgggcgactccacctgct

SEQ ID NO: 1017 - DNA, 546 bp, Homo sapiens
  misc_feature (535)..(535): n equals a,t,g, or c
ggtgatgaacagttctgtatcctgattgcggtggtggtaacgtgagtctatacatatgttaaaatttatagaactgcatactctcaaaaaaattagttttactctataataatattagagcttaaaaaattcatccctcttgcccatcagtagatcaggatatgaaggataccattgaacataaatattttgtatccatgatgaatacaaagtatattctcctggaaaaccaatagaacattcatataaatgattcctatgaaggtaaaaaacttacaaaattcaaagatcatacagatcatgtgctctgtataatgtaataatagtaacaaaaggcctgtccacttggaaatttttaaatgatcttctaaataactcatttaaaggagaaatcaaaataaattgcaaattatttagaattaataaaaacttctctaaagctgaggaattctaccmaagaggtgttagaggaaattgtatagattttgawttactttycarggaggaaaggaagrccaaagagtgrattaaacantttaaaagctt

SEQ ID NO: 1018 - DNA, 4015 bp, Homo sapiens
  misc_feature (1)..(1): n equals a,t,g, or c
  misc_feature (4000)..(4000): n equals a,t,g, or c
  misc_feature (4010)..(4010): n equals a,t,g, or c
ncgggcgcgcgccgaccatcgactcgccaacgagagaaggtcctggggcacggacaccgacgggttgcgactgtgacgtgaggtgttctcgcgcgcgctacgtctccgggtgccgctgacgggcgtgcgcgcttgtgcggagccggaggtgggggccgaaccagccaaggttgcgggggccgcagagccggacgaagacggagggcggagcggcttcgggactgcggagactacacaccgagcgagcgcctgggcccgaaggagcgatgctgtggttccagggcgccattccggccgccatcgcgacggccaaaaggagcggcgcggtcttcgtggtgttcgtggcaggtgatgatgaacagtctacacagatggctgcaagttgggaagatgataaagttacagaagcatcttcaaacagttttgttgctattaaaatcgataccaaaagtgaagcctgcctacagttttcacaaatctatcctgtagtgtgtgttccatccagtttctttattggagacagtggaattcccttggaagtaatagcaggaagtgtttctgcagatgarcttgttacaagaattcacaaggtccgacagatgcatttgctaaaaagtgaaacatcagtagcaaatggcagtcagtcagaaagttcagtgtctactccatctgcgtcatttgaacctaacaacacttgtgaaaactctcagtccagaaatgcagagctttgtgagataccacccacttctgatacaaagtcagatactgcaacaggaggagaaagtgcaggccatgccacttcctctcaggagcctagtggatgctcagatcagagacctgcagaggacctcaacatccgagtggaaagactaacaaaaaaacttgaagaaaggagagaagagaaaagaaaagaggaagaacagagagaaattaagaaggaaattgagaggagaaaaactggaaaagaaatgttggattataaaagaaaacaagaagaagaattaacaaaaagaatgctggaggaaagaaacagagagaaagcagaagatagggcagctcgagaacgtataaaacagcagattgcattggaccgtgcagagagagctgctcgttttgcaaagacaaaggaagaagtagaggctgccaaagctgctgccttgctagcaaaacaggcagaaatggaagtcaagagggaatcttatgcaagagaaagaagcactgttgcaagaattcaattccgtcttcctgatggttcttcctttacaaatcagttcccttctgatgctcctctagaagaggcaaggcagtttgctgcacagactgttggcaacacttacggtaatttttcgttagcaaccatgtttcccaggagggaatttaccaaagaagattataaaaagaagttactggatttggaacttgccccaagcgcttcggtggtactgttgccagcaggaagaccaactgcatccattgtacactcttccagcggagacatttggaccttgttgggaacagtgctttatccattccttgccatctggagattaattagcaatttcttgtttagtaatccgcctcccacacagacttcagtgagagtaacatcgtcagaacccccaaaccctgcatcatctagcaaatcagaaaaaagggaaccagtgagaaaaagagtgctggaaaaacgtggagacgactttaaaaaggaggggaaaatttatagattaaggactcaagatgatggtgaagatgaaaacaacacttggaatggaaattccactcaacagatgtagtgtgacaagtataatatgtgcaataatcattgtttctcttatgatttaattcaactaaaattctactggagaagtgggactgctttatattttccaactggtctataaaatgtctctttattcctgcttagtgggtgtgggttgaaggtgtttaactcagaaaagtaaagacaggaaataactctctgctaggtccttgcttatatggcaaccactgctagaaccctaaaagaaccaaaaatctgccacagcctgcctccatcagcttcttatttagtatttcatatgcccattagccctatgcttcagatgacacgttttgtttagagctactttgctccaagactcttaagcccaaagtaactggtatgtcactgagtaacttgactcggtgtcagagcattttaactagccactcagatgagaatttatgtttaacttctctttttactcatcagctgcaagcaaaatcttgtagtttttaatcttaaacactgaataaaaaaactttcccctaaattggaatgatcttagttttgctttgagttttgttatctagcatctttttgttgcacagggctctattgaggtcctatgtctctgattttttttttccccagtattgccctggagctgtctctggaaagtagctggcgaggttaccttaactatcactgaagaaagaaattttctgacacactgatggcatgtgacttgtctcctaagtcagtgaggcatcactttgtttgcataaagtatacggtttgttaaggcctttgttcttgtgagatgcaaaacagctgctagtctgcaacctagttttccctctcacctttaactgacgttttgtcctcaataattacacaaggacctagagtacctataggacaaaaagtatagaataaaaatatgcctttagtcatttggtttttcttaaaaagttgagattcttaatctgacttacatgttactttatccgtatgtctttgttagtggagaccgctaaactaatgatgtttgaaaacagttcctctgttttagattggaagatagcactctagagtggacatacggaaagactgtgactttattttgtaatgggaggaagaaattttctcagagcaaactttctattttttacctgtgaaataacagtgactttttaaaatggtgacagtgttggcaaggaaacagcaacacaggctgcgctgttggtaggagtgaaaaccagtataattcttctgaaaaacatttatcagaaacttaaaatatttcataccgtttgatccagtagcttcttctaaatcataaatgcagacaatgtttaggtaaagacatactcattaagtgttatttattttactcaagaactggaaaccaactaaatgccttctatagaagtaatttttgatgaggagaaatggtacaatactaattaacaacttggtttaacatgtttactgagcatctgttaagtgttgggggaaaaagcagcaggatccagagctataggtacagtgtgatctcagctttgcaaacacattttctacatagatagtactaggtattaatagatatgtaaagaaagaaatcacaccattaataatggtaagattggtttatgtgattttagtggtatttttggcacccttatatatgttttccaaactttcagcagtgatattatttccataacttaaaaagtgagtttgaaaaagaaaatctccagcaagcatctcatttaaataaaggtttgtcatctttaaaaatacagcaatatgtgactttttaaaaaagctgtcaaataggtgtgaccctactaataattattagaaatacatttaaaaacatcgagtacctcaagtcagtttgccttgaaaaatatcaaatataactcttagagaaatgtacataaaagaatgcttcgtaattttggagtaggaggttccctcctcaattttgtatttttaaaaagtacatggtaaaaaaaaaaattcacaacagtatataaggctgtaaaatgagaattctgccccctcacctcttaccccagtactattctccagaggtaatctattaacaatttcttatgtaattttcagaaaatttgtatgcgtatataagcaaatatgtaatctttattttttaaataaatgggatcatattatawaaaaaaaaaaaaaaaaaaaaaaaaaaaaaaaaaaaanaaaaaaaaanaaaaa

SEQ ID NO: 1019 - DNA, 401 bp, Homo sapiens
  misc_feature (376)..(376): n equals a,t,g, or c
gaactgttgaaaaactgttgtactgatgtcaccggtgattgaaggggtatctttaattggctaatttgaaagaaagycacaaaagaaaggcatgaataaccaaaatcctgggatatttctgaaactcagtcgaggtcagtagatctgtctgggactacattttccatcccagttcctaacaaagtttcattttcttttctttattctctgatgtaagagttaacagtgaaatgaccaaaatcctgaaagccaatggagcaacaataaacatactcagatagattgcctcataaattctttcmagttagtttttaaaagtaacacattttttaaaagtccacttkgcaaaatgataatttaatatctgggtatcagnctctccaaaggattcctggaaaaag

SEQ ID NO: 1020 - DNA, 756 bp, Homo sapiens
gcgtgcaccagccagacctcatgaactcaggaaggtgcttgtccaggagttcctggttgctgtgcccttcacaggcaaagactgcattycttcctcagctgycagtgaggtgctgssaggattccctgtagaactktcaggccagtttatgaactggttggmaccygtgtcctcytcctggcccaggmaggagaaccatgagcaggcagaaggagactttgcaaagtgccttccccagcatgtgtgccctctgcccttcagagcctgcagatakkaggggtggcaaggacactgttctcaatgagcagaacctccaagacacccaaagctgcctgtttgccacctggccctatgcctgccccgttttctccctcaaggccttcacccatgctagggcagtcacctggaatgtcctttccattacccctgctgtaatgcccagcacagaacttgatggcaggcctttgcatggtagcctgaagcgatctcacccttctaactgggtttgccacaggcacactggctcatgcttacctgtgctgcctgtggttatagttatgcgaattgtggttttacatccctaaaacagaagggcacggtgtccaggggatagcacccagcccaacttcagtgtagacctgagctgggagggaacctgttagtctccccacctcttccctgaagagacaggcacccctcccagccgtggtcaacggagggagtggcacttctgccttgagtccccaggggaaaaaa

SEQ ID NO: 1021 - DNA, 393 bp, Homo sapiens
tcgacccacgcgtccgtaagatatgacaggtggcgacaagtgctgagaagaaaaattgaggagggtgagggagtagagtggccaagagcctgggtttcagcagagggagctggagaatgaacccaggggcgctggagctgggggcgtgggagagtgtcagagagctggcatgaactggcaggttgcctggaggggagggctggttccaaagccagtcttatagcaatttttccatttcttgatagtgaactttggaagagctaggggtkgggaagatgggaagttgaaccacctctgagataaaactctctgarggggctgargtkgwcctgggttggggtgcccctgctactggcmagagagaagcmaactccatatggaagtaatctggtt

SEQ ID NO: 1022 - DNA, 938 bp, Homo sapiens
  misc_feature (812)..(812): n equals a,t,g, or c
ccggcatcggccaccacgcgcaccgggccacgcccaggccctgctcctcgatgccctctgcctgctcctggacattcttgcacccaagctccgccccgtgagcacacagctgtacacacccgtgaaaagcaacagctggccagcctggtgggcacgatgctcgcttacagcctgacctaccgccaggagcgcacgcccgatggccagtacatctacaggctggagccgaacgtggaggaactctgccgcttccctgagctgcctgcccgcaagcccctcacctaccagacgaagcagctcatcgcccgcgagatcgaggtggagaagatgcggcgggcggaggcttctgcccgkgtagagaacagcccccaggtggatgggagccccccagggctcgagggtctgctggggggcattggggagaaaggggtgcaccgacctgccccacgcaaccatgagcagcggctggagcacatcatgaggcgagcggcccgggaggaacagcctgagaaggacttctttggacgtgtggtcgtcaggagcacagcagtcccgagtgcaggggacacggccccggagcaggactcagtggagcggcgcatgggcacagcggtgggcaggagcgaggtctggttccgcttcaacgagggtgtctccaacgccgtgcggcgcagcctgtacatcagggacttgctctagttctctgagccgcggacatgccctcgcattgcttcccgcagagtgcagagacaggaagctggagatgtctttataaagtcacacctttacagactgtaaaaaaaaaacggcangagcatgaatgtatgaactggaggaagttacttacagtgggaagggttcttaataacaaggtctacctagcatgaagtatttaacattctcccattcccttaaaaaatatacattttattaaatgg

SEQ ID NO: 1023 - DNA, 523 bp, Homo sapiens
gaagaaactcactttccctgtggcacgttaatcttcattgttttaattctgaagcataacgtgccacagggaaagtgagtttctttactgtttgccagcagcaaggacaaaaagtgaatggtgggggcccaggagctcccagcttggagagaaggcccttccagacccaggaacccggggtttggggcaggaggcaggaaggatgggagggtgtgatcaccgacacacacacacacgttctctctcttcagggaagggttttccagaagcatttgcccatactctgaatgaagtattttcatgccaagccaaacctcctgaagagaagtgaattcatggctgagggagccacgtgccctggctggggatgcacctgaacgctgctcttcagcaagtgagttcatagcatccaccagagcttcccagctcctcaagctgaagacaggctgagcaaaaaccaggcaggccatgaggggattcaaagaaacctaataggattgggtgcggtggctcacctcgtgcc

SEQ ID NO: 1024 - DNA, 232 bp, Homo sapiens
  misc_feature (222)..(222): n equals a,t,g, or c
  misc_feature (230)..(230): n equals a,t,g, or c
gcaaaaaggtagctggagtgggtttaaaatttcgtataatttcgtatgtgagcaagctgtgtgatttagattattttaaagattaaatgtttttcaggtattaatggtaaactataaaatgtttgcttctgtataaaaaaaaaaaaaaaaaaaaaaaaaaaaaaaaaaaaaaaaaaaaaaaaaaaaaaaaaaaaaaaaaaaaaaaaaaaaaaaaaaaggggnggccgttnta

SEQ ID NO: 1025 - DNA, 423 bp, Homo sapiens
ttttagagaactttcagagcactgatttttgatagactaagtggaaaatttgcagagaaatgatggttgtaagtggacatgcaaaccaaaattggggattggagaagtcagactcactagacttttggttcgagtactattgaactctctcctgatgagaagatgtttagataagtacaagttaagaaagtagcatatgactggaaactatattcagtgcactttctccaaaagactacccagaaaaatagacttattttcaaataccagttatcaagatatattaaatagctgtattgtttagaatcttaatatggtataaattagcatatgtattcacaatattcattcagacatcattcccagacagcagggatttatttaaatgttagctgtctgagtttttaaatagctaatacgaca

SEQ ID NO: 1026 - DNA, 874 bp, Homo sapiens
  misc_feature (802)..(802): n equals a,t,g, or c
  misc_feature (866)..(866): n equals a,t,g, or c
cattttagccctaaattacctgtggctgtttctttttatttttttgactacttttatattataaatgtgtgttactgtcttatgaattcatggcaatatagttggatagcctggatactttgttagatgagtatttagctgtgtctgcaaatcttaaaagccattagcaaagaktcgtggtatttttttctttatttttaaatgtttgggcaccaaacctaaaagcaaaagattgacgaarcatgtttctcttaaggctacttgtattttacaatacaatattaaattatttaatttgagaaatttagttttgcttatatgcactttttaaatatatactattttgaagattccttatgtaaatgcaaatttcctagttaaaaccgaataacagagatctgaaatgactgagaaaaacttttttattaaaggaaggaattaatttaaggcaatttttaactatgtagaactaattgcccatgtttaattatagcagacacgccattctaacaggtatttgataccattggatgcattattctaggttttttctttaataaaaatggaacaagttttcatttacattccaagctgtcaggaaatgaagaatattttattatctaggattttatctgatgtagttgcttaaagatctgatgtgctataattccatgaatcagaaataataaaatgctatcattctggatctgaagacttttgatactttttcaaaagcaaaattaatttcaggaacctttgataagttgttgttataattaatctaattttgtatagtttttgnaaataaattaccatccttcacaattagggatgcttttatccccccatcactaaattgcagttgnttgatacc

SEQ ID NO: 1027 - DNA, 1287 bp, Homo sapiens
  misc_feature (34)..(34): n equals a,t,g, or c
  misc_feature (1286)..(1286): n equals a,t,g, or c
ggcatataaggaatcttcaaaatagtatatattnaaaaagtgcatataagcactttttaaatatatactaatttgcatttacataaggaatcttcaaaatagtatactatttgaagattccttatgtaaatgcaaatttcctagttaaaaccgaataacagagatctgaaatgactgagaaaaacttttttattaaaggaaggaattaatttaaggcaatttttaactatgtagaactaattgcccatgtttaattatagcagacacgccattctaacaggtatttgataccattggatgcattattctaggttttttctttaataaaaatggaacaagttttcatttacattccaagctgtcaggaaatgaagaatattttattatctaggattttatctgatgtagttgcttaaagatctgatgtgctataattccatgaatcagaaataataaaatgctatcattctggatctgaagacttttgatactttttcaaaagcaaaattaatttcaggaacctttgataagttgttgttataattaatctaattttgtatagtttttgtaaataaattaccatccttccacaattagggatgcttttatccccccatcactaattgcagttgtttgataccaaaataaatttacgtagagatccttaacttaaaataaattaattttttcaaaaaacataaatctggaactgttgtttctatatttgataacaaatacagtatattttatttataagccatggtctactgatactgtatgaggactttccttatatataaaagttgcagggattgtgttttattagctgctttaattatgttaattttagagagtttttaaatggaaatagaggacatttatgaaacgctggaattgcagttacaaattctttttgttgttgttgttcctgaacatgccttggaataattctaccattttttccccctccataaatctttctaataaagcatagaaaaagcctatatgattttaaatgcytctcttaagctggtaaacagatttgagttatgagttcattgttattgccttcaagatgaaaagacagtgatataatttttctatttcaacttaaaagtaatagttaatatgctaaagtagtacagaataaactttattgctgcttactaactacaaaatactgtagatggcatctgtatgattaaacatataaagtaaaacaggtctgagggctttgtagatgattaaagtctccaccttcatgaaaaaaaaaaaaaaaaaaaatnt

SEQ ID NO: 1028 - DNA, 462 bp, Homo sapiens
  misc_feature (425)..(425): n equals a,t,g, or c
  misc_feature (458)..(458): n equals a,t,g, or c
  misc_feature (461)..(461): n equals a,t,g, or c
attgtgatgagttatccagtaacttacagcatatcagtgctttctgattcataagataagtctgttctttaaaagtacttaactaaagtatatgctactacaataaaaagccttsaagtatgtcaatattaatccccaaactacctcaagaaatccctttaacctccagaaattatcactgtataattgacatacaactgaaaaatacagcacatcgaatctagcaatttatcctattaattgccttattaaggtaacatctttcaaagggaaaaaaataaattttagtaatgtttcagtcatctttaaatctaaaattgtgaagacattctgaaactttgcttagtttacaaatataaagatttccatactgacaattaccaaataccaaatacctttactggaaagaaacctagtgtaaaacnattaccgggatcaagtagcctaaaatttagtanggng

SEQ ID NO: 1029 - DNA, 366 bp, Homo sapiens
  misc_feature (11)..(11): n equals a,t,g, or c
  misc_feature (81)..(81): n equals a,t,g, or c
  misc_feature (167)..(167): n equals a,t,g, or c
cactaccctantaaggaggtcatctctcctaaattatattcaccctgactgtggggataatcatactcctcaattcagggnatactattattatcagtctgtccaaggcctctgttggcttattttatttttttaccccctttatcactactcccccatttcctccnaaaccttcataagcaaaaacttaattgtctggcatctgtctttggatatggagtgtttctttraaaaawattaagtgttgttttacatatatgtgtgtgtgwttwaaattttcataaatggcaatatgctatgaatagccttcttttatatttttcattaaatactctttcaaaatgaatccatgatacagcatggccc

SEQ ID NO: 1030 - DNA, 750 bp, Homo sapiens
  misc_feature (26)..(26): n equals a,t,g, or c
  misc_feature (684)..(684): n equals a,t,g, or c
ggaagaaccagcagtgaaagatggantaggaagcagagggaagaggggaaggatgtgttcacaggagaggccaagaggcagcgggggtgggatgagggttgcaaagcgtgaatttatgcatttctccagtctaggtttagttagtatactccctgtgaatgtcaatacctgtaaatgatacttttaatgaagggagattatccccttgaatgtttggtttgtatcttgtcctagacccagagttgccattctctaaatatctaaatgactattattattttatctctctcttttacacacacacgcgcacacacacacacagagaaatgttgtttatgagattttgtatatttcacatacttcatattctttatatgatagatgaataatgtgtagtttttcaaagttttgagttaattacaatttaggtactatttctaaaaggaagatatatttgtgttcttactttggtggctgagattacttaaaggggataatttgctcccaaattcctaagaatggtacaggaattctaaggtgactaattcttatttcatttttttatgaatacttttatcttgaaatgtgtaatacaaatctggtcagagttctatataaaaattatattgggaatcagacttatgtgtgtgtactttttatttgatatttaataatgccctaagnaggtaattcaaatttttattaaagtgaaatgatttgacagtcagactttgaatttaatgcatgcat

SEQ ID NO: 1031 - DNA, 1333 bp, Homo sapiens
  misc_feature (133)..(133): n equals a,t,g, or c
acaaggttttgaacgacagactacagctgctgttggagtgctgaaggctgtgcactgtggagagtggcctgatcaaccccgtttaaccaaagatgtaatttgttttcatgctgaagatttcttagaagtagtncaacgaatgcagttagatttacatgaacctccactgtcccagtgtgtccaatgggttgatgatgcaaaactgaatcaactgaggagggaaggcattcgctatgccaggattcagctatatgataatgacatttattttattccaaggaatgttgttcatcagttcaagacagtttcagctgtatgcagkttagcatggmatattcggctcaaattatatcactcagaggaggacamttctcagaatacagctactcatgaaacaggcacatcatcagattccacatcatctgttcttggacctcacactgacaacatgatttgtgctgtaagcaaacctccttggattctgttttttcagataaacttcattctwaatatgaattacagcagattaaacatgaacctattgcatctgtaagaatcaaggaagaacctgtgaatgttaatattcctgaaaagactacagcactgaataatatggatggcaagaatgttaaagcaaaattggatcatgttcaatttgcagaatttaagattgacatggattctaaatttgaaaatagcaacaaagatttaaaggaagaattgtgccctggaaatctaagtctagttgatacaaggcaacacagttcagcacattcaaatcaagataaaaaagacgatgacattttgtgctaaatttgcatataccatctaaaatccttttttaaaaaaatttaatgtaataaagattcatgaattctgaaagcaagccaaggacttgctcctatgtctgttacaaaacatagtttatgtagctttgtaacattcctcagtgcctgtccataactgtgaagtattaagcacttagggccagatgcactgtaaacattgcaggtttaaacataaaggagtctttaaaaaaaaatcatttacgttggaattttaggttttagaatagagctgacattaacatatatatatatatataaatatatatatatattttgtaatatgagccagaattctttttcaacaatttaaagcttttccatagagcttatttatatccttttttttcattttaaatgtgtcagcactgtagtgtaaatagcttttaaatatctttttagtgtgatttatactgaaatgtgagccacttaataaaggttcatatgttcatattaaaaaaaaaaaaaaaaaaaaaaaaaaaaaaaaa

SEQ ID NO: 1032 - DNA, 565 bp, Homo sapiens
  misc_feature (529)..(529): n equals a,t,g, or c
ggcagagctaaaataatgactacctaacacctgggtaaatatgtctccagaccttttcaatgtgcatgtgtacataagcttgtatttttcataaaaaaggaatcctgatacatattttataacatactttttttcatttaacatactgaggcatttaaaattttcagtttgtttttattgtagcaaacatgtagtaagggtttggttggctttcagtggataaaaggacggtatccaaaggggggtttgaatttcccacttctgggaacagactcctattaaagttccaggggactatctgcagtggsgtgctgaacaaaagatatcagcagtgctcatcattgtagtaacttgggtaactcctccaaatactttgtgtgaactatcagaaatctttgggaattttttaatgtacattcttgaaattctgaatgtacaaatatggagttccatttaaagttttttttttaattttaagtcttgcatccattaatgtattctcttaaacttttatccttatatatttatnagctctgaaatcttgggccactaggcactttggggg

SEQ ID NO: 1033 - DNA, 525 bp, Homo sapiens
  misc_feature (479)..(479): n equals a,t,g, or c
  misc_feature (522)..(522): n equals a,t,g, or c
  misc_feature (524)..(524): n equals a,t,g, or c
ctggcagtctgtgcaccggagttggctcctttccctcttaaacttgtgcaagagatcgctgagcgatgaaggtagaattatggtcctccttgcccttgcctttcctttttgtgatctcaaagcatcctccctccgccctcattccatggccccagttccctactcccacagctgtctgctgaaactgccaacattactcaattgtttctggggggaggaacatttttttttgaaacaaaatagatatatgaaacagtacacgggaattaacacgaatatttaaggtaaaacatgaccttgaagattatgaaatccatcttattttggcccagaacgggggcattgggctccttgggccataggggagctggggaggacagggtgaagagttagctctaagccctctgcttggagatgctgtaaatacagaacgcaaaatcaccttcgaagttaaagacgcgaaagttcttcttttctcnggcccttcttcccttccccccggccatttccttccagtaccantng

SEQ ID NO: 1034 - DNA, 908 bp, Homo sapiens
  misc_feature (132)..(132): n equals a,t,g, or c
gtgatggactatcgcgacgtagatcaaataagtataaaatgcctcagttttgtcctttttagtgcaacataagtactggtataccctatcctaattagggatcatttgaaagcttttcccaaattgaggccntgctgccttctccccatcccctggggttttaaagtgatttcaaactgcaacctagttttagaaccactgttctgggtagttgggatactgaaggcatattgttaattattctacttgtatgttttgctaattctaagataagcatttttccagaaaccaggatgtagaatccagytgccatygacatcttaacattttaggaaacaactttaaaatgatatactatctatctatctatctgtagcatyttaaaggtaatgaaattaatgtggcagtaggtcttttaagcttctgcctacatccatattgagtatagttgttgtcttctaaaataattaattgatttttggtgagataaccagattcatattttaagccttttgtaatggccccgtggtacctggagtcaaggttcagaagtaaaaagttccttaaggtatcaataacaaaaatttgtattaatagttcagtcctaaagcagtgttgctgagattatgtttcaccagcatttacaagctgtatgttaaatgctgccataaagaggtctctgaagccgtagggcacacccaaggcagggctgaraagtacctagtagtgtgcmccmcccraaaaccatggatggcagcagccacatytccagcttacccattcactgccmcagtytacagcttaagacmcttaactacaaggtaaaagaaaaggrccaagtaaatacaaaaagtttyttattaaaaaacttggaagcccaaaaaaaaaaaaaaaaaaaaaaaaaaaaa

SEQ ID NO: 1035 - DNA, 421 bp, Homo sapiens
gggtacggtaattcccaaggtaagctcttgatctagatcttggggcctatagaaatatttttaagggacatcaaagggtcttgggaaatctgcctagtgagggtaagcaagatgaaagagggaaagttgttatggttaatagtttgttaggaactcccttccaagaggcaagcttttgtcatctctatggaatttgagggcagttggacaatttgcaaggatattctcacctgttcattaaggtccctttcctccagtaagagaatggctagggtctgtgggataatcttaagcacctactgttgcttttttgttgttttgcttatgcaagtgatcatttattttttaggagtgatttggaggaagagtatgaggcaagcttgtttttctccagtgtaattgatggtcaccatgcatggtt

SEQ ID NO: 1036 - DNA, 887 bp, Homo sapiens
gattgcgtaacagaactttctgtacatcacagaaacaacaggcaaacaatggaggatttaatttcactgtggcagtatgatcacctcacggctacctatcttctgcttctagccaagaaggctcggggaaaaccagttcgtttaaggctttcttcyttctcctgtggacaagccagtgctaccccattcacagacatcaagtcaaataattggagtctggaagatgtgaccgcaagtgataaaaattatgtggcgggattaatagactatgattggtgtgaagatgatttatcaacaggtgctgctactccccgaacatcacagtttaccaagtactggacagaatcaaatggggtggaatctaaatcattaactccagccttatgcagaacacctgcaaataaattaaagaacaaagaaaatgtatatactcctaagtctgctgtaaagaatgaagagtactttatgtttcctgagccaaagactccagttaataagaaccagcataagagagaaatactcactacgccaaatcgttacactacaccctcaaaagctagaaaccagtgcctgaaagaaactccaattaaaataccagtaaattcaacaggaacagacaagttaatgacaggtgtcattagccctgagaggcggtgcsctcagtggaattggatctcaaccaagcacatatggaggagactccaaaaagaaagggagccaaagtgtttgggagccttgaaagggggttggataaggttatcactgtgctcaccaggagcaaaaggaagggttctgccagagacgggcccagaagactaaagcttcactataatgtgactacaactwgrttagtggattcccggttcaactgtttggatggaattaat

SEQ ID NO: 1037 - DNA, 461 bp, Homo sapiens
  misc_feature (273)..(273): n equals a,t,g, or c
  misc_feature (281)..(281): n equals a,t,g, or c
  misc_feature (418)..(418): n equals a,t,g, or c
  misc_feature (424)..(424): n equals a,t,g, or c
ttgtctcccaagtttgccataattaaatgggaaacacgtaaagcattcagcatagtgctggcactcagacgtttactagttcttaggagctccctccatttgtgcaggagatgaagaaggcacagagatagatactctacagtttcgtctccaggtcagatgcactcgggaacccccatgctgctaaagattcctctgaccccaacgraactgtacgtgraaccacaaaggtgagtagtggtagggtgagggaagaggccccacctgtgggtnagctgctnagttttagggactgagatcttctgacatgtttttcctccagtgtataccaggcatatgaacatgggttccccctgggggaaccaggctggatctcttttccagaggggcacttttccgaccagtgccatgatggttntcctcntcgttcagtgcgggcttggccaagaaattgactgttc

SEQ ID NO: 1038 - DNA, 923 bp, Homo sapiens
  misc_feature (646)..(646): n equals a,t,g, or c
aatgtttagactcttgtaactaccttagcaatgttctgaagctggtttttctaaatatatcacagaggtctaacatagttgaaattcaaattgtctggatggaagctgaaagtgcttgcagagatttctggtgggagtactggcatctcaagaatggtatttccctacaccttttttagtcccgcttgacgtctctcaatcaaactgcaaaagagccttgacctgccattaaaaataataataagcagaatgtcattgccaaagattattataggtgtttaaaagcaagataagacttcttaaagggctccaaagcatttgcttgttatctatgtttttttagcccaaagccaaaacaaaaaataatgcctttgtgccaracgtttttgctgggcacttccactatktctcaacttargaagtataatgtatacattgcacagttttacaatttgtcmatggcacagatacttgagacatataaattggatgatcacagagatattgtggtaaatatctgggcttggaatcaaaggaccctgggttcaaatctcagcttcaaatcaaagaagctaaattctttggctgagtaaaccaaaacacctcccaccagaccccacctccaaatttcaacatgaaatttggngrggataaatatccaaattatttcagtgcattcatctggaaactgagaataacaatgctcactttgcaaatttgtgggaattaaatggcataggcaaaatattgttcttttcttctcttactcctctgagttttgctttcttccacttgaactttaccactcaattgttaaaagccttgaattttgccattgtattctatttaataaacttttgataaatctggataaataawaaaaaaaaaaaaaaaaaaaaaaaaaaaaaaaaaaaaaaaaaaac

SEQ ID NO: 1039 - DNA, 491 bp, Homo sapiens
cccacgaagatgtttccagacccttggaatgccaagttcaagtttagctatgtctcgcggagaggccggtggaagaagcaacgagaatgaagcaccccagttctctgctgagcacatgggcatctgcaataaagatttaatttcccagcttctcctgaagctcggtatggccacaacactaaattctgcccgaggagattaagcaaaatagtatgggacttccaagaaatgtttttaaagtcagrggcaggcctttcttcatgccttcttcctctttgctggctggaaygcaaagaccatggcaggaggccaagcagccatcctggaaggtgaaagcctcatactaaggacgtcagacagcgaaataagagcctgggtccttgaccctgtagacatctccctccccatcctggtctgtctgccttgactcctttcatatgagagaaataaacttttaacttgcgtaaammaraaaaaaaaaaaaaaaaaaa

SEQ ID NO: 1040 - DNA, 933 bp, Homo sapiens
gtgctttccggcgctctgccttccggtgcgtcgtttacgccagtttgaaccaaagacgcccaaggttgaggccgagttccagagcatggggtctcggttgtcccagccttttgagtcctatatcactgcgcctcccggtaccgccgccgcgcccgccaaacctgcgmccccagctacacccggagcgccgacctccccagcagaacaccgcctgttgaagacctgctggagctgtcgcgtgctttctgggttggggctgatgggggcgggcgggtacgtgtactgggtggcacggaagcccatgaagatgggataccccccgagtccatggaccattacgcagatggtcatcggcctcagcattgccacctggggtatcgttgtcatggcagaccccaaagggaaggcctaccgcgttgtttgaaagtaccaccagtgaatctgtcttctgtctctgtccctttccccgtgacacacagagcaggcatggaatttaatgggtgttctggacagacacttgtacatggacagacatcactactgtggatactacaagactgaaaagaaaatcgtatgttgtcattctctggctatggagtgtttgtggccttcacagatttcacaggaaccaataaatccctcagagaagtaaaaaaaaaaaaaaaaaggtckttattaamggcgcagctatcccttagtaaggtatttacttgactgcgtcgttaaagcgtactggaactgggtcgacttatcttagaaccctttcactggtatacaagcccagatcttctaattgcccaagcaagggccttccggtaaacgggtgtttggtcgaaaaaccccggtttttctttggtggccaacatgcttgcatgtcgccaattgcggtctgatctggggtagctacacctttaccttaaaaaaagcggttat

SEQ ID NO: 1041 - DNA, 2715 bp, Homo sapiens
  misc_feature (9)..(9): n equals a,t,g, or c
  misc_feature (48)..(48): n equals a,t,g, or c
  misc_feature (65)..(65): n equals a,t,g, or c
  misc_feature (96)..(96): n equals a,t,g, or c
gccaatggntatttaatttttaaaaggtaattatcatgggctggaatnccaaggtccattcaaanggaaccatggtccaggtaatttccactgggnggggtatatatttccatccaccatgtttacattaccccttctttaagtataaccatccattcttccaatttctttttatcagtttccctccccaagtcccccaaattaagaatgccaaatagtcttgaaaacccagagctccatattttaatgttttcttaagaacacatttgtgaactcacaaaagtgttcctctttcaactttgacaatgcagttcttactttaagtaaacaaacctgtcctaaaatcccaacaagtaattctgagaacttaaacaccttgacagtgtcccttaaaaatgctatgacagtaaagtgccaataggcatggcaatgacctcttagatgggatcatttaactcctcggaactgagaaatgccagcaccaaggattacactgagattcaattttactgaaggctacatttagtttacccactytccacaacctattatattcattatgttagaatgaaatgtaaatgttttgtgtagccctcaaacttacactaagttttgagagagatgtactttaaaaaagcacggggtaatatataaaatcagtggcagaaagtttcattaagcaccaggaactaatttttgtcaccccatactcattttgtagataagtttcaataaccggcaaggcacatttacatatattccaatgaatacttattgacaaattttaaattacactctatgtcccagctatcccagtaactgacatacaacatactaaaatgatttatttagataacaaaaaaccaattaatgtgaaacatacaggctattggcaaccactattctaaaattatgtaagtacaaataaacatactgaaatgtgtgcaattctaagtttttaaaccagaagatttctacactaacacacatttatattaatgacacataaaaaaaataaaaactttattacaaaaataagttacactcgcctccagcttacagtataaaacaattttatttgcaggaatgcaaaatgattgtttgccatgagcattttgaacatatgacatgtctgattttcttgttaaatttgcatttactggggaactggtgtgtataaaaccttaattaagtataagctctgatcttcatcgtggtgcctattgggtatgtgatataactgcagtatccctttggggaaggggggaggggatttctttacaccaagtcctaatgaaactataattttcactttttactttaagctatcaacttaggacttggcaaaaaaatttttgagggtggttcaatagaggatgcttcaccactggacactcactgtcatcaaggtgctttagaaaattaaaaacatagcacaaatgattgtactctactctacaagttatcatgacctgcataagaaatggaaagctgattcacatgtttacagtgatcagcaggaagaaatgcactaatgaaacataccttttacctaaaaagctaaactacagccatatactaatttctatgatttatgaaaaaacttcaaaatatccaaatgtcaggtcgctgtacaattgtcagttttagtctgactttttataaagggacactgcagtatttagtacaagttcggatgcacttttttgaacatctgatgtcttacaaaagtaacatcttgctaaactattatacatccaaataactacaatatctgaagaagcaaggctgctttttcagccacaaaatacgacaaaagcaaggattttctatgtacagtacagacagggtatagttcaatcctctgctactgaggtagttaaccaacccttttaaaaaggttctgaaaagaaccactatctggaatgcctgactaaccagctctgatgattacacctgaaactgcatatctgaacacaattcaaaagtgatcactataararagatatagacaatcatgattaaccttggtgagcagaaataaaatttaaggataccatcagtggcattcatctataccactgcaataaaatttaaatgcacaaattcaagagaatatttcaaaataccactgttgggatccttaatttaaaaaaggggaaaaatctacttagagcagatttttaaaagaactttattctttattaagataccatgctaggagttatgaaggatttctgttggaacacattttgaaaatagagtagctttagtttaataacttgcactgcagagaaaattgttaaagaaattcatatcaaagtccaagtattagttcaatgtcccgtatttgattccatgatcttcataggaaggtcttctgcaatagaatatgctcctatacagccgacatatttaaggttgcttgatttccttaccattactccactgcaagcttctggtgtaatcccacatagcaagtcagtcttcattgtaacaggtcaggaccggcctcgaccccttttccctgcccgcggcctctttgttgttgggcacctcctctcgcacctcgaacgcctcttgctgatccaggacctcctctctgtgaataaccggctctaccgcggggaggagcagccccacgacctctggatggagcagcaccccttgctcctctaccaccccttcctctagctccaacttgaaaatcttcat

SEQ ID NO: 1042 - DNA, 2369 bp, Homo sapiens
  misc_feature (2)..(2): n equals a,t,g, or c
  misc_feature (7)..(7): n equals a,t,g, or c
  misc_feature (2338)..(2338): n equals a,t,g, or c
  misc_feature (2340)..(2340): n equals a,t,g, or c
  misc_feature (2343)..(2343): n equals a,t,g, or c
  misc_feature (2357)..(2357): n equals a,t,g, or c
anggganggaagggaagggaagggaagggggggtcacgcgggggcgcgcgcgcgcaccgggagcgcgctcgraggcgagtggaactggatcgggtttgctgccagcggcgtgagcttcggccgccattttacaacagctccactcgcgccggacacagggagcagcgagcacgcgtttcccgcaacccgataccatcggacaggatttctccgcctcagcccaacggggagatctctggaaacatggctacagaacatgttaatggaaatggtactgaagagcccatggatactacttctgcagttatccattcagaaaattttcagacattgcttgatgctggtttaccacagaaagttgctgaaaaactagatgaaatttacgttgcagggctagttgcacatagtgatttagatgaaagagctattgaagctttaaaagaattcaatgaagacggtgcattggcagttcttcaacagtttaaagacagtgatctctctcatgttcagaacaaaagtgcctttttatgtggagtcatgaagacttacaggcagagagaaaaacaagggaccaaagtagcagattctagtaaaggaccagatgaggcaaaaattaaggcactcttggaaagaacaggctacacacttgatgtgaccactggacagaggaagtatggaggaccacctccagattccgtttattcaggtcagcagccttctgttggcactgagatatttgtgggaaagatcccaagagatctatttgaggatgaacttgttccattatttgagaaagctggacctatatgggatcttcgtctaatgatggatccactcactggtctcaatagaggttatgcgtttgtcactttttgtacaaaagaagcagctcaggaggctgttaaactgtataataatcatgaaattcgttctggaaaacatattggtgtctgcatctcagttgccaacaataggctttttgtgggctctattcctaagagtaaaaccaaggaacagattcttgaagaatttagcaaagtaacagagggtcttacagacgtcattttataccaccaaccggatgacaagaaaaaaaacagaggcttttgctttcttgaatatgaagatcacaaaacagctgcccaggcaaggcgtaggttaatgagtggtaaagtcaaggtctgggggaatgttggaactgttgaatgggctgatcctatagaagatcctgatcctgaggttatggcaaaggtaaaagtgctgtttgtacgcaaccttgccaatactgtaacagaagagattttagaaaaggcatttagtcagtttgggaaactggaacgagtgaagaagttaaaagattatgcgttcattcattttgatgagcgagatggtgctgtcaaggctatggaagaaatgaatggcaaagacttggagggagaaaatattgaaattgtttttgccaagccaccagatcagaaaaggaaagaaagaaaagctcagaggcaagcagcaaaaaatcaaatgtatgacgattactactattatggtccacctcatatgccccctccaacaagaggtcgagggcgtggaggtagaggtggttatggatatcctccagattattatggatatgaagattattatgattattatggttatgattaccataactatcgtggtggatatgaagatccatactatggttatgaagattttcaagttggagctagaggaaggggtggtagaggagcaaggggtgctgctccatccagaggtcgtggggctgctcctccccgcggtagagccggttattcacagagaggaggtcctggatcagcaagaggcgttcgaggtgcgagaggaggtgcccaacaacaaagaggccgcggggtacgtggtgcgaggggtggccgcggtggaaatgtaggaggaaagcgcaaagctgatgggtacaaccagccagattccaagcggcgccagaccaataatcagaactggggctcccaacccattgctcagcaaccgctccaaggtggtgatcattctggtaactatggttacaaatctgaaaaccaggagttttatcaggatacttttgggcaacagtggaagtagaaacagtagggcctctgtaaaattggagactgataggttgatcagaaactcaccctaaatctgaacgggtgccgctataatttgtgacatctggcaagatttccctttatgtatatattttaacaatccgcttggacacgaacaaagccacacttctaactgcttctggcgaactgattttatttttaatttttttcaataaagatattcttagatactgcananaanaaaaaaaaaaaaanaaaaaaaaagtc

SEQ ID NO: 1043 - DNA, 349 bp, Homo sapiens
  misc_feature (28)..(28): n equals a,t,g, or c
  misc_feature (69)..(69): n equals a,t,g, or c
  misc_feature (313)..(313): n equals a,t,g, or c
ctgattacgccctttctaatacgactcnctatagggaaaagctggtacgcctgcaggtaccggtccggnaattcccgggtcgacccacgcgtccgtgggagacagagcaagactccgtctcaaaaaaaaacaaaaacaaaaacaaaaaaactgaaggacaagcccaggtaaagtatccaatttttattctcagcagaggaattaaaaaataaatgaatatatatacaggcaaggaagcaagaaaagttaggcagcaggatatagaccaaaaacaagaaactacaaaatctgttaaaactagcttagcttgatnggctcatcctgttaattcccacacttttgggaggcc

SEQ ID NO: 1044 - DNA, 847 bp, Homo sapiens
  misc_feature (726)..(726): n equals a,t,g, or c
  misc_feature (806)..(806): n equals a,t,g, or c
  misc_feature (829)..(829): n equals a,t,g, or c
ggtcgactaatgctcaaattgtcccaaattatggccaaagaaagctccttcaaactggttgctatgtccttttgacatggcccatcattctttaaacacattttacatctggcacaataacgtgctacatacccatcttgtatttttcctgccccatcttttaaatcagccattctcaaggggttccttcttaatctggctgttgttgtgttggaactcctggtaccatcttagaaccttaaggagacaagcgaaccaagccaataagctttccatgatgctgcttagagttaaacagagcccaggtactaagttatgtcatggagacagtgaactaacctctggactgcttgctacatgagacaattgattttcttattttctatgtagggtggtacatttcctcattttgagatatttcttcaacatatagcttttcattagtggggattttgtcaattataaccaaaaacaatgtgacggrtacccaagrtgtttcatgttgtagsttgggtgaattacmcatttctgaagccattacacttcctartttatttggatttaagttgacaaataaaaattgcatatgtttatggtctataacatggtgttycgatatatgtatacatcgtgggaatggctaaatcaagctaacatatccattacctcacatagttattttttgtggtgagaacattttaaaaatattgtcttagcaattttcantcaagcctgtcccatggagacacaaggcaatagtgacatgaggcacttggacttcgctggggttatccggcttttggctnccaaatgtttgggctttcaaatnatggaaaaaggttaccag

SEQ ID NO: 1045 - DNA, 535 bp, Homo sapiens
  misc_feature (461)..(461): n equals a,t,g, or c
  misc_feature (487)..(487): n equals a,t,g, or c
  misc_feature (533)..(534): n equals a,t,g, or c
ctccccatttcacagatgaaaaatgagctcagtaagggaagcagaagagccgcctttagagctggaactctccccacaccatcacagcgaacagtgatgctagagccagtcacctggtgagtcagcgcatcagagtggcccacccctcaggagggccccacccaggccgttcctggcccccaggagctctggcccagccccagcacaggggagtctgtgagtcaccatcatcatttctgcctccccaactcaagtgaccttacttggatcacctgtgtgtccccaccttgaggtgacagctgrgccctggcgatgggacagcatcctgagtcctggatgccttcctcctgtcaggagacctgtttcctggtgcgttacatctgggagatgccaggcctgctttcctccctcatttcctccccagcgtgcaagaacaaatcaccagtgtcaccacacctctnaatggcctgagaacttcatggactgntttacctgtgccattgtcaacttaagaaggccttaatatggccggnnc

SEQ ID NO: 1046 - DNA, 525 bp, Homo sapiens
  misc_feature (509)..(509): n equals a,t,g, or c
  misc_feature (524)..(524): n equals a,t,g, or c
gtttggagctttgattttgaaaagcacagggactccatcaatatggtcatgtagcctttgacctcatagggactgggcacacgaagggccccatggaaaaggtgatttttccatgaccaccctgagtctgatggtaaagagggagccatcagcaatgcagggacatgtgcgatgtcttcccaccttccctgaggtccaagcagggctgtggggctgagttccaggtgaggcagaattggagagggcagtggaggctttccctcttctagttgagagctatgcgcctcattcaggcagtgaacttcagttgctcagcaggacaacgactgagtcaggaatcagagttaaaaacacttctcctactccacccttactgcatcccaggcgtttccatgtctttaacctctgatcttctctccaagatcctttgaagtcattgcaagggctctagctacctgaagccctatcattgtctgggctctttcctttgtcacagatccccttctgtnaaaagtgtcccactna

SEQ ID NO: 1047 - DNA, 1000 bp, Homo sapiens
gcaagatggcggtagtgcgtcggctgctgccccgggtctggcagaactcgggtkttttgggctgagacagtggcagctgcggccccgaccccaagtgcggggacctccggcgaataaagggtttgtgcaagtttgcaaacatgttcaccctgtctcagacctcgagagcatggttcatcgatagagcccgtcaggcacgagaagaaaggcttgtgcagaaggaacgggagcgggcagctgttgtgatccaggcccatgtccggagttttctctgtcggagtcgactgcagagagatatcaggagagagattgatgacttttttaaagcagatgaccctgagtccactaaaagaagtgcactttgtattttcaagattgccaggaaactgctgttcctattcagaatcaaagaggataatgagagatttgagaagttgtgtcgcagcatcctgagcagcatggatgctgagaatgagcctaaggtgtggtatgtgtccctggcttgttctaaggacctcaccctcctttggattcaacagatcaagaacattttgtggtactgctgtgattttctcaagcagctcaagcctgaaatcctgcaggactcccgactcatcaccctgtacctcacgatgcttgtcaccttcacagacacttcaacgtggaaaattcttcggggaaaaggtgaaagtcttcgaccagcgatgaaccacatttgtgcaaatataatgggacatctcaaccagcatggattttattctgtgctgcagtgctgtgatgggctgtttcctgatttggtttcatatgctcctcacaacaaccctgtgaggtggtccgttggcagaagctggtatgactggcagttgtctcgctagaggaaccttctacttcataccataattaaacggcttctaaaataatatgatgtctttaaattttaagtctggcattatttgtattagctgtttttttaactttattattaaagaatttctaacca

SEQ ID NO: 1048 - DNA, 573 bp, Homo sapiens
  misc_feature (512)..(512): n equals a,t,g, or c
  misc_feature (555)..(555): n equals a,t,g, or c
  misc_feature (561)..(561): n equals a,t,g, or c
  misc_feature (570)..(570): n equals a,t,g, or c
  misc_feature (573)..(573): n equals a,t,g, or c
gggcaagcccgggttctacccctaatgcaaatacccaccagggagatgtctagaggcagactcctgagtgaggwgttgcagcccaaaggctgcagcattgccataccattcccatggagttgccaactattctcaggccaagggccatggggaagatggagcaaacctagcccccaagccggtgggctagaaagtacaagaaaaggcagcacgtggttttatgaaggtatcttaggtggagctactccccacctyccaccaacatatacattttgttgcakgaaatgtttaattccgcatgatgtttccctctccttccaacaaaagaaggtcaaactgtgggtcgtagagccttgacaatgttgtcctcctgttcatctgtgcaccacttgacagactgtagcttctcttgctctcgaccggccctgcattcttcgcaccctcctagctctgaaatcaactctcttcggtcgtatccaccttgcacccgcaagtcaaagccgccccttgtngaaaaatccctccacctttccgttccccgctaggtcaaccccnctgtanacagggaanccn

SEQ ID NO: 1049 - DNA, 921 bp, Homo sapiens
  misc_feature (366)..(366): n equals a,t,g, or c
agaaggtttttctgtatcataaccatagcaaaaggtaagccaattaatctgtagtaaacattattttataatattgagattcagttacttgtcctgaatttttgaaattcttatgtcctttactagtgtttcatttaccttctctattcccagattggatagaagtgcttgacatgcctttttaaacaattatttaaataatacatgctagttataagaaaaaaaaaatcaactgaaatttagcagtaagctgaaagatcacttaaaatcctaccactcctcaaaaaactattaaaatcaaatgaccatgaatgcatgttagggcatctctgtatgtatatacagatagatagaatggattttatnaaaaatgggattactatagtcctgcagtggkttaagaagtatggaattttacctcattctttaaatttgggtggcattcagaaagcccttctaaaaccttctaataaattggatcagctgagtttagacttgtaatttattttttaaaacaaagagggcatattaaakgagtaatttggaaatacttcagrtgrataaataacatctctgcaacttcctttttctcctgatcagtcctgtgagtgacccttgataacttttcttaaaagcaatatgagtcaaccaaagaataagattaatttttgaggatttgtgataaccagaagaaagcactgtaggctgtgacaacctgtgagggccgagagaaatacaggggagccaactggtgatccatattggctttcatagagtggtagtatttttgtgtcagcttgttacatgcctgaacctctggattgcagcagtgttgtcattgtaccagcagttgctcagactctaatcagagtctgatttaccctcaataaagttctgtacgcatcagattggaaaaaaaaa

SEQ ID NO: 1050 - DNA, 381 bp, Homo sapiens
gcgacctttgcttacaagaagtagtctgtctgcataggatgtgatagctatctctgttcattttacaatgtggggcaaagttactgtttctagacaacccaactgctttccctgtgcagctttgtagaaggacattggcacagtgacttctgcggcggggatttattmatggattttacaatgctaacgtggtwtyccttcgggraaaaaactggcaactagaatccttgtcactgataagcaaaggaaatcctgatttttttgtaaattatgtgagacaagttgkttatggatttttatatgaattacaatttactgtacatcaaatcttagtctcagargagttaatttatgtaaagtgtttaaaaatttatacttaaa

SEQ ID NO: 1051 - DNA, 762 bp, Homo sapiens
  misc_feature (698)..(698): n equals a,t,g, or c
  misc_feature (708)..(708): n equals a,t,g, or c
  misc_feature (739)..(739): n equals a,t,g, or c
cttcccccgggggaaggagctcccttctcctatcccctgtggtcagcaggaccagctgccctgacctaccctggagctgtttgagtgacagcctccatcagggtcatcctacagcctccaagcrggctttcccctggacaaatgccactgcaacatttatgtgtgaagccaaaatcaccctgcagcagagccaatactgatcaactgaaagtaaatccatggagtcctcattgacacctcttttctgcacaaatactggaattcaatgtcaagagaaaatgacctctgctcaaaagggagaagagtctcaatttcagcaagtacctgtcatgaagggtatgaccttaatgatgtacataaaataaaacaaatgaagaaatggaaaacttttagaaattaaggtgtacttgaaaacgaatatctatcatatgacccctgcactccctctgtatcatctcaggaggtttcaggggcctgttgacatgaagtttcgaagtttcatgttggctttggaatggtagcaaaagcctttcctggctgagatgatgcttaaaacacacctcacttattgtacatgttggaaccaggacatgagagacatagraaaacagaaagtcatgaatgttaaattgaatgagaaggcttaacatgcatgaaaatacagatggacctgcaggaaaattgagcaaaccccctanattttggttnccttttccggaaattggggcccgggggcttnggcctggcccccccctggaattt

SEQ ID NO: 1052 - DNA, 396 bp, Homo sapiens
  misc_feature (392)..(392): n equals a,t,g, or c
  misc_feature (394)..(394): n equals a,t,g, or c
  misc_feature (396)..(396): n equals a,t,g, or c
ccagcaggagaatcctcccctgccccttggctcaaaggccctggagcccacctcccagaagcccggtgtgggggcgggccacgggggagatcccaagctcagtccccacaaagttcagggccggtcggaggcaggggcaggtccgggtccaaagcaaggacaccacagctcttccgactccagcagcagctccagcgattcggacacggatgtgaagtcccacgctgctggctccaagcagcacgagagcatcccgggcaaggccaagaagcccaaagtgaagaagaaggagaagggcaagaaggagaagggcaagaagaaggaggctccccactgaagggccctggacagggctcattaaaccttcctctmtgccttcaaaaaaaaaaaangnan

SEQ ID NO: 1053 - DNA, 496 bp, Homo sapiens
  misc_feature (74)..(74): n equals a,t,g, or c
  misc_feature (384)..(384): n equals a,t,g, or c
  misc_feature (471)..(471): n equals a,t,g, or c
  misc_feature (488)..(488): n equals a,t,g, or c
cccgggatcgaactcctgacctcaagtgatccacccacctcggcctctcaaaatgctgggattacaagcgcgancaccctgcccggccgaaaagatctcaaacattcatctcttacaagatttagatgactatcatcaatatgccttaacatcagtagtttaggagactctagcccactttgtctagttgcaaactgtaattctccctgtggtcccactgaatatcattccacagcattcttggatatatatgatgtattgacaattcaggtctagatagaaatggcccctattgcttcatgaagaatatcctttccccaaatgtcttctgaggagctcaagattaaagctagtatcctgtacagacacttgcaggactgctangtatgatatatattgacccctatgggagacaaaaatgtgggcaaccacccctattctgggatccttaaaagatgagaaccatatcanaaagttctttacaggtncccccaac

SEQ ID NO: 1054 - DNA, 469 bp, Homo sapiens
ctttttttttkttaacatagataacatttttattttaaaaaactatttttttaaaacaaaaaatactgtgaaaagagtggcattgtttttatatttttgcccatctctttcatgccaggcttaacagaaactcatacctgcttgtgcgtgtagtctgttgcaatatcacatatcatgtaacctccggaaaaccccactgtatgcatgtgagagaaggcgaatcacatgttcgtgttgttataaaaatagtgttaactttgtagaccccttgaaagggtcccaggagcccccaggaggttgcagaccctaaatagtgaagggcagcatctcttcgttcctctcagggcctggcacaaagtgagtcyctgaaagcatttgctgagtgaatcgggcagcagggtactgggtttttgggctgggagtagggacttcttcctccctgggaggccggagaggctgtggaatgcat

SEQ ID NO: 1055 - DNA, 1402 bp, Homo sapiens
  misc_feature (26)..(26): n equals a,t,g, or c
  misc_feature (88)..(88): n equals a,t,g, or c
  misc_feature (97)..(97): n equals a,t,g, or c
  misc_feature (131)..(131): n equals a,t,g, or c
  misc_feature (1325)..(1325): n equals a,t,g, or c
  misc_feature (1344)..(1344): n equals a,t,g, or c
  misc_feature (1355)..(1355): n equals a,t,g, or c
  misc_feature (1394)..(1394): n equals a,t,g, or c
ccccccgccccccgcacccccgaaanccagtgaaggtgaagactccgcggcccgcgggcgtgccaggagagcggactgtttgatgtgntgccggggnccgtgcaggggcgagtggtttcgggcgggggggnagaaaagatttttttcttctcttaatcggaatcgtgatggtgttggattatttcaatggtggggttaatatagcatgttatcctgtctatcttttaaagatttctgtataagactgttgagcagtttttaaaatagtgtaggataatataaaaagcagatagatggcgctatgtttgattcctacaacgaaattatcaccagctttttttcattcttaactctttaaaggattcaaacgcaactcaaatctgtgctggactttaaaaaaacaattcaggaccaaattttttctcagtgtgtgtgtttattccttataggtgtaaatgagaagacgtgtttttttccttcaccgatgctccatcctcgtatttctttttccttgtaaatgtaatcagatgccattttatatgtggacgtatttatactggccaaacatattttttcttttgtccctttttttctttcctttctttttacttcctttatttctttattccttccttttcctttttttcttttttttttcttttttttttggtagttgttgttacccacgccattttacgtctccttcactgaagggctagagttttaacttttaattttttatatttaaatgtagacttttgacacttttaaaaaacaaaaaaagacaagagagatgaaaacgtttgattattttctcagtgtatttttgtaaaaaatatataaagggggtgttaatcggtgtaaatcgctgtttggatttcctgattttataacagggcggctggttaatatctcacacagtttaaaaaatcagcccctaatttctccatgtttacacttcaatctgcaggcttcttaaagtgacagtatcccttaacctgccaccagtgtccaccctccggcccccgtcttgtaaaaaggggaggagaattagccaaacactgtaagcttttaagaaaaacaaagttttaaacgaaatactgctctgtccagaggctttaaaactggtgcaattacagcaaaaagggattctgtagctttaacttgtaaaccacatcttttttgcactttttttataagcaaaaacgtgccgtttaaaccactggatctatctaaatgccgatttgagttcgcgacactatgtactgcgtttttcattcttgkatttgactatttaatcctttctacttgtcgctaaatataantggtttaaggcctaatggntgsatgatagncatawggkgtcaggtttataactttgggttaaaaattgnaaaagggg

SEQ ID NO: 1056 - DNA, 858 bp, Homo sapiens
caaactgaggctttgtaccccacggtaaataggactgaaagcaaattcacagggagcaactgatccattccacaacagaatgctccctgtcaattcgctttccattctgttgtgtcctgtctcaaaaaaaaaaaaaaagtcaaggagggtttcccagagtggccacttgattagagacctagcacaggaggaagagatgggcagggagagtgacggggagcagcacagtccctgggagcccgaagtgggtgggcacagggctccctaggagaatggaaggacatctatgagctgtagcccaagaggaagaggtcactggggctagatgcggcagaccctcgcaggctttgggaagggcttcagaattcagcctgaggacaatggggagcccttttgggatattaaacttgagtaagatatgagcatatttgcatcttgaaaaatcattatgggaagatggctgggaagagaggaggagtggcagaagaaagataggttggagacaattgattgctcgatgatataaaatgttaagtaccatgaatgatgctgttaggctggaatgcgccaagcataaaggtggggcatggcatcaaaaggtaggtcaacatattaaataattccatgtattgaaatatccagaaaatatatagacagatctatagagatagaaactggtctgcccaggactaggggttgtctaaggataaggagcttcttttttggatggtgaaataacctaaaatatattgtgccattgtttgcacaactttgtgaatatattaaaaacctgttaattgtactcactaaatgtcctccttttaaattaagctgttctkgacaaraaaaaaaaaaaaa

SEQ ID NO: 1057 - DNA, 321 bp, Homo sapiens
  misc_feature (32)..(32): n equals a,t,g, or c
  misc_feature (35)..(35): n equals a,t,g, or c
  misc_feature (316)..(316): n equals a,t,g, or c
aggaaccggcagcgacggccgcggaaacgagntcntgcgtcctctgtggcctccccgcggcaggaaaatcgactttcgcgcgcgccctcgcccaccggctgcagcaggagcagggttgggccatcggtgttgtcgcgtatgatgacgtcatgcccgacgcgtttctcgccggggcaagagcgcgaccggcccattcccaatggaaattgcttcgacaggaactgttgaagtacctggaatacttcttgatggctgtcattaatgggtgtcagatgtctgtcccacccaacaggacttgaagccatgttgggaagantttat

SEQ ID NO: 1058 - DNA, 535 bp, Homo sapiens
  misc_feature (11)..(11): n equals a,t,g, or c
  misc_feature (14)..(14): n equals a,t,g, or c
  misc_feature (25)..(25): n equals a,t,g, or c
  misc_feature (28)..(28): n equals a,t,g, or c
  misc_feature (36)..(36): n equals a,t,g, or c
ggaaagggaanganattgcccattnccntttccatnacattcatgcccaatggatgctgcaagacctgcacccctcgcaatgagaccagggtgccctgctccaccgtccccgtcaccacggaggtttcgtacgccggctgcaccaagaccgtcctcatgaatcattgctccgggtcctgcgggacatttgtcatgtactcggccaaggcccaggccctggaccacagctgctcctgctgcaaagaggagaaaaccagccagcgtgaggtggtcctgagctgccccaatggcggctcgctgacacacacctacacccacatcgagagctgccagtgccaggacaccgtctgcgggctccccaccggcacctcccgccgggcccggcgctcccctaggcatctggggagcgtgagcggggtgggcacagccccttcactgccctcsacagctttacctcccccggaccctctgagcctcctaaagctcggyttcctstyttcagatatttattgtctgagtttttgttcagtccttg

SEQ ID NO: 1059 - DNA, 433 bp, Homo sapiens
actcggcgctcgacaggcgtctaccagcttgtcttccggtttcgtcgccgccgcagcaacctgccgagttccgagcgaccgatggagatggcggctgcggctgagtgacggacggtggaggcccagagcccgggcctgaagggggggacaaacctgrstgcccgcaggagcccggcasggtactgtgctaaaccctggggagacggcgaagtggaaaacatatagagtctgtgccctcccagattttacagtcttacttggtcacttcacgtatgtacctgcggttataaattgagatgagtgctgtgaaggagaagtccmttctgatgctctgagtgtcttacaagtatcaagaacttactatatgtggttgaataaacaatcaaggtaaagagcatyaagtaaaaacttctgcttgtgataagtacttcag

SEQ ID NO: 1060 - DNA, 714 bp, Homo sapiens
  misc_feature (674)..(674): n equals a,t,g, or c
ttcccagctcttcaaactttaagaaactgaagagggcagcaaagtaacctggccatcttttatcagggcagtcagaggcacctgactggctgagtkgcagwtagattaatggaggagctttgttgctgtattgcctagtttcatcctcttggactcttttcatatacttgaatagcctaattatctgaagccagaagtgagttgacagtgccagttagtggtggcagtaattatgactgaaggtatctgtgagcattaaagcattccattcagtgacatgaatgaaacttaccctagctctttaagataaaataggtgtaatatctcaataggtattctgtaagacgtaatagtagccctagagttgatggcygtgtttttttctacctctcagaattttaatgcatcttccttttagattaaaaaaaaaaggtaacttgggaagcttcaactctttgaccacagctatataagttattttttaaaacaaaatactttcaagtttatttactcactaaaaatataattatggtcaagacatttcttttcaataggttagtcattttcttgacgtctattttttttaacttgagcctgcataaaaagaattaaaccctgaagaagtattttatgtcatatctgctttcaccagattgggtatagttctgtttttngtttgttttttaaaccttaagtgttctcagtgttttcttt

SEQ ID NO: 1061 - DNA, 377 bp, Homo sapiens
  misc_feature (12)..(12): n equals a,t,g, or c
  misc_feature (80)..(80): n equals a,t,g, or c
  misc_feature (370)..(371): n equals a,t,g, or c
agaattttttanagtgttaaacttggttgcctaacatcgcccccatataactttaagcaaacaggcaaccagtgtaaacncattattcaataccacagaatacccagaaatgtttgaaaggtgacaaggaatccatctatcctgcaaaataaaaggcagaaagctgctgagtaacatctgtaaacgttggaaactaccatgttcagtcaaatacctcacaaacaggtccggatgtgsaaaaaagtctgcatacatttctaaaagagatcttctttcaagaataaacgttggaagaactacctgaaaaacatacacatttgacccttggaagatcaaatttctcttcagataaacagactaaaaaaaaaanntgggta

SEQ ID NO: 1062 - DNA, 811 bp, Homo sapiens
tataatactattgttatattaaatgtatttactcacactttgcctctaaggagctagagtagtcctctggattaaggtgataaataacttgagcactttccctcaaccagcccttaactagaacacagaaaataaaaccaagactggaaggtcccctctacccctcccaggcccagagctagctgactgtgtatgagcctgggagaatgtgtctcctccacagtggctcccagaggttccacacactctctgaagctccttctcccacactgcacctactccttgaggctgaactggtcacagacaaactgggatccagcacagtccagcagttctcaaaatgaggtcctcaggccacagtgcgtgagaacttgcttggctgtttgktaaatgctaattcttgggccccatcagarctactgsatcgaaacctgggggtaaacccaatattctgcatttcttatcaactctttggggatactaagtgtctgaagggtgctatttcctgacaaaggcccaagagggaacagacatggtagcaacagcacaggcctgtgctaagaactgttatgggccgctctcatgggatcggaatgtccaaatcgggttcggcctatgcgtaaagtaatgccccctacttgaaaaaacctccttgcgaaaaaaaaactttttggccggttcctttgggtttctcagccggttaagatgggggggctgcgtccgacctggtgtgaggcctctgtgtgagagcctcgatgggtttggtatccagtttcttggggtagggttccaaggggattggtccagtggg

SEQ ID NO: 1063 - DNA, 466 bp, Homo sapiens
  misc_feature (404)..(404): n equals a,t,g, or c
  misc_feature (456)..(456): n equals a,t,g, or c
  misc_feature (458)..(458): n equals a,t,g, or c
gctcgaactgtatggctgcatttacccctctttgcacctaatgtccatgaatatctaagttcaagagagatgagctcagttcctaggtcatgccccagtctgtagtgacatgctcctgtatgtaacggaaatggccatgtctacaggaggtaaaatcacaccaacctgggaagaggaaaagccagtgaggggcagtacagcaggggcagccctctccactgaargcagttgtttgcctgactccatggcatttgtgtccattagagtctaraagargtgttggcaaactttctacaaagggccarataktaaatatttttggctttggaarctaratggtctctgtcataaccactcmactccgccattgtagtgcaaaagcaaccatagaccatatgtatacnaatggatatgggcctggtccaataaaaacttttatttacaaaaagcaaggcnantgggccca

SEQ ID NO: 1064 - DNA, 557 bp, Homo sapiens
  misc_feature (6)..(6): n equals a,t,g, or c
  misc_feature (86)..(86): n equals a,t,g, or c
ttcggntaaaaaaaaaaaaaaggactgtgtaaggttacttaactcctctggggcttgtccatcttatctgcaaaaatggggatccnctagcgtgtatctcgctgagcggtacagatgaactatgtaaagcatttggcccaatgcctggcactgctaagcatgcaataaatggaagttactatcataatgtgtaacacatataattatgacaattatatttccaagatattctgggatctttacagtttcataattttgctctttttactatacaacactccttttattgaaacaaatacagattttggagtcagacagacctagtctggatttgaattccagctctccttcttaccagcctggggccatggagaatgttgtccatttccctgagcctcagtgttcttctctgtaaaatgtggatgatacctgactcccaggcattttgccaggattacatgggattcctacacagtgcaatgtctagtgataatataaatactaaaagcaacttgttaaatgtataaataaatgtgatttatttttgctcctttaaa

SEQ ID NO: 1065 - DNA, 2872 bp, Homo sapiens
catgcctgatggagccactttggctattggatcttcccgggggaaaatatatcaatatgatttaagaatgttgaaatcaccagttaagaccatcagtgctcacaagacatctgtgcagtgtatarcatttcagtactccactgttcttactaagtcaagtttaaataaaggctgttcaaataagcccacaacagtgaacaaacgaatgtttaatgtgaatgctgctagtggaggagttcagaattccggaattgtcagagaagcacctgccacgtccattgccacagttctaccacaacctatgacatcagctatggggaaaggaacagttgctgttcaagaaaaagcaggtttgcctcgaagcataaacacagacactttatctaaggaaacagacagtggaaaaaatcaggatttctccagctttgatgatactgggaaaagtagtttargtgacatgttctcacctatcagagatgatgctgtagttaacaagggaagtgatgagtccataggcaaaggagatggctttgactttctaccgcagttgaactcagtgtttcctccaagaaaaaatccagtaacttcaagtacttcagtattgcattctagtcctcttaatgtttttatgggatctccagggaaagaggaaaatgaaaaccgtgatcyaacagctgagtctaagaaaatatatatgggaaaacaggaatctaaagactccttcaaacagttagcaaagttggtcacatctggtgctgaaagtggaaatctaaatacctctccatcatctaaccaaacaagaaattctgagaaatttgaaaagccagagaatgaaattgaagcccagttgatatgtgaacccccaatcaatggatcctcaactccaaatccaaagatagcatcttctgtcactgctggagttgccagttcactctcagaaaaaatagccgacagcattggaaataaccggcaaaatgcaccattgacttccattcaaattcgttttattcagaacatgatacaggaaacgttggatgactttagagaagcatgccatagggacattgtgaatttgcaagtggagatgattaaacagtttcatatgcaactgaatgaaatgcattctttgctggaaagatactcagtgaatgaaggtttagtggctgaaattgaaagactacgagaagaaaacaaaagattacgggcccacttttgaaatttcagtgaataccttaatgttctgtaatttgggaagtttctggcaacacagaactacatagaatcagtattgttttcatggcctccagggaaaaaatgtttttcaagtaagagtaaaagggtgatgggattttataccaacaactgtttcatcttaaaaatatgtatatttttatattaaaaattgtacagtatgtcatctaccccaataggaaagtcaacaggatctttattttttgaaagctttagccatccactaagtgccctttttcataagagaagaaaattgtgcataaaaattggttatgtttgttttttagtcatcttttttaacatatatttttgattgacaaattgcctttcaaatttttggggctagttgagatttaaagagtttgatatgccttctatttttatggagaaagtaattttaaaatggcaattggtgtttctaagccattgactaataaaacatagggttggctagtaattattttgttaacttgatgaagtcaagtatgactattatttattgtacatttgataagacaatttttggaattttgaattgcacaaattacatgatatcttttgcatttatgttactatattgtacttctgacaaatctttattcctgggtggtatttttaagatatctttacctataaaaaatgtttaaggttcataggactcgacaagagctatctggtgattttctcattagtaacatgcaacgttgtactgcaaaatttcaatcaacatgacaacttataatgagtggagatttcatattaggtactaaatattatagtattatttctattttctttttccaaataagaagcttggattattttattttgtggtctttatcattaactttaattctttctgtactgtgtataatatttttatattattggccttaccataaaattatttagaaaggttgtcaaaataagttatacctctttggcaatagatagatgtatacatctacctactatgatctacaattttaggttaagtgaagcttgggggggctactgacttggttaccttcttgtctcttgtcccaaagatttaaactatgtacctttgtatagctcttctgccccattttgacttctgagatgaaagtatttactaaaattaaaaaaaaaaaaacaaaaaacaaacctttagctcactaactttatgggtttctgaagtgatggaaatttttaaggatatatttaataagcataaacttactaataattacttccaaaaataaaaacaggaatattacttttacccagtgtggtttatagcatacatttgtactgaagcatatagggatgttaatgtgatcttttcctgacagattatgaaagcattatgacttgtaacaagtttccttgtatatcactaacaggtttagaagacataaatattagtgtgttttgcctacatggtgtatttaaatctattaatattttcctgttgcttttttaaaaaaataaatacacataatgtatattaaaagaggtgggatgaaataattttagtaattatgtgtacagatgaaacatttttgtcatggaatttaaaagctaagtaagtataaaaaataaaatgttatatgcaaaaaataaaaaaaaaaaaaaaaaa

SEQ ID NO: 1066 - DNA, 552 bp, Homo sapiens
gtagactagagaaggcatttggagatcgttttagtaaattatcttaaccaatctaaaaatacttctgaactgtcaaccagaacacagaaatcctgtattacttgctgtagtctggacagtttaggggaacgtggcaccgatctcatcttcaccgtcgatcagtggttctctgacttggtccagtggccgcacaccagctagtgaagaaaaccacagactccaactgcactgtgtacgstctggtgtcctcatttccaaaaaaaaaaaaaaaaaatctccaagatagagtttaagaaatctcatttgagttgccctgctaatatttgcagctcgctggtgggtgccgtggaggccagtactcaccgtcaggctgtggcaggtacagtgaaaggaaaaactccatgagagaacggtggaaagttcacctgagagtgaaacgcatgccagttagagtggctgaaaaatagcatggacaacaccagctagtgaagaaaaccacagactccaactgcactgtgtacgctctggtgtcctcatttccaaaaaaaaaaa

SEQ ID NO: 1067 - DNA, 871 bp, Homo sapiens
  misc_feature (754)..(754): n equals a,t,g, or c
cccacgcgtccgcagagaagtacagagtcttaaggaacaacatcaaaaagaaatatcagaactaaatgagacatttttgtcagattcagaaaaagaaaaattaacattaatgtttgaaatacagggtcttaaggaacagtgtgaaaacctacagcaagaaaagcaagaagcaattttaaattatgagagtttacgagagattatggaaattttacaaacagaactgggggaatctgctggaaaaataagtcaagagttcgaatcaatgaagcaacagcaagcatctgatgttcatgaactgcagcagaagctcagaactgcttttactgaaaaagatgcccttctcgaaactgtgaatcgcctccagggagaaaatgaaaagttactatctcaacaagaattggtaccagaacttgaaaataccataaagaaccttcaagaaaagaatggagtatacttacttagtctcagtcaaagagataccatgttaaaagaattagaaggaaagataaattctcttactgaggaaaaagatgattttataaataaactgaaaaattcccatgaagaaatggataatttccataagaaatgtgaaagggaagaaagattgattcttgaacttgggaagaaagtagagcaaacaatccagtacaacagtgaactagaacaaaaggtaaatgaattaacaggaggactagaggagactttaaaagaaaaggatcaaaatgaccaaaaactagaaaaacttatnggttcaaatgaaagttctctctgaagacaaagaagtattgtcagctgaagtgaagtctctttatgaggaaaaaatwaactcagttcagaaaaaaaaccggttgagtagggatttgga

SEQ ID NO: 1068 - DNA, 544 bp, Homo sapiens
  misc_feature (365)..(365): n equals a,t,g, or c
  misc_feature (395)..(395): n equals a,t,g, or c
  misc_feature (408)..(408): n equals a,t,g, or c
  misc_feature (434)..(434): n equals a,t,g, or c
gctcgaactcttgagttcaagcaatccacctgcctccacctcccaaagtgctgggactacaggcgtgaatcagtgcacctggcctgatagtcacctttgaagagttgtgatataccattttactagataaatggtaatatgccattataatgcaactcaatgtagatgagtctggaagaggctgggctcaaatggtcccacatgatccagggatagacccagagtttccagaggaatgggtggataacacttattcaaataagaatcccttcttactcttctcaataaaacttttgtcaaagataatcgacagactgtagctatactctgtggtgattgtctggagttacatgttgctgattganggtgaattcatatgctttagaaactagaancgcaagtgttcangttgctaatctgctttggaaatgaanggaccagtgaagaccttcactcgcaatgaargtgtwcttttctatgcaattaggctcttggctacctgccagaaaaaccagatgttttcctactgaagcaatttcaaaag

SEQ ID NO: 1069 - DNA, 597 bp, Homo sapiens
tctgtgccatgagaaactgagcctactagaagatttcaaagacttcagagattcctgcagttcatctgagagaactgatggaagatattccaaatacagggttcgcagaaattctcttcagcatcaccaagatgacaccaagtacagaaccaaaagtttcaaaggtgacagaacctttctggaaggttaccacactcgtgggttagatcactcatcctcttggcaggatcacagtcgcttcctgtctagtccaagattttcatacgtgaactcatttaccaaaagaactgttgctccagattcagcttcaaacaaggaagatgccacaatgaatggaacaagttcacaacccaaaaaagaggaatatgggagctaaaaaagcaaatgtaatttgttattttacatgagtatgttacaaataataacatctctattcttacagcaatttggcccagattatctaacagacatacctgcagctttggctctttggtattgccaaacattgacaaaagtgacaatactgttggtccttgtgaatggtaaaccaatccaaataatatcagatcatgaatgatgtgcagctaatttatttgc

SEQ ID NO: 1070 - DNA, 425 bp, Homo sapiens
  misc_feature (96)..(96): n equals a,t,g, or c
  misc_feature (334)..(334): n equals a,t,g, or c
  misc_feature (344)..(344): n equals a,t,g, or c
  misc_feature (380)..(380): n equals a,t,g, or c
ccgtagggctgcatagatgagcagaacgaggccagcaagaccaatgggctgggggcagcagaggcattcccctctggttgtacagcgacagctggngagagaaggcagcagccctgaaggcagtaccaggaggacgatcgaggggcagtctccggagccggtgttcggagatgctgatgtggatgtgtctgcagttcaggcgaagttgggagccctggaactgaaccagagggatgctgcagctgaaactgagctcagggtgcacccaccctgccagcggcactgcccagagccgcgagtgcacccgaagaaaacaaagccaccagcaaagctncccaaggtancaactcaaaaacccccatctttagccctttttccancgtcaagcccctgcggaaatctgctacttgccaggaaatttggga

SEQ ID NO: 1071 - DNA, 593 bp, Homo sapiens
ggttctagatcgcgagcggccgtccttttttttttttttttcagttcaagcgcaattttgccaccaatttgattacgaaaaatctttcgggcttccagggagctttggagcctggaaattgcagatgagggatgggggcctgcactgtttcgcggctggggagagggagctcatccgaagtcttccgacagaggtgggcgtcatgcccgacgctgagcggagtgggtctcctcgagcccaggctccctgcgggcgctgtcctcagcgagcctccccgcctccgcgcccggggtcgtacctgcttcacgatctcctaccgcggcgggccgcgtacctcctggatggcctcttagacgttctctgagtcgctgcgcgacaggggcagcaggcacacccaggagcccgctacgctgcaggccttgaagctgccgctgcttccgaggttgccggcgggaggcgagacgacggcgcgcgtcaggtcgtccagggactgcgcgggccgcacgggcgccgtgggccgcaggtacaggcaggcgggcaggccggtgtactcgaaggggtgctccaccagtacgtacacgtccccctccaca

SEQ ID NO: 1072 - DNA, 332 bp, Homo sapiens
ggcagagctttattaaagtacagtattataagaaatcacaggcgtgagcacctgcgtccagccaaaaagctatttttgaatgtgatctgtgtgaaaataattccctatggtatgacatatgataggcagggatgatgtatctcakaaatcatactcctgtcttgatatcccatcaaatatcaatgtttacatttagcgtttggatgtctggcaggacattaaaaaattggcagagctgtcccacacatgcagaacatctatagcgttcttgcctcctcaaaggtaatcttcatgtgacaacaacaacaacaaaaaaaaaaaaaaaaaaaatt

SEQ ID NO: 1073 - DNA, 2340 bp, Homo sapiens
aggcgctgcggagacgcgtagaggagcgcgccccccggccgmtgccgmccctggcccgtgccgtcaccccgcttctccgcgcctcgggcggtacccagccagtccccagcgccgcgctaccgcgctgaccggccctccagacgcctcccggtacccgggaccccagcccggccgctcgcccgcagcccgccggccgcacacgtccccggagccgggcctagggcgggcggcagggcggctcggcgcagtcaggctgggctctgtagcgtccccatggccgcggccggctggcgggacggctccggccaggagaagtaccggctcgtggtggtcggcgggggcggcgtgggcaagtcggcgctcaccatccagttcatccagtcctattttgtaacggattatgatccaaccattgaagattcttacacaaagcagtgtgtgatagatgacagagcagcccggctagatattttggatacagcaggacaagaagagtttggagccatgagagaacagtatatgaggactggcgaaggcttcctgttggtcttttcagtcacagatagaggcagttttgaagaaatctataagtttcaaagacagattctcagagtaaaggatcgtgatgagttcccaatgattttaattggtaataaagcagatctggatcatcaaagacaggtaacacaggaagaaggacaacagttagcacggcagcttaaggtaacatacatggaggcatcagcaaagattaggatgaatgtagatcaagctttccatgaacttgtccgggttatcaggaaatttcaagagcaggaatgtcctccttcaccagaaccaacacggaaagaaaaagacaagaaaggctgccattgtgtcattttctagaatcccttcagttttagctaccaacggccaggaaaagccctcatcttctctttctctcctcagtttacatcttgttggtacctttctagccttagacaaatgatcaccatgttagccttagacgaagaagctggctagtcctttctgtgaagctaatacaatggtcatttccagacaaatttaaaggaaacactaaggctgcttcaaagattatctgattcctttaaaatatatgtctatatacacagacatgctctttttttaagtgcttacattttaatagagatgaatcagttttggaatctaagctgtttgccaagctgaagctacaggttgtgaaataatttttaacttttggaatcatactgcctactgttactctaaatagaaatatagggttttttttaatgtgaatttttgcctatctttaaacatttcaatgtcagcctttgttaaccttaaatacactgaattgaatctacaaaagtgaaccatctcagacctttactgatactacaacttttgttttctgatggccaaaataccaaatgcctgttgtatttatggattaaaaactgcttataaaaccctgtgttactactcctactcttggagatgataatattctatgtggtcaaatatttggactcatttaggacttagatatttcagtgtacttgattttttaatttaactctttttcacagccacgctaagggtaaaaaggaataatttccttctgtcttccttttcaagtatttctgggtaagggattcaaaaaactaaaactgtttttgtttgtaatataaaatatggaattgatctttccagggtcagagatgattaatgtttttgctatatacttttatacattattttcttatcaaactagttaacaagtatttttatatgtttgtaagcagatatgctttcatagcataccttgtgtatatgtaaagataagtatttaattctcactgttcacttttaactgacaaagaaaaacaagtggaaactacagaaactgtggtagaacttttacttgctggtctggtcttggttgtacccatctttggccagtcacataactactcaagaaaccttcccaatagagtacaacaggatgagactctgaaatcactttcagtattccctgctagatattgattgttatttcaagtattaagtgtaagcttttaatggataattagtataactgtggatggcatctgattttgtttttaattctgtggattgtgtttaagcaattcaatagtatgttcctgattttgagatgctaagtggtattgcacagttgtcactttatcaagtgtgtacaacagtcccatgaagtttatagagcatacccttgtatagcttcaggtgctagaattaaaattgatctgttatcacaaaaaaaaaaaaaaaaaaaaaaggctctttaattaggcg

SEQ ID NO: 1074 - DNA, 1647 bp, Homo sapiens
  misc_feature (262)..(262): n equals a,t,g, or c
  misc_feature (1609)..(1609): n equals a,t,g, or c
  misc_feature (1629)..(1629): n equals a,t,g, or c
gcggccgctgaacgggacgtaccaccaccaccaccaccaccaccaccaccatccgagcccctactcgccctacgtgggggcgccactgacgcctgcctggcccgccggacccttcgagaccccggtgctgcacagcctgcagagccgcgccggagccccgctcccggtgccccggggtcccagtgcagacctgctggaggacctgtccgagagccgcgagtgcgtgaactgcggctccatccagacgccgctgtggcgcggnacggcaccggccactacctgtgcaacgcctgcgggctctacagcaagatgaacggcctcagccggcccctcatcaagccgcagaagcgcgtgccttcatcacggcggcttggattgtcctgtgccaactgtcacaccacaactaccaccttatggcgcagaaacgccgagggtgaacccgtgtgcaatgcttgtggactctacatgaaactccatggggtgcccagaccacttgctatgaaaaaagagggaattcaaaccaggaaacgaaaacctaagaacataaataaatcaaagacttgctctggtaatagcaataattccattcccatgactccaacttccacctcttctaactcagatgattgcagcaaaaatacttcccccacaacacaacctacagcctcaggggcgggtgccccggtgatgactggtgcgggagagagcaccaatcccgagaacagcgagctcaagtattcgggtcaagatgggctctacataggcgtcagtctcgcctcgccggccgaagtcacgtcctccgtgcgaccggattcctggtgcgccctggccctggcctgagcccacgccgccaggaggcagggagggctccgccgcgggcctcactccactcgtgtctgcttttgtgcagcrgtccagacagtggcgactgcgctgacagaacgtgattctcgtgcctttattttgaaagagatgtttttcccaagaggcttgctgaaagagtgagagaagatggaagggaagggccagtgcaactgggcgcttgggccactccagccagcccgcctccggggcggaccctgctccacttccagaagccaggactaggacctgggccttgcctgctatggaatattgagagagattttttaaaaaagattttgcattttgtccaaaatcatgtgcttcttctgatcaattttggttgttccagaatttcttcataccttttccacatccagatttcatgtgcgttcatggagaagatcacttgaggccatttggtacacatctctggaggctgagtcggttcatgaggtctcttatcaaaaatattactcagtttgcaagactgcattgtaactttaacatacactgtgactgacgtttctcaaagttcatattgtgtggctgatctgaagtcagtcggaatttgtaaacagggtagcaaacaagatatttttcttccatgtatacaataatttttttaaaaagtgcaatttgcgttgcagcaatcagtgttaaatcatttgcataagatttaacagcattttttataatgaatgtaaacattttaacttaaggtacttaaaataatttaaaagaaaangttaacttagacattcttgngcttcttttacaactaca

SEQ ID NO: 1075 - DNA, 252 bp, Homo sapiens
gaggaattggaagcaaggggtctgagatggttgccatgggtatttccttctagattgtgttactgcgtgagaccattttcccactgtgggcatgttttccttgagtcaattttccaggtactctatattcagcactctcctccttccttttctttaattccattttagccacacacaggggaatgggaaagggcctgattaaatcaactatttttttttttttaaaattttaatcttttgggggcccaggaa

SEQ ID NO: 1076 - DNA, 1095 bp, Homo sapiens
  misc_feature (69)..(69): n equals a,t,g, or c
tcccccgcgcsttgcccgattcattaatccagytgccacgacaggtttcccgactgaaaccggccagtnagcscaacgcaattaatgtgagttagctcactcattaggcaccccaggctttacactttatgcttccggctcgtatgttgtgtgaaattgtgascggataccaatttcacacaggaamcagctatgaccatgattacgccaagctctaatacgactcactataggaaagctggtacgcctgcaggtaccggtccggaattcccgggtcgacccacgcgtccgcaaaatttcttcagtttattatctgtaaattgtacagttttctttttgaaagttttaatattgtcttcctttttaataacttattttatacatattgtgcagatgtaaatcttgtaattaatggtcaaactgtataaagggattggtagtcaaaacatgtacaaagaaatacctgtaaaactgttttgtctcatgttttattggaccaaagttgtggtttgtatggagtgtagtagtagtgtgtacaggtagaaaacttttaaatacagcatgcaggtgtttcagttagcttgttttcatcaccataactgcaaagatgtggcttagttgtattgcatgcttcctataatttaactctccataattgatgcctgcagtagtgtaaggcatttcatactagtctcctctagtagacctgtgacttactgtgttggacatattatttagacttagtcatacaaagaaacttagctcttttttcatctcacagtaaagcctatttccccaggaaaaaaataaatgcctttgaatgaaaattctgaaattgtaaatgtctattttaatattcacctatgaaagaatctgtgaatatatgtaaatacgtttaataaattttattggtcatgttaaatcattgtaaaacttttttacattgcttaatgttttaagcttaatagcctttgcacttttaaaataaaaaccaagtatgcaaatcaaagatatttggtagtcaaaataagtaaaagaaatataggaatattccagtcaaaaaaaaaaaaaaaaaaaaaaaaaaagggcggccgc

SEQ ID NO: 1077 - DNA, 661 bp, Homo sapiens
  misc_feature (619)..(619): n equals a,t,g, or c
  misc_feature (657)..(658): n equals a,t,g, or c
cagccctacaggcaacttgaacggagagcgctttgatcactcaccagcccgggaaggcaagccccagtcaggcggaaggtagctggctgcggggcggggcgactggcgggcggcgggaggcgccaaccggcacagacgactcccagctggccgagggcgggaagggggcaggcagggaagcggcccgcccttcgtcctgccccttcgccctaytctgtcacctccgytggaaggagtggaacccakacttgctggtctgatccatgcacaaggcggggctgctaggcctctgtgcccgggcttggaattcggtgcggatggccagctccgggatgacccgccgggacccgctcgcaaataaggtggccctggtaacggcctccaccgacgggatcggcttcgccatcgcccggcgtttggcccaggacggggcccatgtggtcgtcagcagccggaagcagcagaatgtggaccaggcggtggccacgctgcagggggaggggctgagcgtgacgggcacgtgtgccatgtggggaaggcggaggaccgggagcggctggtggccacggtgarcttgcakggaaatgggcacagagccargaagtggaaaaggagccanctgamctkcttcctgctttcctaagacagcaacacatnngaa

SEQ ID NO: 1078 - DNA, 164 bp, Homo sapiens
  misc_feature (146)..(146): n equals a,t,g, or c
attccttatacatgttaactaactctaaggggaaagagatagatcataaattacatgttaacgttgaggggaaattgatagatcataaattaaaatataatttaatatgttatatatttctattgatttatatacctatgaaatantttttatattgaaaggta

SEQ ID NO: 1079 - DNA, 1004 bp, Homo sapiens
  misc_feature (37)..(37): n equals a,t,g, or c
  misc_feature (40)..(40): n equals a,t,g, or c
acattaacgggaagcttcctatagggattgcgggtangcntcccaggtaccggtccggaattcccgggtcgacccacgcgtccgagttatttgagaattttggtgaaaaatatttagctgagggcagtatagaacttataaaccaatatattgatatttttaaaacatttttacatataagtaaactgccatctttgagcataactacatttaaaaataaagctgcatatttttaaatcaagtgtttaacaagaatttatattttttattttttaaaattaaaaatratttatatttcctctgttgcatgaggattctcatctgtgcttataatggttagagattttatttgtgtggaatgaartgaggcttgtagtcatggttctagtgtttcagtttgccaagtctgtttactgcagtgaaattcatcaaatgtttcagtgtgstyttctgtagyctatcatttactggctatttttttatgtacacctttaggattttctgcctactctatccagttgtccaaatgatatcctacattttacaaatgccctttcagtttctattttctttttccattaaattgccctcatgtcctaatgtgcagtttgtaagtgtgtgtgtgtgtgtctgtgtgtgtgtgaatttgattttcaagagtgctagacttccaatttgagagattaaataatttaattcaggcaaacatttttcattggaatttcacagttcattgtaatgaaaatgttaatcctggatgacctttgacatacagtaatgaatcttggatattaatgaatttgttagtagcatcttgatgtgtgttttaatgagttattttcaaagttgtgcattaaaccaaagttggcatactggaagtgtttatatcaagttccatttggctactgatggacaaaaaatagaaatgccttcctatggagagtatttttcctttaaaaaattaaaaaggttaattattttgactaaaaaaaaaaaaaaaaaaa

SEQ ID NO: 1080 - DNA, 1306 bp, Homo sapiens
  misc_feature (1289)..(1289): n equals a,t,g, or c
accgtccggattcccgggtcgacccacgcgtccgtgaggttacagattatgccattgccaggcgcatagtagatttgcattcaagaattgaggaatcaattgatcgtgtctattccctcgatgatatcagaagatatcttctctttgcaagacagtttaaacccaagatttccaaagagtcagaggacttcattgtggagcaatataaacatctccgccagagagatggttctggagtgaccaagtcttcatggaggattacagtgcgacagcttgagagcatgattcgtctctctgaagctatggctcggatgcactgctgtgatgaggtccaacctaaacatgtgaaggaagctttccggttactgaataaatcaatcatccgtgtggaaacacctgatgtcaatctagatcaagaggaagagatccagatggaggtagatgagggtgctggtggcatcaatggtcatgctgacagccctgctcctgtgaacgggatcaatggctacaatgaagacataaatcaagagtctgctcccaaagcctccttaaggctgggcttctctgagtactgccgaatctctaaccttattgtgcttcacctcagaaaggtggaagaagaagaggacgagtcagcattaaagaggagcgagcttgttaactggtacttgaaggaaatcgaatcagagatagactctgaagaagaacttataaataaaaaaagaatcatagagaaagttattcatcgactcacacactatgatcatgttctaattgagctcacccaggctggattgaaaggctccacagagggaagtgagagctatgaagaagatccctacttggtagttaaccctaactacttgctcgaagattgagatagtgaaagtaactgaccagagctgaggaactgtggcacagcacctcgtggcctggagcctggctggagctctgctagggacagaagtgtttctggaagtgatgcttccaggatttgttttcagaaacaagaattgagttgatggtcctatgtgtcacattcatcacaggtttcataccaacacaggcttcagcacttcctttggtgtgtttcctgtcccagtgaagttggaaccaaataatgtgtagtctctataaccaatacctttgttttcatgtgtaagaaaaggcccattacttttaaggtatgtgctgtcctattgagcaaataactttttttcaattgccagctactgcttttattcatcaaaataaaataacttgttctgaaaaaaaaaaaaaaaaaaaanaaaaamaaaaaaaaaaa

SEQ ID NO: 1081 - DNA, 150 bp, Homo sapiens
gacttgttctagatcgcgagcggccgcccttttaactgttttaggtgtgtgtgtccagagtgagcaaggattatgtttttggattgtcaaagaggatgcttagtcttaaaataaaaataaatttaaaaatcatcttataaaaaaaaaaaa

SEQ ID NO: 1082 - DNA, 386 bp, Homo sapiens
  misc_feature (12)..(13): n equals a,t,g, or c
  misc_feature (24)..(24): n equals a,t,g, or c
  misc_feature (380)..(380): n equals a,t,g, or c
acgcctgcaggnnaccggtccggnaattcccgggtcgaggggccactctcctgtctttactccttttcccttctctattctttcaccagaagccctcatttgaccagtgaactcctaggccctcttgacccgcacattagctgggcgatttccttgttctgctaattcctaattctgcttaaaatgtatttggatttctgtttttgaacacttatgatgccaggcactgtaatgcttgaaacccgatctttccctagagaatgtaacatacgtttttattcatttaatcacttcattatgccggggttaattatgtttattttataattggtaataaaggccacatttatttttgtaactgtttaaaraamaaaaaaaanaaaaaa

SEQ ID NO: 1083 - DNA, 623 bp, Homo sapiens
  misc_feature (1)..(2): n equals a,t,g, or c
  misc_feature (23)..(23): n equals a,t,g, or c
  misc_feature (27)..(27): n equals a,t,g, or c
nntgagaaaaacccttgatgtgntganaaccatcatggggaccaggatagaaggcttcttcccactcaaagcttttctccctggagggtgggcactgctgggccatgcacttcaaagcagtgttcctcagcaggaaagcggaggtcaccacttaccggcctcctccaccttctcggcttctcttttctccatgaacccaggtcgtccagcaggtacttccaagttcccaggtctgtctgcctaagagccttttgaggagaccgtcctggagccccatcagtgcccagatcctggggtaccgaccattgctgtctagcagtgggggatcctgtggtgggaatggggtgggcttctcatccatgttgcttctgggaagagagggttgcctttctgggctagggaggtggctggagcttctgccctgaccctccgctagaaaccagttatatccattgccacagcaatactgtgtaacaaatccgccaacactcggtggcctgcaacagtcagcactgatctagggcaggagtcagcagtctgggcagggtgattcttctggtctaggctgkgcttgtttgtttagggccatgggttgttaagtccccaggggatgctccatggtg

SEQ ID NO: 1084 - DNA, 629 bp, Homo sapiens
  misc_feature (450)..(450): n equals a,t,g, or c
  misc_feature (609)..(609): n equals a,t,g, or c
cacttttattaatttgcatgtccttttaatatttatttattcaaatactaccgtatggcccaccataattacccccatactccttacactattcctcatcacccaactaaaaatattaaacacaaactaccacctacctccctcaccaaagcccataaaaataaaaaattataacaaaccctgagaaccaaaatgaacgaaaatctgttcgcttcattcattgcccccacaatcctaggcctacccgccgcagtactgatcattctatttccccctctattgatccccacctccaaatatctcatcaacaaccgactaatcaccacccaacaatgactaatcaaactaacctcaaaacaaatgataaccatacacaacactaaaggacgaactgatctcttatactagtatccttaatcatttttattggcacaactaacctcctcggantcctgcctcactcatttacaccaaccacccaactatctatwaacctarccwtgggcatccccttatgarcsggggcagtgawtatagstttcgctcttaaaattaaaaatgccctagccccttcttwacaaaagggatattggtttttggaatacactnttttctttgattttttttaa

SEQ ID NO: 1085 - DNA, 556 bp, Homo sapiens
  misc_feature (338)..(338): n equals a,t,g, or c
cgttgcccaacccggtccccgcccccagacacgccgggctctcggggcaccacagccatgtgctcgttagcgtcaggcgctaccggcggccggggcgctgtggagaatgaggaggacctgccagaactgtcggacagcggggacgaggccgcctgggaggatgaggacgatgcagatctcccccacggcaagcagcagaccccctgcctgttctgtaacaggttattcacatctgctgaagaaacattttcacactgtaagtctgagcatcagtttaatattgacagcatggttcataaacatggacttgaattttatggatacattaagctaataanttttattagacttaagaatcctacagttgagtacatgaattccatatacaacccagtgccttgggagaaagaagagtatttgaagccagtattagaagatgaccttttacttcaatttgatgtagaagatctttatgaaccggtgtcagtacccttctcataccccaatggactcagtgaaaatacatctgttgttgaaaaattgaaacatatggaag

SEQ ID NO: 1086 - DNA, 420 bp, Homo sapiens
aagccggaagttgggggatgacagcagcatcatgatgctggctgtggagtgagcatggggctggcgtcgaggccactctgcctcccatgggtgggccgccttagctccycctctgcaaaatagggagctgttgcaggacatttcagagctactataaggactgaaggaggccccggggaaaagagctcttgatatattaaggcactgcttagtagtgactatgcttactttgcgagcagggaaaccgaggcctgggtaggacagaggggggcacatgtgtttactgccctctccgcccccgactttggtgccatcagcctccacccctgtgcgcccgtcaagaatttggcttccacgttctgctccccggaccctcccagcctaacctgtggatcctgccacacaaagatgggcttacct

SEQ ID NO: 1087 - DNA, 736 bp, Homo sapiens
gattcagtgtctatttcctgaggaacccaacttataacacgtagaataaactggccaaagttcttaattttccaatttgttgcaccagccccacgtgaccaccaaaagcttttctgggtttccctttccctcaggagagaccctcttcacagaccaagcttgatccttattagtccatgtccagaatcagtaaatgtccctagaaaataaaatggccacttacctcaggaggactcctccctctctggaattcccattcacctagtccttattgctttcatagctctcacatatctttaaatatgatctttataattttyccatctttttctagttgttgcaggcaaagttttaggctgccatgacctactatatcctatttagaagtggaagtctctagagagattttcaaaattacagatgtgtggatattagcttttctcctaatttaattgaattgtggtgagagaaggtgttctgtattattcaaatagcttaaaatttgctgaaatgggtttataatcaaatatatggtcaaatttaatagttcatgtactcttataaatatgtattctcccattgttggatgcaatgccctttgtatgttcatgggatcaagtttgttgactgttttgtgtaaatctatatgcaaaatcttgatttttgtctacttgatctgcttctgaaagaggaacaataaaacttcccactgctacggtaaaaaaaaaaaaaaaaa

SEQ ID NO: 1088 - DNA, 899 bp, Homo sapiens
  misc_feature (5)..(5): n equals a,t,g, or c
agggntggaacgcccgcaggtaccggtccggaattcccgggtcgacccacgcgtccgcccacgcgttcgctggtcggctatccattcattctccatacagcaactagagtcattcttttaaaattgcggacctgatccttccatctcccagctgaacgcttttcatttgcttcctgttctcatgagtatgccaaaatgtattctgggctaggaggccctgaggaatttggtccttccctcctcccccctcgttttctgtgcttcgccctcactggcttgcctttcttttccttaaatacatcatgttctctcctattttagatccttttccccgaaggtatggaaacattatttctgtaagcttattcttctatatagatgggaagtttttaaatcagataaggttctaagggcatgtggacaatttacgttatcatagtattgttcataacgtccatcattattctgtagactgtaagggcttacttagctcgtgtaagaattatccttcaaaaagcatttttaaggtattagtattgctaatctataaactttgtgcaagaagtcctaaagtcaatagcaacatttatttaaagtacagtttgtcatacttaataaacctctggtatattttcctttattatgcttgttaaaaacacagtataaatgggagaaatcattaaagatcattaactccaaggctgctggatgttaggacccttaagcatacttaaaagattgattgtaatcaagaataacttgtatcagattgccttccagtgattcacatttattagttcaaccagttacatacctgtagcaagagaccagtttatttggcaataaaattggggaaggaatcaagacttaaatgaggaaaaaaaaaaaaaaaaaaaaaa

SEQ ID NO: 1089 - DNA, 2215 bp, Homo sapiens
tataaaagaacaaactggatgtggaaaggctacttgtccaagggcacactgctgctagtgatggagtccaaagttcacatctgtctgcctctggaacactcatctaactaaagatgaaaacaccgttcttcatctttaacctggcagaaactgctcacatgccttcaaaagtgaaagctcaactctacgctcaagcatatgacctttataaggagattgtctatttacaaaaggagcacccagtgaattggcacaagaactatgccatcgcctgtgagcggatgctgcgtcttcaggcaagagatgcagatcctgaagtgctgttatcggaaaccatcagacatttccgtctgtactctcagaaagcaccgaatgacccacagcaagctgatattttaggtgctctaaagcacctaagaaaagaactgcaaagtctgagaaataggaaaaatgtctgagacagcaaaatatgaaaaacctgctcatcgttcagcttccaaaattctgaagtctggaagtttttccttcaaagaaaagaaactgcataaaaaatttaaaactaagtcatctcccagatataagtatcatggtccagcagtactgtttaatggggtattcagtgactaaggtctgctatttatgcaaaattctgtttatcccgtgttaccaaattaccatttcagtgagaagcttttgaaaagtcttctgacttccagtctttcaccagatgactgcactggattagattctagaagagaatgaaccattttcatataactaaatattggtcatgaactgtgtaagggccatgcttattgggatcagttttaaagttaaattcttttgatattaataccagaccaaagacattttctgtttcctggaaaaaaaaaatgaatcatgttaggctttaggtgagagtacattttttacaaagtagctatagttgttacatagtcttacacttcaagctaaacaccaaatgggtgatattttgaaaaaagtttgtgttttactgtcttagatcgttcttggaaatcactaaaaaaaaaaaaagttaatttgatgtttgcttatttcagttgcasaaactggcgagtaaaaaagattttgcatttacttaattaattttatatttatgttttatttctatttggactcagagatctagacccaattgtatagctcctagactccaagcactatataggcccctgtatagaaatgctcactaatgaagagggagggctagaagcttgtctgcattcaaagatcactggtgagtcattcagcaagaaaaggccccttaccaggaatagtcacagttccgtggcattgtactagcaaaagggtctgatcaaaggtctcctgtggagcttgcatggttccctttcatactacgaccataattaaaaccactaattctcttttaaaatgctgcaggatgccatgtaggcatctgtctggagtgtcctttgtgatgtcataagctgttaaggaccagtgccgagggcttttgagtgaaatgccagtcatgaaggtgcttcaagacaagggtgcctctaaaagcttgacagggccttgactgcacaattcgagctgaatttgccccttgtcagctgccagtaaataaatctcaaagggggaaaagctgaagtttcattacctgatccatggggctttgttggttttggcatcacacaggggaagctcttgcccctccattctctggatttgaagatgtccattggagcctgcagtgcctggacagggttcagagcggaaccttttgaagagtgtcaatagttgtaacagttcagctgttaggaagacaaataaatggaggagctcattaatccgcttttggctctcagtgccttttgcccttttatcacagccttattaggctcctactcatcttgaaccagaaaaaaatgaattgaagttgttgagtactaattggcaaagacttttaatcatgggccaagaactttcactgacttgaaagtaacttctccacagggaaggaccaaaaacctggtttaccttaaaacaaaaacctgttggagttcagcgtggtgtaaaaatgtaaggaagcattgataaattgtctaagtttatccatttgaaagaaattgtgtaagattatgatattctcttttctttaaaaaaaaaagtacaataaaattcaaacattccttaggaaaaaaaaaaa

SEQ ID NO: 1090 - DNA, 599 bp, Homo sapiens
  misc_feature (27)..(27): n equals a,t,g, or c
  misc_feature (30)..(30): n equals a,t,g, or c
  misc_feature (374)..(374): n equals a,t,g, or c
acaaaagctggagctccaccgcggtgncgnccgctctagaactagtggatcccccgggctgcaggaattcggcacgaggagcctgcaggacacagtcagaagaaaggaaaagccattaacattgggcagttggtagatgtgaaggttttagagaagaccaaagatgggctggaggtggctgtcctgccccacaacatccgtgctttcctccccacatctcatctgtcggaccacgttgccaacggcccattgttacatcattggctccaggcaggtgacatccttcaccgagtcctgtgtctgagccagagcgaggggcgtgttcttctttgcaggaagccagccttggtctccacagtagaaggtggccaggntcccaagaacttctcagaaatccatcctggaatgctgctcattggttttgtgaagagcatcaaggactatggcgtgttcatccagttcccctcaggtcttagcggactggccccaaaagctatcatgagtgacaaatttgtgacctccacaagtgaccactttgttgagggccagacagtagcggcaaaggtgaccaatgtggatgaggagaagcagcggatgct

SEQ ID NO: 1091 - DNA, 642 bp, Homo sapiens
  misc_feature (618)..(618): n equals a,t,g, or c
  misc_feature (628)..(628): n equals a,t,g, or c
ggaaatttgaattgaatctgaacaggaaatgagtgcagttgcttgccacttaagaaatgaaattaaccttttccgaatatcttttgaaatctgcgttttgatgatgctgaagctttggattatacatttgcttatttcgataaggtgcacctaagtctcttcatctcatcagtattcttttgctatcaaaggcagttgatcagttttgttcctcaatattttttttgcaaatatctaccgaagttttttcaaattttatgtaaaatgcaagtcattgtagagatgccagtctatgcctttatgcttgccagtctcaattaagacttgattgagctgcagtactttaaaaaggattagaagagctattgaatgacttaatttattagaagtttttaagtgacagcatttctaattattcaagtgcatttatttttcatgaaaaaaggtagaatgatttgttctgacataaagtaaatagtgttgatgcattagaaattgtgtgtcttgattatgatttctgtactttttgcattagaagtataatggacttgtatttttaaatagttgaaactagcactgtgatcatattaaataatgcattycycagtttgggacctncagatagggnttccattgttgaaa

SEQ ID NO: 1092 - DNA, 570 bp, Homo sapiens
gtgttctgagtaacagtcagtgtataaaaggggattgcagaaaaaaatgagggcttgctttactcaacagaaaatatggcccttcctgaatgacactaggagagtcattttatctcatacattcccttcatttcgttggtggacatttgttgaaaccggcactcaatggtcaaaccgtctgtgccctccagttgctgacagtcctgcaggaagatggacaagaggcccagtgctgacagtcacacgactctcactacttgaatgaggggactgtgggtgcaactagaaaatatgttgattcttagccattcccaccttgcctctccgttcagaaccccagctgcgagctgtttgtttccctgcctggaaatgatgttttaggcaggttccttaatttctcaggtctgtctcagataataaaaagctctttgtatgagcctcagaactgtctcttcagtgaatgaaattaccagtcattatacgaagggactttaaaaaatttgtggaaatactgaagtaaaagatgataaaaaaataaaaamwttatytcttggctgggaaaaaaaaaaa

SEQ ID NO: 1093 - DNA, 675 bp, Homo sapiens
cccttccagtcatgaaacttcatttgttttatccatatccctgaggactgtgtagactttatgtcagttctgtgtagactttatgycagtttttgtcattatttgaaaatctattctgacaactttttaattcctttgatcttataagttaaagctgtaacaactgaaattgcatggatcaagtaagcatagttttatccagggagaaaaataaaaggaagccatagaattgctctggtcaaaaccaagcacaccatagccttaactgaatatttaggaaatctgcctaatctgcttatatttggtgtttgttttttgactgttgggctttgggaagatgttatttatgaccaatatctgccagtaacgctgtttatctcacttgctttgaaagccaatgggggaaaaaaatccatgaaaaaaaaaagattgataaagtagatgattttgtttgtatccctacccatctcctggcagccctactgagtgaaattgggatacatttggctgtcagaaattataccgagtctactgggtataacatgtctcacttggaaagctagtacttttaaatgggtgccaaaggtcaactgtaatgagataattatccctgcctgtgtccatgtcagactttgagctgatcctgaataataaagccttttaccttaaaaaaaa

SEQ ID NO: 1094 - DNA, 628 bp, Homo sapiens
  misc_feature (535)..(535): n equals a,t,g, or c
  misc_feature (579)..(579): n equals a,t,g, or c
  misc_feature (620)..(620): n equals a,t,g, or c
  misc_feature (626)..(626): n equals a,t,g, or c
gccccggtggccgactatctgacctcacagttctatgccctcaactacagcctccggcagcgcatggacatcctggatgtaagtgcctcctgggcctcagtccccctggtctggcccaagctgccctaaggtggggctgccaaaacctgggtctccttgttgctgggccccaagggctcgtgcaggcctgtccactgccttcgtgagtgtgtgacccggcaggactcagcagtgggggagtcagggctcccggggcagagagttttgtttgtttaaaataacagctttactgatataattcacacgccataaaattcaccgctttagggtaaaatgtgtgctgcgcaggtgagggaatattatttagcaawraaaaaaaaaaagggcggccgctctagaggatccaagcttacgtacgcgtgcatgcgacgtcatagctcttctatagtgtcacctaaattcaattcactggccgtcgttttacaacgtcgtgactgggaaaaccctggcgttacccaacttaatcgccttgcancacatccccctttcgccagctggcgtaatagcgaagaggcccgnaccgatcgcccttcccaacagttgcgcaagcctgaatggcnaatggnac

SEQ ID NO: 1095 - DNA, 1356 bp, Homo sapiens
tcgacccacgcgtccggttttttatgcaytwgagtcttggatcaagtaygatgtacaagaacgycagaaatacttagcacagytactwaayagtgtrmgattaccattgytgagtgttaagtttctcactagactatatgaagcaaatcatcttattcgtgatgatcgcacttgtaaacatcttttgaatgaagccctaaagtaccactttatgcctgaacatagactctctcatcagacagtcttgatgacacgacctcgctgtgctcccaaagtactttgtgcagtaggagggaaatctggactctttgcctgtttggatagtgtggagatgtactttcctcagaatgactcttggattggtttggcacccctaaacattcctcgctatgaatttggaatatgcgttttagaccaaaaagtatatgttataggtggtattgcaactaatgtgcgtcctggcgtcactatcagaaaacatgaaaattcagtggaatgctggaatcctgatacaaatacttggacttctctagagagaatgaatgaaagccgaagtactcttggagtagtagtacttgcaggagaactttatgccttaggtggttatgatggacaatcttatttacaatctgtagagaagtacattcccaaaataagaaaatggcaacctgtggcaccaatgacgacaacaagaagttgttttgctgcagcggtattggatggaatgatatatgccattggtgggtatggtcctgcccacatgaacagtgtggagcgttatgatccaagtaaggactcctgggagatggttgcatccatggcagataaaaggattcactttggcgtgggtgtcatgctaggctttatttttgtggtgggtggacataatggagtctcacatttgtccagcattgaaagatacgatcctcatcaaaatcagtggactgtgtgtagaccaatgaaagaacctagaacaggagttggtgctgctgtaatcgataactacctttatgtcgtcggtggtcactcagggtcttcctatctgaatacagtgcagaaatatgatcctatctcagatacgtggctggattcagctggcatgatatactgtcgctgcaactttgggttaactgcactttgacaaatgtgaactctcggaaatagtatggtggtgaaacttgtactgcatgaacatccggatggcccagttttctgaaacccacaagctgcattgctttctttttaacttgaagtagcatgaaggctcaaaagttttgttgggtacttttaattgagaagtagttttggttgctcttgattacacagtaaatcaataatcaaaaaaaaaaaaaaaaa

SEQ ID NO: 1096 - DNA, 703 bp, Homo sapiens
gcaaacattggacatctctgacatattttttctcgttttcagcttttcggatgatcccttatcccttggaaaaggggcacctattttatccttacccaatctgtacagaaacagcagaccgagagctgcttccatctttccatgaagtctcagtttacccaaagaaggagcttcccttctttattctctttactgctggattatgttccttcacagccatgctggccctcctgacacatcagttcccggaacttatgggggtcttcgcaaaagctatgattgacattttctgctcggcagagttcagggactggaattgcaagagtattttcatgcgtgttgaagatgaactggaaatccctccggcacctcaatctcaacatttccaaaactgaactcatcacccctcttcccccaccaccaaaactgctcctcctcctgtattcctracctccgccatccaccccgttgctcaagcsggaaactcggcagcccttccaaactcttccctctctcactccccacatcccatcgtctcggccttcacaatctgtcagttctaacctcctaagcaactaggccttcagtaaatgtgattcacctcttctttccctccttttcccaaaagcatccctcttagtctaggtcctttgttggtttcttggcttgaacttctggccataagtcttaacttggggctccc

SEQ ID NO: 1097 - DNA, 479 bp, Homo sapiens
  misc_feature (438)..(438): n equals a,t,g, or c
  misc_feature (446)..(446): n equals a,t,g, or c
  misc_feature (474)..(474): n equals a,t,g, or c
agccaaagtgctggaattacaggtgtaagccaccacacccagcaataaagcattttaatttgcttctattgagacaataccctagaagttttgcagtggcagtgtgatgaccaatgaggtttatctgaggtgcgattattgctaattgaagcagtgccctggaggtactagaattccttatcagtttcatacaatttcagggcttgattttttataggttacccagacaattcattcaagggctgctttacttacggttcacatgtcatgtaaggagcagtggttttgagcataaactctattcctgggatttatcagataccccacttttgacaggtcttggatttcacttttcagatcctttttaggattggcaaatcgctttcttcactgtccctctagccaaggacaaaaaagtgattccaacttccccagcanttttgggnaagcccaaggcagaagggttttttttanggccc

SEQ ID NO: 1098 - DNA, 442 bp, Homo sapiens
tcaggccttccctaacgctccaagcaccgctggagccatttaatgggtgagggaacttgggtaagaggaagatcacccccttcctgtcccctttctaggccccctcaagtgcaggtgacccttaattggtgagatcttcagcctcagccgccgacctttcccttttgtccagttttggarttcccgttttttccttgtttgctttcmgagtgtaaggtctggccggtgagaaagatttcccccaaccttgattaatcagccccctcccccaacttacttcccttaggacgggtagggctgagggacctcctctcctggaaagtgcttactttgcctggggaaggggctagacactgtcccagggaaagtaatagaaggtggaagaaatcaataaaatcagaccaggacggagggaaaaaaaaaaaaaaaaaaaggggggggg

SEQ ID NO: 1099 - DNA, 1074 bp, Homo sapiens
  misc_feature (1055)..(1055): n equals a,t,g, or c
gcactctttacatctttcatataatagagtcactagcttctgtaccaatttcttgtctttagtgtactttggtaaagttttataattaaagcacatttctatcttgaagttaccatccaaggtggtttctggatgctagtttaatgatttaaacactagtggctcactaattcactagatagtttttgttctgttttctttttgctgcctgtttttatttttataattacattggcatgaatttccacttttcaatcttctaaggaatatttgagatttttgcttttaaaacttaatatttcctttaaaattctggaacttcttaagttgacattttaatttttttaaattaaattctgtagtgctcttacagaaccgaatattcttaatgtaagtataagcattacaaatccttgtagaataaatatttttagcattgttacgaaggttaaaaactgggttttgttcacttacatgtcttaaaattgccttaaaatgaatacagaaatttatatggcagcttctagtacagttgactgctttaacatggcctgacatctagtgatatttttctctctttcaaatttctgttttctagctcttaaatatctgtttctcattcttataaatcaagatgcttgtagtatataattctgagactaattatctgcttttgaattttttccactgcaattcatataatgtgaagatctgtgaaaatgctatgggaaaactagcttgggttcaaaatatcttaaccaaatataccctgtaggcttcccaagagtgactgtctgacagttggtgactgtagaagaagctggttgggtgttttctgggccaaggaaatttaaaatgtctgcaatgttatccatcattactttytgctgtcagaagggatggcagattgaagcttttctccctatcgcattttcagagttgccgtgtcagagcttcaccttgggtaaggaaagatgggcaggaattctgggaaacagaactcctgagacctacctctgcctgcctaaaaatgtggactgactcagtatgagatnataacaagaaaacatttaa

SEQ ID NO: 1100 - DNA, 1163 bp, Homo sapiens
  misc_feature (159)..(159): n equals a,t,g, or c
actgccccaagctcaaggagatcaatttccgtgggaacaagctgagggacaagcgcctggagaagatggtcagcggctgccagaccagatccatcctggagtacctgcgcgtcggaggccgtggtggcgggaaagggcaagggccgtgcgagggctcgnagaaggaagagagccggagaagaggagggagaggaagcagaggcgggaaggtggtgatggggargagcaggacgtgggagatgccggccggctgctgctcagggtcctgcacgtctctgaaaaccccgtacctctgacagtcagagtgagccccgaggtccgggatgtgcggccctacattgtgggggccgtggtgcgaggcatggacctgcagccagggaatgcactcaagcgcttcctcacctcgcagaccaagctccacgaagatctctgtgagaagaggacggctgccacccttgccacccacgagctccgtgccgtcaaagggcccctgctgtactgcgcccggcccccacaggacctcaagattgtccccttggggcggaaagaagccaaggccaaggagctggtgcggcagctgcagctggaggccgaggagcagaggaagcagaagaagcggcagagtgtgtcgggcctgcacagataccttcacttgctggatggaaatgaaaattacccgtgtcttgtggatgcagacggtgatgtgatttccttcccaccaataaccaacagtgagaagacaaaggttaagaaaacgacttctgatttgtttttggaagtaacaagtgccaccagtctgcagatttgcaaggatgtcatggatgccctcattctgaaaatggcagaaatgaaaaagtacactttagaaaataaagaggaaggatcactctcagatactgaagccgatgcagtctctggacaacttccagatcccacaacgaatcccagtgctggaaaggacgggccctcccttctggtggtggagcaggtccgggtggtggatctggaagggagcctgaaggtggtgtacccgtccaaggccgacctggccactgcccctccccacgtgactgtcgtgcsctgacsccagggccgcctgtccgcgtttgtttggccggttttgcggaggtttctatgcggcaatgctgaattatccgttagat

SEQ ID NO: 1101 - DNA, 771 bp, Homo sapiens
  misc_feature (4)..(4): n equals a,t,g, or c
  misc_feature (8)..(8): n equals a,t,g, or c
  misc_feature (10)..(10): n equals a,t,g, or c
  misc_feature (56)..(56): n equals a,t,g, or c
  misc_feature (59)..(59): n equals a,t,g, or c
agcnagananccaaccctcactaaagggaacaaaagctggagctccaccgcggtgncgnccgctctagaactagtggatcccccgggctgcaggaattcggcacgagattttgagcattcctctgatatttgaaaaggaagtacaacaggaaaggaagtctgaggatggaagctaaaattggtatgaatttatattttagagatcaaaatgtaccttatgttgaaacctatgtaagaagtgatwatgtagaaagagtgaaagtgatagctcttagtctggaaagcccactggcttgtttgggcatttctcatggcttcccactcaaagtggatccccaaaatcacttgatggatttccttgctgatttctaagtaaactatggtttaagaaagaaatgacagggctcagcactgccctacagtaccaagaatacaaatgtttccatgaagtcttcaaaggcatttgtaaaattcaggctgtaagtgattagttagttcattctgcacttatttattaactgtatattcagttccaggctctagggtagagattatggataaaggtgaattagatagatgaagtttttgccctcacagcaaaagctttagccaataattaaagctatcactggaagtgggtctgtgccaataacctagagaagagcagtgcttttagagttgagctatattcccaatcagttcttaatggtggttttacccccttccctctacactgtcttttcttgagattggatcatgtgtgtgaaccca

SEQ ID NO: 1102 - DNA, 757 bp, Homo sapiens
  misc_feature (86)..(86): n equals a,t,g, or c
taggaaatcaactgagtgggtgtttggaagaggaaggagcaactctcgggcagcctgcccaagggagggagcaagttgcaatttanaagatgccatacgtcgtgtgacagctcatgagcctttcactgggctggcaattgtctgaacacttgggttcagttgaaatatatgtattttggccaaaagccaagcagcmcttcacaaaaacaaaacacaamcctaagctaacaaaatgmctgcattcgtctcttttttaaaggtagagattaaactgtatagacagcatagggatgaaaggaaccaagcgtttctgtgggattgagactggtacgtgtacgatgaacctgctgctttgttttctgagaagaggtttgaagacattttattaacagcttaatttttctcttttactccataggaacttattttaatagtaacattaacaacaagaatactaagactgtttgggaattttaaaaagctactagtgagaaaccaaatgataggttgtagagcctgatgactccaaacaaagccatcacccgcattcttcctccttcttctggtgctacagctccaagggcccttcaccttcatgtctgaaatggaactttggctttttcagtggaagaatatgttgaaggtttcattttgttctagaaaaaaaaaatccctcccaaagtggggcaaaaagctttatatttatttgattatccaaaatacagatcaaagtttagatctaaaaaaaaaaaaaaaa

SEQ ID NO: 1103 - DNA, 633 bp, Homo sapiens
  misc_feature (619)..(619): n equals a,t,g, or c
gcaagactctatctcaaaaataaaataaaataaaataaaataaaataattaataaaatggtgtagtatttgcatataacctatgcacattctcccatatagtttaatcatctttagatacttataatgcctaatacaatgtaaatgctatgtaaatagttgttgttatactgtattgtttagggaataacaataagaaaaacagtctgtacatgttcactacagatgcaaccattgttaagcctgactacatctttttatctgcagttgattgaatctatggatgtggaacctgtgcatatggagggtcaactgtactataaataatacgaatatgccaacattatataatcattgctttctgcaactgtttactataatttcaaaattaatatcctattaactgttcctataaattatcaaatttggcaagtgtattactagcaggagatggaccttaaattatgacaactttatattttttgatagcatctcttgaaaaagaattttaatgattctaataagaggttctttttcttttttccatttccttgacaaatagtactcatttaaaaactagagggctaggcttagtggctcacgcctgtaatctcagcacntttgggaaggctga

SEQ ID NO: 1104 - DNA, 548 bp, Homo sapiens
gtcggggacacattccaagaggctaaaaagcaaatttctgtacattaggagatttgtgagtccttaggaaaggctcagaagagggctccacctagcacaatacctgacatagaaagtggtcagtgtctgcagaatgagtcggcatgaaccgtactttccttggcagggttattaggtggtaaatacctgcagaataatgggattgtactagggtttcttctggctttagaaacccatttgtttactaatagattcccagaggataccttgatctcaccaagctatttgccagaatgtctcctgatggcctcattgaagaaagggggactatgagccagatgctggtgccctgaagatttgtagtttgtgggatagtcttaacttggcagggtttgattaacagaatgaagtctgttccttagagggaagtctttgcttgctgccctgacctgctggacactgttaattgggatgaggtcaaagaaggcatagttaccacatttgcaggagaccctaacctggaaatagtaaattacataacattcaaa

SEQ ID NO: 1105 - DNA, 860 bp, Homo sapiens
  misc_feature (636)..(636): n equals a,t,g, or c
  misc_feature (758)..(758): n equals a,t,g, or c
  misc_feature (768)..(768): n equals a,t,g, or c
cagtgaacaaaattatttttttaaagcacataatccctagtatagtcagatatatttatcacatagagcaactaggttgcaaatatagttcagtgacatttctagagaaactttttctactcccataggctcttcaaagcatggaacttttatacaacagaaatgttgacagaaattgctgtagtttagggttgaagtactgtatgatgggcagcaatcatgtattaacttagaaggggaaattgaaatataggaccgaatttggttttatcagtttccagagtactgctgccaacctagacactgatttttcagagtttgaaatgtaaatttcttcccgggacttgattgcacatgaagctggactgcgttagtcatcctgtcccaaagcgctgtgggggccagggtggaggtctcaaggcatcctttatgacctggccattggatgtaaaagaaaacatattccatgctgtggttcttgtatcttgtttcattcctcaccattgaaagagaaagtccatgtattgtctccagcacatccttraaatgttatactgggatggattactgatgcccatcggtagttgagccccagaagagggtagtagcatctctgcctcaggtgatgatttgtancttggccagaggagagcggagtcaccagtatatctgtggtccatgttgctagctctggtaaaattaaaaatctggtaagatgtttgtatcattagtacactagacagtaagctctgtcttgntgttttcaantaacctatattcacttttgtttgggcaaagacatttaaattgaaattcaattctaatttttgttaattgtggaaaggggtaattaacagatc

SEQ ID NO: 1106 - DNA, 1754 bp, Homo sapiens
  misc_feature (48)..(48): n equals a,t,g, or c
  misc_feature (1543)..(1543): n equals a,t,g, or c
  misc_feature (1584)..(1584): n equals a,t,g, or c
  misc_feature (1694)..(1694): n equals a,t,g, or c
  misc_feature (1738)..(1738): n equals a,t,g, or c
ggagaaattgattcttcttctctctttgccaggaatagacatcaatgntaaagacaatgctggctggacgcctttgcatgaagcctgtaactatggcaacacagtgtgtgtccaggaaattttgcaacgttgtccagaggtagatctgctcactcaagtggacggggtgactcctttgcatgatgcactgtcaaacggacatgtagaaattggcaagctgctactacagcatgggggcccagtgcttttacaacagaggaatgctaagggagaattgcccttggattatgtggtttcacctcaaatcaaagaagaactgyttgctattacaaaaatasaagatacagtggagaactttcatgcacaagcagagaaacattttcattaccagcaacttgaatttggctcctttttacttagtaggatgttgctaaatttttgttcaatttttgatttatcttcagagttcattttagcttccaaagggttaactcatctaaatgaactgcttatggcttgtaaaagtcataaagaaaccaccagtgttcatactgactggttactggatctttatgctggaaatataaagacattgcagaaactcccacacattcttaaggaactgcctgagaatttgaaagtgtgtcctggggtacacactgaggccttgatgataacattggaaatgatgtgtcggtcagtcatggagttttcatgatgatgctagaaagtatggattgactttctaaatctgttcagtttgcattggtacttactgtggacttcatagcttactgacagatagtaatttgatttatttattgacagactttgcagccttgctaaattttaaaagcatttttaaaaaaacttctacaaaactctagtatgggcttctgactttttccagggtgtagaatttgactcaaaagtaaaaataattttgttttagtatattctactttcattaatgtttttttgttctgaaagtgatattatattgtacatgtaaaattaatttaaatattttttcaaataaaaatgtaatgtcctgtattctagatgttctaggtcttagaatcatggcaagcatattcatacaaatgcgtacctataaacttgtagctcctgactcttagggatggattttgaggaaaaaacaagactaaacaaaaacatgtagctccctatttcttctctctaggttgttggactgaaatatgcattttagctttgtgtgtttctaaaataaacatttctaaaatttacagtaataattaatattcttttggtttttaaatgcagcaaatatgcagagtctgacagttcaattccttgatctgttttattttagcaattcatatacaaaatgtatctgtcgctgccctatgtaacccagtattctgtacctgaaaacattctgctgcataggtttatgagtttaatattaagatattgagtggcataagtaatagatttgagattatttaagatcttaatatatagtatgaatttactgagtagtaatgttttaatttgcagnttttccttatagcagtttgtagtaaaactaaaagaaagggngtggataataaccacttttgagattggagtttcttcactactgggagtaagttacattatgatacaggtggaaaataaacacttccatttagcttttatgtaattcaagngatgaccttagcagttaatctgctaaagcaatacacttcagttntattttggaaatagat

SEQ ID NO: 1107 - DNA, 774 bp, Homo sapiens
  misc_feature (765)..(765): n equals a,t,g, or c
  misc_feature (768)..(768): n equals a,t,g, or c
  misc_feature (772)..(772): n equals a,t,g, or c
aggattattccttctcatctgctgcaatgggtcaatgtgttaaggagaggagcgagacagcaagaaccgcattcattcagtcatacagrccaaaaggaggaatgtcgcccagccctctaaactgacccagaacccagatcatgtytcaactgctacctctcctacttagaaagaagtaactccaccaaagcagggttctgggacaaatatttttttattgatcatatacaaatagatgaaggatggacttggatgttaagaaaaataatactatacaaaatcgagagtagacagttgcccctagacttaaattaaaagtgtgcacattagataatttaatccaatgtatcaggtaaaaacttgaacaaaccttttggcctcttccttaaaattcagggaagcatgtcctccacaaaacagaatcaaaatataaataaaagactgccttaagacgaaaggaaaccttacagatgaaaagaagccagatgagaggcacttaactaagaatgaaaagaaactgagtggacaaaataattatgagaagatgaaccttcaaatcagaaagagggaaaaaagcttatttgatactatgggaactcaaaagagagtgaacacaaatgtgaaaattccaagagtgaagaaaagtatcataactacatttagagcatgagaaaaagtatacaattttgagtaataagaacagaaatcaaaagtaactattgtatgctgtattttagtagagcaacmctgaagaagaaaggaaancangaanta

SEQ ID NO: 1108 - DNA, 164 bp, Homo sapiens
  misc_feature (162)..(162): n equals a,t,g, or c
aattcggcagagctgtcacccaggctggagtgttgtggcacaatcttggcttattgcagcctcaattcctgggcttaaacagtcctcccacctcagcctcctgggtagccggaactacagtcacggcacttccatgtccggataattttttttttttttttnag

SEQ ID NO: 1109 - DNA, 576 bp, Homo sapiens
  misc_feature (527)..(527): n equals a,t,g, or c
  misc_feature (568)..(569): n equals a,t,g, or c
ggcagctaagacttcagtaaaattgggggtggggggagggttgacattttccgactgcctgttacgtgccaagtgctttttgttaaggacataatgtttttractggggatcatgtttggctgatgtaaatattaatgccaaaataggagctaggatgaaagtaacactgtaattagtagtagaatttatttcatattaaaatgtgtcatgacgtaatttttatggcttggctcaagcaacaattttcagagtgcacgtaagtatcaacgcgtaaaacttaacattttacagtgttatttggtattattctctatgaagctgtctggatcggtctccttttcccattggttaattggttaatgctcagattttggctcctagaatcgatctgtgtgttcccggtcttggcatctcattatgtcatttgctgkattttttgatatattattgtacgtgcaaattgargtgaawttgttgttttagattaagactgttgggactcaagctacaacgaggtgtctctggnggtaaaaaaactggcagttttaagatttgggtaaatcccgnnccccggg

SEQ ID NO: 1110 - DNA, 829 bp, Homo sapiens
aaaaaaaaaaaaaaaaaagaatatccctgtggcaatagtctgatggtgtttggacacaagaaaagttatggttttgagtcgtgagtgtttgctagggcatggcactcttcagtttaacagctgatccattaaaccttttctgacatttgtgccttgttctcatgctagaattaatgctggatttttctctcatttgaccatcaatgtagttttacttattgaaaggaaaaaagacttaacacaagataggaaagatgagtatgagaagtaaaacattctgctggggtgctacatagaaggttaggttgtaggggctttgattttaatttaaacttattatcgattgatatttctgtatctcactaaatgcggttgaagagtgtgtgtgtgtgtgygcgcgcgcgcatgtggccaaaaaatagtgccataatgtcaaattcttcctttgctctgtttttgagagttgatgacatcaggcacttttcagtgtttggggaaattgattgggatacctcccccaaaccaactcaagtctgtaactggaagccaggtggttggttttctggtccgctttgtcctctttcttttaccgtcatcctattcaccagcacttaatgtaagtagatgttttagaattgcaatatttattggtttagtatttgtcatccttagaaatgttaatgatgtatttttatattgataatataaatttrtgtacagtatgtgtgtatatgtatttcaggatgttatagtattgtactttgtatgtgatggtttttgtgtcttcataataaatatgtcccttttaaaaaaaaaaaaaaaaaaattc

SEQ ID NO: 1111 - DNA, 1020 bp, Homo sapiens
gcgggagtgcgccacgccgcgcgtggggctgtggtggccgcggctctcagatatatttttgccatcatggatcagtttggagatatattagaaggtgaagtggaccattctttctttgacagtgactttgaagaaggaaagaaatgtgaactaactcaktttttgacaagcaaaatgatgacccaaaggaaagaatagataaagatacaaaaaatgtaaattcgaacactggaatgcaaacaacagaaaattatcttactgagaagggaaatgaaagaaacgtgaaatttcccccagaacaccctgtagagaatgatgttacacaaactgtaagttctttctcattgccagcctcttcaagatcaaaaaaattgtgtgatgttacaacaggacttaaaatacacgtgtccattccaaatagaattcccaaaattgtaaaagaaggtgaagatgattactacacagatggagaggaaagcagtgatgatgggaagaaataccatgtgaagtccaagtccgctaaaccatctactaacgttaaaaaaagcataaggaaaaagtattgcaaagttagctcctcttcctcctcctctttatcttcctcatcttcaggttcaggtacagattgtttagatgcagggtctgatagccatctatctgattcgtctccgtcatctaagtcatctaagaaacatgtatctggtataaccctcctgtcaccaaaacacaagtataaatcaggaataaaatcgacagaaacacagccttcaagtactacaccaaaatgtggccactaccctgaggagtctgaagatactgtgactgacgtaagtcccttatcaactccagacattagccctcttcagtcttttgaactgggcatagcaaatgatcaaaaagtgaaaattaaaaagcaagaaaatgtgagccaagaaatatatgaagatgttgaggatttgaaaaataattcaaaatatttgaaagcagccaaaaaaggggaagaaaacttgggcctgttgt

SEQ ID NO: 1112 - DNA, 593 bp, Homo sapiens
  misc_feature (27)..(27): n equals a,t,g, or c
aaattctcaaatatgggagaaattttnttcttgagaattatctgagtcattaatatttttcaaaaacagctctcactgacttgaacctcttctgtaagctctaaccttttacctgctttacatttccacttgaatgtctagtaggcatctcttgaccaaaaacagcttttgattcctgttctccaacctgttcctctcctagttttctccatctcagaaatgttacttcctctgcaaagtctttccctgacttatctaaaataataacctcctctgtttgctgtgggaatttgtatagaatggtgggaaaatttcaagtttcatatttggattagctctgacatttatttatctgaacactggtaattgcctcagtaaagacactgataataagtaccttttagagttattttaatctttaatgctttaatgtgtaggaagagtatagtgtcctgttttgcacagaaaggcattctgtaaataataagttgccttaattttcctgtaatgttcattatattgttgtgggaaggtatttactcctattattaaaaataaaaatgtgtaaaatttaaaataacaaaaaaaaaaaa

SEQ ID NO: 1113 - DNA, 1429 bp, Homo sapiens
  misc_feature (3)..(3): n equals a,t,g, or c
tgnccaggtaactttacacttacaatgaattcatggattttgttagcagcattggctttctcaaaaggacaaactcaatatcgttataaaatataattcgtgatcacaaattatacaaaaatcagtagaaacagttttttatgttcagattaaaaaaaaaaacttgggataattttaratttacaraaaagttgcaaagatacatggagagcttctgtgaccactcacccagttcccccagtgttaaccttttatttaaccatgaagcatttgtcagaagctaagtaaccagcaatggcaattactattaacggaactttgactttatttttcagattgtactagttttttaattaatgtcatttttcttttccaggatccaatctaggataccacactgaattagtcgtcatgcctaattagcctctggtctgtgatagttccacagtctttctttttcataaccttgacagttttgaggagtactggtcaggtgttttgtagaatattcctcaatttgggtttgtctgatgttttcctcatggttagagtggggttatagatttttaggaagaataccagaggtgaaggtccttctcactgcatcatgtcaggagttacatgctatcagcttgatggtgtattaactttggacacttggttaaggtagtgtgtgttggttttttgctgctgaaaattactgttattttccctttccatacttctgttctttggaaaacagtcactaagtccagtcatgggaggtggtgggtgggaaagattacattcaaccccctggaagtgggaatatccatatgtagtatttggaatttttctatatggaaaatttgtttctccctcccaccctaatttgtttacatcagtatggactcatgtatattttgtattttgggtaacacagtatttattttgttgcttaagttgtccagcttggctattaggagttctgccaggttggctactatgtccctttgatgtgcccatccttttgatttttgagcacttcttactttctggcactacaagatgctccaggttcatcttggatattccctgccccaaccctagaatccctagaatcaacccctgctccaaagagccctggttccttttgttggagaatcatacttagaaaccaagatctgggcattagatgtgcttgttgctactgggatgtcactgtttgtagcagagttgagaaatatgtatgtatattaatccatgcatatgtacacatctataattatttatgtgtgtacaaagctaaacatgagtttgtactgccgtcttcaactcaaaatttgtcccaaaattttgtggcatatgtttagattttaaagttgatattttccctattgacagaataaactcattaaaagagcaaaaaaaaaaaaaaaaaaaaaaaatt

SEQ ID NO: 1114 - DNA, 727 bp, Homo sapiens
  misc_feature (1)..(1): n equals a,t,g, or c
  misc_feature (520)..(520): n equals a,t,g, or c
  misc_feature (658)..(658): n equals a,t,g, or c
  misc_feature (709)..(709): n equals a,t,g, or c
  misc_feature (714)..(714): n equals a,t,g, or c
  misc_feature (716)..(716): n equals a,t,g, or c
ngttgagttatttagaattttatctcaagtgaaagctgatggattcatctgctttggctgaaattaaacttatcattagtctagctagcatttcagcatgatattgcaagcacttctcattgctaaaaataaataaaccaaagtttaaccgaatcagttagggaaagtgatttaaactttatttaaagaggtattttctaattatgcacagatatctactttatacaaatactttatatggctatttttgagaaaaccctcacattttaatgtttatgctagggatgaacctgaaaattctattacgtttatttagatttcaaaggcaaatattgattcctatgctctgtggtttatttcttttttctattgcttctttctcccttgagtcccttgaaggcagggaatagacttctagaaaacctgagaggaaaaagaattctttttacaggaggcagcagaaaactgtctgaaaggtcaattgttttatctccctttccactctctttccaatttgggntttggtggtctgaagaagaaaaagaaattttatgtatgtatgtgtaaatatgtgtatatatttctatctcttgctacaataattccaactaagtgaacttctcaattatcatcatacttacttaccttatattaacanattaagatgatgctgccaaaacaagtctagcagggaaaacaggttctacanttttngnaaataaattaa

SEQ ID NO: 1115 - DNA, 605 bp, Homo sapiens
  misc_feature (15)..(15): n equals a,t,g, or c
atgtctgcagtatanatagcatagacatttggtgtgaagggaggagaaaggaagtagtagttctgagaatattcatttgaacagagtgactatggaagaatgaatagcaaaaaaaggagaatttttttaaaaagatctctcactgggaaaagaaaaagttatgcatttataaagtaattaaactggttttccttgtactttattaatctgaatctaatggcacttccttacgagggttttcagatgtgcttgtagttaatggcaacattatcagaatgactacacagacagtcctactctgaggagatgactttggaagaaacccatttggaactacacaccctgctatgtctgtggagaaatggaactgcaatcctcaagagtcacacttcatattccttcctttcaagtggttgataaaaggtagtgcttcaagcacaggatttatggaatagttggcaaattaaacaacatgctttttattttgactaccatttaagtggaatctttgaactttttttttgacatgtgaatctctaatgtggtgagagagaaaaacataaaaatataaaaacattcaaaaaaaaaaaaaaagggcggccgct

SEQ ID NO: 1116 - DNA, 805 bp, Homo sapiens
ttttttttttttttttttttttttcttttaacgttataattttatttcaaagaaaacagaaacagaacaaaaacaacctttgcatttgagggaggagattattttacagttttggaaaagaataagaacaattgtatcaggaaacaaatgattatgacagaaactcgcatccgacagctgcagtgaatccacgaggacacagaccatgctggtggccacagcagggccacaggtgaatccacaaggaaacacagaccatgctggcagccacggcagggccacagggcacggtctccatgtgttaatgtttaatgtcagcattttcatatggacagaaatcacgaagaaatcctgcaaaaatggcatcaatatgaacaaacccttgttataaaaagcaaaatattgataggaacaatatcttccagcgtgtgcgtttcacatttaggctttactgtatgaaactaagtcaaaattagaagcactggctatctccaccgacatatattttaactgaatataaacttcaaggcttttcttaaccataggcttaagaggatttcttttatgcagaatgtgaccagagcaacaaatacacctaaactgtttgaagatgggaaatttatacatgaaatgagctagcaggcttcctttggtatggggacactgttattctaaaattaaaaaaaaaaaattgaatggaagtggactgcttcaagatggtaacacttgtagctgcaatttttagcccagtagagaatgaaatggaaaggcagctacatgctgactgcacaagcaggtgcacccc

SEQ ID NO: 1117 - DNA, 355 bp, Homo sapiens
  misc_feature (10)..(10): n equals a,t,g, or c
  misc_feature (19)..(19): n equals a,t,g, or c
acactatatntagggacanctgcccgtaccggtccggaattcccgggtcgacccacgcgtccgtactgccctttttyaacctcagatgtgactttcattataggaagttctcaggcattttctcttggaataatacctcttctctcttctctttatgtccttgtgccgcattctgggttattcctttagctctaggttaagttcactaattcttcctttagctgtatttcattattgtttaagctgtccattgcattttaaactttctttcaaatatcttcccttcccttcctttcccttctcttccctgccctgccctgccctgccctgccctgccctcccgtcccctcccctc

SEQ ID NO: 1118 - DNA, 447 bp, Homo sapiens
  misc_feature (357)..(357): n equals a,t,g, or c
  misc_feature (408)..(408): n equals a,t,g, or c
  misc_feature (442)..(442): n equals a,t,g, or c
cccacgcgtccgggttatttgtattttacctggcaaccctatgttggagcctccttccctgctgcagccaacaggggtagaggatctgagctgcttatttgtaactgaaagtccatgggactgcttttatttgggggaatttttctgttaactgtcattatgaaagtgatcacgatgagagattcagatttatttttaaaattcggtggaggaatatctcctcattgatttagatctttgatttttttcatcagaggttttgytttcctgctatagattttgcatatcttttgttagatttatacctgaaggttttgtctttttggaatgtgtgtttttgcacgtgttttgctaatntgtttttaaattccaaattttattgcttggcatataacaatttgaattttnggtatattaaccctggtgaaaaggaaccaaaaanaacct

SEQ ID NO: 1119 - DNA, 802 bp, Homo sapiens
ggttacctcctgaatcactgtatatgccatgttttgcgataagattgcttgcattttctgctcaacaatgtgtatcttctgtttgggaaagcactagtgatggattactttttaaagcaatacatttagcttgcaaattgtgcctttaaaaaaaaaaataggcagacttttgagggccaagaaggaagctgtccagttttccaaaaatcctttttccctgctatcagaaatgtgaaaccaaatttagcaaccaagattaatgaaaagatgggttttccattagtgctgtccctatcttgttcttggctttgttatgtcctttcccctagactgtatcccgacaaaatgtcctagtaacaaattgctttttaagctcctgttctgggaaaactaagcattaaaattgattattctaaaacataaagtggactaaagccatcctattttataattttctaatgcaaagtggtttagtatagagttaacacttagaagtttatagtttactgtttttattcttatgtactgtaaggaccatatttgagtttttggtctattcctaccattgtttctttgtggggaggagttggggcggtttgggggattggttttttttttttgtttttttaaactacaggtatttgtaaaacaatgtttgggttcaaacaaattagttgttaaacatctgtaatccagttttctgtaaatgttgctgttgttctaagctctgttaatgttaagcattctttgtatataaaattacaataaaatgttaaaactgaaaaaaaaaaaaaaaaaaaaa

SEQ ID NO: 1120 - DNA, 458 bp, Homo sapiens
  misc_feature (407)..(407): n equals a,t,g, or c
aaaatgcaaagctgattttcatgtttatatatattcataccttgatatattgcaattttagagtttctgcagtctgtctaacttggctgtttgttcataggccagatcaaactaccctcattccccaaaacttggattgtgaagggattagtgccccagaactctctgtgttactggcagggcaaaatgggtaggaatagtctggcttagggaaaaagacatattttctctctaacacaactggcagatactgaagtgggcaggtggcaagaaaaggcaagtactgagctgattcagacttgcagaaagcttcctctcctccttcttagcaaaatgaaaggctctgggaaaaggcacctgcctttccctgccttgaggatcctggcatccttgagtctttattgaanattaatttaatgacttggtcaacaatagcattacctaatcacagagcatca

SEQ ID NO: 1121 - DNA, 754 bp, Homo sapiens
  misc_feature (660)..(660): n equals a,t,g, or c
tatagggaaagctggtacgcctgcaggtaccggtccggaattcccgggtcgacccacgcgtccgcaaattcttttgtcaaatttgcaaatattgaagaagacacaccatcctatcacagacgttatgacttttttgtgtctcgattcagtgccatgtgccattcctgtcatagtgatccagaaatacgaacagagatacgaattgctggaattagaggtattcaaggtgtggttcgcaaaacagtcaacgatgaacttcgggccaccatttgggaacctcagcatatggataagattgttccatccctcctgtttaacatgcaaaagatagaagaagttgacagtcgcataggccctccttcttctccttctgcaactgacaaagaagagaatcctgctgtgctggctgaaaactgtttcagagaactgctgggtcgagcaacttttgggaatatgaataatgctgktagaccagtttttgcgcatttagatcatcacaaactgkgggatcccaatgaatttgcagttcactgctttaaaattataatgtattccattcaggctcagtattctcaccatgtgatccaggagattctaggacaccttgatgctcgtaaaaaagatgctcccgggttcgagcaggtattattcaggttctgntagaggctgttgcattgctgctaaggttcataggtcgacagtgcgaagcttcatacctttgaacatcgcgctcagcgtgatcgaacaatgattc

SEQ ID NO: 1122 - DNA, 624 bp, Homo sapiens
  misc_feature (549)..(549): n equals a,t,g, or c
  misc_feature (554)..(554): n equals a,t,g, or c
  misc_feature (562)..(562): n equals a,t,g, or c
  misc_feature (591)..(591): n equals a,t,g, or c
  misc_feature (621)..(621): n equals a,t,g, or c
ggtcctgagctggctgccgcttccaagacagtcgctttgagggctcttggcaccgattttgttaaaatgcatgagcttagggttgtgcagcctgtaggggcaggggtggtctcagaatggatttggtggccccaccgttaattaagctcctgacccctgggccggtggtgaggtgggaagatgagcctgtgtctcccatgctgagccaagatcctcaggtaccagtagcggtcaaagcacctgctccctgaaggaagcttacctggcttagcctcattcctgctcgtaagtcaggcattcagcttgcaaagatccccaagcacacaaggagagtcagctgactgagggccaacagaaacagcaggcagccgctgtcagccacaaagaaacgcagatcctgaaactgtcatcatacaggtgagaggatagttatgtgtgaggtgttcaaagaaagtcgcgcagtcagtgatgagaaagctgkatgggtacatactgtcacgcatgaataggcaggactccttaaagaactttttgggaaatgaaaaacangccangtgcaatnggttcatgcctataatccccaacactttnggaggcctaaagggggaggatcactttgancct

SEQ ID NO: 1123 - DNA, 660 bp, Homo sapiens
  misc_feature (658)..(658): n equals a,t,g, or c
ggaggggaaaagcccctccttggcaccccctcttccctgactgctgtcccctacccakccttgcccccttcatccttttgcgtttggtattgagactctcctagactctactcctctttcttttgtatggacagttccccttcagtcccatccccctacacatacacccagccggggccaaatttatacttatataaaagttgtaaatatgtgaaattttatccctgtgccctttccccacctcaggccctacccctggaccctccccaaccttccttctctcttctttggctgttgtaattatctggggtttgtactgtacatatccggggtgtgtgtgtgtgggctgggggcaacccttctgtacagagcttcctggccccctccccccccgcccctctgcttccctccccacccaccacctcaagggtagggagttgctcttcctacctgttttattttgttttctcgttctccctccccaccccactcccagccttatctatcccccctcactgtccccttttctccactcccagccccatttcctttttttctggagtgtgtggtgaaacagaaaaaaacatgtttaataaacggagattgttcttttaaaaaaaaaaaaaaaaaaaaaaaaaaaaaaaaaaaaaaaaaaaancc

SEQ ID NO: 1124 - DNA, 517 bp, Homo sapiens
  misc_feature (508)..(508): n equals a,t,g, or c
ttttgaaatgtttttgattgttttatataasctagagtgacttcccttacccttatttagatctgcatatatagttctagtatgaagtttaatagttaaggagttagctatttgttatctttaagagtagggtattgacgtgaacaattgcagtattttgcatgatactgttttatagatgaccttttaggaaagtggtgcatttattaattgaactgaagaagtagttcagttgaattcagtatcataattcacaaattggaggctgttgattttgattcatttaaggtttaaaatctttattaattgcaaacagtgcaattatttatacttcacagtgccttcccagaccttccaccttaggttctgctgcaaaaagcaccaggtaagcmcaacctaaggacatatataaataaatatttcaatrcattaatgttgtccctgtgaggtttttgtggttgtgtattcaaaggcaatctgctactgcttccccaaaatgtattttgtnattttatgc

SEQ ID NO: 1125 - DNA, 886 bp, Homo sapiens
  misc_feature (7)..(7): n equals a,t,g, or c
  misc_feature (274)..(274): n equals a,t,g, or c
gccgtcntcaaaaaaaaaaaaaaaaaaaaaacaaaaaaaaaacaacccagaaaaacccaaaaaacaaacaaacaaaagaaccaaaaacccctttctttcatgcctagattcattccaaaaaggtttaagacagcaacaagtgattccaggatctcagctgtgggcatccttgtgttactggatggctgtgtgttaaytgttagcagctggaataagtgaagagggtctcgtcctcatactcaaagtcctttgctcatgcccaaggccagaggynactcatgctgaaacattaccatctccctccaaagtgcagggtttagtcactgagtactgggtggagcacatgactggatcccagttaatccctcccagcttaccagtaaaacctcaggattcatgctttcctgggagccacctkcggccactaagataggagcggggttcagacatggccaggcgctcctaatctcagacccaaagtgcaatttttggcagcctgcrtgagaaggagggtgggaggaaaggtggctagaaccaagggtagcagcctgggggcttgagaggaaacccargcacagcccatcctaccctgtctcacgagcagcccgtcctcctcctgactccccttaccccacacaccgagcgccattctcttgctgcctcatctattctggttaggtacttactgagcatcaggtgctaggcaagtggctggggagagacaacgtttaatgactcagtctccgcctgcacagagcctttgagtctagagggagacacagacttactgacaggctgggttgtgtaataagtgctacgggaggaaaagctgagagtgtctgagaatttatgagatgtgtgtctcatcagacttgggcatcaaaaa

SEQ ID NO: 1126 - DNA, 315 bp, Homo sapiens
  misc_feature (47)..(47): n equals a,t,g, or c
  misc_feature (109)..(109): n equals a,t,g, or c
agacttatgataataagcaatatttgcagagtatttgtatgtgccanacactattgtaagtgcttcatcatgtactgattcatttaatactcacagaaatcgtaaatangggtattattcttatcctcactctatggattaaaaaaactaaggcacaaagggttaaagcctccttgcctgagattatagactgtaagtttgaacgttgagcacttggaatacagarttcatgctgtaaactaccacactatagggcctccaatatgataatttataaaatatttgaataaaaaatgaatactagttccacatttt

SEQ ID NO: 1127 - DNA, 749 bp, Homo sapiens
  misc_feature (1)..(1): n equals a,t,g, or c
  misc_feature (16)..(16): n equals a,t,g, or c
  misc_feature (27)..(27): n equals a,t,g, or c
nccgacagtgaccggntccggaaattncccgggtacgacccacgcgtaccgccagcatgggccaacagaacaaggaccttgtctctattttgttttttgtttttgtttttgttttttcatttttcagtgttcttaagtttaaaacaaaaaaaaaaaaaaaaagaaaaagaaatgcaaagctttattttatgagtcagaggacttgatactaagtcttaagattgtaatactgcccctgccaagttaatctgcaaattcaacaaattcaaaaaaacaaaaacctccactcccagatacctttttgcaaaaattgacaakttgatcttaaaatttatgtggacccagagtagccaaaataatcttgataaataacatatttggagtactcactcggatatcaaaacttagggcaaaactacaattataagacaggcataaagataagcgaaataaaagtccagaaataaacccttgtgttttgtagtcarttgatgtttggcaaaagttccaagacaattcaaatgggaaagaatagtctcttcaacaaatggttttgggacaagtaaatattgacccctcctttatgcgatatacaaaagttaaactcgaaatgtaacaaacacctaaatataagaattaaaactataaaactctaagaggaatatctaagggtaaatcttcacgactttgggttacacaaagccttgttgatgtgacaagtcacaaaagaaaaatagatgaacaccaca

SEQ ID NO: 1128 - DNA, 716 bp, Homo sapiens
  misc_feature (598)..(598): n equals a,t,g, or c
  misc_feature (636)..(636): n equals a,t,g, or c
  misc_feature (686)..(686): n equals a,t,g, or c
gggagatggcgtgcaagtatccgctgcggtgttctggtgctagagtggagaggctggcaaagaagaaggcacacgcatggtgagaatccggcctgagccgaagcggagtttgctatggacagcaaccatcaaagtaattacaaactcagtaaaactgagaagaagttcttaaggaaacagattaaagccaagcatactttgctgagacatgaaggcattgagacagtatcctatgccactcagagcctggttgttgccaatggtggtttgggtaatggtgtgagtcggaaccagctgctcccggttttagagaaatgtggactggtggatgctctcttaatgccacctaacaagccgtactcatttgcaagatacagaactacagaagaatctaagagagcctatgttaccctcaatggaaaagaagtagtggatgatttaggacaaaagatcactctgtatttgaattttgtggaaaaagtgcagtggaaggagttgaggcctcaagccttaccaccaggactcatggtagtagaagaaataatttcttctgaggaggagaaaatgcttttggaaagtgttgattggacagaagatncagaccatcaaaactctcaaaaaatccttaaaacacanaagagtaaagcattttggttatgagttccactatgagaacaacaatgtanataaagataagccattatctgggggtcctt

SEQ ID NO: 1129 - DNA, 362 bp, Homo sapiens
  misc_feature (265)..(265): n equals a,t,g, or c
  misc_feature (276)..(276): n equals a,t,g, or c
  misc_feature (347)..(347): n equals a,t,g, or c
gttagtgtataatgagcccaagtgtgattcttcccatttgggaattctgtgaatcctgctgtaggttgttgcctgtctgattataaaagactaggctcatgtttttgctttaaatgtttgagattatggtcttataccttagtgcttctggggcaatctgaacattgtttgctttgtaaaataatttcttttagagtartctcatgccaaatttactggcctttgattcagtacagttgggtttactgtatgtagtaaarttganaccctgcgtanattggtctcatgttagcattcttggggaagctttgaaaaatttcccaagttaaaaattccagaaattgatnttccccagatcttta

SEQ ID NO: 1130 - DNA, 1248 bp, Homo sapiens
gcagaaatgctggggcctggaataagggaggagaggggactggagagtgtggggaatggaaagaagcagtttactctagactaaagagtatattgggggaggaagagagggaggcacgtatgaacaagcaatgagaagaccaggaaaagaaagagctgaaaatggagaaagccacagttagaactgttggatacaggagaagaaacagcggctccactamagacccgccccccggttkgatgtccttccaagaatggaatccttccctggtgatggtctctcrccctgtcttaccagcatccactctcccttgtcctcccaggggtgtatctgagtcagccagtggcttcttgatgatggtggtggtggttgtagtgtgacaggtcccctttaggttatttaagggtgcatgtcccctgcttgaaccctgaaggccgggtaatgagccatttccatggtgcccagctgaggaccaggtgtctctgagaatccaaacatcctggagagtatctgagaaccaaccaagtaaaagtctcgttgctcatatatagtagacaaagagccagaaaattaactgaaaagcagtttagacattgggggaggcyggatctctcgagctgtcttgctgagtgccctgtgtgtaagtcctaataaacttagctactcgccaagctggacttgtttgagtcattccttggtctcatggctcctttcccgctttgagggcaagttcctgtctcaagtttttgtcctaacagtggtaaaggtgattgtggtgatgtcagcagacagcaagaggacttgacatggggtcggccctgcttggggccagcgtacactgagggaccgatgacatttcaatgaaactccaaatgctatattggaaacgttgatgtgtgaagaaaaataaaagcaaaaccagatgccaggaacaagtcaaaatgttgtggtgcattgaggagatgaaccagcctgcagtcaagagaccccatctctctgagcctcagtttcctcatcagctgggaaaggggggctggacaagatgatatctcacatccacctggccctcttctcttgtgttctagagacttgtgttcaagcaacactgactgatgactgagcctttgtgtgctgatatatgggctcccctaggctctgggtgcctgacttctcttcctcatgattcttcttccaggctctcagggagctaggcctccatggccccttctgcttactctccagactgcc

SEQ ID NO: 1131 - DNA, 723 bp, Homo sapiens
gtgatcccttcagattgaattaacgaaaagacaacacttccagtttttggattgggaaataccttctaattgagactatagccaaaccagggccaaaattatggatattggtcacccagtgatcataactaggcttgaaaatcactacacatattttctgccttgagtgaacatttttagaggaaaggttatgccatctttttaccctaaccactgatattctggttagcagggccaggacaaggggaaggaaaatgaggtcaacaaaaaaatcaaatttttaggaaaagataagatgaatgttactgatttttccttttggctgaggctgcaatatggcctggcaaggcactgktactgatcttgkctttaacattttgatattttgttcatcataatttttgcatttatttttttaaatattgcattaaaatatcatttagcttgattatcgagttttttggtttgaggttttttgttgcttcttttttcttttctttctttccccctcttttttttggatgtccccttaaattttgtcccaaggcaggtacctcactcatctcatccttggctcagccctgctggttagtatttagtatttattttagtaagatatttgtgtctgtatgatggtcagagttgaactgatctggcttgtcatttttcagtaataaaaaaagttactgaatttaaaaaaaaaaaaaaaaaaaaaaaaaaaaa

SEQ ID NO: 1132 - DNA, 782 bp, Homo sapiens
tttattctcagaagacttactatgaatgagctaaatagtgtttcagatctggatcgttgccatttatacctgatggtgttaactgagcttataaatctgcatttgaaggttgggtggaaaaggggtaaccctatctggagagttatttctcttttgaaaaatgcatccattcagcatcttcaagagatggacagtggacaggagccaacagttggaagtcagattcagagagtagtgagcatggctgccttggccatggtgtgtgaggccatagaccagaagcctgagctgcagctggactctctccatgctgggcccctggaaagcttcctttcctctcttcagctcaatcagacgctgcagaagccccacgcagaggagcagagcagttatgctcaccccttggagtgcagcagtgttttggaagaatcgtcatcttcccaaggatggggaaaaatagttgcacaatatattcatgatcaatgggtgtgcctctctttcctgttgaaaaaatatcacacccttataccaaccacagggagtgaaattctggaaccgtttctacctgccgttcagatgccaataaggactttgcagtctgcactagaagccctcacagttctttcttctgatcaagttttaccagtgttccattgcttgaaagtgttggttcccaacttctgacttcctctgaatcactctgcatagagcttttgacatggctggaaaatatatcttctttaagcacactcagctgatattctgggctaattaaaagcttt

SEQ ID NO: 1133 - DNA, 768 bp, Homo sapiens
ctagttctagatcgcgagcggccgcccttttttttttaaagaaacactttttattttgaagtaattatagtctcataggaagttgcaaaagtagtacatagagtccctgagtactcttcccccagtggtgacaactgtagtataatatcaattctgggaaattgacattggtacaataccaaatatactatgcctttttctctaaggcatgatgttgcagtagcatccttgtacatgtagctaggagaacttgtactaagcccagataaatagttgaagtacaagggcraggagtgtgtctttgatattttaatagaaatcacctattgccctctagaaaagctgtacccttttccagtggcagagaaccttcctgaaaggcagtcctgtgtaatggtgtccatttcatcacacccttaaaacactcagctttaacaaacatgcagatttttgctgatgtgggagaaaatattaattattaatgatattaaggtgattatcttttcgtatgtttatagatatttgtatttctttttaaatgaactgctcatgacctttgtctacttttatttgggtttacttctttctcatttattcctataaactctttataaaaggaaattaaccatttgattgtcatatgttgtgaatatttttaccattttgacttttgaatttatgtctttttaatgaattgtagaagtttaaaatctttatggaataaatttatttagttttttgttaaaaaaaaaaaaagaaaaaagacaa

SEQ ID NO: 1134 - DNA, 274 bp, Homo sapiens
  misc_feature (52)..(52): n equals a,t,g, or c
  misc_feature (235)..(235): n equals a,t,g, or c
  misc_feature (254)..(254): n equals a,t,g, or c
agcaggccaggctcccctcggcaaacctgtctaattggggcggggagcgganttcctcctctgagggccgtgcgcgctgccagatttgttcttccgcccctgcctccgcggctcggaggcgagcggaaggtgccccggggccgaggcccgtgacggggcgggcgggagccccggcagtccggggtcgccggcgagggccatgtcgctgttgggggacccgctacaggccctgccnacctcggccgcccccacangggccgctgctcgcccctcc

SEQ ID NO: 1135 - DNA, 1135 bp, Homo sapiens
aattcggcacgaggagctacggaaggagggctttgacccggctattgtgaaagacccgctgttctatctagatgcccagaagggccgctacgtcccgctggaccaagaggcctacagccgcatccaggcaggcgaggagaagctgtgattccccccatccctctgagggccggcggatgctggatccggagccccaggttccgccccagagcggtcctggacaaggccagaccaaagcaagcagggcctggcacctccatcctgaggtgctgcccctccatccaaaactgccaagtgactcattgccttcccaacccttccagaggctttctgtgaaagtctcatgtccaagttccgtcttctgggctgggcaggccctctggttcccaggctgagactgacgggttttctcaggatgatgtcttgggtgagggtagggagaggacaaggggtcaccgagcccttcccagagagcagggagcttataaatggaaccagagcagaagtccccagactcaggaagtcaacagagtgggcagggacagtggtagcatccatctggtggccaaagagaatcgtagccccagagctgcccaagttcactgggctccacccccacctccaggaggggaggagaggacctgacatctgtaggtggcccctgatgccccatctacagcaggaggtcaggaccacgcccctggcctctccccactcccccatcctcctccctgggtggctgcctgattatccctcaggcagggcctctcagtccttgtgggtctgtgtcacctccatctcagtcttggcctggctatgaggggaggaggaatgggagagggggctcaggggccaataaactctgccttgagtcctcctagcctgtgtgcaaaccacccaagcccaccctgaccccagaaccccacagccccactgtggccgcttgatcccccacgccaaccccctggcccattgacccgcctcatctgttcattcacttatctaagctgagggtgtagcaggtaagatgccgcagcccctgcctccaatgtgctggttcagccggggcagtgcccatgtgaatctggcaaggtgtttaacagtgtgggcttgaaagtccaaaccaaaaaaaaaa

SEQ ID NO: 1136 - DNA, 446 bp, Homo sapiens
  misc_feature (435)..(435): n equals a,t,g, or c
aattcggcacgaggacaaaaccaattaaaccggctctcaaatcagcagaggtggaattgaagacaggaggaaataattcaaatcaggtttctgaaactgatgaaaaagaagacctgctgcatgaaaaccgcttgatgcaagatgaaattgccaggctcaggctggaaaaagacacaataaaaaaccaaaacctggaaaagaaatacttaaaagactttgaaattgtgaaaagaaagcatgaagaccttcaaaaggctctaaaacgggaatggggaaacattagcaaaaacgatagcctgttatagtggacagcttgctgctctgacagwtgaaaacacaacgctccgttccmaactggagaagcaaagagagagcaggcaagactggraacagaatgcatcctaccttgtaggctgatgctgttcgttgtgttcnggttcaagtca

SEQ ID NO: 1137 - DNA, 573 bp, Homo sapiens
cctcatctctatggctctatggctgtacattaggacctagaacagtggcccattgctcttagactggaaccatgtccactaaaataaacctaagcagatgttgtagacctagccccacaggactgcatttagctgcttcagtgacactttgatgaaagtatggagaagtggagacattatagataaaatatatcaattcccagagaaaactcttgacttaaaaacttaactgtagtaaatatatctttttcaggtgatgaattatttttttaaaaaaggttacatataggaattctgcagtataatttggaggctattagtgctatattaatggaaattaattattttttaagtaagtccaaaaaataatctagaaagtaagtttccagagcaaatctgacctagcatttggtatgctaggctctgcttttcatgattttgaaataaatcataattagacttaacaatatggagaaaataaacttgtatttttaagtgttctgttggcttattttctgtttcatccaactcaataattctgataaataaatttggttctagtttaaaaaaaaa

SEQ ID NO: 1138 - DNA, 2229 bp, Homo sapiens
  misc_feature (262)..(262): n equals a,t,g, or c
  misc_feature (1358)..(1358): n equals a,t,g, or c
agctcactaagggaacaaagctggtgctccaccgcggtggcggccgctctagaactagtggatcccccgggctgcaggaattcggcacgagaggaagcggcgcacggtggcctcgggtgccacctgctgcaggtcggccatcttgaagtcgtaggtggctgtgtagcccacgttggccagtgtggtctcacacatgtagaaagtcccgtaagagccgtggaagagctcctccacgaactccagcaggccgatggcgatcttngcccgccaaggcgagcacagcaccgactgcacctacgggcgcgactgcagggccccgtgtgacaggctcatgaggcagtgcaagggcgacctcatccagcccaacctggccaaggtgtgcgcactgctacggggctacctgctgcctggcgcgcccgccgacctccgcgaggagctgggcacacagctgcgcacctgtaccacgctgagcgggctggccagccaggtggaggcccatcactcgctggtgctcagccacctcaagactctgctctggaagaagatctccaacaccaagtactcttgatggggcagtgaggggcctggccacccttcctggagctggccaggtgccagggtccarccctccctcaaggaatcctgtcagaagatgtgaaatgcaactgtgttgcaaaatcactcccctaccgtcagggctctggattccagcaccacagacatgagaccccagctcggagcaaaggcggacatggacatcccggcaggagagtcctccaagggggtttgttactctgaagaacgtaatgtcaataaacagcttttatgtaatgcccagggctgagcaccctgagcccccatcgatgctgtgtgtgggacccttcgccccgctgtggatccacccagcccaggcactcaggctggggttgagcccctgaatccttcctggcgargyrgccctcargtgttagtccaaggtgaggtctattgcagagtgcctgcccttcaacccacacacacctctgaagccgccagggcagttccccaaacacagcggcttctgaaacagtcaatgaccagtaccccccaaacctgggctgtgcacaacagaccaagaaaaaggtgttccagtaagaaaacagatatatgcggtattttaaaaactgattttacaaaatccagccatgagatgtacaactcattccctaggaaacagcccaggaatggccatcttctccagccccgtacgctctccccagtagcccagggcacccagcaaccatcccctaggagaacaggcaaggaccctcgtgggaagatcccaccacagcaacacctttcttcagggcgggctctgntccgcaatgtgtgagtcaagacaatccattccattcaagaccaatttactctcaaattttgccaacacagaaatattatccttaaagaaatgtgcatttaaatcttttaattcacttcatcctgtattttaaaataaatgttttccatatagattttccccttgggggggaaaagaattcagggtcttaggttccaggcagttcaaaaacagccacgcggttcttttttctccaccagaataccacaatagcagaacttaagaatcgggatatgaaaagggaggcgtggtcctggcagtggcccctggccggcaggaatacacagcaacacccaggcaggggcagcggctgcccccatgccagcctgcccatccctttattccagccagcctcctggcacagggctgggcccacatcctggcctctgcatctggatcagggctggtgctggtcagcctggtcactctggccagtgctcacactggaagtccatcacaggcgaagtcacctccttcccgtgttaaataacaagaatgccaacaccccacgcacgtgtcatctccagtgagcagacgtccaggcttcccgaagcttcctggctggaaaccgcgcagggccggcagcgccctctccaccaagggacacagcagcggcgcctcctccgcggcccgggcccccatcccgcggctcgcgctgccaggacgccccaggtcggagcctgcccccaccccgcacccggaggccagcagcccagtcccctaggccgcgcagcgccagcgagagcgaggctgcagggcgaggcccggtgaggcgctcgagaactggccgggaggagaagtcaggcggacgcgtgggcggacgcgtgggtcga

SEQ ID NO: 1139 - DNA, 949 bp, Homo sapiens
agctaccacctcaagctttcaaccacattgccaagttatgcagccttaaacgacttgttctctatcgaacaaaagtagagattgaagactatgatgtgatagctagcatgataggagccaagtgtaaaaaactccggaccctggatctgtggagatgtaagaatattactgagaatggaatagcagaactggcttctgggtgtccactactggaggagcttgaccttggctggtgccaactctgcagacascaccgggtgttcaccagactggcacaccagctcccaaacttgcaaaaactctttcttacagctaatagatctgtgtgtgacacagacattgatgaattggcatgtaattgtaccaggttacagcasctggacatattakgaacaagaatggtaagtccggcatccttaagaaaactcctggaatcttgtaaagatctttctttacttgatgtgtccttctgttcgcagattgataacagagctgtgctagaactgaatgcaagctttccaaaagtgttcataaaaaagagctttactcagtgacttaatatatgttctgtattaaaattaatgtgctttgttggggtttaattttgggattggttttgggttttgtttttagttgttttaatggtaagaattaagacatttgtagattttaaagaaaaatatgaaattgtccattaaatcaagtaaaaatgtgcacaaatgttttcataaaatactgcaagcacttctcttcaagaatatgagtggatattatttttaccttatgttaatcagtgatatgctttagtcaataatatgattgataaaagaataacatggaatcatgctaacttattttcaaaggaacactgagcaataaagtatcgtggcatttatgcaaaaaaaaaagttaattttttacaccttcatgtaaggatgtcttattaaag

SEQ ID NO: 1140 - DNA, 1418 bp, Homo sapiens
agggtttcctggataggcttgctgaagatgaaggggacagtgagccagaggccgttggacagtccaggggagaagacagaagaagtagagaggcagggcctggtgacagtatcagtgagtgccatacagaattgtgtattcaccagcatcatgaaacagttgtggtcttttgagttgatcttggcagagtaaagggacgtgtcctggagccattcctgaatctccccttctttgtgacagctcctcccacccccccaaaaaataaaaaaaccacaaaaaacaaaaaaacaaaactaaggcacttcacttagagactggagtcctgcttataatcatgcatataacctttactttgatggatctggccagaggggtgttggagcccagcccacccacataccagtcaagctcttaggggagcagaagaaaagcaggaagaatttaaatgtttaattttttttttaaattgacttttctagttattaaaagttgcttgtttcagcagtgatattgtataaagaacatcttgtaagatactcctgacatcttgctttagcacatgtacagtacagtttctatgataatgtgtttgctctaacttccctggcttctccttcagcccatccactctcctctagagcagttgggttggaggctcattgaggcaagcagcaacattggagggggagcagggcagtgctgtgtctgctgcctcccatgcccgttctgacctcagccttggaactcctcaagaacctgaagattccagtggtcagtgtcggtggggggtgggaggagagagcggcagagaagctctgagagccccttcccccacaacaaatctagctctagttgttatatttaggcaaaactttgtagtcttctttcccttttatgatggattttgataaaagtacaaaacagggtttttcttttttatcacctttgaatttggaaattttgagcacccaagctcttctgtacctatttaaagtccaccaaggggactgcagctcctagaacatgagaatcaagcctcttaattttaaactgcggaatgtggcctctgcttcctccgtcctcctgcccaaggacgacgaggattgctccagggctgctgggtagtttaccgtcccttctataggcatggagttggcactgacatcacagcttcataaccccaccaccgccagcttcccctgcctcctacatccagtctgttcttgttcatagtgagaatcctgtgttcccacttcagtgacacctgaattgtttgttgttgttttttttttttattgtcttcaaagaggaagggccccattaaagggtgaacttgtaataaattggaatttcaaataaacctcatgtacttgtgtttataaagaaraaaaaaaaaaaaaaaaaaaaaaaaaaaaaaa

SEQ ID NO: 1141 - DNA, 1662 bp, Homo sapiens
  misc_feature (1656)..(1656): n equals a,t,g, or c
  misc_feature (1661)..(1661): n equals a,t,g, or c
aacacatcagwactcatacaggagaaaggccctttaagtgtcccttcgaaggctgcggtcggtcctttacaacatcaaatatcagaaaagtgcacgttaggacacacacaggagaaagaccttattactgcacagagccaggatgtgggagggcatttgccagtgcaacaaattataaaaaccatgtgaggatacacacaggagaaaagccatatgtttgtacagttcctgggtgtgacaaaaggtttacagaatattccagtttgtacaaacatcatgttgtccacactcattccaaaccttacaactgtaaccactgtgggaagacatacaagcagatctccacgctggccatgcacaaacggacagcccacaacgacactgagcccatcgaggaggagcaggaagccttctttgagccgcccccaggtcaaggtgaagatgttcttaaagggtcccagattacgtatgttacaggtgtagaaggggacgacgttgtttctacacaagtagccacagtaacccaatctggactgagtcaacaagttacactcatatcccaggatgggactcagcatgtcaacatatctcaagctgacatgcaggccattggcaacaccatcacaatggtaacgcaggatggcacgcccatcacagtccccgcccatgatgcagtcatctcctcagcaggaacgcactctgttgctatggttactgctgagggtacagaagggcaacaggttgcaattgtagctcaagacttggcagcattccatactgcctcatcagaaatggggcaccagcagcatagccatcacttagtaaccacagaaaccagacctctgaccttagtagcaacatccaatggcacccagattgcagttcagcttggagaacagccatctctggaagaagccatcagaatagcgtctagaatccaacaaggagaaacgccagggttggatgattaatcctcagaacaatggagcaataaagcagaaggagtctttcatcttctggcagcagaaatccatgaagcccgggcccaggaaaattagaagttttccattcctgatacactgtacacatttttatgcgagagtggagaacattttattcttgacacttttgtgtatataacccttggaatagattctcagagtgattcattgtgtacaaggaagtatgaaattagggcaatacagtaaattttcatgttactcttttatcagatcacaaactcctagagtctacatgcaagactagtaaagtcttatggagtcttatgatggatttttaacttcccgtggaaaaaaaaataaaggctgtatctaaaatatcaaaggttctatatgtcacacaatcgtaattccaaaagccattatggataataaagggtgtaaagccttcagatatttccccagttagtagagtgtctgcggtttttgttctactatatgcttgtccatttttatttgtatctcatggtttgcagactgtttgaataatttatagtttcccatccctgttaaaaaccagctcttcaagctgaaatgctaattatattggcattacattgaattatgtacaaaattataaaatttggttatttaaaattaaaaagttaaatccaaaaaaaaaaaaaaaaaaaaaaanggggng

SEQ ID NO: 1142 - DNA, 387 bp, Homo sapiens
ggcacgaggtttttaaagatagggtcctgccatgttgcccaggcttgacttgaactcctaggtcaagtgatcctcccatctcagcctcctgagtagctgcgactacaggaaccagccaccacacacccatgtccacccaccttagggttaatctttgttactagccctcactactcagaattggtgagacctctccatttctgcttcactcagcttacgtggtttgctcacactgacaccaacaaacacctgtcaatccctatgtccctcctgtcttccaaaaatacctagaaattgctgctctattgacggtagtatttcttgttttctagtgttgctattatttgtctattgtactcggttttgcattttagtcacctgaatgtc

SEQ ID NO: 1143 - DNA, 82 bp, Homo sapiens
tcgacccacgcgtccggttctagatcgcgagcggccgcccttttttttttttttaaacgtttctgcactggcaaaaaaaaaa

SEQ ID NO: 1144 - DNA, 806 bp, Homo sapiens
ttttttttcaagctggcttttcgtatattgtgtataaaaagatcagattcaggatgatttggtgggattgccaggggtgaccggagtgttgctgggaaggagcctcagctccgctcmaggtcctccaccaggtaggactgggactcccttagggcctgraggagcaagtccttgcaggtccagttccaggctggtgtgaaactgaagagcttccgcatcttgcttgggttggtgggctcggcccgcactgcctggtactgctcatccgtcaggaccttcccgtacagagcatccagcagccactcaacgtttgtgaccctcgcgataagcgcagcccggtgctggtctataaagtgcaggcctggcttggctgccgactgaggaggggcctggatcccagctggcgcggctccagagccctggtgcgtggccgcctgcagctgcccggccatctcctgcaggcccatgtcgcgcagcacgttagcggtgagctcggcgccgtaggtctccaggtagaagctgaccagcttgtcggtgaggtccaaggcgtccatggacagcagcgcgccccgcgggatgcgcccgtagccctcgcgcagcggcaccgacagcagcttcagcttgaacttcttgagctcctcggcggtcaggttctccagcgcatccaggatggcgtcgcgcgcgcgccccatggctccaggatccccggccgctgccgccgctcaccccgctgcagccgccgaccaggaggaagtcggctccggggcggaacctggactccccgccttcctcccactctggtctcc

SEQ ID NO: 1145 - DNA, 639 bp, Homo sapiens
gagctgaagctgctgtcggtgccgctgcgcgagggctacgggcgcgcgcgacgccatcctggatgcgctggagaacctgaccgccgaggagctcaagaagttcaagctggtcagcttctacctggagacctacggcgccgagctcaccgctaacgtgctgcgcgacatgggcctgcaggagatggccgggcagctgcaggcggccacgcaccagggctctggagccgcgccagctgggatccaggcccctcctcagtcggcagccaagccaggcctgcactttatagaccagcaccgggctgcgcttatcgcgagggtcacaaacgttgagtggctgctggatgctctgtacgggaaggtcctgacggatgagcagtaccaggcagtgcggccgagcccaccaacccaagcaagatgcggaagctcttcagtttcacaccagcctggaactggacctgcaaggacttgctcctccaggccctaagggagtcccagtcctacctggtggaggacctggagcggagctgaggctccttcccagcaacactccggtcagccctggcaatcccaccaaatcatcctgaatctgatctttttatacacaatatacgaaaagccagcttgaaaaaaaaaaaaaaa

SEQ ID NO: 1146 - DNA, 442 bp, Homo sapiens
  misc_feature (427)..(427): n equals a,t,g, or c
gtccggaattcccgggtcgacccacgcgtcccaaaaaaaagcaaatgctgaaatcctattggcaaagtaaactgaaattggctgctatattttatataatcatttctgcaaatcccattttttgaatactaatatttgacatggttaattcttattaatttgttggaattgtttattgttaataatgcaaatagataatttttaattatccacaagtaacatttcactgttaatggtttgaaataggtgataagcaaaccaatttgaaataaaatataaacatgtgccattgtattataacactatacactttcttgacagttaaatttaaaaaaaaattttttttggtagcatgtattgtatatgtttatagtatatgtagtaaataaaaatatggccaaaaaaaaaaaaaaaaaattactgcggnccgacaagggaattc

SEQ ID NO: 1147 - DNA, 673 bp, Homo sapiens
  misc_feature (647)..(647): n equals a,t,g, or c
  misc_feature (652)..(652): n equals a,t,g, or c
  misc_feature (662)..(662): n equals a,t,g, or c
  misc_feature (668)..(668): n equals a,t,g, or c
aacaaatgttgtcacttgaaataccaaaacaacatttctgagcgttgttgagggactggcaaagcaatcagctactataacaaatcagtagrrataaccctcccacaccagatatgcatgcagaaggaatggagtattatagagacttgatacaatggacatatgcacatggaggtacaaaacacacagtctaaatacaaatgaattccatcagatttactatacggaacatcagtagtgacagattgcacttcttacttaataacagcaaacttaatttctgaggggaaaaaaatggcgaagtcttatcccaaacaaatagcaagagaggtatcatcaagagctaaaattttctttggcatggtaaagggggaaattgagtttaccaacttatttacatgacatttctctatattggtgagtaatgcaatgccattttgttacataaagttgtttgatgttttttaatatgccttcatataaatattttattcaatatgttgtatttgtgaatttaacaaatgatattaaacacaaactacaatgcagacaaaaaaaaaaaaaaaaaaaaaaaaaaaaaaaaaaaaaaaaaaaaaaaaaaaaaaaaaaaaaaaaaaaaaaaaaaaaaaaaaaaaaaaaaaaggggnggccnttttaaaggntccaantttac

SEQ ID NO: 1148 - DNA, 558 bp, Homo sapiens
gcccacgcgtccgatcttcgagctgaagaaattgatccagtttactttgatcttcaccctggtcagggccatacaaaacctgaatactattatcctaatttccttccatcccctttcagctcctgggacctacgagatatggccctgcttctgaacgcagagaacaaaacggaagccgtgccccgagtgggaggacttcttgggaagtatatcgatagacttattcagcttgagtggctgcaagtccagactgtacagtgtgaaaaagcaaaggggggcaaagcaaggccccccactgcccctgggacctcaggggcactgaaaagccctgggagaagtaagctaattgctagtgctctgtccaagccactacctcaccaggaaggggcttcaaagtcaggcccttcccgaaagaaagcttttcaccatgaagaaatccacccatcacattatgcatttgagacttcccctagacccattgatgtgcttggtggtaccaggttttgttctcagaggcaaacccttgaaatgaggacagaagaaaagaaaaaaaaaaaa

SEQ ID NO: 1149 - DNA, 789 bp, Homo sapiens
  misc_feature (59)..(59): n equals a,t,g, or c
gatcatatggtaagcgtacgtttagtttagtttttttttttcttttttttttttktttncyggggttagaagcyattcgaaaagtccagtttcygtcccagtgtagcaaaatgtagttcctcggttgtttttctttaaatgctttataattttacactacctttttaatatacaaacctcattcttcattggataacttgaaggctttgatttctttaaaaatttaaattttagtrtgtatattactttgacagttccctcatctttgagatgcactgatcactgtgcttgaaaaagacaatactgaagattgtactatgaagtttattgaataattttcataaattatttatccaaatgagagatttttagatttttgtattctgcttagttttaaaaaaaaaaaatagtagtttaaaagagaggctagtaagtttgatgctattcttgccaaacaaactcagccaaaatctttaaagtaacaagagggaaaaggatgactaatcgttctgcttctgagtacattttccaaaacgttggaaagaaacttctgaattgaaatcttgaatgtattgaatctgtcaaggtacacagcggtgcctttgtaaatgttcattactttatttaatcaggtgataagtggtgtaatgtagcagagcttaagaatagaactcaattatcactttttgtgaacaagttggaattgtcatgttactgtgtaattgatttgctttacaatgaacaataaatttaataaaataaaaaaaaaaaaaaaaagggcggccgctc

SEQ ID NO: 1150 - DNA, 830 bp, Homo sapiens
ggaacacagtttgtaagttcacatttactataatgggccaaaaccataacctgccagtttgcaatacatcttgatcttttaatattcttatctgatattgtgtaattcaattcctaaactgatagttaccttgaattttgcgaaaaggtttgggtggttttttttaaacatgaaattgagggatctcatctgggcgaacaagaagagaaagctgtgaattgtactgtatcatgtacattcctgatttaatactttacagaacattttattcagatatcaatttgttacataaacatttcagcaatgatacaaagataactgataaaatatattacattcaatgaggttttctttacaaatgctctacttgaggtctgtgtcttaaagatggcatgacacctaagtacaagacatcaactgaatgaggattttaaaaaatggtatataagcataggacaagggctatgtttgtttgtttttcaaaagtgctttgaagataacagcctttaggtttgagttatttcacttttcataatttttaagtagcttatatataatggtggtaccataggattttcttttttcaaatgactgtcggcagaaacagtgggcactgactcaccttttgagttttagcagagaattatttatttctttacaatgcactttctaacccattgtagctatattagcattatcttttaaaaaagacatgcttttgtatttaaatattgtaggatttaagtgkctttctcaaaatagcytattcctttctgaaagaaaatgagggaaatactctgaattattaggagacttaaacccaatattta

SEQ ID NO: 1151 - DNA, 1110 bp, Homo sapiens
  misc_feature (1107)..(1108): n equals a,t,g, or c
catttaatactggagttagccacatgtgattagtggctatggtattggacagggaaggtacagaatacttccatcaacatagaaaattctatcagtctagctctaggggcagatagtccttccactgacttgggcaagtcactctacaaatggcatctacctcacatggttatggtgagaattcagcgtatgtatgtacatgcaggcacacaatatgcacacagacacataacatagtacaccctttcctgaaaagcctgacacatggagctcaaacatgagtgccacccacccctgggcagcaccaagatggctctagtctgggtgcctttgtctcacccccatgcctttgctcggagtgtgctcctcatttttctgccactttgaccctgtctctgatttggtcctgtctgacatcactgctatatgctttgctcctctcaatttcctctgccctcatgccagcaggagtcatgccagagatcatatctgagaaagcaagacaattttgtgtgtgtgtctgtgcccatagaggagtgctggttgtgttgatatagttgtagattggttgtgtttacacagttgtatatattgacacccttgagtgttatgacttcttttgggggtggtcgccttttaaatcataacttttaatgggattccattttagtctttgtgaagacataaggttgttggcaggcatctgtccctgggagcatccaagcagaaaagactaagactcccttgtagacagatcactggccgccactgaagtgtgtctgcatggcaccacagggctggaagacccttgaaggcaggaattcaaggaaatgtatgatgaattttggcattgccatcaaaagcagaacaggcatggaaaacttgggtgagtgggcgagacaacctcctcaccacagcagagttccatccatgcctggataatgakggagggatttgtgtccactgcagtggggaaccatgaaggacacatcaagggtgtggttggcctgtggtgctctttggaggaatgaataaaaatgaatagaaatcctaaaaaaaaaaaaaaaaaaaaaaaaaaaaaaaaaaaaaaaaaaaaaaaaaaaaggnntt

SEQ ID NO: 1152 - DNA, 406 bp, Homo sapiens
  misc_feature (398)..(398): n equals a,t,g, or c
gttaaaaatggaaagcagaaagtaactgcagtgatgaacattttggtccaaattcttgttttaaatcttacacctgaaagtaaaatattgggatcacttttccctgtctaaactccaggatacagtatccaatttatccaaacagaactgtggtgtcaatgtgtaattaattgtgtaaaatagccttcccaagtttctttttccctggaaaaataaaaaaggtaatagaacttgtagttttatgtaaaccccatgtcatgaggaggtactagttccaagcaacaaactccttaatttgctctaatagataggtatggtttaatctttccattgtgtcttttcatttaattttcctgaagcttgcaggatagattgaaatgttataggtttgtttgganttaaccac

SEQ ID NO: 1153 - DNA, 421 bp, Homo sapiens
  misc_feature (35)..(35): n equals a,t,g, or c
  misc_feature (413)..(413): n equals a,t,g, or c
  misc_feature (418)..(418): n equals a,t,g, or c
gcgtccttccacgcgtccggcgactgcagcgggtncggtgcaggtgaggggcgcgcgcctgcccagctttgcagcccccgaacgcggcctcgcacagatacccagacaaatggattctaaaatttgaatagaagagcaaagaaaataggaaccaatttgaaggactacaaggtggactgcttgctcagctcagtatcaacacttatggagtcattgcagttttcagtagaggtgtacttctgagaagtggcttcttgggtcttcatgcagccatggatctggatwaaccatctgtttggggctcattaaaacagcggaccaggccattgttgatcaacttgagcawgaagaaggtgaaaaagaacccaagtaagcccccagatctacgggcaaggcatcacttggaccggcgnctcancct

SEQ ID NO: 1154 - DNA, 266 bp, Homo sapiens
aaaagtgtagttatcgtaacatcaccttgaaacaactttgttactgggatacatttaattaagcaactaccatgaatgtagtcggtaccttgccttacgtgcttcagtatatatgttgttcttgttttatgtacaggctaaatttgkagattgaatagcagaatattagttctgwtcttatagggcctactgstgtattcagagttatgaagctacgtttcttctgcgtttggctgcaccatgaaatcctaagaagacctaaaccc

SEQ ID NO: 1155 - DNA, 725 bp, Homo sapiens
  misc_feature (5)..(5): n equals a,t,g, or c
  misc_feature (173)..(173): n equals a,t,g, or c
gcatnaaatgcaagtataaaacattccaaattaaaatagaatatgcacattgttcaaaggcaaaactcttaccctactatatatattttacatccctcattttttccccctctaaaatgcattggtattcaggattagaatctgaatcttttgctataaagttgacatacatnggttttaatcccttgaaagttcagtaaagacctaaaaggaaaagcatcctaccacaccacactcatgttgtatgtgcaactattatagtggcttagagacactagttcgtgttcttcgtttctatattagtaaagatgttagaggaaattaatctgtttgttgcatcagggtttaatgtgaccatgttgkataactattctgaaaggtaagaagtttttcactggagtacagtcactggctgagaacatttaagtttttttttgaagcatacacagttaacaactattgcaggaagaactctgaattaaatttcaggcccagagttttgatttaaactccaaacccttggaaaaaaagactgctggaaaatatgaaagaacccttcgtttcttaacccccacaagtccttttattgcacttactttcatgtatttgaggatgagaggagctttaaatcaacaataattcactaaggaataatgcaaggtggtctattgtaacattttatgatattattgccctggaaataaaagatactgaacaatgtaaaa

SEQ ID NO: 1156 - DNA, 435 bp, Homo sapiens
  misc_feature (396)..(396): n equals a,t,g, or c
cccacgcgtccgcccacgcgtccggttcaaaattcaacagtgtatgtcattgccttctctatagggtaccagtcgtccttcacactatcatgttttatgggatgataactgctttactgcagatgaacttcagctgctaacttaccagctctgccacacttacgtacgctgtacacgatctgtttctatacctgcaccagcgtattatgctcacctggtagcatttagagccagatatcatcttgtggacaaagaacatgacaggtaatataaaagcataacaggttctcacccaaatcccmatattgtctgcatggtaggattttcaakttccacaagctattaacggartcmggygatccatgtkaaaaatgatgamagaactgactgcccaangattcctatttgaaaatatattggtctaggctcatttag

SEQ ID NO: 1157 - DNA, 533 bp, Homo sapiens
tttttttttttttttttttttttttttttttttytytttgkgttgctgaccttcacttttatttaaatatagtgatcttttaagagaataaacaaaaaatactttacacagcaaatattttacataaatgtaaacatgcatgtctacttcataattaagcaaaaaaacttttaggcacaagattttaaaaataaagaatgagacaatgaaaccaagactggaataacagaagtaacaaaaactcacatttcctaactcttcaattggtcttgtcttccaacctattggttaaggcctgagtttcagaaatcctaccttccttgccaaayagaaacatccactttggctgtatataacattatccacataacacactaattctctttcaaaataatgtaataaatataccattcatacacacacacacacacacacacacacaccctgctgaaccagcctctcaaataggaaaataaggattttggaattttcaagttttcctacaaccaaagcacatacacacacattaacac

SEQ ID NO: 1158 - DNA, 396 bp, Homo sapiens
  misc_feature (38)..(38): n equals a,t,g, or c
  misc_feature (309)..(309): n equals a,t,g, or c
tgacatggtagcgcacgcctgtagtcccagctactcangaggctaaggtgggaggatcacttgagcctgggaggcagaggttgcagtaagctgagtaagccaagatcatgctattgcactctagcctggatgacagagtgagaccttgtctcaatgaaaaagcagggggcactkggagggggaaccaaatgccctatcctccagttctcagcatatagaagggagctctctcatctgctagccactcctgcctcactgtgccatgctttctgtaatgcactctgggtccagggactgcttggcaggagngtgggaagaacaagaagtttagggccttcccagtttcttagggcctgtctggagagggaactagcgtttactgagtttttacgatgt

SEQ ID NO: 1159 - DNA, 540 bp, Homo sapiens
  misc_feature (136)..(136): n equals a,t,g, or c
  misc_feature (445)..(445): n equals a,t,g, or c
  misc_feature (474)..(474): n equals a,t,g, or c
  misc_feature (506)..(506): n equals a,t,g, or c
  misc_feature (515)..(515): n equals a,t,g, or c
gagaggaaaaggaatgaagaaaaatgaatagatcttcagatacctgtgagacaccctcaagtgtgccaatgtatacctaacgggagtcccagaagacaggagagaaaaaaagaaagaaataaaaagaatatttgantttaaaattgcttgaaaatgtctcaaatttgatgaaaaatattactctgcacattcaacccatgaactataagttgtataaaatcaaaaagtttcacaccaaggcgtgtcatagccaaactgtcaaaagccaaagacacagaatcttgaaagcagtgagagcaaagcagacaagggatccccaataggattaacagcagatttctcatccagaagccatgcaagcccagaaaggctatgggagacatactccaaaatgctgaaataaaaactgtccaacaaacatttccccatccccagcaaaaatccnaaaacaaaggaaaatcttgttgcatgttnaacctgaataaaattggtttccccgccggttngtttggatnaaattttcccccccttaatgttcca

SEQ ID NO: 1160 - DNA, 1481 bp, Homo sapiens
  misc_feature (14)..(14): n equals a,t,g, or c
agaggcttggcttngaaacatccggggagagttgggcaggctgctctttatggatgtggctgctgggctgaaaatactggagctcataacccctactccacagctgtgagtacctcaggatgtggagagcatcttgtgcgcaccatactggctagagaatgttcacatgctttacaagctgaggatgctcaccaagccctgttggagactatgcaaaacaagtttatcagttcacctttccttgccagtgaagatggcgtgcttggcggagtgattgtcctccgttcatgcagatgttctgccgagcctgactcctcccaaaataagcagacacttctagtggaatttctgtggagccacacgacggagagcatgtgtgtcggatatatgtcagcccaggatgggaaagccaagactcacatttcaagacttcctcctggtgcggtggcaggacagtctgtggcaatcgaaggtggggtgtgccgcctggagagcccagtgaactgacccttcaggctgagtgtgaagcgtctcagaggcatttcagaacctgagcttttgggggtttttaactgaagttggttgttttatctttcttgttttataattcctattgcaacctcgtgcactgctcgagacacaagtgctgctgtagttagcgcttagtgacacgcgggcctttggtgggtgagcgggactgtgtgtgagtgtgtgcgcgtatgtgcgcacatatgtgtatgtgtggagtatgtgtgtttgcttctccgtggatgaaatagaaactcctcattgtgtgaccaggaatggttaaatcatctttacaaaatgtgtgctttaactgtttacaagtaaaacctaaagttgcaggaaacattttttatttcgtaaagaggtaccaactgtcgctgatgtgatatgtcagaactgaagagtaaatctacttgtttaaatgacttgacagtggtagtgctccatttaataacagtaataagtaataaagtgtttttatttggttaaccagtttaagtggatcctgtggtaacttaaactgktgktctcatcccytatatggggcatttttctttaacaaagaatggtttcagtgaaacaatctagcagagaattaatgtcagaacctttttaaataatagtctgattgatacagtttgtacttatttcatcaagcttttctaagcttaaatattgcatagcttcgagctgtatggactatattatgaaagaatatgtaaagagaacatacagtaatgcacagtccttaatttgtgtataatggaaagttatttacaatataacactgtaaataagaaagcaaagtttatgggaaaattcaatattatctttgtttttgtttaaatatatttttaagataaaggcmcaaaaataaaagaagcgtattactgggtatagtatgtgactcctcttctcagactaataaattatcttttgaatccttaaaaaaa

SEQ ID NO: 1161 - DNA, 1092 bp, Homo sapiens
  misc_feature (216)..(216): n equals a,t,g, or c
  misc_feature (1083)..(1083): n equals a,t,g, or c
ctttaattttgagtttaaacccaagtttattggcagactcccttttgacctccctttgcctccccatctggtgctttcttgcatctacaccccagggccctgtggtggggctgcagggggaagctgtgcacctgagatgaggctggaacgggaattggcctctctgctcccttcttcagtaagcaaggagccccgcccctcaggcccagcctctgnmaagaggtggtggaatccttgtgccgggtagtagaggaggataagggcaaaaccaggcccaggccagtgcctgcttggtctggatgggacactgtcagagtttggccacagcctgtcctttacttcatccacacctatgaagctattccctaaataaggcatttcccaagttagtcgctacctaatcagccttgagaagaatcctttcctcttctttgatagtgggtcgggggattcttcaggaatggtttggagctgggagtgggtagggggattttaaatgttccatatgggagccccaaaggaactggatgggctgcagtgaggtgggggcgggtgggcagggaatgggagaggggaagtcttggcagggaaatcccttttggccacacagtttacaaacccagtatcatgtctgtctgtgtgtctctcaaggtgagagtctgatttttataccaaagaggaaatgattttttttcatattttgtttgtctatattatataaatatatatatacagttatatatatatatatattattttttggttctctctcgttttttagggagggaagaaagtaccaagttgcattgagctgtaattaaggaacattataatttatgacacatttctatacttgcaaaaattatatcattttatggatataagagaaaaatgcctttttataaaatttcaatttctgaraagtgtgtaatttgtctcttttctgatgtttaaccaagactggtggtgaaagtaaagacagaaactgtctcttaaaaaaaaaaaaaaaaaaaaaaaaaaaaaaaaaaaaaaaaaaaaaaaaaaaaaaaaaaaaaaaaaaaaaaaaaaaaaaaaaaaaaaaangggcggccg

SEQ ID NO: 1162 - DNA, 534 bp, Homo sapiens
  misc_feature (282)..(282): n equals a,t,g, or c
gcggcagtgagcattctgggtctttgatgatggatgagtcttcacttgtaaatttaaagccatatgtattaacttagtttccttccaggcatttagtattagtgaatatcacatacggctttataatgctccaataacagatgcctagttgcactttgatttaatatatgctgggagaaaagatatatgagaatttcactataattttttgcctagataataggtcagaagggttctatcccacctggaaggtaaaaggattgggtcttactgatttcttgnacttctctctggattttatgaagtctatgctatctttttcccagaagcattaagtttgaagactcaatcaccaagtgcaatcaaagctacctttyctccccccaaaattaaatagacatktttaaacacacatacacatttcaagatcaacagarttcccttttgagcatggaaatatagccattgctaaattacgttactggactgaactccaggtattaatttcagtgggaaaattaagaaatggtagga

SEQ ID NO: 1163 - DNA, 401 bp, Homo sapiens
  misc_feature (2)..(2): n equals a,t,g, or c
  misc_feature (31)..(31): n equals a,t,g, or c
  misc_feature (386)..(386): n equals a,t,g, or c
gntttcacccccgccgcctctacaagatgcnggggccacttaaactacgcggaggacgcccagctcatcgcccaggccattggccaggccttcgccgccgcctacagccagttcctacgggaaagcggtattgaccccagccaggtgggcgtgcacccgagcccaggcgcctgccacctccataatggggacctggaccacttctccaacagtgacaatgccgggaggtgcacctcgagaagcggcgaggggagggcctgggcgtggccctggtggagtcgggctggggctccctgctgcccacagccgtcatcgccaacctgctgcacggggggcctgytgagcgytcgggggccctcagcatcggggaccccttgaccggcatnaaaggggaccagcct

SEQ ID NO: 1164 - DNA, 1107 bp, Homo sapiens
  misc_feature (1092)..(1092): n equals a,t,g, or c
  misc_feature (1094)..(1094): n equals a,t,g, or c
  misc_feature (1101)..(1101): n equals a,t,g, or c
ctgacctcgggtgatctgcctgccttggcctcccaaagtgctgggattgcaggtgcaggccaccacacccggccttgggccactgttttcaaagtgaattgtttgttgtatcgagtccttaagtatggatatatatgtgaccctaattaagaactaccagattggatcaactaatcatgtcagcaatgtaaataactttatttttcatattcaaaataaaaactttcttttatttctggcccctttataaccagcatctttttgctttaaaaaatgacctggctttgtatttttttagtcttaaacataataaaaatatttttgttctaatttgctttcatgagtgaagattattgacatcgttggtaaattctagrattttgattttgttttttaatttgaagaaaatctttgctattattattttttccaagtggtctggcattttaagaattagtgctaataacgtaacttctaaatttgtcataattggcatgtttaatagcatatcaaaaaacattttaagcctgtggattcatagacaaagcaatgagaaacattagtaaaatataaatggatattcctgatgcatttaggaagctctcaattgtctcttgcatagttcaaggaatgttttctgaatttttttaatgctttttttttttttgaaagaggaaaacatacatttttaaatgtgattatctaatttttacaacactgggctattaggaataactttttaaaaattactgttctgtataaatatttgaaattcaagtacagaaaatatctgaaacaaaaagcattgttgyttggccatgatacaagtgcactgtggcagtgccgcttgctcaggacccagccctgcagcccttctgtgtgtgctccctcgttaagttcatttgctgttattacacacacaggccttcctgtctggtcgttagaaaagccgggcttccaaagcactgttgaacacaggattctgttgttagtgtggatgttcaatgagttgtattttaaatatcaaagattattaaataaagataatgtttgcttttctaaaaaaaaaaaaaaaaaaaaaaaaaaaaaaananaaaaaanaaaaaa

SEQ ID NO: 1165 - DNA, 619 bp, Homo sapiens
  misc_feature (563)..(563): n equals a,t,g, or c
  misc_feature (597)..(597): n equals a,t,g, or c
  misc_feature (615)..(615): n equals a,t,g, or c
atctttccatatttactgagtttaaatgaatcatctcagagagaaaagaaaaactaaatatrgaaaagtgcatggcagaagctgaaatgagctcaagcagtactaaccttggaaccattctgggtacccaaaagaaaaatttaaaatcaagatgagtaaaaggagaatggtctcaatatcctcaaaaatgcagtaagagaagtaattccccactgaaaatgtctctctttctttctatgttataccctggagtcctggttgaggggtgggggaatcagaaaagtaggtttacatttaacatttttcttaactacattcacttcttaaaaaggaacaagaagtgtaaataagtatgtatagagtgagggattaagcatatttgcattggggactcgtgtattatgcttttaagtcaaaattaatattctcaaattcgaatttgatagctattatttctaaatctttttaatcctcaattttcctggtaaccttctttcaagagtctccttcttctaaaagttgccaaaccctttatatttaagctttttccactcaggactcanttagagtggcaacagggaaagggatggtcccatntgaactttgccactgacnaaac

SEQ ID NO: 1166 - DNA, 531 bp, Homo sapiens
  misc_feature (78)..(78): n equals a,t,g, or c
aattcggcacgagcaaagaagctgctaacagatggactgataacatattcgcaataaaatcttgggctactttatttncttggcgtatttcttccacaacttgcggatcacagtctttgtggaagaaatacgccaagcaaataaagtagccaaagaagctgctaacagatggactgataacatattcgcaataaaatcttgggccaaaagaaaatttgggtttgaagaaaataaaattgatagaacttttggaattccagaagactttgactacatagactaaaatattccatggtggtgaaggatgtacaagcttgtgaatatgtaaattttaaactattatctaactaagtgtactgaattgtcgtttgcctgtaactgtgtttatcattttattaatgttaaataaagtgtaaaatgcagatgttcttcaccccttttggtagaacaaaagcaggatgataaccatatccccccagtgctcatcaaagtaggacactaaaaatccatccatctcagtcaaagtcgagc

SEQ ID NO: 1167 - DNA, 826 bp, Homo sapiens
gggtcgacccacgcgtgtggcactcggcggtcgaaaggggagttcaaggagacgggggcgacgcggctgagggcttctcgtcggggtcggggctgcagccgtcatgccggggatagtggagctgcccactctagaggagctgaaagtagatgaggtgaaaattagttctgctgtgcttaaagctgcggcccatcactatggagctcaatgtgataagcccaacaaggartttatgctctgccgctgggaagagaaagatccgaggcggtgtttagaggaaggcaaactggtcaacaagtgtgctttggacttctttaggcagataaaacgtcactgtgcagagccttttacagaatattggacttgcattgattatactggccagcagttatttcgtcactgtcgcaaacagcaggcaaagtttgacgagtgtgtgctggacaaactgggctgggtgcggcctgacctgggagaactgtcaaaggtcaccaaagtgaaaacagatcgacctttaccggagaatccctatcactcaagaccaagaccggatcccagccctgagatcgagggagatctgcagcctgccacacatggcagccgcttttatttctggaccaagtaaagatgggtccgtggcccacactcggtcatgtgctcagacaacgactgatgaaaacgcccatgcggtttgcatcgactgatagtgtgttctttccgggatcacaaacattaacaaaaaagttaacttatgtgacttggcagttattctataccatttcctgtccattaaaatttttaaaggaaaaaaaaaaaaaaaaaaaaaaaa

SEQ ID NO: 1168 - DNA, 614 bp, Homo sapiens
ggcctcttcacgcgtttcccgaggccgggcgcacgaccctgcggctccccgcccacgacacccccggggccggcgcagtgcagctgctgctctcggactgccccccagaccgcctgcgccgcttcctgcgcacattgccgctcaagctggctgcggccccgggtcccggccggcactccgcccgagcgcacgtgctgggcccgcggccgcgatcttcgtcaccatcagccctgtgcagcccgaggagcggcggctcagggcggccacccgggttccggacactacgctggtgaagcggcctgtggagccccaggctgggccgagcctagcacagaagccccaaggtggcccctgcctgtgaagaggctgagcttgccctccaccaagccacagctttctgaggaacaggctgctgtgctgagggccgtcctgaaagccagagcatcttcttcactgggagtgcaggaacagggaagtcatatctgctaaagcgaatcctgggctcactgccccccacaggcactgtggccactgccagcactggggtkgcagcctgccacatcgggggcaccaccctccatgcctttgcaggtaagtaggaacccctagggctt

SEQ ID NO: 1169 - DNA, 594 bp, Homo sapiens
  misc_feature (4)..(4): n equals a,t,g, or c
  misc_feature (15)..(15): n equals a,t,g, or c
  misc_feature (62)..(62): n equals a,t,g, or c
  misc_feature (111)..(111): n equals a,t,g, or c
gcancagtgacaccnaaccctcactaaagggaacaaaagctggagctccaccgcggtgcagnccgctctagaactagtggatcccccgggctgcaggaattcggcacgagngagagaactagtttcgagtttttytttttwtttttttcatgggtaacaacgtttattaaaatctggccattttctacatctcaaagaggagataacccaccagaggcttaggtaacataattgtgtttaacgtaaatatacacagataccaataggcggttaagccatgggacagggccgcagatggagactgctcaaggtcaaaggggtctccagctgggaccctgcacctggttcgtagcccctctgcagacgcacagtgcctcacgcctgctgcaacctggaaccttgaggccttcatgtcagtgcaggacaagagtcatgtctgtccatagattggggctggaaaggactttctgccactggagcttcgattgtgagcatgcatccccgccaacagctgtgtctccctttgaaccaagtctggttcctccaagcaagcggkcgttcattccaaagagggcctgatcccagacagttaac

SEQ ID NO: 1170 - DNA, 359 bp, Homo sapiens
  misc_feature (330)..(330): n equals a,t,g, or c
  misc_feature (350)..(350): n equals a,t,g, or c
aggaactctggtctccttgcctagtgcttttcaaaactctgtgctacacaggagtggatccaggcctgaaggtcatacaattctggggactctctttaagaaaaagaattctaaaatatcttacttttgcaaacattaygaaaatatactgccacattaatatgttgctagggcccctgctaggaccttaagaaggagctcatgtgagtcaggaccctgaatgttaggcctcgttagctctatggttcatatgcttcttgaaccaagtcacagggcacttcccagccacattgccaggcaacaggactaaactacctccaaagcaagcantcttttcagttttgactgantgatgttga

SEQ ID NO: 1171 - DNA, 633 bp, Homo sapiens
  misc_feature (593)..(593): n equals a,t,g, or c
  misc_feature (606)..(606): n equals a,t,g, or c
ttcctttttttttttctccagatcccacgtttcgctcttgttgcccacagctacttacttcattccccatgggtcacgtcattcatccacattaaccaatttcctcactccaagctcttttctagagataatctccagtccctgtgcagaaactgtcattgcactttctgctgaaatggcagtttcttctcagcaaggtgagattatggaatccagaatcttttttcaggggtcacatgcccatttccccacttgcatgaatgtcgacactgcagccacagttttggccgtaaatgtgaatttggcaagtaaccactgttcccagggaaatgtcccaatcagaagaagattatctgggacactgatactgacagggagatgggacattctgagggacccggaggcagggtgccacctcctcaacttccctgagggctgcctaggaatctgtttcctcttcattctggaattattcttcctctttatgggctgaccaaaaacatgggaaccttcacaaagtccactgttaacagcttttwtttttgtggargtkgarggacatggaggacgtttttaaggccaaagtttatttngagttggggacanttttgtggttttttttttttgaggaag

SEQ ID NO: 1172 - DNA, 1422 bp, Homo sapiens
  misc_feature (1421)..(1421): n equals a,t,g, or c
aattcggctttcgagcggccgcccgggcaggtactttcttactgagccctctattttctttattttaataatatttctccccacttgagaatcacttgttagttcttggtaggaattcagttgggcaatgataacttttatgggcaaaaacattctattatagtgaacaaatgaaaataacagcgtattttcaatattttcttattccttaaattccactcttttaacactatgcttaaccacttaatgtgatgaaatattcctaaaagttaaatgactattaaagcatatattgttgcatgtatatattaagtagccgatactctaaataaaaataccactgttacagataaatggggcctttaaaaatatgaaaaacaaacttgtgaaaatgtataaaagatgcatctgttgtttcaaatggcactgtcttyttttcagtactacaaaaacagaataattttgaagttttagaataaatgtaatatatttactataattctaaatgtttaaatgcttttctaaaaatgcaaaactatgatgtytagttgctttattttacctctatgtgattatttttcttaattgttattttttataatcattatttttctgaaccattcttctggcctcagaagtaggactgaattctactattgctaggtgtgagaaagtggtggtgagaaccttagagcagtggagatttgctacctggtctgtgttttgagaagtgccccttagaaagttaaaagaatgtagaaaagatactcagtcttaatcctatgcaaaaaaaaaaaatcaagtaattgttttcctatgaggaaaataaccatgagctgtatcatgctacttagcttttatgtaaatatttcttatgtctcctctattaagagtatttaaaatcatatttaaatatgaatctattcatgctaacattatttttcaaaacatacatggaaatttagcccagattgtctacatataaggtttttatttgaattgtaaaatatttaaaagtatgaataaaatatatttataggtatttatcagagatgattattttgtgctacatacaggttggctaatgagctctagtgttaaactacctgattaatttcttataaagcagcataaccttggcttgattaaggaattctactttcaaaaattaatctgataatagtaacaaggtatattatactttcattacaatcaaattatagaaattacttgtgtaaaagggcttcaagaatatatccaatttttaaatattttaatatatctcctatctgataacttaattcttctaaattaccacttgccattaagctatttcataataaattctgtacagtttcccccaaaaaaagrgrtttatttatgraatatttaaagkttcyaatgkgggtwtttaataaggnt

SEQ ID NO: 1173 - DNA, 513 bp, Homo sapiens
  misc_feature (22)..(22): n equals a,t,g, or c
  misc_feature (488)..(488): n equals a,t,g, or c
ggttataccttggcggacgtgntctgcaaactrggagaawgatttgcactayctaamcctrracaccyggacttggtctggaaggattactattaatggagaaagcccaaaacatcggtcatggcatactttaacacctatagctgatgataaacttttcctatgtggtggactaagtgcagataatatcccattaagtgatggttggattcataatgtcacaacaaattgttggaaacaacttacacatttacctaaaacaagacctaggttatggcacacagcctgtttgggaaaagaaaatgaaataatggtatttggtgggagcaaagatgacttacttgccttggatacaggtcactgtaatgatttattgatctttcaaacacagccttattcactactcaggtcatgccttgactgcattggtaaaaattctatcatgttagaaagtcagatatctttattacctcctaaacttctgcaanaagtactcaaaaaaaaaaaaaaaaa

SEQ ID NO: 1174 - DNA, 577 bp, Homo sapiens
  misc_feature (21)..(21): n equals a,t,g, or c
  misc_feature (37)..(37): n equals a,t,g, or c
  misc_feature (59)..(59): n equals a,t,g, or c
  misc_feature (74)..(74): n equals a,t,g, or c
  misc_feature (137)..(137): n equals a,t,g, or c
  misc_feature (546)..(546): n equals a,t,g, or c
  misc_feature (549)..(549): n equals a,t,g, or c
  misc_feature (577)..(577): n equals a,t,g, or c
ggtcccaaggggtttacccgnaatgtgaaagccccanagtgaatgaaacctcaaattgncccctgtatggcctnaagaagcccccaagttccccagtggttcccaagtgggcaagtgtaattggaatggtgcccccnccgatgccaaatggagaatgccaaactgcccaggacaaatccagatgaagaaagaaactgtgaagtgcctttgtttaaattggatcagttcccgctgtgcccaatggtcagtgcattggaaagcacaagaagtgtgatcataatgtggattgcagtgacaagtcagatgaactggattgttatccgactgaagaaccagcaccacaggccaccaatacagttggttctgttattggcgtaattgtcaccatttttgtgtctggaactgtatactttatctgccagaggatgttgtgtccacgtatgaagggagatggggaaactatgactaatgactatgtagttcatggaccagcttctgtgcctcttggttatgtgccacacccaagttctttgtcaggatctcttncangaatgtctcgaggtaaatcaatgatcan

SEQ ID NO: 1175 - DNA, 665 bp, Homo sapiens
  misc_feature (8)..(8): n equals a,t,g, or c
  misc_feature (395)..(395): n equals a,t,g, or c
cttttttntttttttttttttttttttttttttttttttttttttttatgtaaactatcaaatgtttatttaaatttccatttaaaatattttcaagtaaaatatgtacaaaaatggttataaaatggttgaagcaactagaagcgtgacaggtataatacatataaatacaaccaaaattcaattcaatgcaaagttgaatgacatcatattgcaccaaaatttattccatacaaaagcacatgcatcaagagtttccataagatgaaaacaaacacacttacttcatagcatcttaccacttacttacacaaatagcccataaacaccatctggcattgtgattgcagtaccagaactctccccagagggraactcatttagctatagaagantccattttatttcacatatcacatgcttgtgcaggcatcagtgytaggaaccctaagaaacaacgcaatccacagatgaaagtctctctgcaccatttatatyttcatagataaatatcttagttctaatatgattggaatgtggatgcagaaataaaatgcagttttgctctttaagaattttatcaatgtaagacattgtattaaatttgtataaaatacacacaatcccctctactaagtttcatgatcacagtgccagagtgaagc

SEQ ID NO: 1176 - DNA, 1077 bp, Homo sapiens
acagaaagtaacaaagaggaatgagccaggagaacaaactaattcctttaaataaataaawaaaaaaaatgcaaatgtccttcaccagtaaagcaagcaaatttttaaaatctctgtttttgaaatctactcgtcaaagagttttcagaggcaatgaaaggggaacagatttttcattgtaatagtggaagttgtgtgatagttaggagatatcaacatgcatttttaatcttttccttagatgaaagagatggcttttggcagtgtgttctaaccagaaagaaaggatttgtattactctccaaatctactgtactgtcagcttcactccacctgagaaaaaagaaaaaaaaattgatagctcaaatgcatgtaattcataaacactgcaaaggagagccacttggtgtctgcagtcctcatattaacagtctgtcacagaatgcagttaaagtattgattggcatatggtaatagagcaaccatagccttaacttacagacctgtgaaataaagggcattttgacctaatacaattaattttctggataactcttaaagagaagtcattttaactgtttttgctactccatatattgtcattcaaaatatattttaacccaaaataagttaaataatttgtgcatgtttgtgtgtgtatatatgcatacacttttttatattaaaattttgaggctatacagccactgtgccctgtggaataaagccatatatataaatgttttatatgtatatgttttatacatawataaaacatttcatctaatatatatatgtgtgygtgagtatatgtgtgcatgtttagcagatatttgtataaaatataaacactctgttgtcatatwggctatatgcgaaattgttaattttaaaataacctcaggccacagacttgtagtaatcatttgaaggcctcacctagtgtccccttggtgacgtatgcagcagctcaaattaaacctttgtgcattgggttatgaataatcttttcttccaaagatggcaaaagcctcggtttgatttgatactaaagaataaatttctctgactttcaaa

SEQ ID NO: 1177 - DNA, 1177 bp, Homo sapiens
ggcagagctgacgttccccccagcttagaccctgagtcgttttcccccgtttcccggctgaattaggttcttcttctccacaggtgtgtgcagtggcctcagggatccggaaagtctaggactgaacttctcctaacatccagtaatggggacctggaacctgggcgtactagagtgccgcgcgtagggctccaggtcgctggcttctgcgctttcttcctctccaaagttgagtatctcctatctgtgtcctcatacatactgccgcctgaggtgccatggcccccaagccgggggccgagtggagcacagccctgtcccatctggtgctgggagtggtgtctctgcacgcagccgtgagcacagccgaggcaagtcgaggggctgctgctggcttcctgctccaggtcttggctgccaccaccacgctggccccagggctgagcacacatgaagactgccttgctggagcctgggtggccaccgtcatcggccttccccttctggccttcgatttccactgggtgaatggggaccgctcctctgccaacctgctcctgggaggaggcatggtgctggcagtggctggcggccacctcggccctgaggccktctgtggctggtcaggcaatgctgttggtggtcgcagtgaccatcctcattgtagctgtcttcacggccaacacttatgggatgtgggggggggcgatgctgggtgtggcaggcctcctgagccggctggaggaggacaggctgctgctgctaccgaaggaggatgtctgtcgctgggccttggctgtaggcagctgggcttactgccgggccctgcatacacagcgcctccagtgggagtgacagttggatacagccaggcagggtttctgccctgccgaacactttccctcccacctgcctgctcctggcgccttctccctaggggtagactcttctgcctactgaagtgggtttgctgcacattgactggtcaggggcagagtctgggtgctgtcctttggccacgtgtggggacttgtctagaccagaatgaaagggacagggtcccagacacgtttgggggtcctgattctgggctggacacggttgtggatccagagaagaggcctagtctccaataaatcttaggaattttgcaggaawaaaaaaaaaaaaaagtttt

SEQ ID NO: 1178 - DNA, 698 bp, Homo sapiens
gtttaaatgagaacctaatgatacctggacaaacttctggagaaattatcaaattgctaacatgccatgtgaaatccttgaacactattaagataattacaggagattgatgtgtttgccttagtttaaaatcttaattagcattgacaccaaaagcaacatccctatgttaaaaacacaatgtgaatactattttattattaccatggaaccttgacctttctttccttcacctatagctcaatccttgtcttcctccagtcccagggctccttatcacaaccatcattttgattttacactggatttacatgataccttttactgaagtgcttaaatctaggaaagaataaatttctattgactaggagtcagaaacttagggtagaatgatggagcattgttttataacaggrgcagtttccagcttggattcaaaatactgattaaaaaaatttgttttctattatgattggatctgtactttctaacgccaaatattttaatccagatactttttatcttgatcccacgcttgccctttaacctttaccagaaattcagagaaacagagtacatatttcgccacacaatggtcatcctcactgaatacttttatccagaggtctacaaactatgaccctccagtcaaatcctaccttgcccttgtttttgtaaataaagttttattggaacat

SEQ ID NO: 1179 - DNA, 1408 bp, Homo sapiens
taaactatttatcttgtgtgtgtacatttgtgggtggagtttgtgcgcctggtttttttgtttggaaaacactgcgtggtcaatgtggttatgggggggagtgatgcatttttttctagtcttaaaactaaaaacttgagtctaccatttcttggttgcactgaaaataccgcccagcctgatggtgttcccgtgctgtccctcccccttcccttctccccgcgtctacctccccaccccgttctgttccccctccctccttctccctctccctcaaatccgtgagttttggaagccccagggcctctctcccccgcccctcctggatgaggccaccatcccccaaaccggcttgttttgcagtttccccaggatcctggaagctcgctggcgctcgagggtggcggggacacgggggggtgggtgaaggttcgttaccttttctagtgcgttctatcatagttaacggttgcacacttttttaaaaaaagtaaatggatttgccacaattaaatgtcataacatttatgacagaatataaaatattaacatattttaagccaagttttaggtgtattttttgaatcttggttataaacccaattttaaagggcgatgtatccagcgttgtgaaggcaacagagtgtacccatatttatatttttataaaatacctataagactgtgaatctcttgtgctaatggctgagttaattgaaggatcgttttgcccctttttagcctcccagagcttcgaggactcaattcgaacccgaaatcctgccgtgggggaggggttgcgtcgagacctgggcccggggaggttctcctgcgtcactttctgtcctgaaaggcgcccttcctggtttctgtggctccaattttctatgcagccccacaccccttgttgttttgatcctgagaaataaaagggaggctgaattattcaaatttaaatgaggtttccccttcatggaagtgctgctgacccttcgtgcagaaatggggagcacttgaggacacaggtgggtggaggccctttgtgcgtggctggtcgtattcgggcagccctccgtcgctttttataaaactttgtgtgagaagaatatattgataatgtcagtgaaacaagcagacattgaaatggaggcacagattactccacaaggagttcttctgtatattttttctagatgcaaatacctttttaattatgttaattaatgttaagactttctaggcttatatcgaagctgtgtgtgggtcacggggtgatcactgctaactggataaagtttgtgcagcacattcctgagtgtacgatattgacctgtagcccagcgtgaaaaatttataaataaatttttcattgatctttttatattaaaaaaaaaaaaaaaaaaaaaaa

SEQ ID NO: 1180 - DNA, 824 bp, Homo sapiens
  misc_feature (132)..(132): n equals a,t,g, or c
ggcacgagccccccaccaagggacagagtgcaaggacatgatcgaacagaaaaagttctggtacaagatcaaccccgtggggtggtgagtgctgcagccccgggcctcacatcctgccgtccctgtgggagnattggagcggtcccagtgcccaccgctgattctytggctccagcaacccctccaggtggatccgtcccacgcagcctggcctgaaacactgcccagccactgggtccagtaagacagagcctcgagtcattctgccgagaggatccagaaacacagactttttctggggtcctggaggcttctggcccatggggagcccctgggtcccagcgatccagccctgatgtgctgagggtgcagggcccagctgcagagcagaggagagtggcccccagggaccagcagcacgaaaggcacactgaggcacactggcaggcctgggctgcagagagcctgaaggtcatggggtagctgrtggaagcaggaagaccccatacagcagcgaccactgaggctggtgctgcactttctcagggaattgagtgtgggctcccaccatcccgcgcactggcttcctccaaagcctcctcctcttacatcagcaaaccttctgttcggtgaccccctcagtgaccctctgtgcttgccttcgtggtcttcctcatggaggatttcgggtcagcgtgggggtcagaggtcatttcccataccccctcaaaggtacttcttgcttggtccccacactctgacaccctcttctgaaatgaacacttttttgttgttgttgttgagacagagtgagacgccatctg

SEQ ID NO: 1181 - DNA, 595 bp, Homo sapiens
  misc_feature (530)..(530): n equals a,t,g, or c
agcaactaacttcttgttagtgatcttacattgctcagcaagtatagcattattgcaagatttacagaattcaggtctttaaaagtttatattttatttccatatgtagataagcttgtcagtttactgttggagtatcataaagtttttgttaaaattacacaggttattaagtaaatttccaaggataaaaattatgtttctaattaacttgaatttttaagtaactgatgcccccatgtggcaaaggatttattttgcttttgcttaaacttggagaatgactgtcttttcatttttctttaaaaaagtggacattagtgtttataaagaagctgttgaccaagagacataatttgaattttgtaaagctcattgccataaaattcacagccccttaccctgtattgtctcacaagtgcatgtaatcaagcacgtacaatgagacaaaatattggaagctatttaattacaaatagcataggggattttctgatcttatatgtgatttcttaatgtctttgttttgnggcttacataggtgatgtcagttcattgattatgaatattctggatacaactcctgcatatgata

SEQ ID NO: 1182 - DNA, 486 bp, Homo sapiens
  misc_feature (2)..(2): n equals a,t,g, or c
  misc_feature (395)..(395): n equals a,t,g, or c
anatcaaccctcactaaagggaacaaaagctggagctccaccgcggtggcggccgctctagaactagtggatcccccgggctgcaggaattcggcacgagtggaacttggactgttttctgaggtattgcaagcatgaacttttaaattgccttgtgtggtgtgctgtgggcttctgtgatcatgaagtaacatgcatttttcttaaaacttttcagggtggtagagattgcagcctgtcactcyrcmcacacgtctgcagccaagacgcagggtgggcacgtgtacatgtggggccagtgccggggtcagtccgtgatcctcccgcacctcacccacttctcctgcaccgacgacgtgtttgcctgctttgccactccggccgtctcgtggcgnctcctgtctgtgggtaagaaagtgcagggccacttcacccagggaggaatggtactaccaactgaccagttttcctgtgtctttgctggtt

SEQ ID NO: 1183 - DNA, 1109 bp, Homo sapiens
aacaaggttctcaagagacacctgcctttgcagggtggggagtccgtkaggagaaggtagggaggcccgctctccactctggccccacaatccctgcccctgagcaggtggagcatatgacccgtcacctgkaggagagtgagaaggccatgcaggagcgggtgcagaggctggaggcggcgcggctgtccctggaggaggagctgagccgagtgaaagcagcggcactcagcgagcgtkgccaggctgaggaggarctgatcaaggccaagagccaggcccgctggaggagcaacagcgcctggctcacctggaggacaagctgagactgctggcgcaggcacgggacgaggcgcagggcgcttgcctacagcagaagcaggtggtggccgaggcccagacccgggtcagccagctgggcctgcaagttgagggcctgcggcggcgcctggaagagctgcagcaggagctgagcctcaaggaccaggaaagggtggccgaggtgagcagggtgcgcgtggagctgcaggagcagaacggccggctgcaggcggagctggcggctcaggaggcgctgagggagaaggcggcggccctggagcgccagctgaaagtgatggcgagcgaccaccgagaggcgctgctggacagggagagcgagaacgcgtctctccgggagaagctgcggctccgggaggcggagatcgcccgcatccgggacgaggaggcccagagggcgagcttcctgcagaacgccgtcctggcttacgtgcaggcgtcccccgtgaggaccctgagccccccaaagtgagacaggccgggaggacccgggcgcagtaggagtgcatcaggcggcgcccgagatggaccaggggctgcgtcccgcccgcgccgcctctttgagacccgggtcgtctgttccacgcggcggttgcggcgactgttggtggtgtcgcggctgcgggggaaccccgtgggaggcgcctgggaagggctccctaccggccccttcttcccggtcgacgccacgtgggagcacaccgggaaggggtcccgcgggcgcgtctccccctcgccttttgcgatgtcaccgtgaacgctgcggccgc

SEQ ID NO: 1184 - DNA, 417 bp, Homo sapiens
  misc_feature (357)..(357): n equals a,t,g, or c
tctcccctataggttcatagaaaaaaaactcccaccttataaaggaatctttaaaaggttcctcataaaggaacagggttagcagaaccaagttttgagtcctgggtgaaaatccaggggagaatggtaatcagtgataaccaatggccaatccaatattaaaattagttaacagtgaccaatcttatttcacctaccccacccagagtggcccaaagcagattgctggatctgcctctaaaccaaccttcctkccaaaataattggggttaggttgtgtctgctgattgtctccataatttgagattttaacaagttgagtttggctcccaaataccttaaaggattttttttttnggcatctctggggagggggagattggacgtaggcaaccaaacaggaatggaataagaaat

SEQ ID NO: 1185 - DNA, 972 bp, Homo sapiens
aatgttgcctttgtccaagtatagattaaggcaacaaacatatttgggtgtgtaatttgaagttttggactgaaatatctttgcaagtatccacataaaattctgtaatgccttataattatattctaataattatgcattatactaagacaccattaagaacagttgaggcactacactaaatcaaaccataaatgaggaaaaaacttttaatgttcttttctagaagtgttcaaataggtcttgatatgaagctaaaagccttatttatattatcttaatatttcggctaaaatgttaagctccataacatgaattgatacaattccaattttatcaatattytgtgatagaaaaatgttaatattattcatgagctatacagtccttacattttttcccttggtgtaggaacaacggaggagtttctcctctgctaactattcatatatgtaactgtaacaaaagtgtactatgttatgcacacattacaaataatataaggggaagttttattagcttagtaggaaattgttattattaaggtttaaaaatgagaacaggtgtgagttttccaaaatacttaaaaataatagtgtcaaaaattcaggggcagttaaggagtcatggatggaactagaggtcactatattaagtgacataagccagaaacagacaaacattgcatgttctcaattatttgcgggatctaaaagtcaaaacaattgaactcatggatatagagagtagaaggatggttactagtggctgggaaaaggggtgtgcgaggggaactggggatgcttaatgtgtacaaaaactatgtagttagaaagtataaataagacctagtatttgatagcacaaccgggtgagtatagtcaataatagcttaattgtacaaataactaagagtataattggattgtttgtaacacaaataaatacttgagtggatggataaaaaaaaaa

SEQ ID NO: 1186 - DNA, 443 bp, Homo sapiens
  misc_feature (428)..(428): n equals a,t,g, or c
  misc_feature (437)..(437): n equals a,t,g, or c
ctcgagcggggctggtgtgaaagctgcctaaccacagccccatctccgccctgtgctgctgaggggaccccggctgcccacaggttccaggaggctctgtctgacttctggctggccctggagcagctgaggggccacgctgccatcgactacacgcagctgggcctgcgkttcaagctgcaacctgggaggtgctacacaatgtggcgtcggcacagtgccagctggggctctggacagaggcggcagcagcctaagggaggccatgtccaagtggccggagggtccctgaatggcctggactcagccctggaccaagtgcagagacggggctcactgccgcamggcagktccccagggcgagktyttccggccccamcgtggacctgaacacttggagcccgtggatttctggcaaggccaaggtnggtggcctntgccat

SEQ ID NO: 1187 - DNA, 591 bp, Homo sapiens
  misc_feature (587)..(587): n equals a,t,g, or c
ccgctctagaactagtggatcccccgggctgcaggaattcggcacgagtctggagacaagctgaaacttgaccagactcatttagagacagtaattccagcaccaggaaaaagaattctagttttaaatggaggctacagaggaaatgaaggtaccctagaatccatcaatgagaagactttttcagctactatcgtcattgaaactggccctttaaaaggacgcagagttgaaggaattcaatatgaagacatttctaaacttgcctgagtttgaaaatttgttaacaatacattaaaatcttaaagcatcaaattggtgttcgccaaggcattatgagactctactgtgttagggtatattcttttgtataaaacaaacaggtttttgaaaatattactgtatagttagttgttcagctaaactttgagaagaatttaattatgtctcatgaggtatcaaactatgtaattttgtccttgttatttttgtttcctttgtaatttacttgatgagtttatatcttcattaaagaatgttattataaaaaaaaaaaaaaaaaaactcgagggggggccccggtaccncaat

SEQ ID NO: 1188 - DNA, 460 bp, Homo sapiens
  misc_feature (5)..(5): n equals a,t,g, or c
  misc_feature (10)..(10): n equals a,t,g, or c
  misc_feature (18)..(18): n equals a,t,g, or c
  misc_feature (39)..(39): n equals a,t,g, or c
aattnttccncctgatangatttcagcaaattctgatancccgggtattacttcttaatgcatttttgtaacatttgacaaacatctcccaatatgtagactcccactctcctgatgctaatcagtatcagacaatggaagtaaattttcctgcttttctcaacttttcctcaaattcatgttagtgaagtactttcatttggccatcattatttatcaaccttaagaaacatgcctattgacgaagtaaatatactaggaattcaacgtatctacgggaatgtggacaaagacatataccaagacaaggcactagagtgaaaagccattaaaataaaatgctcagcagcaaaggatttgtaatggttaacttgcaatatrtccatatggtgtaatattacagtcattagaaatgacatttgcgtaaggatctgagtggaaactgatacagcctgtcgga

SEQ ID NO: 1189 - DNA, 567 bp, Homo sapiens
gagacaacaaaacaaacacagaaaaaagaacataataacagagacaaaataaaattcagacaacagtawactgaasmcattttaaaaaccagaatatgtagtctacggatattttttatcataaaaatgatctttggctaaacaccccattttactaaagtcctcctgccaggtagttcccactgatggaaatgtttatggcaaataattttgccttctaggctgttgctctaacaaaataaaccttagacatatcacacctaaaatatgctgcagattttataattgattggttacttatttaagaagcaaaacacagcacctttacccttagtctcctcacataaatttcttactatacttttcataatgttgcatgcatatttcacctaccaaagctgtgctgttaatgccgtgaaagtttaacgtttgcgataaactgccgtaattttgatacatctgtgatttaggtcattaatttagataaactagctcattatttccatctttggaaaaggaaaaaaaaaaaaaaaaaaaaaaaaaaaaaaaaaaaaaaaaaaaaaaaaa

SEQ ID NO: 1190 - DNA, 349 bp, Homo sapiens
  misc_feature (339)..(339): n equals a,t,g, or c
  misc_feature (346)..(346): n equals a,t,g, or c
gcaatcctttcgcatctgggcagttccaaactagaattcttgcctgccctgcctcccatggaatgcccttaccctactgccaatgtgatctttctgaaacagcatacctgatattgtcattcccaggagcagcttcccacctccctcaggatttaaactttaaactctacagctctccacactcacctcaacaatgagctcctctcatcatttcttctcctttgtcccagtcacaggccacttttgggccatgscaaaccactttatttctgaarsttctgccctgractgttkgytccttgactggggggctaaggatgactgcagtcatgcaggggncaggggnaag

SEQ ID NO: 1191 - DNA, 379 bp, Homo sapiens
  misc_feature (352)..(352): n equals a,t,g, or c
  misc_feature (366)..(366): n equals a,t,g, or c
ggcagagcactgcactccagcctgggtgacaagagcaagactccgtctcaaaataaataaataaaaataaaaaataaacatgatgatcacagatgcagtcacattttctgagttcttgtctctctgccagtgcccacccagatagcctcacaaaactttgacccagccactgttagtgtcgccaccgsccataaaggagctgagcccagcaggggmactgcctggggccctgtagccaaaaggctacagcaggagctgatgaccctcatgatgyctggygayaaaagaatttctgctaccctgaaagccttatcaaatggacaccattcatgaaagcaactggcacaggggnatggaagatctganggataagctcttg

SEQ ID NO: 1192 - DNA, 403 bp, Homo sapiens
gcccaaagtcctgggattacaggctgagccaccgcgaccggccctgctgttgcttctgaggtttgaaaaccgctgcctcaatgctcctgattcagctcttcttacccaaaggttcccccacctcatctactctgttcctgcacagtcgcccttttctctgatgccccgggcaggtttctctctgccagctccacgcttctggagtcccccatccgtcttggggcccagctgcccactgtctgggttcagaccttctcaacactccctggcttctctgccctagttttgccttctccaatccactcttggtgggtggaagtacggttaccatggtaacttgaagacaacgcaaatctgattgtatcattacaatgactgggaaaacctccagtgccacaaaata

SEQ ID NO: 1193 - DNA, 417 bp, Homo sapiens
gctagattaaatcgtagaatgtgtgccagcaaagcttaaagtttccaggttagctgagggaggccatttggaaacttgtgtctgaactccaataggagagagaatgttcaagcaatgggtcttctgcccatttccctctgctttgccatcccatgggataagggaaccacctcaggttcccaatccccaaatcaatatcacagagtttagagtccaggccctcggctaaaattagaccccatagagtttctagtattaattggcccattattttaatagtaattaatgtaattagtctgtagctatgtttatttgtaatatggaggatgcctgtctgctgtacatacatctttctaagacagatcctaagctgtgttcaatttcttttccagtgtaatacatttctagtcacaggac

SEQ ID NO: 1194 - DNA, 643 bp, Homo sapiens
  misc_feature (617)..(617): n equals a,t,g, or c
tgacacgtttaagttgataccattgtgccattcctcttttggcctcttttttgtccatagaggcttcaagatagataggtaagagcccagtagtgttcataagaagccaatagagagcaggagccactttatcaggtggcaggtgtcctgggcctccctgctggctagtcccaagcggtggtgttgccaggatgtcttggaggtgataatgggacacacagaggcactgagtctccataggttaaaatgccaccaaaactggcctttgcctaatatccctcattgactatttrgcatttaatttatttattttcctgacatttctgcaagctttgtatttatatttccactttatagatgaggaaatttgaggctcttagaggtaaaatgacttgcccaggtcacacaggaagtggcagagacaagctttttaaataagaaaaaattaataaaatataatatgagagtaacttaaaatattaataaaccacaattttaaattaattaaccgtgataaccaacattaataaaagttaagataccaaaacactggtgtctaattctttcaactaacaacttgaattattttcccattttaaattaattaaccgtgatanccaacattaataaaagttaagatacc

SEQ ID NO: 1195 - DNA, 551 bp, Homo sapiens
tatataatttaatgcaaagtcttttacattaatgtaagggtaggaaaagaggttggaggaagatatggggaggtaggaaaatgggacttttttcctccatttacttttgatgtttgaatttcaaacatgagtatatttgtgtattattttgcggttaaaaacactgaagattgcataaagatcaaagagggaaatttaagggaattaatgggttatgattgcatttgttcagaatggttttggtggctcatgacaacattttgagagagagagattttaatggcaccaatggcagctaggataactagtttaaagtttagggcctgtgttaatagattttgctttctagtttcagaaagattctcttatagtactgttttaatctgtttttctaagccctctgatttatgtatatttaataggccacaaaataatgtcaaatatatggcataataaccaacaaatatttgaataagtgaaaggtactctacaaaatgctatgggaaagacaaaaataaataatatccctttctttgagggattaacagtga

SEQ ID NO: 1196 - DNA, 567 bp, Homo sapiens
aacacactataaactttcaaggagagaggctgtgtcttcttcatgtttatatctgctacaacactgagttcatggcttttcacacataattgctcaacagagcaggtgccatggaaagtcaattcaatgagtaaaattacctcaaaatagtccgttaattcactcacctttgatgtagacagattattctgcattgatacttatctcttactcttaaaattcgctatgtattaataaatattttattgaatattaaggaatgatcactattttaataagatgttctttaccatatatttctatatgtacatgataattagaagtatcaaattatattgtggaatgtaaaagcttttcttctgaagccaagcatttgttttattgtcatttcagtggcaaatatggacttcatattcaaaatgatgttctatattatttttccttacaagctttttgaaaaacaatttaataattccatgattgttgtagcaccactgaattgattctgaaagcttactttttaaataaaaattgacctttatcaagcaaaaaaaaaaaaaaaaaaaa

SEQ ID NO: 1197 - DNA, 566 bp, Homo sapiens
  misc_feature (529)..(529): n equals a,t,g, or c
  misc_feature (543)..(543): n equals a,t,g, or c
  misc_feature (557)..(557): n equals a,t,g, or c
ccatctttctctctgctctatgagaccctccccttccttatttttatctcttcccactttatgctgggccttccctatcctgccctgagttatagttagtcactaacttctcsgctggctcccacccttatcacatctcagctacatatataaactctctgttatctaagtaattctattagccagaagcaattccagagtttatattagtactaggaaggtgtcatgtagcccctgtctaacatttgaattgaactaaaatgtgaatctcaataaaagcaacacagttttcacagcatatgctgataatggcaatccaacttcttttgccttttccccagagaatcctgggaatatcctgagcttggtgctttgatgattctatttcagctttggtgccttaaaaaaaattacaaatcaattttgaatggtttaagttcatgattttgttctgcagccctagctaggggtgagccaagccttatgaaatctaaactcagcctaacagaatagaaatctataggcttangttaagggtcacanggcccgagtccagngtgtgattg

SEQ ID NO: 1198 - DNA, 304 bp, Homo sapiens
  misc_feature (290)..(290): n equals a,t,g, or c
ggcagaggtctttgaggaattgccaccctgtcttccacgatggttgaactaatttacactcctaccaacagtgtaaaagtgttcctttttctccacaaccttgccagsatccgttgtttttttaattttttattgataaccattcttattggtgtgagatggtatctcatggtggttttgatttgcatttctgtaatgatcagtgatgttgagtttttttcatatgattgctggccacatgtatgtcttattttcagaagtgtctgttcatgtcgtttgcccactttgangagttgtttgtttc

SEQ ID NO: 1199 - DNA, 540 bp, Homo sapiens
  misc_feature (29)..(29): n equals a,t,g, or c
  misc_feature (49)..(49): n equals a,t,g, or c
tgtgtgtacatcacaaatctgttttcttntgcttctctttaaaaatgtntcctgagtgatttcatcagcagtgctgttgctaagcctatatttagcaactgaaaatcatgctcagaaatactgtcatgcttttttaaaaargcatatccatccctccacacatggctgattccagaaccttcatgcccttagcaaaaaattgagctgtccttcagggtttcaaaaaaagtactgtactcctgctgcaccccmggctcttggcaaggaggggacttttgtcctagagaatgttctttcttatgtattattgcaaaacaattttgttcttgcatactgaagcatcactggatgaatttctttcccctgtagacaaaccgagggtgagtattgctctttaaatgtcagtaaatttgttttagcttctggggcaaaccttgttgtactcattctgttcctcccagcataatatgttaggttgtcataaaatagggcaaattgaggatagtgtaactactgctgctgaataaatgggaaatagtg

SEQ ID NO: 1200 - DNA, 489 bp, Homo sapiens
  misc_feature (86)..(86): n equals a,t,g, or c
  misc_feature (260)..(260): n equals a,t,g, or c
  misc_feature (349)..(349): n equals a,t,g, or c
  misc_feature (488)..(488): n equals a,t,g, or c
gcttctctaactaggaagtatacgtaaaggaggaattgctagggcatgggattggcataatttcaccttttctagatattgcccantcgctgcccacagtgcacatacctttccaccagtcacatgtgagagggcagattttccaaatgctcatcaccacttggcactgtgtggactataattttggccagttaggaaatggcatctcattgttttcatcttaatttgcgtcagcctgattactcattgaaacttgtgangttgagaaacttttcttaagcttattggccattcaagtttcctcctttatgaaatggttgttcatgtcatttgctcatttttatattanattgtttttcttttttccagctkacttgtakgaactctacatcttatcaatattaatcatttatcgaaaactatttgggtgccattatcttctcctagtcaatgttttttgtttgtggatatcttttataatatataant

SEQ ID NO: 1201 - DNA, 412 bp, Homo sapiens
  misc_feature (377)..(377): n equals a,t,g, or c
tcaggcattgacactttgtaagaaagggggtaggggacacagctgggcaggtggagtgggtkggcaggatggctgtcccagtctgcccatcttctcttggctctgggaccagcggcttgttctagggatttggacctggaggccaagggcaataggagagggtctgaagcctgtgctgtctgctgcttgctgtgaatggccctcccgggtcatgacagagctcttttggggcaggaggtgagggcagggggccccgctccttggtaagggcctgccctggggctcccagggaagtgggagctggggagccaatccacccagacccgcgtccacctgggaggcatttggggttgcaggaccgagacccacatcctctnactcacttctccacccgccagcagctgccacaggc

SEQ ID NO: 1202 - DNA, 828 bp, Homo sapiens
gcggccgccccgcccccgctcccgcmgccgcccgccagtcagtcagtcagtcagtcagtcagtcagtcagtcactgagcgcgcggcgcgggagctgctggcagtcgctgcgtctctggcgagggagcgccgcgcctggggaggaggcggaggcagcggctggaggagcgcgagcggcggtttccttgcccggggccgcgggaaggccgaccgactgccgcgatggagcagctatcagatgaagaaattgatcatggtgctgaagaagacagtgacaaggaagatcaggacctggacaaaatgtttggagcctggcttggagaactagacaaactcactcagagtttggattctgacaagcccatggaaccagtaaaaagatctcctcttcgccaggaaacaaacatggccaacttttcttaccgcttctycatatacaacttgaatgaagctctgaatcagggagagactgtggatctggatgccttgatggctgatctttgctctatagagcaggagctcagcagcattggttcaggaaacagtaagcgtcaaatcacagaaacgaaagctactcagaaattgsctgktarccsacatacattgraacatggcaccttgaaaggattatcttcttcatctaataggatagctaaaccttcccatgccagctactccttggacgacgtcactgcacagttagaacaggcctctttgagtatggatgaggctgctcagcaatctgtactagaagatactaaacccttagtaactaatcagcacagaagaaccgcagtcagcaggcacagtgagtgatgctgaagtacac

SEQ ID NO: 1203 - DNA, 280 bp, Homo sapiens
atttaaaagacaaagtaagtaaaaatacttttagtaggcattcgtggattgtgaacatccaagttatattggtttgtatagaatggcattaagtaaaaattacagctgtataacagtagttttctaaattgagagagtccacattgtaattagagatcactgtgaccaaaatgcttctccttgatttataatgatgkactgtattttgtactgcttatatgaaatttcagcaagattgacgatattataaagatgcttataaagtgtaagtggagacgct

SEQ ID NO: 1204 - DNA, 393 bp, Homo sapiens
gcattccctttgccatcccctggactcactcctcatcctattccccaaaaagtgagaagggcaggctgtgtagatggcattcctgagaatgagccagtggagagcatctggccctggcatgtgaattcaagccttttcccagctgtaataaccaccctcttttttccacaggggctaaactgcacggtcaagaatagtaagtcatctttttctgttcttcttcttgttgccttcttaatcaagtgagagcctgctgccaacttctgacagaagtcttgccatgccactccaggttcaggctgtgagctacagccatccgcaggagggttcccggaraaattgtggatgcgttgcacctgcgcttctgtcgagaacattcattatgcaaaattc

SEQ ID NO: 1205 - DNA, 937 bp, Homo sapiens
gatggctgggggtgggagtgtaagtcccttttcctactttcatgtaaagtgccacaggtgtcttggtttgcatattcaaatattatataggaaaaacagtctgttatgtatttcttcacctagcttcttgtaatatttatggacgtttccagtttttgtaccttcttagctaaagcagttgcctttttgtaatggcaattaatttatatgataaaactttgtatccactgtagttgacagtattggttgctaattaactgccatattgccctgtctttctattaaaaaaatactgtacctgtacttagaggctaacagattcatgtggacatttaccaggcaagaccaacttgtattgtccatgatttctacgatttccactatcttcaaatgaaaaataaacgctgagtagaactgatgttttcagactaactcctttcaactttagcatttgggagtcccagatttctgtttacgtttgtgtcgcctgtttgtctccaaaataagttctgctgctcttgggtcaaaacaaatgattaattcgcatttcctttgaagccattgtgaaaaccttaaaagaaaaaawaaararaaaaagcaagtatcttttccagttggtttgtcttcagcagcaatttactcttattgaagctgttccttcggagtgtgtgaacagactcaagatattattataaagcatcatccttcaatcaaaggattattttataatatgtgctgtgaaattaacttgagtggcaaagtttggtgcaatgagttatttcattcaatggtgattgatgctgttaagtaatatttttaagtgactcgaggaaatactgtgcatttacagatccatccttaaggatgcaggtctaaaaaaagagtaagaaagaaaaatcaagtggtagatagataraaraararaaaaaaaaaaaaa

SEQ ID NO: 1206 - DNA, 490 bp, Homo sapiens
gtacgcctgcaggtaccggtccggaattcccgggtcgacccacgcgtccgttttttttttttttttttttttttttttttttttttgtttttttttttttttttttgttgtacacaatcatttgttttatttgaaaacatgtctacactgcattgagcaccaacacaggtgtgaccaagaaacccacagtcctgtccccgcagcactgggtccagtgtatgacttggggtggactgttatttttcacagtgagggggggaaggataggaaagaaaagatggccattatcccaactcctgttcaggaatctgaacaatgaaagttatttaaactcatccagctcttctcattccccttctctcaatcagctggtgttcaaatatggaatctgaggccgagcgcagtctctggtttctttgaagaactttaggcacactccaggctcaggaaaactgcatctctagttctttctgattgcaatagccttctc

SEQ ID NO: 1207 - DNA, 1511 bp, Homo sapiens
  misc_feature (103)..(103): n equals a,t,g, or c
  misc_feature (332)..(332): n equals a,t,g, or c
  misc_feature (649)..(649): n equals a,t,g, or c
aggaggaaccagaccgcggccagagcgttcaggaaacaaatggaagactgctgcgaaccctgcccatctctttgctatgactaaaatgaattcccctatgggnaagaaggcatgtggtatgacggggagtttttatactcattcaccattgacaattcaacttactctctcttcccacaggcaaccccattccagctgccattgaagaaatgcgcggtggtgggaaatggtgggattctgaagaagagtggctgtggcgtcaaatagatgaagcaaattttgtcatgcgatgcaatctccctcctttgtcaagtgaatacactaaggatgtnggatccaaaagtcagttagtgacagctaatcccagcataattcggcaaaggtttcagaaccttctgtggtccagaaagacatttgtggacaacatgaaaatytataaccacagttacatctacatgcctgccttttctatgaagacrggaacagagccatcttgagggtttattatacactgtcagatgttggtgccaatcaaacagtgctgtttgccaaccccaactttctgcgtarttggaaagttctggaaaagtagaggawtccatgccaagcgcctgtccacaggactttttctggtgagcgcacttgsggntctctgtgaagaggtggccatctatggcttctggcccttctctgtgaatatgcatgagcagcccatcagccaccactactatgacaacgtcttacccttttctggcttccatgccatgcccgaggaatttctccaactctggtatcttcataaaatcggtgcactgagaatgcagctggacccatgtgaagatacctcactccagcccacttcctaggaacaatggaagaagaaaggactgaaccagggtatttttgttaggttttctatgtgactccaagagggaatggtcaagttgtttcatgagtttgcatgggcccttggaaaaacaggaaaggagcaatgaagatccaagcaaaactttactttcagcgttggcttggaggacaaataagaaatgaaacatcctatgaaatactttatagcacatggcagatttgcaactagtaaaatgctggtgaaatgctgttggtaaagcacatggttcaaatctagaagatgcagttcaaaaacaagacagactcgagttgttagggctgaggaaccaatcaaggtagaacaaagaaaatgttggggtaaaagtgttgctgattgtcaacacaaactggcttaataatattaataagaacctgtcttattaagactggctttagaaccgtaggtttttttaaaaaattattatttatttttgccctctttggggaagtgggtgggtagatttaaaaaatcccttcctgagtaataaagatacaaaatgttactgctgataattgtgatttgttgagccacgtctatattaactatagctcccctctatttttaaaattttacataaaattgcttcttcctcttttgtcaagtc

SEQ ID NO: 1208 - DNA, 743 bp, Homo sapiens
  misc_feature (712)..(712): n equals a,t,g, or c
  misc_feature (732)..(732): n equals a,t,g, or c
  misc_feature (735)..(735): n equals a,t,g, or c
ctatcaaagcattgccttatactttgaaggagaaaagagatatcttcaggctggaaaattcttcttgctgtgtggccaatattcacgagcacttaaacacttcctgaaatgcccaagctcggaagataatgtggcaatagaaatggcaattgaaactgttggtcaggccaaagatgaactgctgaccaatcagctgatagaccatctcctgggggagaacgatggcatgcctaaggatgccaagtacctgttccgcttgtacatggctctgaagcaataccgagaagctgcccagactgccatcatcattgccagagaagagcagtytgcaggcaactaccggaatgcacacgatgttctcttcagtatgtatgcagaactgaaatcccagaagatcaaaattccctccgagatggccaccaacctcatgattctgcacagctatatactagtaaagattcatgttaaaaatggagatcacatgaaaggggctcgcatgctcattcgggtggccaacaacatcagcaaatttccatcacacattgtacccatcctgacgtcaactgtgattgagtgtcacagggcaggcctgaagaactctgctttcagcttcgcagctatgttgatgaggcctgaataccgcagcaaaatagatgccaaatacaaaaagaagatcgagggaatggttcaggagacccgatatatcttgagntagaagaggccacgattccngtncctttttg

SEQ ID NO: 1209 - DNA, 509 bp, Homo sapiens
gagcagggaaactgtgtcctggcagagatcgtggtcctgggcacacaggacccctcagcacactgaggtggagctggggcgaggggagggggtgcgctctgggtaactgaaggtgtgaagsgcccagggcctgtttctgggcagtgcaggaagtcccarccccatgcctgtggtgagatcccctgtagggccccccccaccatggacacttcggggcctctacggtcttccaaagctgtgtcctcatttccactgcagcagaggggcgtccccagctccgtcaaacagccctttctgtttctggagtcctacaagtggaggcccaaatccgttcccatgttgaggcaaggccctggctgttccttcctctctggaaaccgccttgaactcttcctttgggacatgcctcctcgaccagccttgaaggggtgctcctctctcactacctggaaccaaacacccccttcctttgtgtacaagggcaataaagagtagaccttcatcttcaa

SEQ ID NO: 1210 - DNA, 266 bp, Homo sapiens
ggggagggggatgtaaatttgataaataggttggtgaaaacttatattttcttgtaaagagagagaactgagcatgttgtaggtataaggtaaaaaggcgtgaagaggaatatttcgttgataatgaaagtgagcagctagggaagaaaactcccagaggaagagggaggcaaggaaatcaagaacacacttaaagtttgtcagaagaaggaactttatttccttaaacattcaagaaagatgatgtcatttcagttattgattgt

SEQ ID NO: 1211 - DNA, 394 bp, Homo sapiens
gttttctacatatcttgaaaggcagtgcacaatgacgtgtaattatctaggtggtaaaactgaaacatacttcctcttcccttgaatataaaaaagcattgtggtattagtacttttatcttggatcattgttcagaaggaggttcagcccccagacaaccacatttttactgtcatgaatggcaagacaaaatgtagagctcaacttacccaaaggaaaaaaggctcaaaagacaaattatggcacaacttagcagccaaattcttaccaagtacagacttttgacatactgatctctctccagttscaagtsggaacatgcactttgaatgatgtcattcaaaattaccctgcccagacacacttttcattgattctcttggagggcagttc

SEQ ID NO: 1212 - DNA, 434 bp, Homo sapiens
caaaaaggccagaggctcactaggtcagcatcataccaaacgcctggctttcaccaggcatcagtgtgcttcasttgagagtttggtaccatggttaagatcgagtccatgctaggtaagtcctgttaggaatgtcagtttgtattccgcccacgtgaatgatgctgagcttaatgtattattttgaggggcttcttcagagcagttctcactgagctttccattaacctacactcttccggacggctcttaaaacttgcaggacataatgaaattgggaagagcagagtgttgaagtctatagcatggccttctgcttgaccctgagttcctgaattgaatgtgggagacacaggccatacttctctaggcactcacatgtctcccttggcataaggaaacatgttagtaatatagttttttagatccaacag

SEQ ID NO: 1213 - DNA, 425 bp, Homo sapiens
cactcggccaggcgccggcgacctgaggggagagggaacgcagctgaaactcgaactgtgagatgcttttgacaagttataataagggagagatggtagtaaaggaagtgaagaagcgacgtgaaattgaaggaaaagaaaatgacctgccttcttaccgcggttggaatacacacccaaacgagaggtagcagagaagcaagcagtgcattctgttaaaaattattgtgtcctcatttgagagaggagggatcctcaaataatacaactatgtgcaaagcaggaagtgaaatccttctcagtcctctccccagttgtaatccaagccttccacatctttcctgtatgtgcataaccatgttattttgctttcttatgaaaatgagattatgcatactgttcgataatctgtttcagattaaata

SEQ ID NO: 1214 - DNA, 689 bp, Homo sapiens
ttcgacccacgcgtccgcccgcgtcccagctagagccagaccgtcgctccctgccccgcacgccgtcggcctccttgcccagcagccgccgcagcagcatgggcagcacagcagttgccactgacgtcaagaaactgatgtcctcagagcagtacccaccagaggagctcttcccgaggggcacaaatccttttgccactgtcaagcttcgtcccaccatcaccaatgaccgctcagcacccctcatccgctgaggcggggtccgaggtcgtaccccacagtgcacctgcccaggggctgttcagagctggcaatggcagcgacagcagcaacagcagcagatccaagaagcgggtccctgagacggggggtggctgccctccccagaccaccccggcagcctgagcagctccaaagcactggcttggggtccgagaccttcaaagtaaagcaggcggaatggggggacaggacaatttctccccctccaggggctccaggactctccctggggggcccacctcttgccccctaacctctttcccccttttctgcccccgtggggaggagccccttgtacctgctccgtgcccaacacatgccctctctgtacatcttttgtaaatgatgagaaataaaggaagtggacgcaaagtgatgcggcaaaaaaaaaaaaaaaaaaataaaaa

SEQ ID NO: 1215 - DNA, 2476 bp, Homo sapiens
  misc_feature (833)..(833): n equals a,t,g, or c
  misc_feature (2434)..(2434): n equals a,t,g, or c
  misc_feature (2456)..(2456): n equals a,t,g, or c
  misc_feature (2471)..(2472): n equals a,t,g, or c
gaagtgctgctagtttttatgagaagtatattatattaaatgtgaattttttaaattttgcttcttatactggaaggaattttagccttcatattgatatctaattaattatttaagtggaagaggctgcatcacaattgaggtaatgtagagcaacatgttaaagaatgatggttagcagaagctgttgtatacaatcttcatgaaaatttcagtgtgtatttttctttttctataatacctttaactgcaaagaaaaggcagtttcaaatataagaaatttatttcaggtaagggtaatattttaatagtagtcaataatctagcttaaggctgtaactcttctatcggggctaattgtatgaataggtgtcagtatgttgaagattactttcttttgtgactttcttctacctcatgccactgtttaaaagtaaaaygtattttaatgatgttagaataagactaccattctaaatatcacctacttatgaataacatgtaataatttttaacmttaatgattccmtaaaattgtattattgggattagaatgtgytttatgacmggttagtgtttcctctgmggcagaaaactcttttttggrgatatcttccatcaagcagtactcgtgcccatatacaatctcttagtggctaggagaaataaataaaagggccataatggtttgttctctttcagacataatttagtaggggacaagaagtctgttcttcagtgagtacactagagatttactctggtgactgccttttgagttatgggtgaagtaaggtatggctttaccataaccttgattcattcacccttgnattcatttctcgcccccgtcactgatatttccttgagcatatatctctgcctaacactttagtaggtgctatagaggatacatgaaaagtatgagatctggttccatccagtaagacattttaatagagaagatcaaaatgttacctggcagttggggaataatctgacttcgttggcagttggccttaacttcttaatcattgatccaggaatatttcaaccagagacacaactttctggcagacagacaaattgtacaacaccaacaatatcctggaccttgaaattctgtttacttcagtccattgtatcctttaaggcacctgtgctagcctagattttgtaataacactgatttatgagaatggacaaaagtggtagggaaattgttccctctccacttctgaaagtatgatgatgtattaaggatggaggagttattaaaaatgtctcttctgatgaggtaacaattagatgaaaccatgttaaagctgagatgaacacttagaaattcagggatattgggtctttagccttatgaatttgagctgcttatttaattggtgtaatttactacatattagtactatattcgtaaggattttttattaaccattacagattttacaaacagctagttatatggtaaacagattattatgcctttttgcaattctgaatatgattctagtatttgtgtagatgtatttggtactttttcccctaattccaacactagtttatatatatagcgaataaatctagttgtataaatttttaaatgccgtcagtagaaagcacacaaggttatgatttttttaattactggcttctgatttctttcacttctgatccttttcctttttctcagatgtagctgagtcttgatcattttaagacaacgatgggtagaattttgagattaatgttaattttccctttttgttaatttcagtcccctctcactatgcttttgtccagaaggatcaagaattctaccatcccttgggtctttgtgtataaacaatgttaaataaaggtagactcagtctttaagatattagacagtttttttagtccatgggattgtaaatataaacattaactttcctataagaatattttggctttgtaatctatagcctcaaattggtatttattatggattcactagacaaacagctgtttccttattgtcttttttctttagtgtttctgatttgctatcagtagctgtttttaaagccrtccaaggaaaataattatttacagtttttgaagtcacttttgagccctcatcaagctctcattgtgatgggagggatacctttttgttgttaaaagcctattattgttaaaggccttttatggaaaccaacttggaaaacaaccttaaatgtggatgtatcagatttggtttatccagccatgggagagaaaacaaacctaagtttactttacttgtacatatacactacaatggatagtatatttgctgtaaactacaatgtaaaacctcaataaaagtgcgctgtacttcttaatgtttattaaaagatgtatttttacaaaaaaaaaaaaaaagggcgggccgctctanaaggatccaagcttccgtaccncgtgccttgcgacgnnatta

SEQ ID NO: 1216 - DNA, 630 bp, Homo sapiens
  misc_feature (169)..(169): n equals a,t,g, or c
ttcatagccttctccctgatacccctccccagtgtcacatttgaagacgagcactgaggatgaggaaccaactgaagaatatgaaaatgttggaaatgcagcatctaagtggccaaaagtggaggatcctatccctgaatctaagtttcagatgaactcccataatgantgatgaatttgtgatgagggataacctggaagtggtattcacacattatgctacaataaaaggttctaccgtggagaggattttgacacattcagtaactaatggaacacaccgtcaacatgaattcgcaccttacatgacagaagtgattcagggattcctatgaatagaaatgctgagaaggaacgcattttattgcagaagctaaaaagctaaagtaccagtcatctagagagaaggaaattaatgtttcttaataatcctgttaaatgtttgattgtttttggaatgtgttattgtaaagatgtcatgcaggacatgtatatgttgtctgttgtaaaatgttaacgaatactttgttcagggctcactctctctttgtcatgaaagccagctccttgtggcgaggtaaagtggaattccaataaagaaattccttaaatcaaaaaaaaaaaaaaaaa

SEQ ID NO: 1217 - DNA, 755 bp, Homo sapiens
ggtaacaacaaaatttgttcggacatcaacaaataaagtaaagtgtcctgtatttgttgttaggcatagcatggaaaacctttttgaaaagaataaaatccgagcatccatatcttataagtggactccagaaggaagacgcttggtcactggagcttctagtggggagtttaccctgtggaatggactcactttcaattttgaaacaatattacaggctcacgacagcccagtgagggccatgacgtggtcacataatgacatgtggatgttgacagcagaccacggaggatatgtgaaatattggcagtcgaacatgaacaacgtcaagatgttccaggcacataaggaggcgattagagaggccaggtttatacacaatataccattttctgtagtccctattgtcatggttaaattattctctaagtgtattctgggtgcagagatgcatgggctctgtcagtttctgggaaactttctgcaccctataaacacaatatttttctttgttttcacacattcaccattttgctggcacctttctgaagtagtgttgtcccggtatcagcctttgcaatatgttagagatgtactgtctgccgcattttgcactggttttctcttttcatttatgattaataatgtgtatacgttattcctttttattatctactgtgtaagacaagaatatttcattccaaataaagaattcagtctttaattatgcaactgaataaaatctaaagcctaaa

SEQ ID NO: 1218 - DNA, 600 bp, Homo sapiens
accaccctgaacatgcctgagcttgtcataatatgttgagtacccaaaagatttgtttatattgttaatcttagggaaaaaaaattaaaatccagtagatcagaacatcaggctttcagatacaaattgatttactggtttttattttgctgattataatatttggtatatttaaggtaatctagttaactagatgctatttcatagattatattgaatgatttaaaactttattttcaaggatagtttattttaaatggcatattgaaaacatcattattaagatccagtaggtaggacatttattggattaaaatgaagcatttatctatgtctttaggtgtcattgttccctttctgaattagctgtacatataagccttcctttggttttaagtactgatttttttttaaaaaaaagagggactgtttaccattcttccactgtgctgttataaagttgtatttgaaaggtaatgttgtttttattaatcttttgtcttaaaataatttaaagtgctttgaattttaaaacattaaacaaatccttaaataacaaaaaaaaaaaaaaaaaaaaaaaaaaaaaaaaaaaaaaaaaaa

SEQ ID NO: 1219 - DNA, 783 bp, Homo sapiens
  misc_feature (75)..(75): n equals a,t,g, or c
  misc_feature (230)..(230): n equals a,t,g, or c
  misc_feature (246)..(246): n equals a,t,g, or c
tgcctacgattcccgcactgcccatggggaacgaatcctatatcgctgagcgcttggtagggaatgtggactgtnaccctgagagtcgtccttccctctgcctgagtccttgagcgaaaatattgaatagacagcaattcctgaagtctaaacgcctcccaggactacggaggattattggaaagagaacaagcgaggagatacaatcttcaaggactaaatggggaatnactttttaggggtcantagatgattgatgattgattactataaactgataatatgaggccaaaactaaaagttggaagagtgagcaagtacaatggtttgggagaggcaatgaagaacaaagaaggtgccagcccytactccagacgctgtggtaccactggtttggcaggaaaaacaatcatcatttgagagggccagtggggaagccctgtcctcatggaaaagctatcttctttcgtttacacttttcatggtattatgtctactgaagaggtaaaaacaccaaatttcagagaagctcttaaattgcccaatacttcaaagcaagtataactggtgaagcgcttggcattgatgtcagacacccaatgcctatgatttatttaatgcagtagcattaaggaggatcctatacgtgaaggaacatattttattttcttcctttatattttttggttaaaatatcgtcattatagttagcaatttggaatctggcttacattggttgatacaaataaataatagaataaagcaaaatcagaaaacaaaaaa

SEQ ID NO: 1220 - DNA, 575 bp, Homo sapiens
  misc_feature (561)..(561): n equals a,t,g, or c
acccaatttrggtatgacttggaagtgcagaaacagarggatactgttagaaaawcctaacawtggtctccgtgcatgtgttcacacctggtctcactgcctttccttcccacagacctgagtgtgaaagactgagagttgaggagttactttgtggatcttgtccaaatttagtgaaatgtggaagtcaaccagaccaatgatggaattaaatgtaaattccaagagggctttcacagtccacagggttcaaatgacttgggtaacagaagttattcttagcttacctgttatgtgacagtgatttacctgtccatttccaacccaaaagcctgtcagaaagcattctttagagaaaaccactttacatttgttgttaaactcctgatcgctactcttaagaatatacatgtatgtattcataggaacattttttctcaatatttgtatgattcgcttactgttattgtgctgagtgagctcctgtgtgcttcagacaaaaataaatgagactttgtgtttacgttaaaaaaaaaaaaaaagggggggcccccctaaaanaacccaagctttac

SEQ ID NO: 1221 - DNA, 575 bp, Homo sapiens
  misc_feature (479)..(479): n equals a,t,g, or c
  misc_feature (515)..(515): n equals a,t,g, or c
  misc_feature (520)..(520): n equals a,t,g, or c
  misc_feature (526)..(526): n equals a,t,g, or c
  misc_feature (545)..(545): n equals a,t,g, or c
gggccgcggcggaccctcgctgccctacctctctcgcgggttagtgcggggtcgggctcggccagtcctggccagctccgggagagcctggcccgaattcctgcctccaccctctttctcgccgcgaaggtgactgttccttttgccccagccctctcagacccgccccggattcccaggcatcgggagacgcggaaaggartggggtctggtggaggccccgggcgtatcgctctccaggccgccctccgcgggcctgccccggccaccgctttaacgtcggagagaaggaattggggagaaargtttaagagcctgcgamttcgttgctgaacttttcccccccaagacaggcttccgaaagctgcgccactggagggatccgggacctcagactactcgggtttggccctggcatgtgtgggagcagtttttattagagagaatgctcaatttgcaagttaatttcaagtcttcanccacgtcaggaaaaaaacatgaaggaattaaaggangccangcccgnccaaagataacaaggcgtncaaaaacttggaaatctataaaccctggcc

SEQ ID NO: 1222 - DNA, 523 bp, Homo sapiens
aggtttttaggaacacaaggttagtcaggacgtggatccccacagtggacacgactgccccaccctgccgaggtcggaggtggccatgaggagatgggctgtcgcttgctgtctgagcttccatccacgaatggtgtgggagttcrggatcttcccagacattstttcttcacctttgggaagatggagggggacggtggtggcatcccttgcagtctgtgctgcgctgacactttggagaagygtctcccatctgtagagcagaatcctctttggagaaatgcagctgtccttgaccttgaggcagaaggcgtytccatcctgggcatctgtytgcccctccccatctggatgcctcatcttgctgtgtcattaatggtaatcttattctaacagcctcccatgcatcaactctatcagtccccgaatattatctttaaattttgtcagatcgctttgtgggtttctggctttttctcttttctatcaagctattcaaagcaaaaactgaaagtgaatttag

SEQ ID NO: 1223 - DNA, 752 bp, Homo sapiens
gagccccttggcccagctcttcttggagagagaaggtgcttctttgccaaaacctaagcgcctaatctgttgacatcccttggggctctagtagaagggcccccttctttgatgcagttatgccgccttagaattcggaagtgttttggaatccagcagcatcataagataaccaaactcgtcctcccagaggatctgaaacagtttctcctacatctttaaatgcatctagggaatggattcacaaacgatgtgaaaacattattgagtgttgtagccactagaattttaaaatcaagttggatttatagagtttgactagttttttcgattagatttgtatttgttataaacttgtttatggagtttgactaattttttctattcaatttgtatttgttaaactcaagccagggtkgaaagacactgcatacgtttgtattattagttagaaggcatgaagacttttttccctgcwtggagagtgtcataagttattgttttgcatatctactgcatgccaagcactttctgcatcatctaatttagccctcacagccactgggtcaagatgtccaattttccagagtaaggatagaggagtcaaattcaaatacaggttttctgacattaacttatgtgatgacttgatcgaggcaggcttttccagcatcactgtcctggttccatctctgctatatgggaatgaaaataaagaaacatatttcttggcttgtctaaaaaaaaaaaaa

SEQ ID NO: 1224 - DNA, 1088 bp, Homo sapiens
  misc_feature (4)..(4): n equals a,t,g, or c
  misc_feature (158)..(158): n equals a,t,g, or c
gcgnccgctcgcccggaccctgaggctgctgggcccaccctcccggaaccgtccgaccctcggtggcctcggctcgttctgccatctccggtcctaccctggggcggagggtggaaggcagcttccgtcgaagaggagggggctgcggtggccaccgnggcggagsccgagttattttaccaagaaaatggtttgcacgactttgaacatatactatccatgctgatgggacaggatccaatatgaatataaatgatggaggaagacgacgctttgaagataatgaacatacattacggatatatcctggggctatttcagaagggacaatctactgtccgattcctgccagaaaaaactccacagctgctgaggtgattgagtctcttataaacaaacttcatcttgacaaaacaaaatgttatgttctagcagaggtaaaggaatttggtggagaagaatggattctcaatccaacagattgtccagttcagcgaatgatgctgtggccccgaatggctctggaaaatcgcttaagtggagaggactaccgcttccttctgagagagaaaaaccttgatggatcaatccattatggtagcctgcagtcatggctacgggtaacagaagaacgtcgcaggatgatggaacggggttttcttccacagcctcaacagaaagactttgatgatttatgtagtttacctgatttgaatgagaaaactctcttagaaaacctacgaaatcgctttaagcatgaaaaaatttatacctatgttggcagtattctaatagttattaacccattcaagtttcttcctatttataaccccaaatatgtcaaaatgtatgataaccaccaactgggaaaacttgagccccacatttatgctgtggctgatgtagcttatcatgccatgcttcagcgcaaaaagaatcagtgcatcgtgatttcaggagagagtggttctgggaagactcaaagcacaaactttcttattcaccaccttactgctctcagtcagaaaggatttgccagtggagtagaacagattattcttggagctggaccagtacttgaggccgtc

SEQ ID NO: 1225 - DNA, 382 bp, Homo sapiens
  misc_feature (334)..(334): n equals a,t,g, or c
  misc_feature (344)..(344): n equals a,t,g, or c
tccgtacttgaggagacgggacacacaggacaagctgcaggtggtgagcaggttcaccttctattttgaagacccgcttcttcctcaggtacctgatcttgaaaacgaacctcccctttcaggtcttgcttcccctcaacccagacaccgactcgcccaagggtcttccagctggctgagttggaacctgcattttttaaccacaaggaaaagaagcccagagcttaccaagaataatattttattgacttgggaatgagttttggaatctgtatttttaacaagctgcccagtgaaaaccatttcctcctcgtcgtggcgcagttccagaggntgcgccattntttcccaggtcaacagtcctgtgtccttgggggaggga

SEQ ID NO: 1226 - DNA, 825 bp, Homo sapiens
  misc_feature (2)..(2): n equals a,t,g, or c
  misc_feature (155)..(155): n equals a,t,g, or c
  misc_feature (693)..(693): n equals a,t,g, or c
  misc_feature (735)..(735): n equals a,t,g, or c
  misc_feature (814)..(814): n equals a,t,g, or c
cncactatagggaaagctggtacgcctgcaggtaccggtccggaattcccgggtcgacccacgcgtccggcccgacgtcgcctccggctaggatggcccctccgggcccggccagtgccctctccacctcggccgagccgctgtcccgcagcatnttccggaagttcttgctgatgctctgctccctgctcacgtccctttacgtcttctactgcctggccgagcgctgccagaccctgtccggccccgtcgtggggctgtccggcggcggcgaggaggcgggggcccctggtggcggcgtcctggccggaccgagggagctggcggtgtggccggcggcggcacagagaaagcgcctcctgcaactgccgcagtggcggmsgcgycgrcsgcccgcgccccgcracgacggcgaggaggcggcctgggaagaagagtcccctggcctgtcaggggtccgggcggctccggggccggaagcaccgtggccgaggccccgccggggaccctggcgctgctcctggacgaaggcagcaagcagctgccgcagcatcatcatcggaktgaaraagggcggmacgcgggcgctgctggagttcctgcgcgtgcaccccgacgtgcgcgccgtgggcgccgagccccacttcttcgaccgcagctacgacaagggcctcgcctggtaccgggacctgntgcccagaaccctggaagggcagatcaccatggagaagaagnccagttattcgtcaagcgggaagcccccgcgcgcatcttgggcatgttccaaggacaacaagctcattcgttggttgtncgggaaccggt

SEQ ID NO: 1227 - DNA, 517 bp, Homo sapiens
  misc_feature (432)..(433): n equals a,t,g, or c
  misc_feature (488)..(488): n equals a,t,g, or c
  misc_feature (502)..(502): n equals a,t,g, or c
  misc_feature (507)..(507): n equals a,t,g, or c
gtgaaaaaaaactatagtacacctgttatgagactgtcactttgtacattgttgagtttttattatccacctgtagactagagtggaccatgaattcttccactttcttcaatcccattttctaccatggaatcactaagagcaaagtctgctctgttcctgaagctctataagctacagatggataactcaatgtaaatttcatgggaaaacactcatgcctaaggtgtgggccactcagagctcaccagtatgttcaacactataactagagacactgaaactgcaaaccaggacaagaaattgacaacttcacgctgtagacagcttttcccaagatgtcagaacaagacttcctaccatgatgaggctcctacccctcttaatttgcctagctcatgcctgcctctttcacttgcaggataatgttgnnattagaatttcacaggaagtatcttctgaagggtagcttaacagaagtatcagantctatgatatcacntaccnaaatttttac

SEQ ID NO: 1228 - DNA, 774 bp, Homo sapiens
  misc_feature (19)..(19): n equals a,t,g, or c
  misc_feature (63)..(63): n equals a,t,g, or c
  misc_feature (67)..(67): n equals a,t,g, or c
  misc_feature (753)..(753): n equals a,t,g, or c
ccgacttactttagggaangctggtacgcctgcaggtaccggtccggaattcccgggtcgacncatncgtccgaccacccaagggtgaggagaggggctggaagccctgggcattaggagaagggagtgggtgctggcatggacatgactggatagaattttctcaggagggagcttggtggattttgaaggtaaaactttctgggtttatcatgttttaattttagagacagggagtgatgaatcatcaccggttgtccccttatctaactccataaaagtgggaatttcaaaagaacacctcatccaaggagctggggcagacttcattgattctagagagacctgtttcagtgcctactcatccctgccctctggtgccagcctccttaccatcacggcttcactgaggtgtaggtgggtttttcttaaacaggagacagtctctcccctcttacctcaacttcttggggtgggaatcagtgatactggagatggctagttgctgtgttacgggtttgagttacatttggctataaaacaatcttgttgggaaaaatgtgggggagaggacttcttcctacacgcgcattgagacagattccaactggttaatgatattgtttgtaagaaagagattctgttggttgactgcctaaagagaaaggtgggatggccttcagattataccagcttagctagcattactaaccaactgwtggaagctctgaaaataaaagatcttgaacccanaaaaaaaaaaaaaaaaaaaaa

SEQ ID NO: 1229 - DNA, 556 bp, Homo sapiens
gtttagcacaaagaaaagccatcttggtgcaaagaggctttaaattactatggactggcagtcaatcaaaatccaggaattgatgtctgatgatcagagagaagcaggtcggattccacgaacaatagaatgtgagcttgttcatgatcttgtggatagctgtgtcccgggagacacagtgactattactggaattgtcaaagtctcaaatgcggaagaaggttctcgaaataagaatgacaagtgtatgttccttttgtatattgaagcaaattctattagtaatagcaaaggacagaaaacaaagagttctgaggatgggtgtaagcatggaatgttgatggagttctcacttaaagacctttatgccatccaagagattcaagctgaagaaaacctgtttaaactcattgtcaactcgctttgccctgtcatttttggtcatgaacttgttaaagcaggtttggcattagcactctttggaggaagccagaaatacgcagatgacaaaaacagaattccaattcggggagacccccacatccttgttggtttt

SEQ ID NO: 1230 - DNA, 148 bp, Homo sapiens
  misc_feature (142)..(142): n equals a,t,g, or c
gtgtttaatgatctgtaaaatgtagattatcttcttttattatgaatgtgattgtaagaaacaccctaacattctctaacttttgaaaatgaatattttgtatttctaaggamcaaggaaaatattttttaagccmatgtantacaca

SEQ ID NO: 1231 - DNA, 329 bp, Homo sapiens
  misc_feature (272)..(272): n equals a,t,g, or c
ggtttttcgcagcgccgggtgtgttcgggtaggtgttgcgggcaaggaagtaggcagcggcccctgagcagccgcctcgctccggcattgcggggacacggcggggctgaggccacgagagcagggcccgagcccggcgggccgtggttacggttttcttgcactgaaaaactgaatccggcccgaagcgacgtgcactttatggtccccacaccactcggttaactaagaaaagacccgggcgaatggacctaacgcaacccggtgcckanagggcccggtccagcagcctctggggcccartgcgcagggcactgcgggccgattgc

SEQ ID NO: 1232 - DNA, 480 bp, Homo sapiens
  misc_feature (462)..(462): n equals a,t,g, or c
  misc_feature (471)..(471): n equals a,t,g, or c
ggcagaagcttgaggtcctgaacgtgctacgcaaccccttgtctcgtgtggatggggcgctggccgcccgctgtgaccttgacctgcaggccgactgcaactgtgccctggagtcctggcacgacatccgccgagacaactgctctggccagaagcctctgctctgctgggacacaaccagctcccagcacaacctctctgccttcctggaggtcagctgcgcccctggcctggcctctgcaactatcggggcagtggtggtcagcgggtgcctgcttcttggacttgccatcgctggccctgtgctggcctggagactctggcgatgcgagtggccagaagccgggagctgaacaaaccctgggctgctcaggatgggcccaagccsgrtttaggcttgcagccacggtacggmagccgkagcgcccccaagccccaagtkgccgtgcattcctgcccctncacttcccnactattgag

SEQ ID NO: 1233 - DNA, 1299 bp, Homo sapiens
  misc_feature (1254)..(1254): n equals a,t,g, or c
  misc_feature (1267)..(1267): n equals a,t,g, or c
gctggccaaggcgctgcggcccaccaaaatcatcttcctcaataacacaggcggcctgcgcgacagcagtcataaggtcctgagtaacgtgaacctgcccgccgacctggacctggtgtgcaacgccgagtgggtgagcacaaaagaacggcagcagatgcggctcatcgtggacgtgctcagccgcctgccccaccactcctcggccgtcatcaccgccgctagcacgctgctcactgagctcttyagcaacaaggggtccgggaccctgttcaagaacgccgagcgaatgctacgggtgcgcagcctggacaagctggaccagggccgtctagtggacctggtcaacgccagcttcggcaagaagctcagggacgactacctggccycctgcgcccgcggctgcactccatctacgtctccgaggggtacaacgccgccgcattctgaccatggagcccgtcctggggggcaccccgtacctggacaaatttgtggtgagctccagccgccagggccaaggctccggccagatgctgtgggagtgcctgcggcgggaccttcagacacttttctggcgctcccgggtcaccaaccccatcaatccctggtacttcaaacacagtgatggcagcttctccaacaagcagtggatcttcttctggtttggcctggctgatatccgggactcctatgagttggtcaaccacgccaagggactgccagactcctttcacaagccagcttctgacccaggcagctgaccttcaccatggacactacaggccctggaatggccagggtggaccaaaagccatgccagctgggcatgaccccaggcagccagccacaggctgaagggggcttgttggctgagtgatctgcagaggagaaagcagccccagctctgcccagaggaggcgctgaagtgggacaagcacaggaaagaaggggaccagtctaggaccccaacttgactcactctaaagctacaaccaaatggccttcgattttcaacctggggattaggggaggggagggtgccttccagggctctactcaggactaaccctaagggtgagctagtttctgtgcctctgtgctatgttttgaggctcccttacccaaaataatacccctgcctgcgtgatattctaccattcattttaattcctttgggtcttgcagtttttcaggaggccttgattaaaatgcaaatacttgtctgagaaattccgcttacactttgaaaanaaaattaaaattnacccccttggaaacaaaatttttttttttttt

SEQ ID NO: 1234 - DNA, 1062 bp, Homo sapiens
  misc_feature (1047)..(1047): n equals a,t,g, or c
tccagagagaaaataggccgtgtctcaaagaaaggttcttggtctatgcctctggtctgtgggctggcarggcaaccataccatacycccgccagtcctcggctcctgctgcaaagttggcatgtttcacagggaaacttttggaagagtggctgcttatgagattccaaaatgaagtgttggccaacaccgctcatggccatcctggattttcccagtggcttcccttcctgctcgcctccctgaacaggggagaaagcttaacctctcttctcctctccaaacctttcaccttgaatgggtaatgtttggtgggggctgttccttcttggagaagccttgagtcggaccattttgagatcatggaggaaggatgaagaagtgaaaatgacaataatgactctcaagaggctggcgatgtgacatggcaaatgtagaactgacttaaattgaacaaaccctcactgagcacctctgatgttgagcacctgctgaatactgagcactgaatgggggagggggaggggagcacggggtgagtcaacctgggactcggtctcagggatatgcctaccaatagcgggtatcgtaaggcatgtacccaaacataacggatgtaaggcagaaagtgatcggagaaggaatgagaaagtgtgcgtgatgttaatgaaaagtcatatgcagctagagcagacccaggaaagctttctggaagagattgcatctgaggaaattcaggaaggatctttgtagattggggggagattctaaattgaaggggtgatrgggtgaggggccagagggaagtctgctgtgttctcatgtaggatgtcagccctccctgcaacttctctttttggccaatgtcttttcactttcctgaccctttagaatcatccccagccagacgcaatcatggaagttgccttattgtcactggttaagaacttggcgagattgaagggcttttgttattgttgttggatatttttgtttcccataaaagcacatcatttcaaccctaaaaaaaaaaaaaaaaaaaaaacncgggggggggcccgg

SEQ ID NO: 1235 - DNA, 608 bp, Homo sapiens
  misc_feature (561)..(561): n equals a,t,g, or c
  misc_feature (596)..(596): n equals a,t,g, or c
  misc_feature (602)..(602): n equals a,t,g, or c
aaaaatgggatgaaccttggtataaccaaaaaacagaacatcaaagaaatagcagtaagattctgagatttatttcagacttccttgcttttttggttctctacaatttcatcattccaatttcattatatgtgacagtcgaaatgcagaaatttcttggatcattttttattggctgggatcttgatctgtatcatgaagaatcagatcagaaagctcaagtcaatacttccgatctgaatgaagarcttggacaggtagagtacgtgtttacagataaaactggtacactgacagaaaatgagatgcagtttcgggaatgttcaattaatggcatgaaataccaagaaattaatggtagacttgtacccgaagaccaacaccagactcttcagaaggaaacttatcttatcttagtagtttatcccatcttaacaacttatcccatcttacaaccagttcctctttcagaaccagtcctgaaaatgaaactgaactaattaaagaacatgatctcttctttaaagcagtcagtctctgtcacactgtacagattagcangttccaaactgactgcactggtgaggtcccggcanccaacnggcacc

SEQ ID NO: 1236 - DNA, 889 bp, Homo sapiens
  misc_feature (850)..(850): n equals a,t,g, or c
  misc_feature (882)..(882): n equals a,t,g, or c
atccattttaggtactctactgactttttccttcacttgccaagcccttttattgttcactgttagaaaaatagagaaggtgagacagctgggggaaaatgtggagtaaatgataatcaaatgttgaattctaaaagtctctacatttacctaggttggctttctcccccagttcagaagtttccagcttggccaatcatcagaatcacttgaggaacttagaaagaactccctggctgtagctcctatgtaggtttaggttgagactctggattccacaatttttaaaggttaccatctgaggtttctgatcatagtctacttttgaagcagctgctgctrtttctttattccattgaacaccckggaattgacataattttatctatcagcatttctccccttttagtttatttaataattaacccggtctccagggcagttttcatatgaccatgtgtatattcactgctcacgaaaaagtttaatgttagattaccaaatttaatatagttacagaattactgcataagggcttcccttcttggagactcttacccagcatgggaacagtgatctgcccacatgacagggtggtatgccaggcatagttaactgcttttggttgtgaggtactcatcttcctttagttacccttagttatgtggcacacatgtccttattgcctagttcgtcatccacactttggatcttgtgaaaatgctgttagtatccaaccttaaaatatattagtatatgggtttttattaaaagaattactttgaattttctatttaattcatatgtaaataaaggaacatttcatttcacttaaaaaaattatatcagntattaagctgggtgcaagtggctcatgcctgnaatccaa

SEQ ID NO: 1237 - DNA, 739 bp, Homo sapiens
  misc_feature (678)..(678): n equals a,t,g, or c
  misc_feature (693)..(693): n equals a,t,g, or c
  misc_feature (730)..(730): n equals a,t,g, or c
  misc_feature (736)..(736): n equals a,t,g, or c
ggcacgaggggaaatgcttctgccgcaagtctactctcacgacccacctgaggacccacacaggagagaaaccgtatgaatgtaatgagtgtggaaaattcttctctcggttgtcatatctcactgtacattatagaactcattcaggagagaaaccctatgaatgtaatgratgtggaaaaaccttctacctgaattcagccctcatgagacatcagagagtgcacacaggagagaaaccttacgaatgtaatgaatgtggaaagttattctcccagttgtcatacctcactatccatcatagaactcattcaggagtaaaaccctatgaatgtagtgaatgtgggaaaaccttctaccagaactcagccctttgtagacatcggagaatacacaaaggagagaagccctatgaatgctatatatgtggaaaattcttctctcaratgtcatacctyactatacatcatagaattcattcaggagagaagccctatgaatgtagtgaatgtgggaaaaccttytgscagaattmagcccttaatcgacatcagagaacacacacaggagagaaagcctacgaatgttatgaatgtgggaagtgcttctctcagatgtcctatctcactatacatcatcgaattcattcaggagagaacctttgaatgtatgagtgtngaaagccttctctcnggtgcatacctcactgtacatatagacccttcagggngaaccnatg

SEQ ID NO: 1238 - DNA, 491 bp, Homo sapiens
  misc_feature (8)..(8): n equals a,t,g, or c
ctttgttncattgcccattttgaaaaagggaattatttctcagtctttcaaggcttgagactaatataggccattgtgattcaggaagaaacccaaggttggagggtgggatgagtaccctctgaaaaagggaatttgctggtgaaaagaggctggatcttgtggaagactgtcttggatggggaagtactacctggagatttcaaattcacttggcctgcaaacaacagagttatccgtatcttccacatgtgaatgtcattgcaagggtgactctagacaaactacaaaccgatggaccgtcaagctccccaggagccccttggatggcagcgttgcttcagagtgtttcctgtttctggaattccttgttagggaactttaaagaagaaaagaaaaacttgaattgtgttgaattactgtatcttttactttttttttttgaaaagataaacttgtaaatagagtgatttgaaatactaaaaaaaaaa

SEQ ID NO: 1239 - DNA, 1596 bp, Homo sapiens
  misc_feature (57)..(57): n equals a,t,g, or c
cactggcgggtcgcaacgctgtgggcgttccaggaggtggtcgtggcgaacctggcngctgcgatgaggaaactgaggccctgagaattgactcattcagatcacttcccatgatcacgcagctgagcagtttccaatacagaattcagatttggggttccctacttcsaatccaggtctctgtgctccacacttgtctttcgtgctccatgtttgaagaaattaatattgtggaagaacagttttaaggcttagaggaacttgarttaggatccgtacttggcagatgaggaaattgattctcatggatgtaaattcactgtttgaggccacaacagggcatcatggagggaggcttgaagaggaaacactctgatttggaagaggaggaggagaggtgggagtggagtccagcaggccttcagagctaccagcaagccctgctccgcatctccctagacaaagtccagcgccctgggcccccgagcacccagcctccgcaggcatgtcctcatccataacaccctccaacagctgcaggctgcacttcgcctggctcccgcccctgccctgccccccgagcccctcttcctgggcgaggaggatttctccctgtcagccamcattggctctatcctcagggagctggacacctccatggatgggactgagccccctcagaatccagtgactccccttggcctccagaatgaagtgccaccccagcctgatccagtcttcttagaagctctgagctcccggtacttgggggactctggcctggatgacttctttctggacattgacacatctgcggtagaaaaggagcctgcacgggccccaccagagcctyctcacaacctcttctgtgccccaggttcttgggagtggaatgaactggatcacatcatggaaatcattctggggtcctaaaactgtgatagaggggatcgatccttcctcatgtcatcttcggtggcctggatccctgaatgcaactctgggtgtgtgtttttgtgggggctcgaagcagtgactatggcctcctttgttcccatttcagggttccacaaactgtcttgcatgtgtgtgtgtgtctggttaccccgaccttctgtgaaggtgggtcttcctgaattaatttatctattccaaatgccttaacgagactctgtttctgggagtctgattttccacttacacatttcttccacctttcctgctagttcccactcccctgtgaccactggggcctcagggaagataaagaaagctgggcctgtcgaaggatgacagggatgtgctgccaggttgctatagaaacccaggctctgcctcttgcaccttgagggggtgggaggggctggtgtcctccctccaggctgaaccccacttcctcggcaggaccccagtctcagcagcctcctgatttcataaccaggccggaccacgtgcaatagggtggaaaccaaactgctccatgccgggttatttaaaagaaaggcagagtttgtggtggcttttttttttttttttggattgtttgtaatttttttaaataaaagtattttggaaggaaaaaaaaaaaaaaaaaaa

SEQ ID NO: 1240 - DNA, 580 bp, Homo sapiens
  misc_feature (536)..(536): n equals a,t,g, or c
  misc_feature (554)..(554): n equals a,t,g, or c
  misc_feature (563)..(563): n equals a,t,g, or c
  misc_feature (578)..(578): n equals a,t,g, or c
cctcgagtagcactttagtgaggctgtaagtacaggaattattcttacctcacagacagatgagcagttgggcttctaaaagataaagtaagctccctgaaatgacacagagaatcatttctctatgaaagatcagggctagcatccaggttttgcaaagcccaactcagtgtacttttcatttcatcttacgttgcttaagaaggccaggcatgtaacaggtaccatctgctagcgatcactgaatgcaccttggctagcggtggggggtgtagaagatgatgcgggttcaccaagacagtacattkgagaaactgccattctttcccttagrtgctgactggaaagcttctagggccyawctgtgtgccttattcagggrgacycataaagatcttggaaagtgtaaatgaacatgttttatgagtagaaatggtccacaatttagcagatagaaagcctgggttctagccccagctctgccattagctgtgtgatcatagataaattctttcccctcttgaggtttgaacatnactgactctacaaagaancaaattggntctggaagtggatanca

SEQ ID NO: 1241 - DNA, 1676 bp, Homo sapiens
ggtttcaaatatgtggtaaaattctgtgacctgccatattggatttaaaacttcatcttcatcttaaaacttcatcttttgaaatctctgaaaatcattagtgtgcatgtattgaacaccagtctttattctgtaattaacaccccagatttctttcccctcaccttatgccatccatctgtgtgtttggtttccagtatgccatgtggaagaggtgtgagcctttcttcagcccaagaaggaaactttaaacatatttgcacaataaaatttcaaattaaacatttcaaaaagggtgctcagactagaaatacatgctcttctgaaattccatgttgcaactgtaactcctgtcatatatacccagtgtatgaggaaaagttcttgcagttttcacactgcccttctgtattgctgcctggctgtgctctgttgttggaactgaaatatgaaatttttactttgaagtatgttaatgtcaaagttgatcgtattaagtttkgaaatcctttgaggtttatctaataagtgtgttggagcttctgtctcttctggtaatactgtaccctgttgaaccaagaacagttttattgtttgtgggacttcgttggttttctaataccataacctgtgtccctgtgcagtcagggggtcacttctttaagatcatgtataatacggcccgtcatatacacgtagatagagccatgtgattccagaaattagaagactggatctgtggaatccatacatgttaaaattttgccaaaatgagatgattaaaatttttgtgagttttataaactgttgcagttcgccttactgatttttcaatgataatcacttttatgggaagggggcttaggaacaaaaaactttgccaagaatgcaaaatcttactggtttttaaagcttgtaacagttgtgtgtaaaacttttatatttgaaacgtaaactcaccctttctgccactgctttcattgcacttttcataccaagttctctccaacgtggtgtctgaaagatttttattatatacactctttatggaattcaatgaagtgtggttatgctgtgtttctgaagtttttaggcttttcttcattggcctgcctaatactagtgtgtttctataacttcagatgattcaaaagtttagtgcttcattgtagcaaaaaatgtatataactcataatatcctacatgtagtattcaaaatcaattattaataaccaataaaggactcaacacattttcattgcgtgttcttctttaagacacctaaactcatatctcataatttctgaatccgcaatccctattcattaattgattacagtttttgagttgttggaaagcctagccctctcagattcagggttcagaaagaattaccaggtctggtaaaattgtctgactagcccttagcctcagaatggtcaacttcatagtataagcaaagaaagtggtgatctcatatagtcagctttttcatgaacattaattcatggtgaatgcactcacagcaaccaaaatccaaaaaaaaaaaatgttcatctaaaaccttaaacattagcttggctcattgagttcttggtacaacctgcttttcatatgacacagtatcaaacatgatttcagatgaaatgggtggtgttaatattgtgttaaagaaa

SEQ ID NO: 1242 - DNA, 394 bp, Homo sapiens
attacaggcatgagccactgtgcccggccttcctttctttttaataagtgtatgtatctcaaagccattgccttctctagaaatctgtttctctgttctggaagagcctataaactttgccttcagttgtttttcttttcaaaagggaacaccagtggtagatgattaactcttatttatttttaaaatttaatttggatctatagtcagtatctgagatttataggatgaactttggtttacaaggaacagtgtagttaaaaagttagggtgcctatgttcttatgtaatcatcaacatgtttgttgtataatcatcaacatttttctgaatgcaatgatgaacatttcaaacaataaatgaaaatgaaactaagtatcaggaagtagccagt

SEQ ID NO: 1243 - DNA, 501 bp, Homo sapiens
  misc_feature (362)..(362): n equals a,t,g, or c
  misc_feature (453)..(453): n equals a,t,g, or c
  misc_feature (483)..(483): n equals a,t,g, or c
cttacatctattttgattgacttgaaataaaatttaacacctcagggaaggcaattctcatgtgttttgaattatactgagcattaattcttcaggataattatagacttggaaaggtttaacccagtctcccagtccatgctgaagttcctttaagtgataggaggaactcataatctacaaggcaacccaatccatttggtgctaccatcgattgttataaagcccatccttgggttaaaatctactatttacagttgtatttaatgaccttaattctgccctcaagctatataaaatttggakctgtkttctacatrataatcttttagatawcttaaggtagttagtctatcctctcnacccttcccctcacagtttttccaccctttggagataaatatccttcgctattccaactatttctcatatggtatcattttaatcatcccnattgctccctaaggatgttaaactttgttnatgtcccttccaaaatgt

SEQ ID NO: 1244 - DNA, 361 bp, Homo sapiens
  misc_feature (333)..(333): n equals a,t,g, or c
  misc_feature (337)..(337): n equals a,t,g, or c
cagccccggcgtccgccccgctgccccctcccccgggggccatgggggcgcccccgggctaccggccctcagcttgggtgcatctcctccaccagctgccccgcgccgacttccagctccgcccggtgcccagcgttttcgcgcccaagagcaggaataccagcaggccttgttgctggtggcggccttggcgggcctgggcttgggcctgagcctcattttcatcgctgtctacctcatccgcttctgctgctgccggccccccgagccccccgggtccaagatcccctcgcccgggggaggctgcgtcacctggagctgattgtccccttntcgncggctgcactggcattggcatcgg

SEQ ID NO: 1245 - DNA, 548 bp, Homo sapiens
  misc_feature (545)..(545): n equals a,t,g, or c
  misc_feature (548)..(548): n equals a,t,g, or c
caaaaaaaataaaaaagaacagcctttttaggccacagtgacctgcgcaatgtttatatgctttgacctactaactttctcctaactaaatatttgattttaggagagtgtttaaataaattacagtatgtctatatgatgaaatgttattttgccattaaaattttgtttacaaagataatttttattgacataaaaataactttaatgtaatttatgttgaaaaagctgaatacaagtctttatatagagtaatatttgagctgtgttcaaaaatacataggaaaagactgataaaatgaaatatggcaaaatgttaatagttttccctggaataggataataggcaattttaaaacagactcctttaaaaaaacaaacaaacaaaaaaaacatagacttctttatatcttttgagctccctcccttttattatgtaatgaatatgtgttgcttttgtaataggaaaataataaagttaaaatttcaactgcaaaaaaaaaaaaaaaaaaaaaaaaaaaaaaaaaaaaaaaaaaaaaaaaaanccn

SEQ ID NO: 1246 - DNA, 866 bp, Homo sapiens
  misc_feature (212)..(212): n equals a,t,g, or c
tgagttcctgtgtgcctgtcacccagcccggccacaagaggtgctgggggcagtgtccacacccccctttcttaggacgcctgagtctcagatgtgacttatagggtatttcttatggcaagacagttaaaacaaacttcagcgtctcgtctgtccttctatggctgtggcttctgatgttctaatggcgttctcgtcagccggggctgagnaacaaaataacatagactgtggggcttaaacagcagaaacttacttcccatggttctggaggttgggagtcttggatcaccgtgtagcatggtcaggttcctggtgagggtgggattcctggctaacgtaacgaaggctccctctcctgataccgtgtcactgggggtgaggcttcaacacaggaattttggggggacacatcagcattcactccatcacaggtggttagccctttaatccacgggaattttgtttggggttgtgtgagatacgggtctaacgttttctttttcaaatacgtagccagttgtcacatcatttattgaaaaaggaatcttttctccaccgactgacatgaaatgctaccatcatcgtaaataaaattcccgtaaatacttgctgtctctgctgtctcagtcctgactcacgggctgagttctctttctgcacagtagcactggcattaactgtgacagctttacagcaggctccctccccgaggccgttcagaagcattcctcagcgggtcctacacgtttcctctcccatgtcaagtttaggaagcagtgtcaagacccacagcagtcctgcgggagttttaagggatgcacggagtttatggggacagtttgggraaattgacattcatgtgg

SEQ ID NO: 1247 - DNA, 799 bp, Homo sapiens
gaaaagtgtggaggctagggcaggcaggttgttaggactgaaggtttgcccattctgctgcctccatctcagctccagctccatccccctctccacagaaagcagttggtgacacgaggttctatacttttcttctgttgctctcttgacttaacgtgaaaacagggtatatttgaacaaactgtctgtcccaggcaggggctgggcagggcctgtgtgccttgctcagcctcctgacaggacacttttgttgcacttagaatttacattttaatggatgtaaaaacaactgtgagagatgtctgggcctgcagaagtccagcattgctcaaaaaagcgtgtgttctagtgaacattttcatatatatttattggttatagcctgttaaaatattttcttttttgtattatttatccccctacattatgtatttatatgagggaaaaaaaggaaaaaattgtacttttttagtatttacctgttacaaaggacattgtgtttcctgtcatgtaaaaccagctattttagttactattgtactctagaaaagagctgtagatttatgttaaactcgtacttacgaacaattgtaattagttctaaaaggcatgaactcagctcctaatcgtcactgtatagtcctgaatttgtagaactagagttaattccctcttggaactttctttgttcttcagtagttacttttttccttacctaaaagggttgtctgtcaaacaattcttgaataaactttctgttatcaattttaaaaaaaaaaaaaaaaaaaaaaaaaaaaaa

SEQ ID NO: 1248 - DNA, 719 bp, Homo sapiens
  misc_feature (537)..(537): n equals a,t,g, or c
  misc_feature (593)..(593): n equals a,t,g, or c
  misc_feature (621)..(621): n equals a,t,g, or c
  misc_feature (646)..(646): n equals a,t,g, or c
  misc_feature (672)..(672): n equals a,t,g, or c
  misc_feature (675)..(675): n equals a,t,g, or c
  misc_feature (700)..(700): n equals a,t,g, or c
ggtattactggagaattgtccatatttaatataatttaactgtctttctgaaagaataaagaagtttttatttttattttctttaggtagaacaaaaccgaataaaactactaaatgataaagctgttgctacatcacagcttcagaaaaaacttgggcagcttctttacctaactaatttggagaaggtattgtttctaagacatgctactttttcctatgctgcattatcataaaccactttagtgactcctttcataattaatggtgcaaattgttgtaattagtatttggtgttatatgagtcaagaacactacctatgtctctacaatagcttcragatcacaaaagaatattgtatctatagaaatttattatgcagatgatatagaaggcatgcactcgatagtagagaacaatgtaaatggactgtagttcaaagccttgaatagtaaaagtattaaaacatatctcggtgaaactggcataatgcaatttatcacatgcattcattcatcaatacaaaaatatggtgnaatttggtatttgaaactgaagtgtggttcgaaagctactaaatcagagacatggnaataaaaggagactcaaatattagtaantcaaaacacatgtctgggtatgacngagattatccggcactggtgaatggnggncattgttaaaataattcatttttgncggaaaaatttgtaattga

SEQ ID NO: 1249 - DNA, 339 bp, Homo sapiens
agtctgcctcagcctcccaaagttataagatttttttcctctggtttttagtaaatgttttttttgagattgcttagcaccagaatgatttgcaaatttgaaaataggaactccactaggaatgccggatagaagagtgcttcacatttgtagagggagacaagaactaaatatcacgacgtctttctgagccttttggtttgctaacgtgccccaaattcttattccaaacggtataagataattatgtgtaaatgaataccagctctacttagttttatttcatatttgtgtatckgatatattaaaatatcttttttttttttttgaaaaaaaaaa

SEQ ID NO: 1250 - DNA, 229 bp, Homo sapiens
  misc_feature (177)..(177): n equals a,t,g, or c
  misc_feature (213)..(213): n equals a,t,g, or c
gcaggcgtgagccactgagcccagcctacttttmagttttwaacataatttttgttttatccacaacttttcaagtattgaaagtagaataaaaacatgggttcttagtctttrgctatctgttgaagcctatgaatgccttcttaaaatcatgtttttaaatgccttaaatatatnggattacaaaggaatcttattattcgaaatacggtnttaaaatgtttaaaaa

SEQ ID NO: 1251 - DNA, 1075 bp, Homo sapiens
gccccagctcgtgccgaattcggcacgagcagtttttaacataatttttgttttatccacaacttttcaagtattgaaagtagaataaaaacatgggttcttagtctttagctatctgttaaagcctatgaatgccttcttaaaatcatgtttttaaatgcataaaatatataggattacaaaggaatctaattatatcgaaatacagttattaaaatgttaaaagataagtttgttatatattaatatgcatgcttctttataaatgcattaaataagagttaatagctatcctaaatttgaaatagtgataagcataatgaaaatagatgcaaaaaactaatgtgatatgaaaatatctgggtttttcttttgatgatgaagtattgctaatattaccgtggtttatgaactatgttcagaattgaagaaaatcctaactttcagttagaggttagtgacggggttcaggacaccctacacaaaatacagcactttgacatattgaatattttaagctgaaggcatttgaggaaattgcagaagcaggaaggtgactctgaccttctgcctgctgttctccccagaagcagccataaaacctgggaaggattttctgaccttcccctgaagtagatcataagactgtcatgtaagaggtgctctcctggcacccagagaaaaggagcatccttacctccaaaagcacagggacacaaagaggaatctaaacaaacaggcctctcagtttcccccagtttattacatttagcttgttcacactttgccctatgacatttctacatcactggctgctcttcatcaaacctactataaaaaacattcaagttcaactgtttctttgggcctttatttccttatggagsccctcgtgtcgtgtaaaacttatattaaataaatgtgcatgcttttctcttgctaatctctcttttgttatagagatctcagccctaaacctaggatggatagaaggaaacatatgttctcccctacattagtaaaaataaaaatggaattttttacccataaaaaaaaaaaaaaaaaaaaaaaaaaa

SEQ ID NO: 1252 - DNA, 336 bp, Homo sapiens
gatgggattgtacactttctggttctctctcaagtccaaccagtatgtggtaacctgtctcttcccacttcatttgtggcactggtttgcagtggacaaaaggtccgtgctcctcttctaacctaatctggactgggttgcccaaaggttgccctgccacactgccaagtgcctaattagctgttttctctccaacccctccaaacacttatcatgagtaatttctcttgtctttakagttgccaaatstaatctctgtaaatacaaatgtggtgagacttcttctcaggagtttcagcaaatgaaacaataaactcttttttaccctgaaaaaaa

SEQ ID NO: 1253 - DNA, 752 bp, Homo sapiens
  misc_feature (750)..(750): n equals a,t,g, or c
  misc_feature (752)..(752): n equals a,t,g, or c
gggtcgacccacgcgtccggaatgttttggtgaataaatctgttcttcagcaaccctacctgcttctccaaactgcctaaagagatccagtactgatgacgctgttcttccatctttactccctggaaactaaccacgttgtcttctttccttcaccaccacccaggagctcagagatctaagctgctttccatcttttctcccagccccaggacactgactctgtacaggatggggccgtcctcttgcctccttctcatcctaatcccccttctccagctgatcaaccyggggagtactcagtgttccttagactccgttatggataagaagatcaaggatgttctcaacagtctagagtacagtccctctcctataagcaagaagctctcgtgtgctagtgtcaaaagccaaggcagaccgtcctcctgccctgctgggatggctgtcactggctgtgcttgtggctatggctgtggttcgtgggatgttcagctggaaaccacctgccactgccagtgcagtgtggtggactggaccactgcccgctgctgccacctgacctgacagggaggaggctgagaactcagttttgtgaccatgacagtaatgaaaccagggtcccaaccaagaaatctaactcaaacgtcccacttcatttgttccattcctgattcttgggtaataaagacaaactttgtacctcaaaaaaaaaaaaaaaaaactcgagggggggcccggaaacaaacngn

SEQ ID NO: 1254 - DNA, 764 bp, Homo sapiens
aaaattagacacactttaaaccttcaaacaggtattataaataacatgtgactccttaatggacttattctcagggtcctactctaagaagaatctaataggatgctggttgtgtattaaatgtgaaattgcatagataaaggtagatggtaaagcaattagtatcagaatagagacagaaagttacaacacagtttgtactactctgagatggatccattcagctcatgccctcaatgtttatattgtgttatctgttgggtctgggacatttagtttagtttttttgaagaattacaaatcagaagaaaaagcaagcattataaacaaaactaataactgttttactgctttaagaaataacaattacaatgtgtattatttaaaaatgggagaaatagtttgttctatgaaataaacctagtttagaaatagggaagctgagacattttaagatctcaagtttttatttaactaatactcaaaatatggacttttcatgtatgcatagggaagacacttcacaaattatgaatgatcatgtgttgaaagccacattattttatgctatacattctatgtatgaggtgctacatttttaggacaaagaattctgtaatctttttcaagaaagagtctttttctccttgacaaaatccagcttttgtatgaggactatagggtgaattctctgattagtaattttagatatgtcctttcctaaaaatgaataaaatttatgaatatgacttaaaaaaaaaaaa

SEQ ID NO: 1255 - DNA, 368 bp, Homo sapiens
ttttggtgattccgtagtcaactatcgtgttgccttagctctctttcaagtcacaaacacagctggccttaagtatttatttaagcatctttatattcctgtttactttaaactccttgaattagccatgcaataatttgggtatgttgtattaagagctctaccacattatggttcagtcattgtataattaaacatgaggcatcaagaatcaaaagttactgttttacttgcctgctctctccattgtgtcattttacattttagtagtactgtgttttgtttattaaaaaaagtaaatcaacatatactatgaggtggaaaatggtacagaggccaaatcattctagtccggaggtggcatttcc

SEQ ID NO: 1256 - DNA, 511 bp, Homo sapiens
ggcacgaggagaaaactacctatgacagtgccgaggaggaaaataaagagaatttatatgctgggaaaaatacaaaaatcaaaaggatttacaaaactgtggcagacagtgatgaaagttacatggaaaagtctttgtatcaggaaaatcttgaagcgcaagtgaaaccttgcttagagctgagtcttcagtctggaaactctacagactttaccactgacagaaagagttccaaaaagcacatacatgataaagaaggaactgcaggaaaagcaaaagtaaaatcaaaaagaagacttgagaaagaggagagaaaaatggaaaaaattagacagctaaaaaagaaggaaacaaaaaaccaggaagatgatgtagaacagccatttaatgacagtggctgtcttcttgtggataaagacctttttgaaactgggttggaggatgaaaataactctccattggaagatgaagagtcattagaatcaataagagcagctgtaaaaaacaaagt

SEQ ID NO: 1257 - DNA, 431 bp, Homo sapiens
cggaggaacaggttctgaatgccgcgctcagggagaaattggctctccttgccgcacatgctcgagccccgcacccaaaggtgatggggtctgggcgtggggcttcctccatgtacccccttacccggatccttcctcccaaagtgtaaccttgctttgggcccaacctcccaacaggagccacctgggcctgggccagacatgaccatcttgtgtgacccagaaacgctattttatgaatctccacacctgaccctggacggtctgccccctctccgacttcaactccggccccgcccttcagaggacaccttcctcatgcaccggacactgaggcgatgggaagcgtagaccccaaagatccctggagggctagttcgtatttttgtgttaaactatttgttagaataaagtaattttgctaataaaaa

SEQ ID NO: 1258 - DNA, 2058 bp, Homo sapiens
  misc_feature (1962)..(1962): n equals a,t,g, or c
  misc_feature (1964)..(1964): n equals a,t,g, or c
cccacgcgtccgcccacgcgtccgcccacgcgtccggattcatctaaacccattgtaagagagtcatggatgactgaacttcctccagaaatgaaagactttggtcttgggccaaggacttttaagagaagagctgatgacacatctggagatcgatcaatctggacagatactccagctgatagggaaaggaaagctaaggaaacacaagaagcaaggaagtcatccagtaagaaagatgaagaacatatattatcaggaagagataagagactggctgagcaggtatcttcatacaatgaatcaaaaagatcagaatctcttatggacatacatcataaaaagttaaagagtaaggctgctgaagacaaaaataagcctcaagagagaataccatttgaccgtgataaagatctcaaggttaatcggtttgatgaagctcagaaaaaagccctaataaaaaaatctagagaactaaacaccagattttcacacggcaaaggcaatatgtttttataaggggatttccctgtgcaatgaagaaaagttgaagaatactctttgtccatctttatttctttgtttttggcttcttaagattagagattactttaatcttaaaaaacatacaaatttaccttgttctgtatgtccttttaaggtcatgtggaaacataaaacgaatgttttttatgtagaacagaatattctatgtgcctttagcttctgtggaagtatggggaattatgggcttttcttcaaataattattttaagaggcttccattccccctgatttttgtggtgtctcacaagtaccctctaaggtctggtcaggactgaccaccaaatctctaccacagcctggacctccttgtgaaatatacctaacctgccctagagtcagtgtgtcaagtccttcctgtaaatccatgactttgaaatttgttgttttttccctttaaactgcagccagtgaatacaaatttacttgaaaatagagggtatggggttttgcctgttttgtaatcagtttgcttgttttagcactcagggctttttatttgttatttaattttttaattgtttttaagtcagaaagatctctgggttatctcatgtgctaaggaaaaactattttgctytttccaactttaatagttagtatttctaggggaggcaatcaagataagatatgccattaactgttagcattgtgaaatctgtaagactcaatctctgatctcaaccaaagctttctgagtcctggaactttgctttgggacaactttactttacccatttatatgctgtacttaacagtttgtagctaatttatggggtcatatcttttttttagctaatttacgggggtcatatcagtcatgaatagccttttttaaaaatttaataatccctgaatacaaaaatggaaatggaaaatttataatcataacccccctaattgggagtattataagtttgtaatgctttaagcactgcctcttaagatgataaatttataagatgagaaattctatttaaactattaaactattgttaaataaatgccaattctataagttatattttcttgcagattaatcccaattgttccactagtattctagttttgaagagactggctgagcaggtatcttcatacaatgaatcaaaaagatcagaatctcttatggacatacatcataaaaagttaaagagtaaggctgctgaagacaaaaataagcctcaagagagaataccatttgaccgtgataaagatctcaaggttaatcggtttgatgaagctcagaaaaaagccctaataaaaaaatctagrgaactaaacaccagattttcacacgggcaaaggcaatatgtttttattaaggggrtttccctgtgcattgaaggaaagttgaagrattactctttgtccatctttatttctttgtttttgggntntttaggtttggggttactttatcttaaaaaacatacaatttaccctgttctgtatggtcctttagggtcagtgggaacataaacggatgttttt

SEQ ID NO: 1259 - DNA, 943 bp, Homo sapiens
cttttttttttttttttttttttttttttttttttttttttttagatgtttcaataaccaatttattcacgtatttttaaaacttcacacttcaaagtgaacatctgtcaaccacttagaattgggtatttttggtacccatgtctacaaaaagtgtatggcttcccttgacagtactatactgaggggcaagtgttcccagtgtctttaaattgttaggttctccataatatgaattctccaaaatacaaaatagtctggttacttgttgcactgtcccatatttagtactttcatagaacttcattcctaagagcattttcttatgtacaatgaactgtcatttcttaaaaatattgcctcatttcccgcattcatggggttttccctcatccccagtgggaatatttctaatagcttaagagacttgacttctggaaggcttttggacattcacaggattcttctttgctgtgaatgttctactctataaggcttgtctatggttttaaaagtttttgagatccactgcagtcawaggttcmctctacyctakgaattatgatcggctttccatacaccacctcattagagttctcatcctcatggagtacagacacctaacatgacgtgactgtctacaaacgttatcataattgcatttcctgaagtccaagatgatctgtcaaagactactattaactgtattcctaggatttttttactgtatgagttctctgatgattgatgagctgtgacttctgtgagaaagctttcccacaktcaatgcatcgataaggcttctctcctgtatgaattctctgatgattaaccagctgtgacttctgagagaaggccttcctacattcactgcatccatagggtttctcacccgtatgtgtcctttgatgtggtataaggtgtgacttccgagagaatgcag

SEQ ID NO: 1260 - DNA, 2231 bp, Homo sapiens
  misc_feature (53)..(53): n equals a,t,g, or c
  misc_feature (581)..(581): n equals a,t,g, or c
  misc_feature (1918)..(1918): n equals a,t,g, or c
  misc_feature (2204)..(2204): n equals a,t,g, or c
  misc_feature (2214)..(2214): n equals a,t,g, or c
gcggccgccaagcgatccctgctccgcgcgacactgcgtgcccgcgcacagangaggcggtgacgactttacggcggcacggtaagtgcgtgacgctcgtcagtggcttcagttcacacgtggcgccaggaggcaggttgctgtgtttgtgcttccttctacagccaatatgaaaaggcctagtaagtggggtcgagtcgcgggcgtggagggacccacgtctggaagttgctgcagccaccacgacgctcttctacggctacggctttgtctctgctggtatgggggtgggagcctacgcgtaggccttggccctatttcctggtagaaccgagagttggaagtccctacggcgatcatgttaaccgcgcgggctcattctgcggaacgaagccgggcagagggtggggaagactaggctagattttcgtaaggaagcagcgtctgagccaggtttgaggcccaatattttctttccgtggscacgtgcagactggcccaggtgagagctgagaatcgcctcccagactcagtgttcctctcctgccttatgattcgtgctgtttgacacgaaggtatantcgttttgtgtctcatacgctgttgtgtatgatcccattctaatattgtgagggtaagtgcagggaattttgactccattctggatctactgaatttaattctctgggatttgaaagtagcacgtatgtttgcattaggcatttcgcattagacttaacgttaggtttggtagccaatcacacaagaaaaggatataactccatagtgcgttaacccagaactaatcatttgggttaacagatttgtgatgtgtttctttgtagagttaaagaaagcaagtaaacgcatgacctgccataagcggtataaaatccaaaaaaaggttcgagaacatcatcgaaaattaagaaaggaggctaaaaagcggggtcacaagaagcctaggaaagacccaggagttccaaacagtgctccctttaaggaggctcttcttagggaagctgagctaaggaaacagaggcttgaagaactaaaacagcagcagaaacttgacaggcagaaggaactagaaaagaaaagaaaacttgaaactaatcctgatattaagccatcaaatgtggaacctatggaaaaggagtttgggctttgcaaaactgagaacaaagccaagtcgggcaaacagaattcaaagaagctgtactgccaagaacttaaaaaggtgattgaagcctccgatgttgtcctagaggtgttggatgccagagatcctcttggttgcagatgtcctcaggtagaagaggccattgtccagagtggacagaaaaagctggtacttatattaaataaatcagatctggtaccaaaggagaatttggagagctggctaaattatttgaagaaagaattgccaacagtggtgttcagagcctcaacaaaaccaaaggataaagggaagataaccaagcgtgtgaaggcaaagaagaatgctgctccattcagaagtgaagtctgctttgggaaagagggcctttggaaacttcttggaggttttcaggaaacttgcagcaaagccattcgggttggagtaattggtttcccaaatgtggggaaaagcagcattatcaatagcttaaaacaagaacagatgtgtaatgttggtgtatccatggggcttacaaggagcatgcaagttgtccccttggacaaacagatcacaatcatagatagtccgagcttcatcgtatctccacttaattcctcctctgcgcttgctctgcgaagtccagcaagtattgaagtagtaaaaccgatggaggctgccagtgccatcctttcccaggctgatgctcgacaggtagtactgaaatatactgtcccaggctacaggaattctctnggaattttttactrtgcttgctcagagaagaggtatgcaccaaaaaggtggratcccaaatgttgaaggtgctgccaaactgctgtggtctgagtggacagggtaagcytycttttctgttggcattttggtgaccactagaataaaccttcttttgacacatcttatttttaatatcagtgcctcattagcttactattgccatccccctacatcttgggactcctcctccatattttaatgagagtattgtggtagacatggaaaagcggcttcaatctgggangtactggganaagatcaattgcacaga

SEQ ID NO: 1261 - DNA, 412 bp, Homo sapiens
  misc_feature (272)..(272): n equals a,t,g, or c
  misc_feature (379)..(379): n equals a,t,g, or c
  misc_feature (395)..(395): n equals a,t,g, or c
ctgagagaaaggaatgaaaggatggaagaattacaagatcaggcactgctgtstgtctgttccacggatgtaaccacagcacacgcgtggctcacggtactagtgtgataaatgcttgttacatgaaggcgtgaacagggatgagaagagacttcctggagaaacaaaaggactaacaatcaggaaggggaggtgatcggggcaggagtaaagtggacacctcagcaaagccattcgctgtgatctctgattgtgcagtgtcatgtcctgtncaccagagccccctcgtgtttgatgttggccaatgccgccagcatgatctagcaggccaawtcctwatytaccattctyttgacaccagctggtccctgggttcgtnccacccgatgttcccnctttttccccatttggg

SEQ ID NO: 1262 - DNA, 416 bp, Homo sapiens
  misc_feature (326)..(326): n equals a,t,g, or c
  misc_feature (367)..(367): n equals a,t,g, or c
gcttggaggctttggcatcctgagagcctgcctggggggactgtcaagttgccaagggcaaggagagggtagccaactgcctcctccacctggctgctcagccaggtctccctgccttcaaaggacatttctttggtcaggaattgacaagaatgagcccagagtcatccaccccaagggtgtgtggcaaccatcccttgctcaacaccgaaagctgtagaatcatagtggggaaagaagcaacttcttcagaagcagttgtctaatgagcacagcttggaaagaccttggttcttctggatcatcactggggggatatttcgcanaacaagaaattgcatgccccgtccatcatgttccacccccngcccaggccaccccgattgatctgcccgggctctctccttccaggaagt

SEQ ID NO: 1263 - DNA, 2735 bp, Homo sapiens
  misc_feature (2662)..(2662): n equals a,t,g, or c
ggcacgagcacaatttggtcaaactgagcattcttgatttatcagaaaattacctggaaaaagatggaaatgaagctcttcatgaactgatcgacaggatgaacgtgctagaacagctcaccgcactgatgctgccctggggctgtgacgtgcaaggcagcctgagcagcttgttgaaacatttggaggaggtcccacaactcgtcaagcttgggttgaaaaactggagactcacagatacagagattagaattttaggtgcattttttggaaagaaccctctgaaaaacttccagcagttgaatttggcgggaaatcgtgtgagcagtgatggatggcttgccttcatgggtgtatttgagaatcttaagcaattagtgttttttgactttagtactaaagaatttctacctgatccagcattagtcagaaaacttagccaagtgttatccaagttaacttttctgcaagaagctaggcttgttgggtggcaatttgatgatgatgatctcagtgttattacaggtgcttttaaactagtaactgcttaaataaagtgtactcgaagccagtaagtgctctgggacctcattattttaagcctggtagttaaaaaaaatcttgcaaaaggatgccaaagaagataaggacgtggaaagaagtttaatttgatgattaaaaacatgcaacagttttgtgtcttagctctcctactaggattatcggcgccttgaaggaattctcattcatctttgtgttacctttggtctgggtcacaccaactggtatactgaatgcatattaacttagtatagtgcctggcatgtaagagattctcaacaatattctcaataaatattcgctgaatatgagataaattattaatagctactgaataaagaaagattatttaaaaccagagaggaaactccatatatgttctttaatccaaacagtttaattcaagcaatctggaatataaaaagcactttctgatattagaaggagatcagactcccaaaaaagatcagcattctttagtcaagcaaaacttggaagtttacaaacagctaaatcagaagcttgaaattcaggtcctctccagtacctgctacattatatgtaattccaaacatgacttcagagattaaagaagaaagggaagatgtttcccattcttttgtaccctatataaactaagggtaccctgccctaatcttttttccaacacttccccaaataacccttccttacaaagaaagaagtctaagagaactctctcatctaaatatatttaagtagaggcaagcctgaaaaaaacacaaaaacctaaatggtgttaggctgtggttcacctattctcatggcacctcaaattaatggcttgggtgttggtgtaggtaacgcttggcctgtatgttgaggtagtcactagataaaattctgggcacaacatccgtttagcaattgggcatacattctacagatttagccataacgttttgaagctgattattttacagatcaactaattaattcctctccctaactttacagatgagaaagctcagatgatttgcccatgggttataaaactacttccttacacagtggcagcatcagaactggaattcagatctcttgcctcctaggcagtgtttttcctattataatatggtgacttcgtaaagcagggttaattacattccacaaagcttacatcctaatcacaaacaatgggacaaatatttaaattgaacttctttctctgtctagcttcaagtgattctgtggcaagatttactagtaaggctgctgcctataggcctatgctgggcaagttccttattttcatatccagaagttagtcagagcttggcaaataagacttctctatataataatgcctggcccaatgtcccctgtaacatcttacatgcaggacgtagggccaattctttcataacccacaggcaactgtgagtgtcctttctcaaatagtgaaggtaggtattaaagcacctttggtgggacagatgcacaggtgttgcctctgaattggtgttgaggaagtaggcataaaacctcacacagaactgtgtttggtacctgaacactttaaaatcctatggggatggggaagacatgcatggggtggcagcacatacctcttaaccataactcaggacacggcagttcagatttcatgcatgaccctaattcatatttagttgagatcaatggaggaagaagaatcatcctgtaatagtagaccaataacagatacagtaatagttggaaaacataagataaaggccaaggaacaggttgccttattacattttacgaagtatcattttccccagtagtcaaggtagtgtaggctgtatttctttagcaggtcacatgcctgaacaggggttgcagatgcccaaagacaatgaccaactcctcactaagaaaaaggtatttaggacatggtcacttattaccacagatgacaattctgcttgacagagatggcttcttggatgtttttaatccacagtgaagaaaaaggatttcaaagtgctgctcctatttgaaagtgaatgagttgactgaagaaactgttgcaaaagaaaaacaaaaatcttctctagatagctggctgatggctggnaaagtcataaatctccaggagcattggattccaggaaagttaagtccattctcaaaatcccattttaaaactg

SEQ ID NO: 1264 - DNA, 693 bp, Homo sapiens
  misc_feature (609)..(609): n equals a,t,g, or c
  misc_feature (651)..(651): n equals a,t,g, or c
  misc_feature (682)..(683): n equals a,t,g, or c
  misc_feature (692)..(692): n equals a,t,g, or c
gggtgctttccacaacatgcatcgagaccatcttggagcatttacttttgaagcattttgtttaagaccccggataagaaaatgagggcaaaagaggtgaagtgacttgtccaagatcaacagtgaattattagttggaacgccagcctgatactcctagctatatctcactggaaaagcattggagaaaatgaaaccattttaatattctaagcttaaataatagttattataggcgtgagccaccatgcccgaccagtttctgcttttattaaaattgttcacagttttatacattcatgttcattaaaaatgctatttagaaaagagtttgataaaataaatattatwcaaaattcgaagaaaaaagaawagagtttctgtttcagtcacaaattagggttattgtgatgtgtatttatgatgaccgttgaacaaatgtgaagaatactgtgaattctatgactttatcaaaatcagccacatccaggagcttgcagttgttgaccaaatgaatgatgacatagagtagttcagatctatcatgtgctcttctatctaatcagtcaatatttccttggccctcaagccaacattcattttttatgnataccttcttcatgattttgaaattttgataggggtaactgnttaatggagttcccaaatggtagcacttttnnaacccgaant

SEQ ID NO: 1265 - DNA, 462 bp, Homo sapiens
gctgtgtccatgatgcttttaataaaaacaacccccactgcagtctcaccctccaagtgggtgtgggaggccgggctggccagcagaagcccccaggcctggactccatccatctgctcagacaacagcagggagagcgggggtccaggtggggcagctccctcccttccacccctctccgcccctcctgaggccccatcaggagcaggacccctgtgcctccgtggtcttgccctgtttgcaggcagcatgtggccctgcagtcacacagcctggagacaccacgagtcctggcggcctgtgtgcaraaaggcacctacggcyctggaagcccagttgcggaaggaggttgggggagggacgccgggagggaggtcatgcagcctctgtggccagcaccaccctgacggtgccctggaggtggctgtcacctgaccgtgggcagacccacagagcaaggcc

SEQ ID NO: 1266 - DNA, 1037 bp, Homo sapiens
gggaaagctggtacgcctgcaggtaccggtccggaattcccgggtcgacccacgcgtccgcggacgcgtggggcaagacttttgcccgctacctttcattccggcgtgacaacaatgagctgttgctcttcatactgaagcagttagtggcagagcaggtgacatatcagcgcaaccgctttggggcccagcaggacactattgaggtccctgagaaggacttggtggataaggctcgtcagatcaacatccacaacctctctgcattttatgacagtgagctcttcaggatgaacaagttcagccacgacctgaaaaggaaaatgatcctgcagcagttctgaggccctatgccatccataaggattccttgggattctggtttggggtggtcagtgccctctgtgctttatggacacaaaaccagagcacttgatgaactcggggtactagggtcagggcttatagcaggatgtctggctgcacctggcatgactgtttgtttctccaagcctgctttgtgcttctcacctttgggtgggatgccttgccagtgtgtcttacttggttgctgaacatcttgccacctccgagtgctttgtctccactcagtaccttggatcagagctgctgagttcaggatgcctgcgtgtggtttaggtgttagccttcttacatggatgtcaggagagctgctgccctcttggcgtgagttgcgtattcaggctgcttttgctgcctttggccagagagctggttgaagatgtttgtaatcgttttcagtctcctgcaggtttctgtgcccctgtggtggaagagggcacgacagtgccagcgcagcgttctgggctcctcagtcgcaggggtgggatgtgagtcatgcggattatccactcgccacagttatcagctgccattgctccctgtctgtttccccactctcttatttgtgcattcggtttggtttctgtagttttaatttttaataaagttgaataaaatataaaaaaaaaaaaaaaaaaaaaaaaaaaaaaaaa

SEQ ID NO: 1267 - DNA, 1271 bp, Homo sapiens
  misc_feature (336)..(336): n equals a,t,g, or c
ttcagtcaacattcacgtcttgcagtgcatcggagaattcatactggagagaaaccttacaaatgcaaagaatgtggcaaggtcttcagtgaccgttcagcttttgcaaggcatcggagaattcatactggagagaagccttacaaatgcaaagaatgtggcaaggtcttcagtcaatgttcacgtcttacagtgcatctgagaattcatagtggagagaaaccttacaaatgcaatgaatgcggcaaggtctacagtcagtattcacatcttgtagggcatcgaagagttcatactggagagaaaccatacaaatgtcatgaatgtggcaaagcntttaatcagggctccacactcaatagacatcagagaattcataccggagagaaaccttacaaatgcaatcagtgtgggaattcctttagtcagcgtgtccatcttagacttcatcagactgttcatactggagacagaccttacaaatgtaatgagtgtgggcaaaaccttttaaacggagctcaaacctcactgcacatcagrtaattcatgcaggaaagaaaccatataaatgtgatgaatgtggcaaggtattcaggcatagttcacatcttgtaagtcaccagagaatccacactggagagaaaagatacaaatgtattgaatgtggcaaagcctttgggcggttgttttccctcagcaaacaccaaagaattcattctggcaaaaaaccttataaatgtaatgagtgtgggaaatcttttatttgtcgctcaggcctcactaaacatcgaataagacatactggagagagccttacaactaaactcaatgtgacaaggccttagacgttgtcctagtttctggaatcaccgaataattcctacttactgatataccttgtatatttaccccttctcttgaaatccctgtggaattgtaatctccagtattggaggtggggcccattgggaggtgattgaatcatggaagtggatttctcaaactgagaaagatgtagcgtcatccccttggtgctgtcctggcaatagtgacttctcttgaggtctggctgtttagaaggcatagcacttccctgtcgcttgccctcattctcaccatgtgaaataccgacacccgctttgccttccaccatgattttaaccttcctgaggcttccctagagggtgatcagatgccagcaccatgttttcatttaagccttcagaaatatgagccaattaaactcttttctttatacattaaaaaaaaaa

SEQ ID NO: 1268 - DNA, 849 bp, Homo sapiens
  misc_feature (806)..(806): n equals a,t,g, or c
ggtccgcgccctgtcgggctgagcgagttggcccacagagccggcgcgctcccgcctgcagggggagagcagacgggcgcggggacggccaggcgcggcgggtgctgtttctgtttcactttccttcactctgaggccggcgcgctggcgggcgaggagcggcggcggtggcgctgkacatgggaaagcggaaccaccaaaaggagtgatgatcaacgatctcatgataaatctggatgctagttctcatgcctcaggacatcctactgggaacgacacaccagctcctgggatcagactttcatctacttaggacccctctttgcccagactactaaagccagtcttcactagccacgaatggctacccaaaggaaacacttggtgaaagattttaatccttacattacctgctatatctgtaaagggtatctgatcaagccaacaacagtgacggaatgcctccatacattctgtaagacttgtattgttcagcactttgaagatagcaatgattgcccaaggtgtggcaaccaagttcatgagacaaatccattagaaatgttgaggttggacaatacattagaggaaattatatttaagctggtccctggactacgrgaacaagaacttgagcgtgaatctgaattttggaagraaaataagcctcaagraaatggacaagatgatacttcaaaagctgacaaaccgaaagtagatgaagaaggtgatgaaaatgaagatgataaagattatccacaggaagtgacccacaaattggctatctgtctaggttgttttacggnattaatggggccattcgggggacatgttggtaaagggttttaa

SEQ ID NO: 1269 - DNA, 622 bp, Homo sapiens
ggaatttggcccatccaaagactggccaagtgccaaaaaaaggcctgattaggccctgaaattcagtgaaattctgcctgaagaaacctcttattgaatttgaaaaccataaaccatttcaggtgagcttatgggtttgttttgggtttttttttttttttttaagtctctggcccaatgtacgtgggattagattctgcaagcaggcagcagtaagtataagctaatttctgtctataaaaagaatgattaaaaaaaatcattttgttgatgtgtggaatagagattatcacacacatcattaagtggtaatgtgatgaatgatcacaaaacgaacagtcttatacccagcacacagatcagaacaaagtaactatcaagcaccttcaatgcccccctcakgcctcttcggattawtawtgcawccttcctatagagaggtaagcacctcttgattatcagcaccatgggagatgtttgtctgattttgaacttctgtaaatgaaatcatatagtatatactctttggaatctgttgtcttttgtagagggaactttttcattataaatcttatagtagtgttgttccttcttcccatcaacagtgttcttttacttaaaa

SEQ ID NO: 1270 - DNA, 471 bp, Homo sapiens
  misc_feature (70)..(70): n equals a,t,g, or c
  misc_feature (466)..(467): n equals a,t,g, or c
  misc_feature (470)..(470): n equals a,t,g, or c
tctggtcccccagggctccactcccgcagcagcccggctccgtcggcgtcagtggagccccaggcctggntccgagatgagcgagacgctgctctggctcgcggtcgcccgagcgctcccaaaaccagggaacaggccccaggagagaagcccctagaagtttcctggagcagggagtctcctgtatcctgttagctctgcaaaggaatctggactttattctgagggccttggagaacccctgcaaagttttttaaaaggtggactaagagattggcatttcacaacatgactctccgaattgaaacactaagaagattggcgaaatttaacatttacagattagtaatttaacccaggtgactcgcgatgagggacatggctacccttcacttttggagggagttttaagtgatacagatctttttgccaagcaattttttttttttttttgagacggagcgtnnttnt

SEQ ID NO: 1271 - DNA, 647 bp, Homo sapiens
  misc_feature (5)..(5): n equals a,t,g, or c
  misc_feature (636)..(636): n equals a,t,g, or c
  misc_feature (644)..(644): n equals a,t,g, or c
  misc_feature (647)..(647): n equals a,t,g, or c
gcttnttctagatcgcgagcggccacccttttttttattttttcattggtgatgaaagtctgaaatgtgcatttgtcatccccactccatcaatccctgaccatgtaaggcttttttattttaaaaaaacagagttatcccaatacattatcctgtgatttaccttacctacaaaagtggctcctgtttgtttgatgatgattggttttatttttgaaatatttattaagggaaaactaagttactgaatgaaggaacctctttcttacaaaacaaaaaaaagggcagaaatcaccccaaggaacgatttctcaggttgagatgatcaccgtgaatccggcttcctctgagcattcgatggccttagcacctcatcaagccagcacatcctgcctgctgttgcagcctggctgggtttattcttcagttaccctaatcccatgatgcctggaaccttgattaccgttttacatcagctcttgtacttttcagtatattttcataatgagttatattgtcatttagactttgaacagctctgggaaatagaagactagggttgtttcttaaatttagctcatgttataataaaaagttgaaatgaaaaaaaaaaaaaaggggggccgccctaaaggnccaagttncgn

SEQ ID NO: 1272 - DNA, 836 bp, Homo sapiens
ctcaggaacctccaatcatggcagaaggcaaagggggagtgagctgtctcacatggccagagcaggaggtagagaggggaaggtgccacacacttacaaacaaccagatctcaggacaactcactcagtatcaggagaacagcaccacaaaattgtggttaatcattcatgagaagcctcccacgacccaatcacctcccaccaggccttacctccaacatctgggattacaattcaacatgagatttggtgggaacacagatccaaaccatatcacgcacaaattgcaattacttcacactcacgataacccattaatctgtgaaggattaatctgttcatgaaggcagggccctcatgatggaatcacatcttaaagcccctacgtctgagtactgttacattggggatttagttttaatatgattttcagagcagaaaaacattcaaaccatagcaatatgtattgaatatctagatcatttccaaataagatattaatatgatactgaaacatttattgctgaacataaatttagaacttactttgcctacctattacagaagaacaaaagatatttgggcctattaaacctttcctctgccatttcctgtcctgtgtcataggactaggaatcgtgtttctagaaagtatgaaatcgtgtgcttgcmaacttggaagaaaacagttcatgactgcataccttctagttctctagtgttcactggaaattaaagacactaaaagttaacaattcttattaattaatcatattaatgtaattggaatttctagaaatattaggggaagcaactttatacgcaaagcataacag

SEQ ID NO: 1273 - DNA, 312 bp, Homo sapiens
aattcggcagaggcaaacattaagaaaaaaggaatatattagaataaaatagaaaaagttaaagggcatcacacaaaattagtctaggtattattccgaagcttgcattttatatgcatctgggcatgtactgagctgtgaggtgagatgcatctcttactgtgggctccaatcaaagttttaaaaacaycattttaagttatgttcagtggttactgaatcttttacataatttagttctctcttgaatcttcttgtcgtcatagraaatgtcctatatcmatttttacagctwtaaccatctgatcttca

SEQ ID NO: 1274 - DNA, 190 bp, Homo sapiens
ggagctgactctgcctgtccagggcctgcaaagtggctgagctcccttcgggcccatgttgtgcgcactggcattggacaagcccgggcaaaactctttgagaagcagattgttcagcatggcggccagctatgccctgcccagggcccaggtgtcactcacattgtggtggatgaagcatggactatga

SEQ ID NO: 1275 - DNA, 571 bp, Homo sapiens
accagtctcgcgacactttccttggccatgggagacacacgagaagagactctcgcaagaaagtaaatgagtcaggctggaaacagcgaagtatatctcgcgatacacgtgtttaaaatggcggcttcaaggcgtttcacgggtgtcccggacaggcgtggaggtggggcgcaggcgaggatgaagcttgagttggccaggagtcggaaaacgattgcaggcgggaccgcgtccgtcggggctgaggaaacttagcgtggcagaccctaaactgggataactttagggatatggccttcttttcccagttgcctcaaacttagagcagcgtcgtctttagccgaagattcattttcccagcattttccttctccaggcggagtagttggagacagagggcaagccagaaactgaccttcccatctcctcattcccttccatcaagaacttttcatcgttctttccccaccctggtttgtaaatggtatttggcttcataaaaacgtttgtccacaggtgccctgctccatcagttcgctccagcaatataggaagttaccaaaaaaaaaaa

SEQ ID NO: 1276 - DNA, 1474 bp, Homo sapiens
  misc_feature (1345)..(1345): n equals a,t,g, or c
  misc_feature (1389)..(1389): n equals a,t,g, or c
  misc_feature (1429)..(1429): n equals a,t,g, or c
  misc_feature (1440)..(1440): n equals a,t,g, or c
ggcgggcccatgaaagactgcgagtacagccagatcagcacccacagctcctcccccatggagtcgccccacaagaagaagaaaatcgcggcccggaggaaatgggaggtgttcccgggaagaaacaagttcttctgtaacgggaggatcatgatggcccggcagacgggcgtcttctacctgacgctcgtcctcatcctggtcactagcggactcttcttcgccttcgactgtccgtacctggcggtgaaaatcacccctgccatccctgcagtcgctggcatcctgttcttctttgtgatggggaccctgctccgcaccagcttcagcgaccccggagtcctcccacgagccacrcctgatgaagccgccgatctggaaaggcaaatagatatcgcaaacggcaccagttcaggggggtaccgcccgcctcccagaaccaaagaagtcatcatcaatggccagaccgtgaaacttaaatactgtttcacctgcaagattttccggccccctcgcgcctcccattgcagcctttgtgataactgcgtagaacggtttgatcaccactgtccctgggtaggcaactgtgtggggaaaagaaactacagatttttttatatgtttattttatctctgtcttttctgacagtctttatatttgcattcgttatcacccacgtcattcttcgttcacagcaaacaggattcctaaatgcccttaaggacagtcctgcaagcgtcctggaggctgtggtgtgcttcttctctgtctggtccatcgttggcctctcaggattccacacctacttgatcagctccaaccagacaacaaatgaggacattaaaggatcctggtcaaataaaagaggtaaagaaaattacaatccctacagctacggaaatatctttaccaactgctgtgttgccctgtgtgggccatctcaccaagcctgatcgacagaagagggtacatccagcccgacacgccgcagccagcagcaccctccaatggcatcaccatgtacggggccackcagtcacagagtgacatgtgcgaccaagaccagtgcattcagagcaccaaattcgttttgcaggctgcagccacgcccctgctgcagagcgagcccagcctcaccagcgacgagctgcacctgcccgggaagcctggcctgggcacgccctgcgccagcctcacactgggcccgcccacaccgccgctccatgcccaacctcgccgargccacgctcgcggacgtgatgccccggaaagatgagcacatgggccaccagttcctgacgcccgatgaggcgccctcgcccccaggctactggcggcggcagncccctggcgcacaagccgaccatgcacgtgctgggctggccagncaggattcctgatgaggacttttcgcggctgtgaactaantcctgtgacanatggccaggccggggaaaccaaaggtcttcatgg

SEQ ID NO: 1277 - DNA, 1405 bp, Homo sapiens
gtgtattttacaatttttttaaaggaaaatttaaaatatgaaatgtttgttttgtcttaacagggtatcccttctccctcccttgtcagccttccttccttctttgaaaggagaagtcatacgttaagtagatctacaactcatttgatatgaagcgttaccaaaatcttaaattatagaaatgtatagacacctcatactcaaataagaaactgacttaaatggtacttgtaattagcacttggtgaaagctggaaggaagataaataacactaaactatgctatttgatttttcttcttgaaagagtaaggtttacctgttacattttcaagttaattcatgtaaaaaatgatagtgattttgatgtaatttatctcttgtttgaatctgtcattcaaaggccaataatttaagttgctatcagctgatattagtagctttgcaaccctgatagagtaaataaattttatgggygggtgccaaatactgctgtgaatctatttgtatagtatccatgaatgaatttatggaaatagatatttgtgcagctcaatttatgcagagattaaatgacatcataatactggatgaaaacttgcatagaattctgattaaatagtgggtctgtttcacatgtgcagtttgaagtatttaaataaccactcctttcacagtttattttcttctcaagcgttttcaagatctagcatgtggattttaaaagatttgccctcattaacaagaataacatttaaaggagattgtttcaaaatatttttgcaaattgagataaggacagaaagattgagaaacattgtatattttgcaaaaacaagatgtttgtagctgtttcagagagagtacggtatatttatggtaattttatccactagcaaatcttgatttagtttgatagtgtgtggaattttattttgaaggataagaccatgggaaaattgtggtaaagactgtttgtacccttcatgaaataattctgaagttgccatcagttttactaatcttctgtgaaatgcatagatatgcgcatgttcaactttttattgtggtcttataattaaatgtaaaattgaaaattcatttgctgtttcaaagtgtgatatctttcacaatagcctttttatagtcagtaattcagaataatcaagttcatatggataaatgcatttttatttcctatttctttagggagtgctacaaatgtttgtcacttaaatttcaagtttctgttttaatagttaactgactatagattgttttctatgccatgtatgtgccacttctgagagtagtaaatgactctttgctacattttaaaagcaattgtattagtaagaactttgtaaataaatacctaaaacccaagtgtaaaaaaaaaaaaaaaa

SEQ ID NO: 1278 - DNA, 1453 bp, Homo sapiens
  misc_feature (1452)..(1452): n equals a,t,g, or c
aaaaaagaaagaaagaaaaggtacatgtatatatttgtcctgcattatgttttttacttgatataaatgtatttttactgtgatagtccaagtgccctggggggcaggtgtgctctatgtggttcttcttccattggagagctggcgtagagatctgcagtgttcacaaggatgttggtttggagatgtctgctgctaggacctggggtgtgtgactcagtccatatgagagggacatctgggtggaggagtaaattcctgtgctctgaaatgccacttggtagctctggacaatgaaggacaattgactcaagggtgcctggcttctgctgctgctgggaaaaaattcagtttatagcattcctgcacctcccaaagtagataacctggaggtcattcagttaacaactgtccctgaggactcagttttgggggaggggttatctgggagaagctttagcctgttctgagccattaggagacattagtgaattggagcactggagaatcctacaaatggcctatgtctcagaagagctgggacctccttccagctgctgcagatgctgacaggccctgggaggctgctgtgctctggagaagctggagcagctcatttcttggcctagcctggctgcctcagaaagagcagtcaggacttgagggaagcatcaaattctatacccataaactgcagttggaagtcagctttttgaaatgtccagcctttgcccaattgtttcagatcatctcattcctcaggctttggcaggtatcctgccctccatcttattccagtgtgttcacctcatcaaggcagcagagtggatgaaggagtaagtctgccctttgccatactgaacagctgtggaccccgattggtgagggctctgcatatgcctgtatgaaggagatacaggtgtgtgtgcacatgccggtatgaagaagacacaggcatgtgcttctcagttttgctaacagtgggagctcaacggggcagagggaggaaggtccatgatgctcagccacatactgtagagagaggcaatttaatgttaaatgacgcaccatcctccctcccacccttctcccagtcaactttttttctttttctagaactactaattatctctcaaggctgaaaaattaattgccttaggtggagaacttaattcctagtatccaccaaacttaactccgtatctccatatggtgtctccatatctactgtgtgagctacttaactgacgccctcttcctccaactgaaggatcgcccaacgtttttggattatagaattattatttcctgctttctttctttgggacttttgaatttctttggtttcgtttttaagaagtaacccaacatttcctacaacactaaataaaatggtacttacctttcaaaaaaaaaaaaaaaaaaaaaaaaaaaaaaaaaaaaaaaaaaaana

SEQ ID NO: 1279 - DNA, 1353 bp, Homo sapiens
ggacccacgcgtccgattatggtaaacattttaaatcttaggctgttggttaaatttaatggtttaagcactgttgggttctctttaattaatatttgcagaaggagaacatatgtgtttcactgatatgtatggtccagaaaaattacttaattctcaaaaatatgttgcattctcatattgtgttagggaaaattccataagtagtctattttttttttttcttttgctgactgttaacatccaaacacctgaatgaaaactgactcatttctgtattggtgtttaaaaatattgatttgcagatgttcacagaacacttgcattttttgattcacattgctaaatcaaatgtaaaggcaaatatgtatatttaataaatgagaagtatttttttattactgaaatttattctcaaagcaaatgtattttgtagatgkttcatttgggagattttgctttgccttaaaacatacmaaataaacctgtcttgtggtctgcccacctcaaaacctctgttaacttgacatgtagaaggagttcagaattctttgataatgtgtggttttcacttttgtttggattaaacaaaaataaaattagagtccatagcactttgtaaactaatgtgaagtttcttgttgaatcataaaagctacctgtatgtactttataatttaatgttctgttagtaaaaattgtcagcattttatctttttctcttctcattacattttagtctccaatctttcccactctcagcagtcacagttttgcagagcaaaacatttttagaaactgaatatgtgtgagttctatataaaatgaatgtgttagtaacatccatctgctgatcaaggaggcattggatctggtactagaaggtgaaattgattgtagctatcaaagcattttatcaatgtaagtcaagaaaaaagaagaaaactgtgaacctctgatatttttaacataaaaactgttcccaatgagtgttctcttgctgattttgtgttaatgttattgtctatgatttttaagctaatgctaatataaaatctaaaatttcaacatgatgacaacaattcctgtagcctgtttttaccattaggatgtttttgaaaacagatgtcatcttagaaattatatttttaagtgcaaataaatcatcctgacttgaaagtcaacacattttatttttcattccgtagtatcacagaatatgctgcatttagatacaggtttaatttgccagattttctcaaaattctgtatttttatattgctacaactggtttacttaacatgcaattgaattgttatttaaataaattacatttgatggaaaaaaaaaaa

SEQ ID NO: 1280 - DNA, 1569 bp, Homo sapiens
ctaatattgagcaggaaaatgaaaaattgaaggctgaattagaaaaacttaaagctcatcttgggcatcagttgagcatgcactatgaatccaagaccaaaggcacagaaaaaattattgctgaaaatgaaaggcttcgtaaagaacttaaaaaagaaactgatgctgcagagaaattacggatagcaaagaataatttagagatattaaatgagaagatgacagttcaactagaagagactggtaagagattgcagtttgcagaaagcagaggtccacagcttgaaggtgctgacagtaagagctggaaatccattgtggttacaagaatgtatgaaaccaagtwaaaagaattggaaactgatattgccaaaaaaaatcaaagcattactgaccttaaacagcttgtaaaagaagcaacagagagagaacaaaaagttaacaaatacaatgaagaccttgaacaacagattaagattcttaaacatgttcctgaaggtgctgagacagagcaaggccttaaacgggagcttcaagttcttagattagctaatcatcagctggataaagagaaagcagaattaatccatcagatagaagctaacaaggaccaaagtggagctgaaagcaccatacctgatgctgatcaactaaaggaaaaaataaaagatctagagacacagctcaaaatgtcagatctagaaaagcagcatttgaaggaggaaataaagaagctgaaaaaagaactggaaaattttgatccttcattttttgaagaaattgaagatcttaagtataattacaaggaagaagtgaagaagaatattctcttagaagagaaggtaaaaaaactttcagaacaattgggagttgaattaactagccctgttgctgcttctgaagagtttgaagatgaagaagaaagtcctgttaatttccccatttactaaaggtcacctataaactttgtttcatttaactatttattaactttataagttaaatatacttggaaataagcagttctccgaactgtagtatttccttctcactaccttgtacctttatacttagattggaattcttaataaataaaattatatgaaattttcaacttattataaaagtatatacttgaagacttgttacagccatcaaataggcagtgagctctggtgaatttctcwacattcataatgctttaagttttttaaagaatatgagggtaaattcagcaattttaagatttaaaattggagtttatatatacttatttatacatgtgttaagattctcaaatcctatgatatatacacagatgtagacatacacacatataggttatgaggttgagccgtatgttttgttaaatatctagcaaaattaaattgagcttaaactatttaattttgaaaattagtgacattaaattgttgtctttaaattaccactcagttatagtgaagagaatccagcctttgtccaagcttaggagcttactattacttatgtttttatggctagagattaaaattaatttgctggtttttaataaaattttgaataggt

SEQ ID NO: 1281 - DNA, 573 bp, Homo sapiens
cagttgaatacatcatccacaaaccaccaattgccttctgaacatcagaccatactaagttctagggactccagaaattctttaagatcaaatttttcttcaagagaatcagaatcttcccgaagcaatacgcagcctggattttcttacagttcaagtagagatgaagccccaatcataagcaattcagaaagggttgtttcatctcaaagaccatttcaagaatcttctgacaatgaaggtaggcggacaacgaggagattgctgtcacgcatagcttctagcatgtcatctacttttttttcacgaagatctagtcaggattccttgaatacaagatcattgaattctgaaaattcttacgtttctccaagaatcttgacagcttcacagtcccgtagtaatgtaccatcagcttctgaagttcccgataatagggcatctgaagcttctcagggatttagatttcttaggcgaagatggggtttgtcatctcttagccacaatcatagctctgagtcagattcagaaaattttaaccaagaatctgaaggtagaaatacaggaccatgg

SEQ ID NO: 1282 - DNA, 782 bp, Homo sapiens
  misc_feature (35)..(35): n equals a,t,g, or c
gcaacaaatgattctgaggcttgatggctgtctanacttactaacagagatgagcaaatacaagcacaagagcagccctttattgcctcttcttatctttcataatgtttgcttcagtcctgcaaataaacccaagatcctggctaatgaaaaaagtcattactgtgcttgctgcctgtctggaaagtgagaatcaaaatgctcagaggattggagcagctkccctttgggctctgatttacaattatcagaaggcaaaaacagctttgaaaagcccatcagtaaaaagaagagtggatgaagcatactccttagcaaagaaaactttcccaaactcagaagcaaaccctctaaatgcctattatttgaaatgtcttgaaaacctcgtgcagctccttaattcttccctgagtgcccatgggatgcctacaccttgaagctgacagtcatcaacaggggagctaaagttgaagcccagctgtgtgtagcagctgttacctgaagacgtgctacctctctacaaagtgttgatccccttctttcccatgagagagagaactggtgatactccaacaccgtccagttgtggcagctctccagaagtaatagcagctgacaactttctgtgccttttcctttctgttgaaaaggcatagaaagttctgggaacataaacatttttacccttttctatgccatttattttgtaaaaatcctatttaacagttatttaataaaacaatatttttagaaamwaaaaaaaaaaaaattactgcggtccg

SEQ ID NO: 1283 - DNA, 294 bp, Homo sapiens
gctgaaccacctccaaaacgcatcractcccggatattcaaagctgccctttcaaatccactttcagaccgcgctgacctgggccagccactggsggtcatggttgctggtgggggcgattagctgtgtagacccacaggtgcgtgggcctgggccgccggcgcctcctcmccaacgcggggagcctgcccagttcttctggagcctgaaatgcgtgcccctcttggttgcccgctctccacagtggggagggctcacgaggactaggtgacacaagcgagcccctcctggcat

SEQ ID NO: 1284 - DNA, 687 bp, Homo sapiens
  misc_feature (243)..(243): n equals a,t,g, or c
  misc_feature (252)..(252): n equals a,t,g, or c
gctcgacaggtaaaatccctacgtgatccttctgccaaaatgtcgaaatcagaccctgacaaactggccaccgtccgaataacagacagcccagaggagatagtgcagaaattccgcaaggctgtracagacttcacctcggaggtcacctatgacccggctggccgcgctggcgtgtccaacatagtggcggtgcatgccgcggtgacggggctctccgtggaggaagtggtgcgccgcagngcgggcatngaacactgctcgctacaagctggccgtggcagatgctgtgattgagaagtttgccccaattaagcgtgaaattgaaaaactgaagctggacaaggaccatttagagaaggttttacaaattggatcagcaaaagccaaagaattagcatacactgtgtgccaggaggtgaagaaattggtgggttttctataggaagtttcaacgaatcacagcaaggcttttgtgccttgcactccatgcattctgataacggcagctttcctaaaaagaaaaagttatagttttgggacatttaatttggtatagctgattattggctttatttgatgaatattgctttgtagctttgaaatacgacagtgttccaaatcccatcaacaaaatgctgtgaacaacaacaacaaaaaataaatcaagaaggcatarmaaaaaaa

SEQ ID NO: 1285 - DNA, 818 bp, Homo sapiens
gaattcggcacgagaaaaagccataatacaagactctaaagatctggaatgaaacctaataagagactggtaggtcaaatgagagcaaagcatttgaatttgactggattgttttctcactggaaatagtgattctatgagttcatcattaacacattttttgactggaaaactgctataggatcccagggaggactaaatttgaacagaggaagtggacagtgttgcagtctctgttctagctcttggttctagaataggagagttaagagcaccaatttgggatgaagaaagcagaaagcaattatcgatatcaatcaagagagcagaacagcctctctccctccatcctccctctgccctcttctcccttcctccttctctgctttcctttcactctgtgtatgttagctttggccccattccataagccgagataaaaatgctaggcatgataaatttgtgactgttactaacatttaggattttttttttgagatggagtttcactcatgttgcagtgagctgagattgtaccattgcactccagcctgggcaacagagcgagagtctgtctcaaacaaacaaacaaaaaaacaaatgccacgtcaacatcaggacgttaacctttagaccctatatggtctaaaaaggggaggcatgaataatccaccccttgtttagcatatcatcaagaaataaccataaaaatgggcaaccagcagccctgccctgtctatggagtagccattcttttattcctttagtttcttaataaatttgctttcactgtaaaaaaaaaaaaaaaaaaaactcga

SEQ ID NO: 1286 - DNA, 850 bp, Homo sapiens
ccccttcacttgggagtctgacttcattacctcgtctgaaacaaggtgcctccaagctttgggttgatttccagaatcttgttgggttaaacataagtagaagtttgatcataaaggrtgttattaagccggataggtaagcacggtgacaatggcaatagaaatctaatggaaaacgattgaatgacaactacaccaaagtttcatggatgaaactcaccccagaaacttagtgttcaaatcagagtgatacacaattcaaaatgtgattttaaacttctggaaatatgtgtgtttgtgaagatccaaatccaattcagcaacctccatcaggcagaaaccttctgcaatcctcacatgaggaactggktcacagtgtacacagcatggagccattagtgacgttatccaaaggatgagacaagacaaaagttactgtctaataaaaggaaaattaggaacaggaatgctctttaaactcaggaagatcttttggggtgtcaaactggacagcacagaatcattagaaaaattagcttggcgtgagaagagacattgaggtcttctctgtaaaatttacttagatacttgtgaataggactgaaatttatattttgggcactctttacctcagattcagagttcttaggattatttaaaattcatttgctggatgttttcaagtataaacaataagaaaactgcaacttcaacttaaaaggcactgctgtatttgcaccctatattttgacctgtcgttaggtactgttgaatatttttatctgtaagcatttatgaagtgcaaaataaacatgttattatataaaaaaaaaaaaaaagggcggccgct

SEQ ID NO: 1287 - DNA, 500 bp, Homo sapiens
aggacatgagcgttttgtgtggggctgctaggacaggcctggtggggtggggggtgtctaagtcagtttacttgkttcacaggttcccaggcccacccasgtacctagaattggcctccaggatgggacyagaaatctggttttgcatagaaatggctagcagcaggcaccatgccrctgtccactctctgccygcgtctgccccagcacttggcacagcrggacagamgcagagatctgaacccacatctacctggctgctcagtcaactcactctytscaaagcttagaaagtgggaggcacagccagactctgtctcaaaaaaaaaaaaaaaaaaaaggttggttggggcttatactatgtgtgctgcttggcactgtttttttcacttaaaagatattgcaggtttttttcacgtaagtatctgaagaaagacttccttttttttttttttttttttttttttgcttttttgcttttttgagacaaggtcttgctc

SEQ ID NO: 1288 - DNA, 561 bp, Homo sapiens
  misc_feature (506)..(506): n equals a,t,g, or c
  misc_feature (522)..(522): n equals a,t,g, or c
  misc_feature (538)..(538): n equals a,t,g, or c
gaagtactctaaatgagcataaggaagaaaacacaactacagttttcataggagctaaactgcagaacacagacaggattctagaaggacaaatcttatttcatttagcttcttcttaaagccaagatacctgcaaattcaaaccttaggttctgccctctgcggcacccaggcagagcctgactaggaaacttcagagaggagaatgtaaaaggaaatgtagatatttataattgaagtatctttccccttgggtatttctctttctctttttttttttaatgaaaatcagtcaactgaatattttgtttccccgaggaagactcctcagctgtcgattatgctgagcacacgggagaagctctaacagaagatgatgcccgctctggctaatgatcacctgttctgtatcagtgagagacaaggtcttgaagttggcccccttcagctgtgaataggtattaggtacggaatatagctaaaagcatttgtgtgagcctgcaaancaaatgggtgctgganccaattttgtacaggnatatccaaataaatttaattttc

SEQ ID NO: 1289 - DNA, 1667 bp, Homo sapiens
gggaactgccaaaagtgtgcatttggctacagtggactcgactgtaaggacaaatttcagctgatcctcactattgtgggcaccatcgctggcattgtcattctcagcatgataattgcattgattgtcacagcaagatcaaataacaaaacgaagcatattgaagaagagaacttgattgacgaagactttcaaaatctaaaactgcggtcgacaggcttcaccaatcttggagcagaagggagcgtctttcctaaggtcaggataacggcctccagagacagccagatgcaaaatccctattcaagmcacagcagcatgccccgccctgactattagaatcataagaatgtggaacccgccatggcccccaaccaatgtacaagctattatttagagtgtttagaaagactgatggagaagtgagcaccagtaaagatctggmctcggggtttttcttccatctgacatctgccagcctctctgaatggaagttgtgaatgtttgcaacgaatccagctcacttgctaaataagaatctatgacattaaatgtagtagatgctattagcgcttgtcagagaggtggttttcttcaatcagtacaaagtactgagacaatggttagggttgttttcttaattcttttcctggtagggcaacaagaaccatttccaatctagaggaaagctccccagcattgcttgctcctgggcaaacattgctcttgagttaagtgacctaattcccctgggagacatacgcatcaactgtggaggtccgaggggatgagaagggatacccaccacctttcaagggtcacaagctcactctctgacaagtcagaatagggacactgcttctatccctccaatggagagattctggcaacctttgaacagcccagagcttgcaacctagcctcacccaagaagactggaaagagacatatctctcagctttttcaggaggcgtgcctgggaatccaggaactttttgatgctaattagaaggcctggactaaaaatgtccactatggggtgcactctacagtttttgaaatgctaggaggcagaaggggcagagagtaaaaaacatgacctggtagaaggaagagaggcaaaggaaactgggtggggaggatcaattagagaggaggcacctgggatccaccttcttccttaggtcccctcctccatcagcaaaggagcacttctctaatcatgccctcccgaagactggctgggagaaggtttaaaaacaaaaaatccaggagtaagagccttaggtcagtttgaaattggagacaaactgtctggcaaagggtgcgagagggagcttgtgctcaggagtccagccgtccagcctcggggtgtaggtttctgaggtgtgccattggggcctcagccttctctggtgacagaggctcagctgtggccaccaacacacaaccacacacacacaaccacacacacaaatgggggcaaccacatccagtacaagcttttacaaatgttattagtgtccttttttatttctaatgccttgtcctcttaaaagttattttatttgttattattatttgttcttgactgttaattgtgaatggtaatgcaataaagtgcctttgttagatggaaaaaaaaaaaaaaaaaaaaaaaaaaaaaa

SEQ ID NO: 1290 - DNA, 457 bp, Homo sapiens
  misc_feature (429)..(429): n equals a,t,g, or c
  misc_feature (439)..(439): n equals a,t,g, or c
  misc_feature (453)..(453): n equals a,t,g, or c
ttcacagctaggagtccctgggaatacacgaacctgtgcagtagacagttgggggccagcttgttggagactgttcttattttcttcttcctttcagaatttcagctgatcctcactattgtgggcaccatcgctggcattgtcattctcagcatgataattgcattgattgtsacagcaagatcaaataacaaaacgaagcatattgaagaagagaacttgattgacgaagactttcaaaatctaaaactgcggtcgacaggcttcaccaatcttggagcagaagggagcgtctttcctaaggtcaggataacggcctccagagacagccagatgcaaaatccctattcaagccacactcaaaaaaaaaaaaaaaaaaaaaaaaaaaaaaaaaaaaaaaaaaaaaaaaaaaaaaaaaaaaaaaaaaanaaaaaaaaanaaaaaaaaaaaaangggc

SEQ ID NO: 1291 - DNA, 723 bp, Homo sapiens
ttttttttccawgtacwtgaaaaatccattctcttggtgtcactacmagtctgcttagttttaagtgaaattccttttatgtctacttggtttttacttgtgtcaacatttagtatgctacctcttctatwgaaggatgaactcctaatgccctctgttgtgacaacaatggcattttttatagcttgtgtaacttccttttcaatatttgaaaagacttctgaagaagaactgcagttgaaatccttttccatttctgtgaggaaatatcttccatgttttacatttctttccagaattatacaatatttgtttcttatctcagtcatcactatggtgcttctgacgttgatgactgtcacactggatcctcctcagaaactaccggacttgttttctgtattggtgtgttttgtatcttgcttgaacttcctgttcttcttggtatactttaacattattattatgtgggattccaaaagtggaagaaatcagaagaaaatcagctagctgtattcctaaacaaattgtttcctaaacaaatgtgaaaatgtgaacagtgctgaaaggttttgtgaactttttgctatgtataaatgaaattaccattttgagaaccatggaaccacaggaaaggaaatggtgaaaagtcattgttgtctacacaaaataaatgtatatggagaccaaaraaaaaaaaaaaaaaaaaaaaaaaaaaaaaaa

SEQ ID NO: 1292 - DNA, 331 bp, Homo sapiens
cggacgcgtgggcgacccacgcgtccggctcaggcacgtggccacctttgaaccagggattttgatcgggggactctcattggcccggccccgttgggttccttgtcccctggcccccacgggagtgaggatggcgccatggtggagagcaccaccaggaccacgtggagttagggagagactgtccccctaagaaaaacataggacccctgcaagcccaaccacctctcccattagaatttttcagtcaggcacaatgtcaaaagttcagcttaggktggaracaaatttgcargacaggtttcccaraatcatccacattaccacctac

SEQ ID NO: 1293 - DNA, 347 bp, Homo sapiens
  misc_feature (290)..(290): n equals a,t,g, or c
  misc_feature (328)..(328): n equals a,t,g, or c
gttctagcaagtgtggttttagctgtattagccagattgggcggccgggagtggtgggggtgccgggtggaaggctctgggcggggtctcaggaccctccttttcttggcggggatcgggcttgtggtgccgctccccgtaatgtacggaggaagagggaaagggctctggccccctcggcgtcatgtcttcggtgctggcggcttcccatccgctggttctatcctcaaacgccgggacaccgggaatctcggaggaagggacaaccgaggattccagctggcttcctncatcggggtgcttcacaatttcttcatttgattttcangtcttgcggacgctgttat

SEQ ID NO: 1294 - DNA, 918 bp, Homo sapiens
  misc_feature (6)..(6): n equals a,t,g, or c
  misc_feature (52)..(52): n equals a,t,g, or c
  misc_feature (182)..(182): n equals a,t,g, or c
  misc_feature (822)..(822): n equals a,t,g, or c
  misc_feature (866)..(866): n equals a,t,g, or c
  misc_feature (878)..(878): n equals a,t,g, or c
  misc_feature (916)..(916): n equals a,t,g, or c
gacacnaaccctcactaaagggaacaaaagctggagctccaccgcggtgcgnccgctctagaactagtggatcccccgggctgcaggaattcggcacgagcctgtcaccatccccagccgttagccatggcttcggttctggctcccggtcagccccggtcgctggactcctccaagcacangctggaggtgcacaccatctccgacacctccagcccggaggccgcagagaaagataaaagccagcaggggaagaatgaggacgtgggcgccgaggacccgtctaagaagaagcggcaaaggcggcagggactcactttaccagccagcagctccaggagctggaggccactttccagaggaaccgctacccggacatgtccacacgcgaagaaatcgctgtgtggaccaaccttacggaagcccgagtccgggtttggttcaagaatcgtcgggccaaatggagaaagagggagcgcaaccagcaggccgagctatgcaagaatggcttcgggccgcagttcaatgggctcatgcagccctacgacgacatgtacccaggctattcctacaacaactgggccgccaagggccttacatccgcctccctatccaccaagagcttccccttcttcaactctatgaacgtcaaccccctgtcatcacagagcatgttttccccacccaactctatctsgtccatgagcatgtsgtccagcatggtgccctcagcagtgacaggcgtcccgggctccagtctcaacagcctgaataacttgaacaacctgagtagcccgycgctgaattccgcggtgccgacgnctgcctgtccttacgcgccgccgacttcctccgtatgtttatanggacacgtgtantcgagcctggccagcctgagactgaaagcaaagcagcnct

SEQ ID NO: 1295 - DNA, 3211 bp, Homo sapiens
  misc_feature (514)..(514): n equals a,t,g, or c
gggattacaggcatgatgcgccgcacttggcctagtgttttcttaactgtgaaattcccattcatttcttgaatgaggctacatcttatggacagagcaaagttattgtcctacagattcttaaaactataattatggctattgcatgaaatttaaatagattttattatgtctgcaaatctctgggcttttatttttctggaaaatataggagctttaatcaaaacataatagttctttttgtaattccatgttaataaaaacaaatactagcaattgcttgaattttaatgaatatttaaaagttcaagagccacggaaatcacttccagagataagagttccctttctaaatagaacacatttttaaaaaataagttatgtttgctactaaaacatttacactgktagactattatgtgcatgttgccaagactcttaagtaacttggatatcaactgtgaagggcctacctctaaaaagtaacaggtcatacaaatacmaatgtaactgntaaaaattccactggattcttgcatatttgcaagattagattattcaaaagaaatttcagtgctaaaattaaccagcaacataagttctatgggctttgaaaattgttctcatctttttaaagttgatgcattttcaatcctgcttacacaggctgttcatttggataagtaaataaaatgtctaaggtgaacttggcattatgtggagatgttggaccgttatagagcaatacaaattcctatgctgtcattctgttttctgcaaatgcaaacgtgcttatatggtcaacagtgcaaaaatagggtagttggctgcatatttagggtattacctaagcatttgttctctaacgttgctctactagaatgatttttttcttgcatcttttcacattaatgatgttctttatataactttcatgcgattatttagttttttaaattaataaagtgaatttaagaaatattgaaataaacatctaagtaattgccattttaaacccttgtttcttactgtgggagagggggaaatacagcactcatttcttgtttttaatttgcagaagtaagtgaaaatctatgtaaaatcaaaccaaaagagttggactgagtgtgtattgtcttgagattaagtgacaaatagtaaagtgttactgagtaattaagcccatgtattttttttttgtgagttgaaaatctttgaaatatgtgataaccgaatgtcaaaagttcctaaactctaacagtgcaggttgttcactgtaacgaggtaactcatatttgctggttacataaactacaagtactgctctcacaatatgggactttgaactgtgatgtagttcaacagttgccggcatcctctcagctgatacgctgcgaatattttgggttagacttgcagccagatgcagttttgcaacccaagaaaaaagttgaacctatgatcaaaaactgctcccaagatgaacctggaaaaaaatcagctaagctcccttggcgatctgcaggaacactagtaatgactggaattactccgtgatctttgatgactattacacataacagcactctagcaccttttcttactggcatggacttcctcatggactgctacttcatggatgatagcttcattgctttgggtagggatttaaggtagtcaaggggaaaatacgcattttattacaggtcttaacatcaggcaactttcaactttaaaaccctttgtgaaaaatgtggttatagcactatagctctgattttaggatggttaaatgttatattcattgttggcytaccttatcaaactgtgccattaatcctttcacagacataggtaaggaagagaacaaccagtggattcaggggacaattatctatctccaaataataggcttttatttcttgcagctaactttttcagtgattctagcagatgccatctagtacatccttgatcttgtttstttcgtgagagatctcgccatggcagcatcttgttaagtaagtgtaattgcacatgcacaaaagacttaactagctttacatttagcagtcagttggttagattaggtttcatagtaaatgaataggaatagaaagaataggaagtgtttttattttccagtagtaattccgtggattccatttgacccagtttactatcagttcagttcaggtagatttggttcaacttttggtggtttttggctctaggatattcttgactttaatatcctagaacttactgagtcttcccttcaataaatacacttctcacatacctctaatcctatgcttccttgaaacaataatgctagctgagttgtttactaaggattattataagggcctgaaggtgtgggagtggagattaattaaaacctttatgttctccaatataagggaaaagcaggttggtactacttctgattaggcagaaaacaccaggattccttaagtgatccttgaaatggttattgttttctgccttgtcacatttgccactgtgccctttaaaacgatgtggaaacctcaggtttgtggacagcacaggtggaatgacatcttgtgcttcctgaggctcccctctaccaggcacattagcttagtgcttcagatgtcagcccaagtccttgttacctccttttcctgctgcccagggaagagtgtgtgtgctggagctggagcgcttgcactcttcaggtgactattctcacctccatttcctccacatgcattaggtgaaactgaggtctaagcctcctgcaaggtctacattttaaggactcacacatcaggctctcagaaatgtacacaggtattagttctgtttgttctaaaggaaatgtgggtatctctcaggccaggacttagtgactagttttcgctagacagcaggttaatacctagatctcatttaaaaaaaaaaaaaaaaaaacaggattaaagggaactgatcaggtttgttgagttttttagcctaattccaaagcatggaagagtgctctaggtaggaaagaaagctttttcttacgatttgtagctacctactgtgcctgacttggtgcctgtgtgaggattaagcccttagtctgctcttgcaattattcaaatgacaaattaaatttgcttttgtaataacaataaaagttgtcatcttcccttttgaaaaaaaaaaaaaaaaaaaaaag

SEQ ID NO: 1296 - DNA, 790 bp, Homo sapiens
  misc_feature (17)..(17): n equals a,t,g, or c
tgaggattagtgcagtnttcccaagggaaaatatgatcatagctagtgggcttaccttggcagtacttagactgtgtatcctttgaagtgtccttatctagggatggtttccatgaaaaccatacaggttttctaaatgacacagtctgggtaactgcctagcttatgtaatcatgtgaggggttaataatctctagggtgtagttacactgatgacttttcaaggttcccmgggcctgaccaaaattttggcttctcttaatacaaagtggcacctggaattttagctctgtgtacattgatattgggccccaaatgggtttctgtgggatgcaaccccagaaagggtactctgatagtactggagaaggtttactgcttgtcctgtcatcgtagttcatgtttttttccccaaggccaaagattgggctgggattggggtggtagtgtatttgaatgatgctggagataaccaaagccaacagtctttgccagagctgggctggtggtatttaactgtctttgagttaaatgtaaagtttttaataaatacccagaatccattaactgctggaggggtaaagtgaagctctgttgtaaaataaagctgattcccattatgcgtggtcctgtatacacaggctgtgggtgaccattatggaaccaaaaaatacttatttgttattttgtgctatagaataggaacttcaggggtggatacctatgctgtcaggaatgcttgttataagaattaattaaaacactttgcttaattattaaaaaaaaaaaa

SEQ ID NO: 1297 - DNA, 391 bp, Homo sapiens
  misc_feature (360)..(360): n equals a,t,g, or c
cggcacgagcggcacgagcggcacgagggaatttctaggttttccccttgatcccagcagggttgtactgcctaagagagcttggaaagggatagagaagtctgacccaaatttgcggagsgactgagtgtatgctgccccctttctgggccttggcttcttcctcaatcatctaggcacagtcckatgactgcctgtttttgaggatgtgggaagggtctgcaaatacagtgctttcccattgacacacgctggtgaggatgcaagctccctggcaccagcagtgagggctcagattgcaagagtaaaaacttcatcactgggaagagaagtctgcaggggactggaagtgatctgaanattctgaaataactcttcctctctctgcaga

SEQ ID NO: 1298 - DNA, 392 bp, Homo sapiens
gggaaaggagtgtttcccagacagcccagcayctgcaggggatggagggcacataagtttgaatataaagtttaacaaatcaggggcagggccagaggaaccaagtccaagctcttgggttcaactataaagtaccatggaagtttgaaaactgaaagagatcaaaaagctgttagaagaaaacgcaggcatcaatctttatgaccttcgattaggcagtggtttcttagatatgacaccaaaagcaaagcaacaaaagaaagaaaacttaaagtggatgtcatcagaatgaaaaactcttgtgcttcaaaggataccatcacattttataattcatagrtctgataaaggrcttgtrttaaggaawtmcaaggacctccacctccattacc

SEQ ID NO: 1299 - DNA, 129 bp, Homo sapiens
agtgtaagggtagccatctraggaccagtgctacaccaaagaatactgataagtgcttctggtgtgggagaaatraggrttatttatatagggcaaaacagaggtgttgaacaggattacagcattttt

SEQ ID NO: 1300 - DNA, 444 bp, Homo sapiens
  misc_feature (25)..(25): n equals a,t,g, or c
  misc_feature (32)..(32): n equals a,t,g, or c
  misc_feature (419)..(419): n equals a,t,g, or c
  misc_feature (424)..(424): n equals a,t,g, or c
  misc_feature (428)..(428): n equals a,t,g, or c
gtccgggagcagtggttggagttcncagagtnatgacgtggagtggctgggcctgggcagatgtgcacatcgtctgtactctggatccctggcccagaaggactcagatccttacttctaggaattttcatttaatgaacattatgagaattggagggaaggagaattccctttacagaatcaacccaagttttctgcagggatagggagcccttgtagtaagttatccccatagaaatgaaaacccagtctccaccatggctgttcttactctctcagagaagctctgataaatgaatcttcctggatatcctgatcattttcattttccacgtgctccattcctgctgggaaccccagttggcggacacaggcagatggccaggggaccttccacaaagggccacagcctgtggccngccantcantgtgcccttccttgtg

SEQ ID NO: 1301 - DNA, 673 bp, Homo sapiens
  misc_feature (560)..(560): n equals a,t,g, or c
gcacagtttctctaatcatggtcaacaaagatctgacagtgcatcgtccctaaacgacccatacttgcctcactgacaccatgtggcccacttcccatctataatctatgtctgggtgtgaagcccttcccatatgatcccccgaatggaacttcacaagttcgaattcactgggtcacagtgtgatagcgtgaagatgggaggacgttaagggaaggctatgggtgagttgggaaatgtgttaggcagggtcagagattaccacatcctaaaaacaacacttaaggcgggagatgacaaaacaatcaatgaataacatgactttttccagtgaaagtgccatatctaatccttttccatttttgttctctgagcttctttcttagggaagatccttcttgagaagcccctgctgagtattaggaaaatgcatttcaggacctctcatcaacacaccctctttctttaccacaaccacatatatgggggcataactcaacatgtgtaaaagacaatcttctgcttttcactgaacctccaggaattcaggacaataaayntctacatgsagaccaacaggtgagtttttctgccccttctttcataacaccgttcttccctagtgaagtccacacacatccttacatggcagctgtgggtatatcaactggtc

SEQ ID NO: 1302 - DNA, 372 bp, Homo sapiens
  misc_feature (356)..(356): n equals a,t,g, or c
gccagaataatattctcttatttgcatgtatctaccacattttatttattcattcagcgacgggcagcagcctgtagatagttttgttttcatgtattgaatggtcctttcccccagtggagtgagtaaatgcatccggaagcagaattctgttgtttcccattcatcactgtgtgccaggtgtctgagaagggggtcttataggagcccacgcaraaaccaagctcacctcagtctgggtgtggggcagtcagggaaggcattctggaaaatgtagctgactcgaaataagcacctattgraaatagtgtgcygagccctggaacattaaaaatgtgttcctatgtggaaatcanaaatgtatgggtccca

SEQ ID NO: 1303 - DNA, 1204 bp, Homo sapiens
  misc_feature (13)..(14): n equals a,t,g, or c
aagcttcctttgnnctagcccggccgccaccgcggtgaacagacagctcccaggttcccaattttattaatgccacgctaccacctcaggagcgcatcactgctcaggagattgacagctacttacgccgggagctgatctacaagcggaatgagagaatagggaagcgggtgaaggcccttttggaggagttccctgacaaaggcttcttctttgcctttggagctgcttcacagtagccttgaaaatcaggagccttgaactacagtagctgtgaaaactgtttgcctaatggttactggaggggacagaatgggttcaaagttcctccaaagctccatccttaaagaatcatcactatttgacatgtccaatagttccctgaaatttccattcccaagcttgtcttcatttgacctgactcagagcttgctctgtgtgaatagccctattcttagggtgtgtgttgaaaacaatcagtagcagctgtttaacatcatagttgctggaaatagcaatattaattgaagcttacaaggggctgcccaaaaaacttaaaagcaaaatcccatagggggtatagaaaagctctaaaatattcctagagagtcacatgcatgagaagagctgtgcacatgcccaggaaagacctgagaaggtcctaatctctcacctctggctgatcttgaggctctgtgtaagcagagtgtgaaagctaaggcaaagtcataaattgcctgttgaagcatcaaatacatgcccccaaactcacacagcccctctgcaaaggttgggaaacttgcaaggaatttaaggaaatctctgttcagtcattagccagccactaaactaactgagcagatccttcagtgatcacacacaacaaagaatacagactttacagacttagtcctagaaaatcactacacaaacagcaacaacaatgcacctgggactaagggagaggagatgagttccagagttggtatattatttaaatgtctagttttcaataaaaacaattataagacacagagcaaaactagaaagtatggcccatacccagggaaaaacaagcaaccaatagaagctgtccttgaggaagttaatatcttggacttactagaaaatgactttaacmctagtattataaatatgttcmaaaaactaaaagaggccaggtgcggaggctcacgcctataat

SEQ ID NO: 1304 - DNA, 474 bp, Homo sapiens
  misc_feature (450)..(450): n equals a,t,g, or c
aagtgtgcaaaatagcattatttctaaaaagacaatgtatatatcttatttaaaaactattgttagaaaatgctaatgatcatttgagctttcagtaagttgtaatctttttggtggtagagggtctcgccttgatgttgatggctgctgactgaatcagggtgatggttgctgaaggttgaggtggctgtggctattaaaataaggcaacaatgaagtttgccacattgactcttcctttcaccaaagattcctctgtagcatgtgacactgtttgatagcatattccccaccacagatcttctttcagaactgggggtgggacctggggcacttgcagtaatggttctaaaccctttgttgtcatttcaacaatgtggcacagcatctttcaccagragttggattccatctcaaggaaaccactttctttggcttcagccgtaaganggcaattcccccgtttcaagtttt

SEQ ID NO: 1305 - DNA, 450 bp, Homo sapiens
  misc_feature (386)..(386): n equals a,t,g, or c
  misc_feature (407)..(407): n equals a,t,g, or c
gcgaaggcagaatcattttttctacctgtctgaatcagcactttgtaagtttacataaaattaaggattgtgatttctaagataggcatgctttgcaaatatttctctataaaagtggaagcctctttcccatagtgctcactttaaggctttctgtaggcctgccgataagattcactgctgttcaggtacataagatgtaatgtaattggatgcacatgctgggctttgtaaataaaatgagattgacacccagcaattatctcatttatctgatttacattgtaaaatcaggatctacactattgattagagcataattagttaattatgaacagggaaatacaaagttacatggagcttgagctcagcargttgtactgctnaaaaatttccaagggcatgancagatggaaatcagtttattaaagaacaaagcagacatgtttc

SEQ ID NO: 1306 - DNA, 393 bp, Homo sapiens
  misc_feature (379)..(379): n equals a,t,g, or c
aaagctggtacgcctgcaggtaccggtccggaattcccgggtcgacccacgcgtccgctaagattagaacagctcataggagagtcatgattttgaatcacccagataaaggtggatctccttacgtagcagccaaaataaatgaagcaaaagacttgctagaaacaaccaccaaacattgatgcttaaggaccacactgaaggaaaaaaaaagaggggacttcraaaaaaaaaaaagccctgcaaaatattctaaaacatggtcttcttaattttctatatggattgaccacagtcttatcttccaccattaagctgtataacaataaaatgttaatagtcttgctttttattatcttttaaagatctcmtacaaaanaaaaaaaagggcgg

SEQ ID NO: 1307 - DNA, 627 bp, Homo sapiens
tgtcctagagatcctgagaattacttttaataaaatcatttttttgctgttattaaaactaacctgaattgcctaaaaccaagaactctgcttgataaaataagcatagttttaggaacagccatgcagatataaattttatcaacactttatacataatttgggacttatatttaaatgtaatatttgatgcttataaaagggtaaatggggaatgcaaataaattatcaagcataataactcatcacctaacttaagaataacattatgagtgcttgtattttatctatttgagctcttctcctatctttgccgacccccccgctctctttttaatagatttgttcgaatgtagaaagacctaaaatacatatgtatccctaaagtgacttattttatagttttctttctttttgaacttcaaaaaaattgtatcatactctatgtagtctaaggatttggtttttttcactcaacatgtctctagaattcacaagttttattgttttatagctgtcattttcattgatgtatatttcattgttgggttatacaacatattgttaaggaatacatacatatataataaattatacattttttaaaaaaaaaaaaaaaaaaaaaaa

SEQ ID NO: 1308 - DNA, 381 bp, Homo sapiens
  misc_feature (339)..(339): n equals a,t,g, or c
  misc_feature (343)..(343): n equals a,t,g, or c
  misc_feature (352)..(352): n equals a,t,g, or c
gtgggccttagggtacagcagcgccgycagcgtttggktgcatggcgccgggggagggcgccctaaccgagaagctgcttaatacaaagagctccaggctcctggcggttcaccaggtctaaacagccgggctttatttgtgggggcgattgaaaaaattgagggtcaagattggggtgctgtgcaaataaatgcgttaatactgttctttttcttctttctttgcagtagcctctagttcgttagtcaaaacgttgaaaaaaaatactgctttgccctgggaaataataaccctgccaaatactccacttgttggaaacaaaagattttatggaactncttnaaaaaaaanctccacatgcccattttttttacccgttt

SEQ ID NO: 1309 - DNA, 509 bp, Homo sapiens
gacattgtaaccgcagattcagcccaatctggttcaactttgtgtaataaaatggcgagttgtttttcagttgtcgtggacccccaggttgcaagttacataccctgggcatgtccagatgaacgaagcgtgcaaatccacgtggaacctaagtgctcagactgaggaacagggactgagttaagaagtggacaccacgtggcatgatccttgatccaatcagattgagccctggcgtgatccagtcagatcaagcctcctgaatcccctcattacaagatccaatcatatcatgcctcactaccctctgtatataaaatctgccccagcctccaacttggagagacagatttgggccagactcctgtgtccttgcttggctgccttgcaataaatttttctctctacaaaaccccagtgcttcagtgtttggttttccaatgtgagccagggaactgacccaatttagttcggcaacaacataagcaaaatgttttcccgagttctct

SEQ ID NO: 1310 - DNA, 452 bp, Homo sapiens
ggcagaggtgacaggtggtgggggatgagcagggacgggccagttttgtaatctgggasagttttcaagatgtattccctctctgacatctattaactagcacagagtcttcaggatattattaggtgctcaataaaagtttattgtatgagaataagcaatattttctttatctctcatttggttgtatctttccctactttgttatttcattttttcttacattttatcytygtattctgacactatttcttagttttgcttctgttttccccagaagagtactttggttaaaatgtatcacttgcaaaatagaataacacaccgccatgtagtgttgcttcaggttataattttccatatatgtacagtatgccaaaaaggatgctgcttctagagagaatgtttaaaactcacttctctagatttttttaaagttactttagtgtttc

SEQ ID NO: 1311 - DNA, 539 bp, Homo sapiens
gatcacttcatgttatgaagctagtatagccttcacaccatacagrctaatctcactgatgaataraagtatgtaattgttaattatyaatrttagcaacttgaatctacaggtgaytatraagtatttttttagtttgaagatagttttttccaraaatccaaggatggcttaatcatatggaataatcaagggcaaagccaagccaagaaggcttgaaaraagaacmctrgagatatattataatgctctaataattaaaatggtgtggtattaggttatgaatggatraacaraccaatggaacaaaattgcgaagccagatagaaatcaaccagtctgtggatctattaatttatgggaatgtcttttgtgagatatatcaattaatgggaaaaagactgtttaaaacataattcagtgacagttgactgtatggaagaaaacaaaattaaacccttatttcatttccagatggatttaagactcatgtaaaaaagtaaaactttgaaactcagagaacaaaaaaaaaaaaaaaa

SEQ ID NO: 1312 - DNA, 432 bp, Homo sapiens
  misc_feature (400)..(400): n equals a,t,g, or c
  misc_feature (412)..(412): n equals a,t,g, or c
gcaccagtggcatcgggaccagccccagtttgaggtcgctgcagagcctgctgggccccagttccaagttccgccatgctcagggcactgtcctgcaccgagacagccacatcaccaacctcaaggggctcaacctcaccacacctggtgagagtgacggcttctgtgccaacaagctgcgtgtggccgtgccgctgctcagcagcgsgsgacaggtggctgtscttgagctacggaagcctggccgcctgcccgacacggcactgcccacgctgcagaatggggcagctgtgactgatctggcctgggacccctttgacccccatcgcctcgctgtggctggtgaggacgccagkattcgactttggsgggtacccgcaraagggcytkgaagargtgntcaccamgscanaaactgtgcttacaaggcca

SEQ ID NO: 1313 - DNA, 421 bp, Homo sapiens
  misc_feature (11)..(12): n equals a,t,g, or c
  misc_feature (294)..(294): n equals a,t,g, or c
  misc_feature (344)..(344): n equals a,t,g, or c
tagcagccccnntcttttaaggcctgactacagaatccagcagcttttgtctggagagctggactgaagagaggcatagctggagacccatagctggccctggccagaamcagggagagtgaaaggctggaatagccaaggccagagcaaggctaataggtagagcaacagcttacaggtgtgggggtggcagatactggcacccttgaaatggattcctcatgcccacgcttcactattcttctctgtggctaggggayttatggataaaccaaaattacagttaaaaaccanccataggccaggcacagtgactcacgcctttaatatcagcactttgggangacaaggtgggcggatcacctgaagatctggaatttgagaccagcctggccaacatggcgaaaacccatctctacta

SEQ ID NO: 1314 - DNA, 815 bp, Homo sapiens
  misc_feature (217)..(217): n equals a,t,g, or c
  misc_feature (223)..(223): n equals a,t,g, or c
cagacctgtgtctgatactgratacagtgccatgggaccctgctccaatctaactgcctacaacctgcccrtccccctgctgcagggatgttgctgctacctcgggaggctctctgagactggtgtctggtcttagatgctgcacatagtacctggtgctagggtctaggggctgcccaaagcccagcaggaacagctactactcatcctgcagagnccttgncccagaccagctttccatccaaagcctcacctggtttccatgtccatctcaacagtctggccttcctgtgactgtagcctggcagccacaccctcagtaatcccrcacagtgagtccagcttctctgggagcttggccttcagttagcccagtccatgagagggcagggtaatgaggaggagtaaaggacctatcttctctgtccacataaggaagttgggaccacaaggtcttttatctccttgttactccccaaccccaccataacctcctactcagcacacagctttatcctggtagattataaggtgagcttccagaacctggcaggaggctggtgtatccccctgcacagasggaagtgtatctgaatgttgtgtatgtggctgatatggaagacatacatgtatgcaatccatcagcgtttaaagaagaagattggctccagttckgaggaggaggaggaagattacagatctattctgagtattttttagagagttaatatttatatttttagtaattttctggtagaaggaaattgcacaataaaatgatttggtttggwtwgaaaaaaaaaaaaaaaaaaaaa

SEQ ID NO: 1315 - DNA, 529 bp, Homo sapiens
tcagtgcttttcagtttgtcaaagagyggatctcaaaatcttgcttaaagggtaaytgagatgtagcagatttatttacttagtcatggaaagaaaaaaattcagtcaaaagctaaagatttccttttgattgaagacagattggttctgtggccttggaactttcccagacttaatggggaaacatcatttctagattagcatactctttggtttaaatttaatatatacatttaatgttacttagggatacttttatattttgcatatataaagcctcatatataaagccttatttctgatgctcttagatttctgaggagtgagatgattaagttgtattcattagtgtattggtatttcttcacatccagtgaaattggaratatgttgtatgttagaagagcattctttaaattgtgttgctttgaacatgtgtaccttttctagattcagtaatcccttccccccrkcmtytggagtatgaaacctttagagtcacaataaaatgtaactaaagaaaaaaaaa

SEQ ID NO: 1316 - DNA, 921 bp, Homo sapiens
  misc_feature (88)..(88): n equals a,t,g, or c
  misc_feature (207)..(207): n equals a,t,g, or c
tagtaattatggactttaaaaactatccatatataccattctaacaagggactctgatatgctcagagtagaggtatctttctatggntcctcaaatctcccagggaattcactatcaccagaatatagtctcatgttccaaagttagaaacaagcatatagtgagaattcatttggctatgtcttaaaatattatttgttttcctntttttgacagagtgaccttaaacctgaaagtggtagcaaggtaagaagtcagcggtttgtcttgtgtttatatttgtgtttactcaagtaggactgctttttgaaacattttttcttaacaagagaagttacaaagtatttactttttccccaagcaaaaatcctatttttctggaatttggactcagtatcatctcaggaataaaagaatagctgagtcttgaacagtaggaaacattttgctaatgcctttatacgcttttttttttaactgaaactccaaagctatgccctgtgtggttttgaaagaaattagtttatgggttcagttgtggaaaaatatcttacttttacattatgtaggacaagtgataataattgtttctgtgttggaaaaaaataattgcaaagttgttttgtttcttataggttatcttctttatctgtaatacagaggcctttctgtacttattttccaaatttaattcttttttcctgtaggctcaaacaggcccacacccttcccggttacttagtaatacagcgaaaacaaaagactaagtatttgagtgtttgaaaactttaatgtgtactacattgcataccaggaagaaaatatggaaccattttctgcctcccacagcyargtggktcattcccttattccctaacaattttccttaatttctgtccttcagatagctggtacacagc

SEQ ID NO: 1317 - DNA, 802 bp, Homo sapiens
acgacggttaacatccacgtgggcgggggtgggcggctgcggccagccaaggcccaggtccggttgaaccaccctgctctcttggcctccacacaggaatctatgggccttcacagggcccaggggctcctgatgcccccttccacatgtgagccaggacatgaggcttccctgaagcaaggatttcagccagatgccatagaccctcagaacttgacctggaagtccagacactgaacgcaggcctcaaaactgctgcggccttccaactcctggtatctgcatcggcgaatggcccttcttgccttgatccacagggatggggaagggaatgtcattaatgttttgttaatactgattctttcatgcaatgatgtgtattttcccattctggaggctgtgggagatgacaagacaatgaatgggaaggtctgacacagaacaaatcagcggttctgaaagcttggggaatctcagactcctttgagaattattggaaaatggacccmctawaacttggcgtgtgtgtgaactgcttgatgcccatccaggaaagccaagttaagaagctttgcttcaagtagacactagaaatccattcccttggcaatttatacagttcacgtctcccaccatccgttcatctcacccaccctgccatctctccacctatccatctggctattgctccatctagctttcccgctccatctacccatcttccaatccatcatctcacgtatctgccttgcttatccaactgtctgccttattcacccacccatccctttatcattctaac

SEQ ID NO: 1318 - DNA, 379 bp, Homo sapiens
  misc_feature (175)..(175): n equals a,t,g, or c
  misc_feature (182)..(182): n equals a,t,g, or c
acaaaaaaaaaaaaaaaaaaaaaaaaaattcaggccgttactggagagtcttggggaaatttttttttaaaatgtctgaaaatttttccacttaatccattgatgaatttcaaagcaattgtattttttcatacaagcctgccactgtgagcctgttcttattgtatctgagctntttgtgntgcctgaattttgtctcttaatttcttttcagcttcatagtgwttcattcttcaattgtgttggagggaaaaataatggtagaaactaaaacacactttgaccttttttttccaatttgtagatggcatttggtaggcttttgggagtaatagcctatttcaaaaattaaaaggtgatgcaaaattattgtgggagt

SEQ ID NO: 1319 - DNA, 1444 bp, Homo sapiens
  misc_feature (948)..(948): n equals a,t,g, or c
acccacgcgtccgctaaaatatccccccaaaccccagcaatccaaaacacttctggtcctaagcattttgagtaggggatactcactcaacctgtatatttgtgctaatacatgactcattagaatgattctttgtaaacttaatattttaaaagtacagcacttctgtagtatggaaggtttcagtaataattatattcattcagtagtctcttaccattatctcccagatggaaaaagaggactaatgtggaaaccccagagggtgtccagttggaccagggagatattagacacttaacagtattttcagtctgtccatctctttattccaatgtgagaaatggaagtgtttttttttttacgtttattggctcttcatatttctctacattatttttaatgtgcagtttcttcaattggttagtatttccatactatttgcaactttatggcctttaaatataggacatattatatagcagaaattttgactttaaatcctcttgagtagtatattttgagaagaaaagctatactgctcttctggatggtttccatcctttatttaggtcttttctttttgaattcaagtgttttgtatgcttagaaagtagacatgtataatattgagatcggttatttctgagctggaaattggaaactttggaaactcaggaaattgctctgacaatgttttaactgctctcaatttaagaaaatgacgaaatgtataaaaaagacaaaaataacgtgtgctgttttttccaagtgctttttctaagtgcttttccattgtgcaatgaggtgaagtttggtaatttttcggtgtagtagttaaatattgctcaatttttatttacatgtaaagaaaacagatttaaatgtttatgtggccaaaaggtgtcatttaaaaggtaaaataagtttatgtagaatgtatgttcnatggtgcttatttttaaaatgtaattcaagtttacagtattacttaatgcttctttacagatttaatagagaaacaaggctagaacacatctacatcctgaagagccgtttataacttcatattatatgatgacaaagttcattattttccttaaagttgagcaattgacttttatggtccaatgatgaacttattattaataaatgattgagttaactgtgaggcttctcattaaaatacaatattgcagctatcagttggagaatatattataaaattttcagacagtatatcagaaaaatgtttttatttgtactgtatagaaaatgtaattttgctgttaactctgtactttttaaattgaaaatgttttataaatttgcttttaaattttcttatgaagccatttgcaaattacatacttaatttaataaaatactttagccacaaaaaaaaaaaaaaaaaaaaaaaaaaaaaaaaaaaaaaaaactcgag

SEQ ID NO: 1320 - DNA, 353 bp, Homo sapiens
atgaaactgaactatcttctttttctttttattccttctgggataaaggagaagtaattgtaggaaaggttatgaaaccattttacggaaaagtagttagaaattaagccaggacaatgtcattaagtcttcagtgacatccctaggtacagcttttgtgttttcatctccttttgtgttttcaagtgaatagcagaaaaaccctttaatggtgtgcttcctgtactgggctacacagtggtgtwccaaggtatatatgaaaccacagtgtaaacaaggcttgtcttcccaagacatcaattttgatagaaaawtgtgtgtgttcatgtgtgtgtgtgtgtctgggtgtaatg

SEQ ID NO: 1321 - DNA, 927 bp, Homo sapiens
  misc_feature (729)..(729): n equals a,t,g, or c
  misc_feature (773)..(773): n equals a,t,g, or c
  misc_feature (889)..(889): n equals a,t,g, or c
  misc_feature (903)..(903): n equals a,t,g, or c
ttttgcaaatataacaataatagtaataacacaattttgtcatttaaaaaattacccattcatttttcaaacttgactgttagtggaggggtatatgtgtgtctgtgtttccacttatgtaatggctgtctcattatttaaattaatttataattatttttcagtgtacagagtgattagcggcttgtaatgctgttacaatgtagcattgtaatgtaagatgaaggaaaaattaggatttaggtgggatttttaaaaatttatcaattcagctactttttaaaagaagtcctattccaattggacctttaaaatttttattttggtaatatttcmacttargrtgtwttaaaactrgcmattctgtggtaatcagtgtactagtcaacattaaaatgctattttgggttgtcttcttttggtaacatattctgacactaagcaacatgttttacaatttagtggratgaacctacaaattcataaatgcttctctttattttgaaggaaaaagatacttgtctgtatacgacataattgttttactcttcagaatgtgaaagttatattaatcactaaacactttaagaagtggttctggtaggatatcagtagtcagacttaattgaaaaactgtcagcgtctgttttgtatatagggattaaagaggataactttattttttcctttggaaagaataattcttttggaattttggaattttgattntcttagatgactttttagcaatttaatgataataatttctattnttcttccaaaactatggcatgttatagtagatcttactattaaagatctgtgtatattttaaactgtttttttcctattctgctttttgctgctctcaaagactgtgattgatgancatcaccaaacttnttttgtgggcaaactgcttatttt

SEQ ID NO: 1322 - DNA, 504 bp, Homo sapiens
  misc_feature (8)..(8): n equals a,t,g, or c
  misc_feature (422)..(422): n equals a,t,g, or c
  misc_feature (442)..(442): n equals a,t,g, or c
  misc_feature (485)..(485): n equals a,t,g, or c
  misc_feature (504)..(504): n equals a,t,g, or c
aatcatancatttaattttaagattaagaatattggcaaagatttgtttatttttacctgtctttattcaaatgttctaatatacattagttccaagttctctattacttctaaatagaatatacatgatcaaaagagtatgcctctttctaaatgagaaaaactttatattataaatccagtgatacggatactatccatcattttgttttgtatggcctaatgtatatcagtaaactaaatagacttaaatgtggctggattttgactgggaatatgggaagaacaaagcaggtgagatcatgtatgtgactaaatatagcgttgatgcttaacgatggcctctgagcatgttaagtgtacttatattttgcagccaaaaactgtatgtatcaagctccaaccatctataataaagtttngggtccagttccaagatggnaaccaagggttttttttccgagacgttaagaaaagtccttcanccataattcttaaccttcn

SEQ ID NO: 1323 - DNA, 864 bp, Homo sapiens
  misc_feature (815)..(815): n equals a,t,g, or c
  misc_feature (848)..(848): n equals a,t,g, or c
  misc_feature (862)..(862): n equals a,t,g, or c
ctgcttaattgaagtgtaatataggttgtagaattgttacctgcagttctatggttttgtttcacttcttttcttttttaaagccattctgttctttggatgtgcttgaaagggtgtgtgattacaccattgttaatgctgggtaaaaactatcttcttgcagccttgcctcataacagtggaatttctgatagacaaaccacaggactttgattttaagccaaatccatctccatccctttactgtcaatcttctgtcccagtagtttagcctttgtggcttaggttatgatgcgcctccttctgtgcgaccaatgagacgacttcagcatctttttaaaataatctaagcatcattgaagcagtaacacaaaaaaaaggttcagtattttctttttagtataacttacatcctttcaaataagtctttgccctcatgaagaatccctagaggaagataaggaaaataagtattttccagttttgcttgacagtttctaaacaaacaaaaataaactcaatgaaaggaaagatgtttctttttagctgagatgacagattgcttctctgtattaaatagtctagaagttaaggggatggtcacatttaccatgtattgtgttattagcagttaaattttatgaatatgtttgtaaaattgttgttttatatttcatgtcaaattgaaaagtttatttcttcactattgtacctgtggaaatacaagccattttacaggaaaaaatcttcaaaaactattaaatggatatcagcctgttttgtgagccattgtcttcagattctgtggttgtccnggggtcatagggcattagtaggttgtacgggtngaccgatttttccntc

SEQ ID NO: 1324 - DNA, 869 bp, Homo sapiens
  misc_feature (2)..(2): n equals a,t,g, or c
  misc_feature (46)..(46): n equals a,t,g, or c
  misc_feature (194)..(194): n equals a,t,g, or c
  misc_feature (784)..(784): n equals a,t,g, or c
  misc_feature (836)..(836): n equals a,t,g, or c
  misc_feature (852)..(852): n equals a,t,g, or c
tnaaccctcactaaagggaacaaaagctggagctccaccgcggtgncgaccgctctagaactagtggatcccccgggctgcaggaattcggcacgaggaacagccaaagtttatggaatggtgtgctgaggaggagaaccaagagctcatcgccaacttcaatgcccagtacatgaaagttcagaagggctggntccagttggagaaagaaggacagccaacaccaagagcaaggaacaaatcagataaactgaaagagatttggaaaagcaagaaaaggtcacggaaatgtaggagttcattggagagtcagaagtgttctcctgttcagatgctctttatgacaaactttaaattatctaatgtttgtaaatggttcttagagacaactgaaacccggtctctagtcattgtgaagaagctcaatactcgccttccaggagacgttccccctgtcaagcatcctcttcagaaatacgctccttccagcctatatcccagttcactacaggctgagcgcttgaaaaagcacttgaagaaatttcctggagctacccctgctaagaataattggaaaatgcagaagctctgggccaaactttcgagagaatcctgatcaacgtggagccagaagatggcagtgatgtcagccccggccctaattctgaagacagcatagaggaagtcaaggaagatagaaacagtcatcctccagcaaacctgcccactccagccagtacccggattcttagaaaatattccaatattcgaggaaagctcagancccagcaacgttttaatcaagaatgagaaaatggaatgcccagattgctctnggttgttggaagttangccaagttcgtaagagc

SEQ ID NO: 1325 - DNA, 1832 bp, Homo sapiens
  misc_feature (1823)..(1823): n equals a,t,g, or c
  misc_feature (1829)..(1829): n equals a,t,g, or c
gccggtggctgctgtctctgggcgggccgtgggaggctcccgaggtgggggccggggcgggatggctgcagcggcggccggggccgggagcgggccctgggcggcccaggagaagcagttcccgccggcgctgctgagtttcttcatctacaacccgcgcttcgggccgcgcgaaggacaggaggaaaataagattttattttatcatccaaatgaggtagaaaagaatgagaagattagaaatgtcggattgtgtgaagctattgtacagtttacaaggacatttagcccatcaaaacctgcaaaatctttacatacacagaagaacagacagttcttcaatgaaccagaagaaaatttctggatggtcatggttgttcggartcctataattgaaaaacagagtaaagatggaaaaccagttattgaatatcaagaggaggagttgttggacaaggtttatagctcggtgctgcggcagtgctacagcatgtacaagctttttaatggtacatttctgaaagccatggaagacggaggcgtcaagcttctgaaagaaagattagagaaattcttccatcggtatttgcaaacgctacatttgcagtcatgtgacctacttgacatttttggtggaatcagcttcttcccgttggataaaatgacttatttgaaaatccagtcctttattaatagaatggaggaaagcctgaatatagtcaaatacactgcttttctctataacgatcagctcatctggagtggattagaacaagatgacatgagaattttatacaaataccttaccacctcccttttyccaaggcacatcgaacctgagttagcaggaagggattctccaataagagcagaaatgccaggaaatcttcaacactatggaagatttcttaccggacccttgaacctcaatgatccagatgcaaaatgcagattccccaaaatttttgtaaatacagatgacacttatgaagagctccatttaatcgtttataaggccatgagtgcggctgtgtgctttatgatcgacgcctctgtccacccaacgttggatttttgccgaagactggacagcatcgttgggccccagctcacagtgctggcctctgacatctgtgaacagtttaacatcaacaagaggatgtcygggtctgagaaagaaccccagtttaagtttatctacttcaaccacatgaatctcgccgagaagagcacagttcacatgaggaaaacgcccagcgtgtcgctcacttccgtgcacccggatttaatgaagattctcggtgacatcaacagtgactttaccagagtggatgaagatgaggagatcattgtgaaggccatgagtgattactgggttgttggaaagaagtctgatcggcgggagctctatgttattttgaatcaaaaaaatgcaaacctgattgaagtaaatgaagaggtcaagaaactttgtgcaacgcagttcaacaacatcttcttcttggattgacggatgacggctcacygagagcatatctaaaaaacactctgcaaacatttggtcacatgcaagttagtggtcatatgacggactgcattcaggacaagggtaaagcaatacttgctttgaagaatcacatttcgactcggtctgctgatctgaggtttttagattttaaatatttatgtggaattaattaaaggtagttggctatatcgctatcatttcattcttttgacattatgtgaatattttactggaaaataagactaataaattgttaaaagtttttaaaaaaaaaaaaaaaaaaaacggggggccncccaanagg

SEQ ID NO: 1326 - DNA, 656 bp, Homo sapiens
  misc_feature (577)..(577): n equals a,t,g, or c
  misc_feature (598)..(598): n equals a,t,g, or c
  misc_feature (611)..(611): n equals a,t,g, or c
  misc_feature (647)..(647): n equals a,t,g, or c
ggagttatcaagtggaggagggattagaacccaggtatcttgagcccaagcaatttgaaggtgtttaagctaattcttttctatgtttttctggctgtttatgtacttttgaagtctttatctttctgtgttaaaatatgtctatcgttattgcattttacagcatcaaaaattaagaatacttacattcttctayaaattgatgcttcaaaatagaaaatttggaatttcagaagctccagtacagtaactaatctgaaattattgatgcattttctttcgtcagggaataactttgaaagattcaaatgatttcaaaatccaactttctaacgtctgggagagaattcctcaaacacatttagcagtcaaaacaattctatagagtataaaagatgaagcatggcacttcgaagtaaaggttacagtttctataaatgagaaaaggccgaatatttgctagcaaaatatttttagcaggaaagaatttactttgggaggtacttaggcatgttatattaatactaatgtacaagttcagcaatttgtaggagtggaaagaattggattaaagtanaaagtcttaatatctacaccnttaaaatgggganaagcctgtgaatgtgacttaatcaaatcctggtagntaaaccagt

SEQ ID NO: 1327 - DNA, 2520 bp, Homo sapiens
ggcactggagtccgagtccgcgcactcgttacctgaacaggcgttacaggccctttggcgcctgcgtattcgtgaagtgtgaaaaaagcgcgcctctgttgggacgggaaatcagcctttctattggtcagggttagaaaccccgcctttgaggcattttcaaccaatggaagcgcggcattcttcatttaaactgtctataaatttctgcctagtcaaagttaagagtggcgccakggatttgaaccgcgctgacgaagtttggtgatccatcttccgagtatcgccgggatttcgaatcgcgatgatcatcccctctctagaggagctggactccctcaagtacagtgacctgcagaacttagccaagagtctgggtctccgggccaacctgagggcaaccaagttgttaaaagccttgaaaggctacattaaacatgaggcaagaaaaggaaatgagaatcaggatgaaagtcaaacttctgcatcctcttgtgatgagactgagatacagatcagcaaccaggaagaagctgagagacagccacttggccatgtcaccaaaacaaggagaaggtgcaagactgtccgtgtggaccctgactcacagcagaatcattcagagataaaaataagtaatcccactgaattccagaatcatgaaaagcaggaaagccaggatctcagagctactgcaaaagttccttctccaccagacgagcaccaagaagctgagaatgctgtttcctcaggtaacagagattcaaaggtaccttcagaaggaaagaaatctctctacacagatgagtcatccaaacctggaaaaaataaaagaactgcaatcactactccaaactttaagaagcttcatgaagctcattttaaggaaatggagtccattgatcaatatattgagagaaaaaagaaacattttgaagaacacaattccatgaatgaactgaagcagcagcccatcaataagggaggggtcaggactccagtacctccaagaggaagactctctgtggcttctactcccatcagccaacgacgctcgcaaggccggtcttgtggccctgcaagtcagagtaccttgggtctgaaggggtcactcaagcgctctgctatctctgcagctaaaacgggtgtcaggttttcagctgctactaaagataatgagcataagcgttcactgaccaagactccagccagaaagtctgcacatgtgaccgtgtctgggggcacccmaaaaggcgaggctgtgcttgggacacacaaattaaagaccatcacggggaattctgctgctgttattaccccattcaagttgacaactgaggcaacgcagactccagtctccaataagaaaccagtgtttgatcttaaagcaagtttgtctcgtcccctcaactatgaaccacacaaaggaaagctaaaaccatgggggcaatctaaagaaaataattatctaaatcaacatgtcaacagaattaacttctacaagaaaacttacaaacaaccccatctccagacaaaggaagagcaacggaagaaacgcgagcaagaacgaaaggagaagaaagcaaaggttttgggaatgcgaaggggcctcattttggctgaagattaataattttttaacatcttgtaaatattcctgtattctcaacttttttccttttgtaaattttttttttttgctgtcatccccactttagtcacgagatctttttctgctaactgttcatagtctgtgtagtgtccatgggttcttcatgtgctatgatctctgaaaagacgttatcaccttaaagctcaaattctttgggatggtttttacttaagtccattaacaattcaggtttctaacgagacccatcctaaaattctgtttctagatttttaatgtcaagttcccaagttccccctgctggttctaatattaacagaactgcagtcttctgctagccaatagcatttacctgatggcagctagttatgcaagcttcaggagaatttgaacaataacaagaatagggtaagctgggatagaaaggccacctcttcactctctatagaatatagtaacctttatgaaacggggccatatagtttggttatgacatcaatattttacctaggtgaaattgtttaggcttatgtaccttcgttcaaatatcctcatgtaattgccatctgtcactcactatattcacaaaaataaaactctacaactcattctaacattgcttacttaaaagctacatagccctatcgaaatgcgaggattaatgctttaatgcttttagagacagggtctcactgtgttgcccaggctggtctcaaactccaccaaatgtacttcttattcattttatggaaaagactaggckttgcttagtatcatgtccatgtttccttcacctcagtggagcttctgagttttatactgctcaagatcgtcataaataaaattttttctcattmaaaaaaaaaaaaaaaaaaaaaaaaaaaaaaaaa

SEQ ID NO: 1328 - DNA, 582 bp, Homo sapiens
  misc_feature (405)..(405): n equals a,t,g, or c
  misc_feature (530)..(530): n equals a,t,g, or c
aaatatgtgtcttttacagtcttttgtcattctgacatttctggatttttgctgttttataatttaccctttgttattcagaagcatgcttacttatagaaactaaatggtctttataaaagtaattacttaaaaagaaatctggggaagaaagatatctatctaatctattaaatctttataaaacattacattgcagagggggagctactcctaaatattttcatgatttgcatggtttaatcagatttttttttttttacaccatattagctaccttttcaatggagaagagacagttcacacaattccctgrttagcacagatgtggactgagtgctttgtcacctgcagrgtagtaamccagtgatgtttcttacagaagcacaatatgttgaaaatccngggtgtgaccaatatggaataaagaagaaggcagaaagagagcaaatgaaaaatttcaacttgtatattcattttttacattttgctttgacttttaaatttaggaagtccgtttttacctgagnacaaatgtttaaagttcctgcgtcactctcagtactctcactgcccctccca

SEQ ID NO: 1329 - DNA, 1099 bp, Homo sapiens
  misc_feature (1077)..(1077): n equals a,t,g, or c
agccgggaggcgggaggcggcggccgcggcggctgctgctgctgcagtgggacaggtggcggcgaccggcggcgtccgaggagatttaatccagagactgacttcactatagaacccacagttgtatcaatggttggggaaagatagtggcaacaggcaaaggagaaacagctctgacatacaaagaaaatgagtatgctaaagccaagtgggcttaaggcccccaccaagatcctgaagcctggaagcacagctctgaagacacctacggctgttgtagctccagtagaaaaaaccatatccagtgaaaaagcatcaagcactccatcatctgagactcaggaggaatttgtggatgactttcgagttggggagcgagtttgggtgaatggaaataagcctggatttatccagtttcttggagaaacccagtttgcaccaggccagtgggctggaattgttttagatgaacccataggcaagaacgatggttcggtggcaggagttcggtatttccagtgtgaacctttaaagggcatatttacccgaccttcaaagttaacaaggaaggtgcaagcagaagatgaagctaatggcctgcagacaacgcccgcctyccgagctacttcaccgctgtgcacttctacggccagcatggtgtcttcctccccctccaccccttcaaacatccctcagaaaccatcacagccagcagcaaaggaaccttcagctacgcctccgatcagcaaccttacaaaaactgccagtgaatctatctccaacctttcagaggctggctcaatcaagaaaggagaaagagagctcaaaatcggagacagagtattggttggtggcactaaggctggtgtagtccggtttcttggggagaccgactttgccaagggggartggtgtggcgtggagttagatgagccacttgggaagaatgatggcgctgttgctggaacaaggtattttcagtgtcaacccaaatatggcttgttcgctcctgtccacaaagttaccaagattggcttcccttccactacaccagccaaagccaaggccaacgcatanggcgaattatggcgaccacgtc

SEQ ID NO: 1330 - DNA, 722 bp, Homo sapiens
  misc_feature (654)..(654): n equals a,t,g, or c
  misc_feature (663)..(663): n equals a,t,g, or c
  misc_feature (714)..(714): n equals a,t,g, or c
ggcctgatccaagtgaccattttccttttagtttgactttgggtgagttgcttagcttctctgagcctcattttcttcatctgtaaaatgggggtggtcagcattgttgttggaggaaccgaatgcctcacccatggtgggtacttcatactgttagtggtgggcaggtgtcctgtcagccccctccaaggaattcaccacccagcgaggccactaaaacctccagagtaagtcaatcagccatactaaggaaagtgctaagggggacagacaaggtgagaagagaatcctgtgggctggaggctgcaaggaataagccaagtagaaggagaggaatcccagcgggaggaatggggggagcaggggcttgggagatgaggacaggcttagtgatggtttgtgggagacagctcttgaggtggagagcaggaggtagggggtgagacaaaagtagaagagggcttcagaccgcaggcccacaaggaggaggtccatgagcccctgaagctgtttgcacaattgttcctgtacatgtatttttctgcgcaagactctgtggtttcatcagattcttcaagtagtctggggccattaagawtccctggtccagctgggtgcggtgactcatgccttataatcttcagcactttgggnagggccganggcagggagggattcgcctagagcccaggaagttttggaggaccagcctgnggacaaac

SEQ ID NO: 1331 - DNA, 255 bp, Homo sapiens
  misc_feature (224)..(224): n equals a,t,g, or c
atttacgtatgttacatttttaagtatgagttaaattgatataaagtgttcctcaatatttaataatgtaagctgttgtcatgacagtattttttaaaaataataacgtatattatagttacgaaacacttgtgccagattagaacatcaagcacagaagcagctgtatgatttacctgttwttttgaaactttaatgtttaccttcccckatgtttaattttnctgtggtgaacacttttgttagaacatggct

SEQ ID NO: 1332 - DNA, 246 bp, Homo sapiens
  misc_feature (61)..(61): n equals a,t,g, or c
  misc_feature (98)..(98): n equals a,t,g, or c
gcaaaaataccataaactgggtgtcttacaaacatttctgaaagttctggaggctgggaantctaaggtcaaggtcccagcaggtttggtgtctggcnagggcccattcctcactgccttcttgctgtgtcactgcatggtgggaggggcaagcaagctcccacggcctcttttacagcggcccarattccattggtgagggttctgccatcatcacatcatcaccacgtcaccttcagggctagg

SEQ ID NO: 1333 - DNA, 339 bp, Homo sapiens
  misc_feature (230)..(230): n equals a,t,g, or c
  misc_feature (309)..(309): n equals a,t,g, or c
  misc_feature (314)..(314): n equals a,t,g, or c
gaaaaacaagaaatagaaaaaaaggaagaaggctgaactaaagcactaattttataggtttagttttgtcagaatttaggacatttggaatcctaacattaaaagggaatttatagawgtctgttcataccttgtacaggaattctttgtacagcatccctgtggaagggcattttaacccacattcaattccttcagtcctaagaaccagctccaaggcagcttgctcntctagctccgtagtagccaccctggacttacatgtttgaatgcacctgggagggttttaaaagatcaagttgcccaggncacanctgcaaaccaattaaaatcagaatt

SEQ ID NO: 1334 - DNA, 366 bp, Homo sapiens
caatgcccttwatatgtsctctktgttcagggaccytggcaggaaacactcgaattgggtgatttraggagattgtggtaaggggacagtttacaaagctgtgggcatgtataggaaagcgcaagggataggacagggtgccgggctatttatagtgatattcacctctggcctgatactgggaggagggggggtgctccctgggacaagaccctatggatgaggcttcctgacaaggggagactgtgaccgtgctccctcctaccagagctccctactggcccagcccaagcagaaacaagagcccattcacgtccattcgtgtcatctcccaccgcccagtgcagagtggagaaaaggtctgga

SEQ ID NO: 1335 - DNA, 431 bp, Homo sapiens
  misc_feature (369)..(369): n equals a,t,g, or c
  misc_feature (404)..(404): n equals a,t,g, or c
aaacaatttgcttctggaaacaggacagccggggccgtgttcctgcaacagcagaccaagcaccgcgggcggacccaggcaagcacggaacaagctgagacggatgataatatggatacaaaatctattctagaagaacttcttctcaaaagatcacagctcttagaaatgtgctacgatgtctgtgaaggcatggccttcttggagagtcaccaattcatacaccgggacttggctgctcgtaactgcttggtggacagagatctctgtgtgaaagtatctgactttggaatgacaaggtatgttcttgatgaccagtatgtcagttcagtcggaacaaagtttccagtcaagtggtcagctccagangtgtttcattacttcaaatacagcagcaagtccanacgtatgggcatttgggatcctgatgt

SEQ ID NO: 1336 - DNA, 424 bp, Homo sapiens
  misc_feature (48)..(48): n equals a,t,g, or c
  misc_feature (138)..(138): n equals a,t,g, or c
  misc_feature (295)..(295): n equals a,t,g, or c
  misc_feature (392)..(392): n equals a,t,g, or c
taattttgtatttttagtagagaaggggtttctccacgttggtcaggntggtctggaactcccgatctcaggtgatccacctgcctcccaaagtgctgggattacaggcgtgagcaccacgcccaggctctgacattnttgaatatccctatcaacccctctcacccacccaaagcctgctgctcaaagcagctctaagcagaagagatggagaaacattcagactgggtggagcatggcccaggctgtgttgctgcccacttctgtctagatgggcagttcttgacttccccgnctgacgctgctgagcagccacagtcccgactgcattctggcttgtacccttactatagtgccagccacagagagcagccagcagcattttaagtagncaggaaaggcccttctcacagcagtgcttggg

SEQ ID NO: 1337 - DNA, 315 bp, Homo sapiens
  misc_feature (303)..(303): n equals a,t,g, or c
gcttttttctaattgaagcttggcaagcrgagggaaatgtattagggaaatagctttagttttgagtgggtgtcagtagccagctgaagaaaaagcmaaatgaaataggtagtagaaatgagaagggagagagggaaagaaagaaaaaaatggatgttggaaattttgttgcatgttctctctggatactccaaaattatcattgtggttattgcctcacttggcttttgttagccatgaaaaaccaggaacatttccactaccatttcctgaccatccatcaaccacaatttttaggcattnggttaaaatttt

SEQ ID NO: 1338 - DNA, 1867 bp, Homo sapiens
  misc_feature (84)..(84): n equals a,t,g, or c
cagtttctcaagcgaccgatgttgaggtgggaactgaccttgtcccttctgtcacggtgaaggtcacactgcagaacagagtantattgcaaaaagccaaattatcagtctacgtgcaaccaccattagaattgacttgtgatcagttcacctttgaatttatgaatcgaaatcctgatggcattccgcgagttatccaatgtaaatttagacttcccctaaagttaatttgcctaccaggtcagccttcaaaaactgcaagccacaaaattactattgataccaacaaatctccagtcagtcttcttagtctcttcccaggttttgccagtcagtcagatgatgatcaggtgaatgtaatgggttttcacttcttaggaggtgctcgaattactgttcttgcttccaaaacttctcaacgatatcgcattcagagtgaacaatttgaagatctttggctcataaccaatgagcttattcttcgccttcaagaatattttgaaaaacagggagtcaaagattttgcatgttctttttcgggatctataccccttcaagaatattttgagttgattgatcatcattttgagctacggataaatggtgaaaaattagaagaactcttatctgagagagctgtacaatttcgggccattcaacgccggctactagcaagattcaaagataaaactcctgcccctcttcaacacctggacaccttgttagatggaacctacaagcaggtaattgctctagcagatgcagtggaggaaaaccaaggcaatctgttccagtcattcaccaggctgaagagtgccacccatttggtgattctgctgatcgcgctgtggcagaagcttagtgctgaccaggttgctattctggaagcggcatttctgccgctacaagaagacactcaagaattgggctgggaagaaacggtggatgccgccatttcccacctgttgaagacttgcctgtcgaagagttctaaggagcaggctttgaacctcaacagccagctgaacatacccaaagacacaagccaactgaagaaacatatcaccttgctctgcgatagattatccaaaggtggccgtctctgcctaagtaccgatgcagcagccccacagaccatggtcatgccaggtggttgtactacaatcccagagtcagacctagaagaaagatcagtagaacaagactctacagaactgtttaccaaccacagacatctcactgcagagacacccaggcctgaagtttcacccctccaaggagtctcggaataattcaagtagagttgtttggttgagaggaacatccccatctcaaggccgaacctgtgtgaacctcatgccaagcacagatatagggctggcgcaggtgcttcctaaagctcaccttcctggagatgacatgcatagaaagaggggttgggactttttacttcactaggagaacttgtaacaccatggggaagtcagctgaaacttgtcttgttttgccaggaaaggaagtagttgcctttggtcatccatctgctaatagtcacagaatacagtgaaatgacatagttttgggttagattttataatgcaaagattcagatccaaaataatttcataccccattttttcacagaattcttatatagtaaatgtatcaagtttaataaagcatctcattgtcaaataatatcttggattttatttataattagagggatttatgagtgattgctctacattatttcttcaaaggaaaggaaaggaattgaagactttgctactctctggtaagacttgaatgtgattattttataaataaragaaccactatgaaactttaaaaaaaaaaagtcgac

SEQ ID NO: 1339 - DNA, 537 bp, Homo sapiens
  misc_feature (130)..(130): n equals a,t,g, or c
ggttaaaatataaccacaatgaatccgacaagtcactgcaaggactgtgtgctttattttgatttgtcatcaggaataggcgatacactgtttggacatcatgaaggaacaatgcaaaatccatcctttnaaaattcatttttaagttccatagaagatccaaaaaaccagacttttagagtataagcagtcaaacttaagaaaatattatatttacttatgaatagatgctaagtcaaaagtaagtccctaataaattttaatgtactgttgttcactaaatgttcctagtcatttgggctcagtagttcagtcatttatcataatgtgtatcaagatagttactggatattgaggtattgtttataacattacaaatagaaaaatcctagtgtttgggataggaaattaatcatatcttgtcgatccaaacagtggagtgcttttctggacattatagatgataatgtaggtatttgttgatatacagagataccagaaaaaagcccatatttacgatccaatgcctattttgta

SEQ ID NO: 1340 - DNA, 1351 bp, Homo sapiens
ctcagactggtctcaaacacctggcctcaagtgatcctcctgcctcagtctcccaaatgctgtgattacaggcacaagctactgcaccaggcctctgactacatttctattaatatggttaggttggaggttttagtatttttgtatctcatatttgtatcaatatgactggcttctttgtctgtagtgtgtggtaatattagttctgtaaactgtcagttgcaaaaaaaaaaaataccttgaactatagtatatgttgataattagccataataatttcttagttaatttcttataattaaatttgtcaaagaggaaacttacagtttatatctgatgaaatctctaaaaagatgggtaaaacattgggaaatgtatgcatgtacttcactctggtttcatagggttagcaagtgtcttaaaaacatatataaagaagcacagagattgttaggagatatttatgctcccagttttaataattgggatactttgtataccacagaaagaaaaattactaaactcctctttttttagtcaaaattggaaaaaaagtcttaattgacagttactatgcctgtgctacccatagcaagtattcagtggaaaatactttactaagtaagtaatttgaacacagcttaaaatccatagtatgttacaattgctagcctttcacaaagtttgcattgtcttaatgtagaaggatactgtgatctaagaattcacaattttaaaaagtggaacctaaatagggtttcctaattgccatgaagttatttgtatcttagatgaattatatttacaacattgtaaatgtcagtgggtgatccaraataaattgttrragttattaraatgtacatttragtaggtttcagtttgactagaaataattggcaagaaggcaagaactagtcttctagagcagggatcccatcccccaggtcatggactggtactggtccatggcctgttagaaaccaggccacacagcaggagatgagtggaaagcaagtgaaacttcatgggtatttacagcaattccccgtcgctcgcattaccacctgagctgtgtctcctgtgagatcagcagcagcattagattctcaaggagcacaaacccttttggaactgtgtgtgagggatctaagttgcgcatttcttatgagaatctaatacctgatgatctgttgttgtctcccaccacccccagatgggaccatctagttgcaggaaaacaagctcaggctcccactgattctayattatagtgagttgtgtaattatttcattatatataacaatgtaataataatagaaataaagtacataataaatgtaaaaaaaa

SEQ ID NO: 1341 - DNA, 1231 bp, Homo sapiens
cctttttttttttttttttttttttttaaatttcaaaatgcagaatttattttagcaacaattttctaactccaatgaataataaattaacaacgaaagaggagcaaaaattattccatttgcttgaaaattgttaaacatctttctataataaatcatgagtaaagtcaaaagtaaaaactgaatgtataaacaaattggagctgaaagacaaggagaacaagatttataggatgtggtcaaagcaatgaaacggaagagttccctgattccccttgcagggcgtgcgacaggggtgtggctcacctgttcagtagccccctctgcagaaaccccttgcgagagggggagcacgcagatgggcaagtgcagaggccggggtgagggctttgggctctggctctgcggtagcgtctagaggtgggtgcctgcaaccccagtgttacaaagctctttcagcttggccaccacagacagctggagtgttaaccagctcaatggaccttctgctttttcacaagggcaaaggaccaggggacagctttctgtattccgagctcttttccagaatccaggaaaaatcgggtcacacacggacttgaaggatgaatgcgaggttttattgagtggtggaaatggctttcagcaggatggatggggagctggaagggtggggatggatgaagtgggaaggtgatcttcccctggagttgggccgcccaggggctggactccgctctgactgccccgagccaaacatctctcggtgtccagacgtccctcctcttctctctttctctgctacgtcgttttgccgtcagtcggcttgcctcgtatctcctcacctgctggtatgctctggaggttggggtttggggtttatatgggggcaggatagggggcgtggtgggtcaaaaggcaactttttgggccccaaacagaaacgcctcttctcatttagggccgcgggtatccaggcttgagggtggggccttagcagggaaccgcyctcttctactcagtatttccgtctcctgttcgtgtcagcaatacacagaagaaaatccattccttatctcactaaatgcagaaactactgggagtgaggctgccataaatctcttctggagaattttactggccataaagaagacagagaagaccgcttgcacagcattttcaaacagttctgccaactctgtggctctttcatcatgtttcaagtgttcag

SEQ ID NO: 1342 - DNA, 1280 bp, Homo sapiens
  misc_feature (29)..(29): n equals a,t,g, or c
  misc_feature (47)..(47): n equals a,t,g, or c
  misc_feature (83)..(83): n equals a,t,g, or c
  misc_feature (121)..(121): n equals a,t,g, or c
  misc_feature (133)..(133): n equals a,t,g, or c
  misc_feature (154)..(154): n equals a,t,g, or c
  misc_feature (1166)..(1166): n equals a,t,g, or c
cacgacaggtttcccgactgaaaagcggncagtgagcgcaaccccanttaatgtgagttagctcactcattaggcaccccagnctttacactttatgcttcccggctcgtatgttgtgtgnaattgtgagcgnataccaatttcacacaggaancagctatgaccatgattacgccaagctctaatacgactcactatagggaaagctggtacgcctgcaggtaccggtccggaattcccgggtcgacccacgcgtccgggaggcagaggttgcagtgagccgagattgcgccactgcactccagcctgggtaacagagcaagactccatctcaaaaaaagaaagaaagaaaaaagaaagtacaagtttataaagtattatagtgaaaaattcgcattctggctgattttaagccatttaaaatttatataaaacaaccttccataaaaatttgacaggtgcccagatgttgctttctccatttattttttgtttttttttaatcacagtaggtctgatagagaattggagctaaattataatatttttgttggtaaagttgagttatatacttgtacatacaatggaaatgcttttagtagtgattatttagcaatttttgtttttgttatattaggcatgtttggaggctttcctattctagcatttaaatttaaattttattaaaattaaataatttaaatctagcatttaaatttaaataatttaagtctagcatttacttttaaataattataatgaagttttgaaatactaagttaatccagacctttagttgtcccatggtgttaataaagttgccaaagaagatgtattatgaacaattcagcaataagacaattgtcaacacagttgagaataacaatggtaatcgttagtaatatttagaattggaatttgcctactgaaatagttatagatgattacttgtgatgtgaaactgaattgagcatgacaaccagacatttccagttggttttgtaagttttgagaatctagatactgggttttattttttgaaagattagctctgtttgtaagggctgattccttgaaaatgtaattttccagaaaaacacctaaagaaaataaaacatggacatgcctagtaaaaaaaaaaaaaaaaaaaaaaaaggggcggccgntctagaggatccaagcttacgtacgcgtgcatgcgacgtcatagctcttctatagtgtcacctaaattcaattcactggccgtgttttacaacgtgtgactgggaaaaccctgg

SEQ ID NO: 1343 - DNA, 128 bp, Homo sapiens
ttggccaaagaggttaaaccccgggggttccccgggggaaaaattttcccccccgggggggktyccggaaaccccccaaccggcccggttyccccgggggttcccaagtttaaaaccccaaaatttgg

SEQ ID NO: 1344 - DNA, 438 bp, Homo sapiens
  misc_feature (137)..(137): n equals a,t,g, or c
catgcgcaaggagaagcgcgtgtacagccgcttcgaggtcttctgcaagaaagaggaggccagcagccctggggcaggggaaggccccgcggaggagggcaccaggggacagcaaggtgggcaagttcgtgcccaanatcctgggcacgttcaaaagcaagaartgatcttctggcctggcaacccargccaggtgcccgcatcgctgccccggtcatccagaaccccgcggaacararaccctgctcatgtgcttgagcagcggctgtcagccacggccgcttggggcttggctgagtgcgccagacctcggctccactggaggctcaacatgcagctgccgtctctgccccctggcctcaccaacagctgggctgcacccctcgccaccagtgcctttctcccctcagcaccttcatctctgcaccgtcagccttg

SEQ ID NO: 1345 - DNA, 350 bp, Homo sapiens
  misc_feature (346)..(346): n equals a,t,g, or c
gctcactttacctctcagagactacttggtgaatttctgcactggtgtgtattctcttgcctggcaagttaatagactaagtttcactttgtgtgtgtgtgtgtgcatgtgtgtgtaagcactggtggtctttgttttattctttgtttctttgattcctgtgccacctcccttccccattctcccaaaaaagacaagacaaaattaagcacaaatcctcacatttktgtgtgtttatcakatacacttacaactgtgcccattattatgtcaagttacataccttgcaaaatatgggttgtctcctatactgctggcttgcatctcaccttggaaggcaaaaaanaagg

SEQ ID NO: 1346 - DNA, 490 bp, Homo sapiens
  misc_feature (400)..(400): n equals a,t,g, or c
  misc_feature (417)..(417): n equals a,t,g, or c
  misc_feature (433)..(433): n equals a,t,g, or c
aaggttttgactgtgttggggtgggggttgggtaagggaatggtcaagactgagaaaggaatgaaatccattcaggaaatatcgacagggctacacrtgatgtccccaaactgctgctattgaagaacttcccaaaacttctttacaaagccctaaaggaaagtttgcatctatgaaaagccaataggtgagacatccaattgctgcatggaaattgatgtacattcaggggacggcaaaaatagctgtaaaatagtgaaaaagagcagtggttgtgctcttttctggccaatgrtttacaaaaggaatctacttggacttctgtcccgggggtkgaaatccttaggggttkggaacttgtgggggaacatttcccaacttggctaaggcaggggttccnctgggggaggggaaggntctattctgggggaanttcacccccccggcggcaccacacttttccccccggggttccccaagggccccgcag

SEQ ID NO: 1347 - DNA, 748 bp, Homo sapiens
  misc_feature (676)..(676): n equals a,t,g, or c
  misc_feature (734)..(734): n equals a,t,g, or c
atagaattctgatgattatgaccttctgataatgaacactttttcctttagagtgatttaaaaatttctgtatttttgaaatcagtactaattgtcatttttttctctcacagcttcatattctccaattcagcctcattctctaataaaacatcagcagattcctcttcattcaccaccttccaaagtttcccatcatcagctgatattacaacagcagcaacagcaaattcagccaatcacacttcagaattcaactcaagacccacccccatcccagcactgtataccactccagaaccatggccttcctccagctcccagtaatgcccagtcacagcattgttcaccgattcagagtcatccctctcctttaacagtgtctcctaatcagtcacagtcagcacagcagtctgtagtggtgtctcctccaccacctcattcaccaagtcagtctcctactataattattcatccacaagcacttattcagccacaccctcttgtgtcatcagctctccagccagggccaaatttgcagcagtccactgctaatcaggtgcaagctacagcacagttgaatcttccatcccatcttccacttccagcttcccctgttgtacacattggcccagttcagcagtctgccttggtatccccaggccagcagattgtntctccatcacaccagcaatattcatccctgcagtcctctccaatcccaattgcaagtnctccacagatgtcg

SEQ ID NO: 1348 - DNA, 112 bp, Homo sapiens
  misc_feature (110)..(110): n equals a,t,g, or c
cctaggcctcctatttattctagccacctctagcctagccgtttactcartcctctgatcagggtgagcatcaaactcaaactacgccctgatcggcgcactgcgagcanta

SEQ ID NO: 1349 - DNA, 622 bp, Homo sapiens
  misc_feature (1)..(1): n equals a,t,g, or c
  misc_feature (556)..(556): n equals a,t,g, or c
  misc_feature (565)..(565): n equals a,t,g, or c
  misc_feature (573)..(573): n equals a,t,g, or c
ncgtcgaggagcctatgaatgcgatatcagcgttatcagaaagscgaaaaaaacttaagttgaaccatyctaagtcggggactgtctrtccacccttgccgacttgacctctttttcccggttctctagagtcagtataccaccagcccgttctccaccccgcaaggcgtgctttggaagcctgactctaatcgcgtcctcccctgcctaaaaccctgctgtgatttcccattacccttagtacagagccacattccttaacgtgtccgacgtggtccggccctcccacacgtctgcagtttcgttttccgccagccttggscttgctttctgctcttcggttcctcacaccatgattcctctaggccargcgtttgcatgcgctgtctcscctgtaaaactaacttcccttcccttgtgggctcagatcccggctcaggtagcaggtgtgaggtcaagcagaggaggtgaatcttcttggagagcaggtagcatagtaagaagaaagggccatggtcagaaccctggagaacaccggtaattaagagggaggganggagggaangggattanggaaggaacagttgataggaggagaagcagagtgctatcaacgaaacct

SEQ ID NO: 1350 - DNA, 624 bp, Homo sapiens
  misc_feature (81)..(81): n equals a,t,g, or c
gtaacaggaggatatcgtaattttctactgttttattcctctgttagaccgggccttgacatgaatgacgccgtaaggganaaagagatcttcccaatcagcaatcaccgtaaaagcctgctgtgttcccgttaaaattaggaaattctcactagatgaattgacatgggaggcatttagatttctaatagtcacatagtaattctgcggaggaattgagtcatctttgatagccatggaattaagcgatgttaattaaagtgcaaaagataacctttctgttcttactagaatagagtaataaaaagaacctaggttttcttttgtttgctggaagaaaaatcaaaattctttagttctgtcaaaccagaactcttgaaagcactttgaacaatgcctggaaaataacaggtactctgtaaatgtttaccttctctgcaagtgcctgccacgtgcccgaagaaaagacacattaaaaagttaagtgacaccagtcctgattttatatattttatatacctaacaacgtatatgttagtatgtagaaattatatccttgacctttttccctacctattacgaactgtacttttattaaaagctgccacttaaaaataataaata

SEQ ID NO: 1351 - DNA, 962 bp, Homo sapiens
tattcattcttttggtcacctagggatcttctaagtgtgatattactttcagagaattcagacaagtgagaaacaataatgtaggagtcagcaaagcagaattcagagacttcagccaatcactgctgctctgagaggatccagttagagactcagtatcagcggtcagaacttatctcactcctgtgaactttcaggctggacttaaagctgccaagtttcccctgcaggaaggaaacactgcytcccttcagcaggtagctcattrgaaagccaamcaggcaaacgatcctggcctctcccgccagctgaccgctcttcagcatccatgcggtttgtagtcgtgactttctcagtcacgatcaagggtgattttttcttaaatatcaagctgttctttgaacagggaatgaacatgagtttttgtaacgtgactgaagttgagtttaagtaggaagcgcaggaagttcccaagtgccaggtgtgtgtagctcagagttccttttacagtgaggtgtctctcactgggggagcttccakgatcctgagcagactggacacaatcatctctcccttcctctatgtcaagcactgttacaaaagactgtgagcaaatttccatctaaatattaataattctgaagaagaggcaaaactgttgaatgcaagcgatacctattgttgaagaaacccacaaatttctgattctaagatcaggggatacaacaaaatctacaagtcatttcaaatagcacacaggaatcaaactttggtaaatcatttctgaggcacaattaaatatattgtagcactatgttaattaattatattaaatgtcgattcatcttgaatgtattctcaattgcctaccaaaaattggtatgattatcatttctgggtctactgatttttcatcatggcaacagaaattgtcattaaatagaattaagatacaaaaaaaa

SEQ ID NO: 1352 - DNA, 262 bp, Homo sapiens
  misc_feature (234)..(234): n equals a,t,g, or c
  misc_feature (236)..(236): n equals a,t,g, or c
agcgttgttagtgcatgaagacaagctgccagagggttttggttgtatgttacacagtgtgactagttcctatctaaaaattagtgtactgtatttagctctttatttaaaagtgaacactaatttaacttatcttaaaatattttaatagttcagactaataatcatggattttatggggattttgaaagctttgtgtcaagaccatatttttaacaatatcagaagcttttnantaaggtgcttgttgctgagctaatga

SEQ ID NO: 1353 - DNA, 833 bp, Homo sapiens
cggacctggggcgcctttgtctaacagatctcggtttcctaaaaaactaaaccgcctggggctgtcgtcccagagcccggcagttaggaccatgcgggaagtgtcctggggcatatagtcatactgatgaggtgaaagatacacctcggaaccaagggccaccctctacttttaaggacaatggcgccgggaccaagaaactacacttcccagaaaaccgtgcggccgtggcaaactcttctgggtctagcgtgcgctcacactaatgtttatctcccgggacgtgggcagaccttgtaccaggcgagctctcgcctttgctagcaaaagagctcctctcttcccaaaccctgctactacgctgtccaccctgtatggtctttgaggtctttgaggtttttttggaattcacttgctggagactacagctcacagaacgccctgggctggattgtgccagctgtagttcgcgaaccaaggacatttcctggaaatgcatgcggccacgtatctgtgacagaaatggcagttctcacgtgcgttacgccccctggaaggacttggaaatacggaacttgagtgagcactgagaggacacagaccctcatcctgggaggagtcactcctcccgcagccatcagagcctgacaaccgcttctcaccagaggcgcttcttagaccctgaccttgcccggctcacccaaaggggcaatggccttctttgtatgcaagccagacagtctactgttgtatatttgaattttttactttatttttaatattttaattaaattttaatttaatgctgaaaaaaaaaaaaaaaaaaaaaaggg

SEQ ID NO: 1354 - DNA, 446 bp, Homo sapiens
tgagagtctgacatgcatatcataattttatgtcaggtattatagatattttgaaatggtgactgactcttttgaaattttaagttctttagaatgtgacgcttttaatatagcctctggttttagatggagaaacactatgctattgtcattaaaaattaattctatttccccaattgtctaatatatgtcttaaaagatctttcatattgtgaaacatcagagggtacaacctttgttcttcagtttaggtattaaagagcacacagaatactgtgtgattaaacatgtaaggccagataatgcatttgcaaaggttcctttattttaggtttaagcctgcataattgtggtcttaatctcaggatagcaagaaagagaattgtacatgaaagtatttacacaaagttcccaaagccctgtggattatgcattagtttagataa

SEQ ID NO: 1355 - DNA, 366 bp, Homo sapiens
  misc_feature (299)..(299): n equals a,t,g, or c
  misc_feature (345)..(345): n equals a,t,g, or c
  misc_feature (361)..(361): n equals a,t,g, or c
aattcggcacgagcagacctggattgactgaggtgaaggggctccttgcagcaatcacacagaaggctcgggtcttaagattggccctgctcctagtcaagctgtatgaaccagggtagtcactccggctttcagggccttgatttccttgtctgtaaaagggactttacgatgcatctggcaacctcaccttcctcactgggcaatktgaagaccaaatgccggcaatgaaattcccagcattaggtttgtcatatagtagtcctctctaagcatttgttgaatactcacagggacanttaggccagtcagcattattgaaataacaggtggggttttttttanttgttttgttcttttncgaat

SEQ ID NO: 1356 - DNA, 426 bp, Homo sapiens
  misc_feature (340)..(340): n equals a,t,g, or c
  misc_feature (425)..(425): n equals a,t,g, or c
ggcaagggaaccccaagctgcagaagctgaaaggcggtgaggaggggcctgttctgatggcagaggccgtgaagaaggtcaatcgtggcaatggcaagacttcttctcggattctcctcctgaccaagggccatgtgattctyacagacaccaagaagtcccaggccaaaattgtcattgggctasacaatgtggctggggtgtcagtcaccagcctcaaggatgggctctttagcttgcatctgagtgakatgtcatcggtgggctccaagggggacttcctgctggtcaagcgagcatgtgattgaactgctgaccaaaatgtacccgggctgtgctngatgccacgcagakgcagcttacagtcaccgtgactgagaarttctcartgaggttcaagagaacagtgttggcttgtcaaaggnc

SEQ ID NO: 1357 - DNA, 567 bp, Homo sapiens
  misc_feature (34)..(34): n equals a,t,g, or c
  misc_feature (542)..(542): n equals a,t,g, or c
  misc_feature (556)..(556): n equals a,t,g, or c
gggcatcactggtctcgcgtgcgcgtgaccaggncccggtttccggtgccaggacctttccgaagcgtcgagtggcctaacggtcacagctgtcgcccatcggagaggcaggactactgcgagcagttttaccgcgacctccggagccggcgtgacaggctctgtcaytaaaataggtctgtccagtcgtactttttcctcaccttgaactttccgtcacgggaatacacgatttggcttaggggccggggctctcctgaggagagagggtttgctttgcggggaagagcgagtcttgacttcgcagcctccaatttcagccgcggtgtggaggggggtgctttgggtggtccccacagcctttccggagtgcccgcgcgtgtragcttttgagatttgacaatttgtgargtgcttggtgctgactttcggggacgacaggatccttttacagtcattctcctgtcagggraggcargtggggagcgaggaagatcagawtcgtaacagacttgagttaaagaattgacaaactcccgagntgatttcctgtcanaccttttgcgg

SEQ ID NO: 1358 - DNA, 582 bp, Homo sapiens
  misc_feature (252)..(252): n equals a,t,g, or c
  misc_feature (571)..(571): n equals a,t,g, or c
ccacctggagctgcttcctgagttggcacactatcgtgtacacagcagtcttcagccccctggaaggaggccatagtcgtgtgaggatggcaaagtcgaacaggaagctttgagtgccttcctccacgatgtcaacgaggagatccagtgccagatcgaggtggatggaacacccaggggtaggggtgcaggtgtgggcagtgatgtcccttcccctccctcccctggtcccacagactgtggccatgaggntgcaggctggtgctatgacagcagattgcagcacagggccctcccctccagcccccagtgggacatcaaaaccaccctggggccatttgtgcagggcaccacctccagtattgatggggaaaataaactcagtagagccacgacagggtggagagaagcagggaccattgtcttcctcaggagcgtgacagctgaccccacagaccatgcttgctggtacacactggtcccagacccagcctgtcggacatcagcagtgtgctaaaaacgtgtaagatgtcatasttaccgtgtgtctatctagttgacatgggtggantcagtaagggg

SEQ ID NO: 1359 - DNA, 279 bp, Homo sapiens
  misc_feature (270)..(270): n equals a,t,g, or c
ggatacgaattccctgattttctaattgctccagcaacacctgttggttatttccacgaaatgcctgtccctgccagtcaatatctacatttgcgtccggttgttgcgtgatgttggcggtatcatcagcggcagctgcgccgtaaatttttgccggaccgttgccagaatttccacctcatcgccaacgcgaatcacgccgctattacgggcaattaaattctgaccaaaatcgacatcgccgttatcctgggcaatgcggaaaagatngcatgtttt

SEQ ID NO: 1360 - DNA, 527 bp, Homo sapiens
  misc_feature (4)..(4): n equals a,t,g, or c
  misc_feature (483)..(483): n equals a,t,g, or c
  misc_feature (522)..(522): n equals a,t,g, or c
cagngagctgaattctgaagcctgagctactgagaatgctgataaaagatgttataaggactgtgttggaacctgctgtgaccaccccgcttcataatgttataacatagcaattcagaatagtaacgtatgcccctcatgaaaagccaagcagtgcaaaaatccactccaaaaagccagactccctcccagcactgagccccagcttctgtgttcccctctccaaaggcagtggttgttattagttacttgcatatcctgttggatatgtgttttctatcagggataaactatacagatatgcayttacaaacatatcatattatttatccttgacagaaaacacaagtgaagtttagccgacgatatacattgtcctacaccttgtattttagatctaacattgccttctagaggtcaacagtacacatgaaartgcctacgtcttttcattagctggacagcatgctgttacatgtatangttaatatccgaacctcagtctaaccatacctactgggncttta

SEQ ID NO: 1361 - DNA, 636 bp, Homo sapiens
  misc_feature (247)..(247): n equals a,t,g, or c
  misc_feature (614)..(614): n equals a,t,g, or c
aaaactggagctccaccgcggtggcggccgctctagaactagtggatcccccgggctgcaggaattcggcacgagtaagaagagctggttgtgagaaattagagataatacggaatcttattaatttggtgtcacgatatatagtaatttttcactaatttctgacccaaggaaaataagcaattagtagtaactaccatgctgtgtttggctctagagggcatttaaatataaaaattgggtaatnttatgtatgttgtacaaataagtttcattttacaaatgagttttgccaaatattttacacacttctagtatccataccaaatctttttaatgagctctaaattataaaagtacaaaaagccactggaattgagaggatgtttgcaaagaaggaaatcctgtggtataaatgacccaaatttatagtattttcaccatactgtaactagattgaaggatttttctattgcattttgtaatttggggaaaacctgtttatttcttctgtcagacttctcttaatcggaaatatttatagtaaaatgtacacaaaaagtactttttacattataggtcattttaaagttaacagtattgaaatatttaanatataggcgaggcattcactga

SEQ ID NO: 1362 - DNA, 554 bp, Homo sapiens
ccatagtaactttattttttataatagaattttctatttttgaccaaacataaaatatttggatatgggccaggcatgatggctcatgcctgtattcccagcactttggaaggccaaagcaggagactcggttgaggccagtagtttgagaccagcctggacaacatagtaagattcatctctacaaaaaaaaaaattagccggatgtgatggcacatgcctgtaatcccagcactttgggagtctgaggcaggaggatcccttgagtccaggagtttgaggcttccatgagctrtaatcacaccactgcaccccagcctgcrtgacagagtgaaaccctgtctctaaaaagtctgaatatgaaaattatattggcagcatactcagacataaactccaaagttgtctctacactgatttcacatctgcataattttctgcatacccagcaggtgaattttcagtttttctgggagacaattttgaagagatggtgaaatagaatgggaagttaaggaggggaggtaaaatgttttaaatgagaagaacaaaaa

SEQ ID NO: 1363 - DNA, 683 bp, Homo sapiens
  misc_feature (672)..(672): n equals a,t,g, or c
atagccaattctaagggatgtacttctgttattatcaacaaaaaccttgccaacagctgcggcactggctactctcaccttatatgtttagttcccaagatagcttgcccttttccgaacagcagtcagctcgactgtgccactaaaacagacaaatatttgctcgggaatcacaaccacggggacttgctcccccagttaggaccatggtacatatttgtgtgtatattatggtgttacatgcagattaatactttcaattaatcctcctagttgcctgtaacgttaacatttcaagatgcatttagatatttttatcctgtaggaggattttgtttatttgagggaaaaaaagggcttttaatgtattctcctcaaaaaccatttagagaaaacagataagtaaaaataaratttaaattaccatatttctatttacagggatgagcacattaacattttatgtatttagtgatcctttttcctcatgtgtacacatatgtttttgtgtgttagtcttgcttgccctccccatagtctgaaatagktctatgragtttatattawttttaaacytgatcatatmcaaattttcagggaaacaaaccactctagctatttggaggagggaatgcaggtttatattgggggagttttggaaactaccatggnttccttaccaa

SEQ ID NO: 1364 - DNA, 434 bp, Homo sapiens
  misc_feature (399)..(399): n equals a,t,g, or c
  misc_feature (424)..(424): n equals a,t,g, or c
ttgctgatttttgactttgcttgtagctgctccccgaactcgccgtcttsctgtcrgcggccggcactgtagattaacaggaaacttccaagatggaaactttgtctttccccagatataatgtagctgagattgtgattcatattcgcaataagatcttaacaggagctgatggtaaaaacctcaccaagaatgatctttatccaaatccaaagcctgaagtcttgcacatgatctacatgagagccttacaaatagtatatggaattcgactggaacatttttacatgatgccagtgaactctgaagtcatgtatccacatttaatgggaaggsttcttaccattcaggcaatttagttacttcatctgtggagtaaaggagtggattttattgtcnttcgtcttacattcgtatttatatnacataagttt

SEQ ID NO: 1365 - DNA, 433 bp, Homo sapiens
gcgatagtgggagtgttaaagaagacagactaacagacacctgttactttggtgtctgcattttagtagctttcttttaagcagttgtaaactgtgctagggcatgtgctttatctttgtcttgcacctcatctcttccttgacccacttgttatatgtatgaccacctttaagaattttaattttgtgtgctgcctccgtcactgctgtgaacacccacatggagtcaggcacccacccaccctggcacctgctagcaccctgctgcacctaacaagtgtataccctgctgcattgctgctgcttctggtatgtgtgaatgargacaatcttgttgctgtcacttacaaatgctttatctggcaccacccatcggtgtwtartgamtggtggkctgarartaccttagccccaacccccscccacaccagtg

SEQ ID NO: 1366 - DNA, 632 bp, Homo sapiens
ttttttttttttttttttttttggatagggtcttctcgtcttgctgtttttcctttttatatwttaacattwctttgtttgtawatcmagttgtwcwtaaaatatcttccaraaacatttcttttacttcaaatggtcwtccctgtatatatatcamtggacaacttccaaaatatcttataaagagatttacatcmaaggcagcactagaaagaattagtttcaaagttgggtgcttttgcaacaaatctcttaactttgtaagtaaaaaatcactaaatcgatccctttcatgcacttcatccacgataacatgtgtcacagtcgacaacgtactatctcctgccatcaatgtacgaagcaataccccattagtacaaaatgtcagaagtgtytttggagaaaccctgctttctaatcggatctgataaccaattgtttgaccaatcctttcccgtctctctgcggcaactctttcagccacagcgatagctgccaatcgtcttggttgagtacaaaatatacggcaggggataccatttttaaagcaatcatctaaaaggaactgaggaatctgtgtggtctttccagacccagtttctcctacaatcaaaactactttattttcctta

SEQ ID NO: 1367 - DNA, 968 bp, Homo sapiens
ccctggcccccccccccccagtacagggaacgtgctttaccatcgtttccggcgctggacggccgtcactgtttccggaccccgcaatttggggtagtgttgttgcgcatgctgtcctccccaaagcaggaatgaacacccccttaacggcgggcaaaaaaccgaggggaacccggactggccaagaatcctgagkagtccgctacattgccaamgyktccgctgccakacgaaagcgagscgtctgcagcgagtggaagttcgccgcctgtgtggtggaccgcctgtgcctcatggccttctcggtcttcaccatcatctgcaccatcggcatcctgatgtcggctcccaacttcgtggaggccgtgtccaaagactttgcgtaaccacgcctggttctgtacatgtgraaaactcacagatgggcaaggcctttggcttggcgagatttgggggtgctaatccaggacagcattacacgccacaactccagtgttcccttctggctgtcagtcgtgttgcttacggtttctttgttactttaggtagtagaatctcagcactttgtttcatattctcagatgggctgatagatatccttggcacatccgtaccatcggtcagcagggccactgagtagtcattttgcccattagcccactgcctggaaagccttcggagagctccccatggctcctcaccaccgagacagttggttttgcatgtctgcatgaaggtctacctgaaaattcaacatttgctttttgcttgtgtacaaacccagattgaagctaaaataaaccagactcactaaatcctttccaataattgactggtggaaggaaaacaaaaaacaaaaactaaaaacctcttagcttttctgcaattcaactttttatttttatttttatttctatcaaagacggtagagagaaacagcttgatgctgtttctacattaaaaaaaaa

SEQ ID NO: 1368 - DNA, 718 bp, Homo sapiens
  misc_feature (678)..(678): n equals a,t,g, or c
  misc_feature (692)..(692): n equals a,t,g, or c
cacaaaaaaaagtacattgctgattccatttcagcatcactcaattaccattctctaactgtctctgatttgtctttaccaaaagccacatctggcataattggcaaaagactttttttttttccccaccattccaatgaacacaaaaatgacattctcaacatcaaatcaaatgatcacatttttattcatattttactccaactgaaatgaaggatataactaatttgtccatttttctttaagcacatatctgtattcattttgataacccagcactcttgattgttcccttactgaatgtttgtctcttagtatcctttgcccattctactcctttaaaaaaactgttgcagtaaccaaagagttatttttgattccacgtctttgtcaaactaaagtcagctctttgaggcttctggattttgatattaaatatgtgtttagcagttcaaattttatatatgtatattctagctcagatccagaaatctatttccttcttatcattctcacttggattcctcaagcaatttaacatgctctaaatatttcttccatgtttatttaggtttcaactctacatacagaatagactaatttaataattttatacaatccttggcctttactttatatgatcttctacatccaatagaaggttggtcaagtaaaccntaaaaacctatcgnacactttttaatctctgaattttcat

SEQ ID NO: 1369 - DNA, 1628 bp, Homo sapiens
  misc_feature (3)..(3): n equals a,t,g, or c
  misc_feature (9)..(9): n equals a,t,g, or c
  misc_feature (1600)..(1600): n equals a,t,g, or c
  misc_feature (1614)..(1614): n equals a,t,g, or c
  misc_feature (1623)..(1623): n equals a,t,g, or c
  misc_feature (1625)..(1625): n equals a,t,g, or c
ccnggaatnccgggtcgacccacgcgtccggcgcgctgccagcagccaggagccaggagccaagagcagagcgccagcatgaacttgggggtcagcatgctgaggatcctcttcctcctggatgtaggaggagctcaagtgctggcaacaggcaagacccctggggctgaaattgatttcaagtacgccctcatcgggactgctgtgggtgtcgccatatctgctggcttcctggccctgaagatctgcatgatcaggaggcacttatttgacgacgactcttccgacctgaaaagcacacctgggggcctcagtgacaccatcccgctaaagaagagagccccaaggcgaaaccacaatttctccaaaagagatgcacaggtgattgagctgtaggtgagcagtgacgtgaagaggggttctagccccgtggaaaacagcccatggttaacatctcaggatgtyctgcattcaaacacccaaggctggtaatgaactttcacatggactgaatattggaggcaaataatagaaggaatagaatatacagtgcctctgtcctgaaggaaaatatcatgcctcttctggaagaaacggactgcacagaggaaggattgagcaatttagcctgcagtggaagaaggtggacaccaaaagcttcaccctgtgttggagctgttcatgcttccatgaggccatggtgtccatgtccgtggaacctaccacagaaaatggctcatgaaaaggggaatccgacccaacacacagcttcctacactgccatcttatcaacagttaggcactactttgtagaacgattagcttcaccctcttagctgccaggagatcccttcttaaagatggactatgtgaagattcgggagtcctgaaacatggggactccgggatggtctctagccctatcgatgatgaacactggccttctggaggggaaatggcagtctgggctggcgtggtaggaagggctttggtgttcatggaatgggcctgctgctctcagaccttcaaaggatggaaccaacgaaggaccaaatgagaaagcagatgctgtgccttgcagagggccatgaatgtcagttattatttttctccttatacaattattttgtggttattattacaatgtacatggctgttgcatagaagacatgactggtggaggctgaggaaagccatgacattctacaattgccatcaggctaaggccccgtgagcatttctctcccttgtaatattaaccctgtatttctgggatcacatcacggaatattctttgcctttccactttccaggaaatctctcggactgggctaccctccttgtgtgtgatgaaagatgagctatatttcagaacaaagtgctgtgttgtcatratttgcctggactcccagggcgtctcttacccaacttgataacgatgctgttcattagcagcctttgttaactgataaccaagagcggtaatgtgatactcataagcaattttctgtgtgtaggataaaataaaccatcttgtatgggatctgctaaaaaaaaaaaaaaaaaaaaaaaaaaaaagggcggccgctctgagaggatnccaggctttacgtnacgccgtgncngcg

SEQ ID NO: 1370 - DNA, 1297 bp, Homo sapiens
  misc_feature (1280)..(1280): n equals a,t,g, or c
gcccacgcgtccgcactccgctcggctcaccatgtgtcactctcgcagctgccacccgaccatgaccatcctgcaggccccgaccccggccccctccaccatcccgggaccccggcggggctccggtcctgagatcttcaccttcgaccctctcccggagcccgcagcggcccctgccgggcgccccagcgcctctcgcgggcaccgaaagcgcagccgcagggttctctaccctcgagtggtccggcgccagctgccagtcgaggaaccgaacccagccaaaaggcttctctttctgctgctcaccatcgtcttctgccagatcctgatggctgaagagggtgtgccggcgcccctgcctccagaggacgcccctaacgccgcatccctggcgcccacccctgtgtcccccgtcctcgagccctttaatctgacttcggagccctcggactacgctctggacctcagcactttcctccagcaacacccggccgccttctaactgtgactccccgcactccccaaaaagaatccgaaaaaccacaaagaaacaccaggcgtacctggtgcgcgagagcgtatccccaactgggacttccgaggcaacttgaactcagaacactacagcggagacgccacccggtgcttgaggcgggaccgaggcgcacagagaccgaggcgcatagagaccgaggcacagcccagctggggctaggcccggtgggaaggagagcgtcgttaatttatttcttattgctcctaattaatatttatatgtatttatgtacgtcctcctaggtgatggagatgtgtacgtaatatttattttaacttatgcaagggtgtgagatgttccccctgctgtaaatgcaggtctcttggtatttattgagctttgtgggactggtggaagcaggacacctggaactgcggcaaagtaggagaagaaatggggaggactcgggtgggggaggacgtcccggctgggatgaagtctggtggtgggtcgtaagtttaggaggtgactgcatcctccagcatctcaactccgtctgtctactgtgtgagacttcggcggaccattaggaatgagatccgtgagatccttccatcttcttgaagtcgcctttagggtggctgcgaggtagagggttgggggttggtgggctgtcacggagcgactgtcgagatcgcctagtatgttctgtgaacacaaataaaattgatttactgtctgcaaaaaaaaaaaaaaaaaaaaaaaaacycggggggggcccggnacccaaatccccccaaa

SEQ ID NO: 1371 - DNA, 2704 bp, Homo sapiens
  misc_feature (1438)..(1438): n equals a,t,g, or c
gggccatcctggcggtcaaatccacgcggcagaagcagcagcacctggtccagcagcagcccccctcgcagccgcagccgcagccgcagctccagccccaaccccagcctcagcctcagccgcaaccccagccccaatcacaaccccagcctcagccccaacccaagcctcagccccagcagctccacccgtatccgcatccacatccacatccacactctcatcctcactcgcacccacaccctcacccgcacccgcatccgcaccaaataccgcacccacacccacagccgcactcgcagccgcacgggcaccggcttctccgcagcacctccaactctgcctgaaaggggcagctcccgggcaagacaaggttttgaggacttgaggaagtgggacgagcacatttctattgtcttcacttggatcaaaagcaaaacagtctctccgccccgcaccagatcaagtagtttggacatcaccctactgaaaacttgcgattcttcttagttttctgcatacttttcatcacgatgcaggaaacgatttcgagtcaagaagacttttatttatgaacctttgaaaggatcgtcttgtatggtgaattttctaggagcgatgatgtactgtaattttattttaatgtattttgatttatgattatttattagttttttttaaatgcttgttctaagacatttctgaatgtagaccattttccaaaaaggaaactttattttcaaaaacctaatccgtagtaattcctaatcttggagaataaaaaagggcggtggaggggaaaacattaagaatttattcattatttctcgagtactttcagaaagtctgacactttcattgttgtgccagctggttgaaattaaaactctgatattactttttttgaggatttttatttttgtttttgcttaaacatatagtttgtctagaagtttaaaaagctaaaagttaaaaatggtgtaattatgaaaatctaacactcaagatagtttctaaaaggaaatcagtagttaaggatacctgatttcaaaatatttaaagcataacctaactgatggtaggatgattgtatcttgaatatgtggtagggccacatctattgtaggaaaaccttgcttttatcatctgtgtgtaaagggcttaataaggagaagaggccttttgactgatttgtgagtataaatgcatttgctgtttcatttcaaaaatgttgtggaggaaaagagtacatttaacttgtataagagaatatttgtactcctgtccaggctgcaggacctttcttcgagagctttgcacacttgacttgaaccacattttctgatccctttactttgttttagaagcacactgaaaaatctcgttgtttaaagtacaatttgtaaatatttcaaaggtctaggagtcataacttttngttttcatactgaaaatgatgttgatcagagaaaccaactgttttgcttttcattgctctgtgagaaatttgaggattctgttttgctgttaggtaagctaaactcagaaattgaaaaggaaaagactggataaacacaggattttcagtaagaaaacaaccccagtcttgtcttagaagccacttgttgaggagtctgttgggggaaaaaagaggatatgcttttaaaggtagaacaaaccttcttctgtgttaaatcaaaaggatgttcaaaatccaccaggacagatgctacttgggtttaaatggagccatagatgatacaaagtcctcttggggctgaaaatcacttcctatttgcatggctttactaactggtttctgttttccattatctttttcacagaaagtcttggtcagtatttttccagcatttaaattgaaacggtcagtattagaccactgctaggttatgtagtcaagaaataaaaatagaattacatgctacagatgtctttattctccttccatctagaaaggagttccaaggtcaaattactttttagtgcaatagttaaatgacattttgagatcataactcatatccaaaaagttgcagggaaaattaaaatagctttcccctattaagctaatggcaaacaaaacttaagtggacccccacttccagtggttgtttaggttgcagttgtgaaaatatgctgccaacatttaaaaacttgtttcatatgtatatatgtatacacatatatgaatatgtatgtatatatacatatatgagaacatgtgtgtacacatatatgaatatgtatatatgtgtatgtatgtatatatgtatatgaaatgagagccacatctaaagatttcttaaatcaagtttggttcagcttccttagaactgtggctgtactttttgaggagtacctcatagtactatatttttaatgcatgcaaatcataatagctccaaatgaaccacagttttttcccaatggaggatttttttttaattcttgtactaaaaaaaaaaaatccataccaaatatttttacaaattaagattgatgtaggttttaaaaaaggcatttgtatgttgttagcttacatatggggctaggtaatttcattgcttaaaaagatgcgcctaggctccctcttggtggctggatttctttttcttcscycgtggtggccatggttcttaatagggccaccggaatcakggtttctttcttttttttttttttt

SEQ ID NO: 1372 - DNA, 910 bp, Homo sapiens
gagtgcccctgagcctgtgtcctaggtttccctgatggaccaagccttctccttttgagactcctcatccagtttctttagttcttcatatatcactgtttttcagatctctggctatccttgccattgacctcagaaatcctgtatttgaccttaaccttcttatacccagtccatacccaaagtgatggaaatggaatagatttctttttaaagttttaaacgaatattttgactgaaaaattttggcagtcttgtatgcaaatgacactgcagagcattgttttctcccccccacggtaggarattttattcaactaaggcacaggcatattaaaagactttcagtataaggaaaaggggtaagtttawtccctccaaatttgactacagctcgaaattgtctttattaatgcaaagttcttttgtcaccttgactttgggacactgttaccaaacctcgtgggaaatatcaagttccagaagattgaatacatgcaggaaacaaatgttttttgggccctagagtgaacatttggtccatatgaaaatgaccaggaagacaattaggtgaaggttttttaatgatttgtgctacgtcagtctcttcccataagacatattcaaagttttaacttttccttaagaggcttccatggggagcaagcatttgataattcatcctttaagaaaaacaccaccgtacactgcttgaagagttcctcttctattacttaaaacgtttttattgtgcaacatttaaggcatacaaaaacatataaagaataccatgatgaaaatctatgactgtattaccaagcttaagaaataaaacagttgagtgatctctcatttatgactaaattaacttattaaaaccattaaaacttttggattattcctgttaaaa

SEQ ID NO: 1373 - DNA, 1823 bp, Homo sapiens
  misc_feature (29)..(29): n equals a,t,g, or c
  misc_feature (63)..(63): n equals a,t,g, or c
  misc_feature (231)..(231): n equals a,t,g, or c
  misc_feature (609)..(609): n equals a,t,g, or c
  misc_feature (1729)..(1729): n equals a,t,g, or c
ctgcaatggaaacgatgtcggccaaacanaaacaactgggaaaatgggcccctaactgtgcancaactgtgcgtcacctcccgcctcccagctccccgcaggamtcccgcctctaccttgtcttccccccacgactcctctgctctctcccaaactccttcccaccacctgcagctctttgaccaggacagctccaatgtgttgtcaagtgagtgtccccagcaggaggcntggcgggtgtgggcagggagggacgasaaggggcgggccgtgacctccctttggcctcgtccccagcgcttcctccaggatccctactccaccaccttcagcagcttctcccgagtgaccaacttcttccggggtgccctgcagccacagcctgagggagccgcctccgaccttcccccgccacccgacgatgagcccgagcctggattcgaggtcatttcctgtgtggagctggggcctcggcaaccgtggagcgggccctccagttacagaggaggagtgggcacgccacgtgggccctgaaggtcgcctgcagcaggtccctgagctgaagaaccggatcttctcggggggtctgagccccagcctgcggcgcgnaggcctggaagttcctcctagggtacctcagctgggaaggcacagctgaggagcacaaggcccacatacgcaagaaaacggatgagtatttccgcatgaagctgcagtggaaatctgtgagccctgagcaggagcggagaaactcacttctgcatggataccgcagcctcatcgaaagggatgtgagccgcactgacaggaccaacaagttctacgagggtcccgagaacccggggctgggcctgctgaacgatatcctcctcacctactgcatgtatcacttcgacctcggctacgtccagggcatgagtgatcttctctccccgatcctctacgtcattcagaacgaggtggatgctttctggtgtttctgtggcttcatggagctcgtgcaagggaactttgaagagagccaggagaccatgaagcggcaactcgggcgactgctgctgctcctgagggtgctggaccccctgctctgcgacttcctggattcccaggactccggctctctctgcttctgtttccggtggctgctcatctggttcaagagggaattccccttcccggatgtccttcggctgtgggaggtgctgtggacagggctccctggccccaatctgcacctgctggtggcctgcgccatcctggacatggagagggacaccctcatgctgtccggcttcggctccaatgagatcctcaagcacatcaacgagctgactatgaagctgagcgtggaggacgtgctgacccgcgccgaggccctgcaccgccagctaaccgcctgccccgagctgccccacaacgtgcaggagatcctggggctggccccgcccgcagagccccacagcccctcgcccaccgcctccccgctgcctctgtcgcccacccgggccccgcccaccccgccgccctccacggacacagccccgcagcccgacagcagcctggagatcctgcccgaggaggaggacgagggcgccgactcctaaccccgccaggcagcctcgttctgcacaggcactttagcccgagccaggcacacctgcgagggggcaggtgtgctccgccgccctgctgataagctggcttcattaaactgacacttctcawgtgnaaaaaaaaaaaaaaaaaaagggcggccgctctagaggatccaagcttacgtacgcgtgcagggacgtcatagatcttgtatggggtattggaaa

SEQ ID NO: 1374 - DNA, 437 bp, Homo sapiens
  misc_feature (332)..(332): n equals a,t,g, or c
  misc_feature (391)..(391): n equals a,t,g, or c
  misc_feature (416)..(416): n equals a,t,g, or c
  misc_feature (428)..(428): n equals a,t,g, or c
aattcccgggcaacaatttgaaaaactactcgaagttctgcgtttcagccctgaacctgaaacataaaatgaatgcaattgttgttgttaacttgtttattgcagcttataatggttacaaataaagcaatagcatcacaaatttcacaaataaagcatttttttcactgcattctagttgtggtttgtccaaactcatcaatgtatcttatcatgtctggatcgatcctgcattaatgaatcggccaacccccggggagaggcggtttgcgtattggctggcgtaatagcgaagaggcccgcaccgatcgcccttcccaacagttgcgcanctggaatggcgaatgggacgcgccctgtagcggcgcattaaagcgcggcgggtgtggtnggttacgcgcgggaaccggtaacantggccagggccnaaggcccgg

SEQ ID NO: 1375 - DNA, 523 bp, Homo sapiens
gggattacaggcgtgagccaccacgcttggcctgcccttctaatttttagaagtttgtgtttctacctctgaagtgttcatgggagagtgaaggtagagagtggtccagagcaggtgggccccagcacaccctgtgtgtcaactgattcygagaatcatcaaatagacaagaatttaagtcttccgtttctgtggtcatgattaaggtgcattytttaaagacttaaaaacttactggctttaggaaggagagttcttataacctcccagcacaaagtgacatactttcattctctgctacttctgtgtagtgttgcttcactgttaatgtttgtggctcttcaagagccagtctttagttaatcatattaccataaggccgtggttctcaatcggaggtgatttccccagggggacatttgggcatgtcctggaggcattttggttgtcacattggcascccggtgtaawactacctcygaccaaaaaaaaaaaaaaaaaaaaaaaaaggggggcgttcttg

SEQ ID NO: 1376 - DNA, 2155 bp, Homo sapiens
tgatttggtcttccactcagagttgagtggtttatcacagagtgtgttatggcttagaccaatacaggtcccttcttaatagtggtagctcctttttatcctgaggattaagccattacaaactcaaatgaccagagaatgtaatttcttaataagaatttttccttaaatctatattcagctctctatttcagtgcttctctcctaccagaggtgcaaggagtgatcctagaaccacagatacagccaagaccacggagagcttttgacgtcaggggtccactttctccactgaacccttggagacagaatatccagcttctggagagagtgggaaaggataataaacaaatttctttcaactggtaaaacatcatacttcttcagcaaaaggaattcttctagcagagccttcatggatgatatctgtcacacatgccwkcacctgcagtttggaaggcagtggtgaatggatccatgcaatatgtctagaagacacaaggatgagccagccacctgatcttgtcatttataaacttttaagaattactctggtttacttttggtctgaaaatggaaaggcccaaataatgaaataatcttttcagattggaattttacatggccatgaaaatatttctttctattcagaagactgaaatagaggaagcttgagagactcctttcttttaaaagcggctctctgtatctgtttcatttaaaacatttgtgggrttgaaaatcaccttaatgaagtaggcaaacatttttttaagtagtagaggaagtccagaaaacttaatgaaatggttttttttgttgcctgacactgaaagtaactagtaaataaagggtgaacttcttaattattcgaaaactgcttttaatattaggatatactcttttagctcatcttcgctggtcttgaggcttattataattgtcaaatcaacaaagkttctaatagagaagtagaagaaatatcttttgagatgtaagkagcttggkctgkcttctaaagkaatacatacctgktaaacytgaggwatttttttcatactgaaggcattctaaagtttggtactgtcacaaaacagtagtttacagagcagaagcacttagtattagaataagcctgtaggtgtgaaggaataagtgttgcaaaatagttatttatccaagctgtcaattaattgattgaagtagttatcaaaatgtttctgtttctttctttggtatctattaactggtcagtcaaaagctattaaagaatgtttttaaagtcacctaatgctgccagtttgttaaatttggtatacattttaagaatagacattctagagttattaatatggaagcagctaaaatgttttaggaaatctcaaaagttttagaagccacatttgctaaagcataacctgcacttagtctttcttggctatctgtatttttttctcattaattataaataaatttttgttaagtatagtatttaaaagtaagtttaaaggttcaawttgaactgaaatttccccagagagctttgaattcccataagtgattacagcttttactcccgacttgtttttagtaaatgttaataagacaattggtttacaaacacatataaattaaaaaaaacaactgtccatcgttttaggaagaactgaaggaactaaaaatgatatttgcttggaaattaagttagttgaactctttgaaccacagtagaaaccgtttgtgtggcctgtgagawtataagctttttgkttcarctttgaagatgaaaagtgatttaatctcttaatctcatgctttgattgaattttagctctgktccttaaaatatgcaaaaggaaatgtaagtgcatttctagtcacctcatgccactacaagctatttatttaaaagtgaaactttttgtatattattgtgaactgatttgtttatttaaacttttattttggtgaatttacctttgagtttttttatattttatgtcacaaaatgaagtcctatatttttcagtgtttatgaatattaatataaactatttttttctagaatgactaattgtgtaatatctgtattatgtgataatttgaaatctaataaatattttctccatgaaaaaaaaaaaaaaaaaaaaaaaaa

SEQ ID NO: 1377 - DNA, 1724 bp, Homo sapiens
  misc_feature (1590)..(1590): n equals a,t,g, or c
  misc_feature (1650)..(1650): n equals a,t,g, or c
  misc_feature (1701)..(1701): n equals a,t,g, or c
gcagcctgccagccgcgctgctgctgctcctcctgctgtgggaccgctgaccgcgcggctgctccgctctccccgctccaagcgccgatctgggcacccgccaccagcatggacgctcgccgcgtgccgcagaaagatctcagagtaaagaagaacttaaagaaattcagatatgtgaagttgatttccatggaaacctcgtcatcctctgatgacagttgtgacagctttgcttctgataattttgcaaacacgaggctgcagtcagttcgggaaggctgtaggacccgcagccagtgcaggcactctggacctctcagggtggcgatgaagtttccagcgcggagtaccaggggagcaaccaacaaaaaagcagagtcccgccagccctcagagaattctgtgactgattccaactccgattcagaagatgaaagtggaatgaattttttggagaaaagggctttaaatataaagcaaaacaaagcaatgcttgcaaaactcatgtctgaattagaaagcttccctggctcgttccgtggaagacatcccctcccaggctccgactcacaatcaaggagaccgcgaaggcgtacattcccgggtgttgcttccaggagaaaccctgaacggagagctcgtcctcttaccaggtcaaggtcccggatcctcgggtcccttgacgctctacccatggaggaggaggaggaagaggataagtacatgttggtgagaaagaggaagaccgtggatggctacatgaatgaagatgacctgcccagaagccgtcgctccagatcatccgtgacccttccgcatataattcgcccagtggaagaaattacagaggaggagttggagaacgtctgcagcaattctcgagagaagatatataaccgttcactgggctctacttgtcatcaatgccgtcagaagactattgataccaaaacaaactgcagaaacccagactgctggggcgttcgaggccagttctgtggcccctgccttcgaaaccgttatggtgaagaggtcagggatgctctgctggatccgaactggcattgcccgccttgtcgaggaatctgcaactgcagtttctgccggcagcgagatggacggtgtgcgactggggtccttgtgtatttagccaaatatcatggctttgggaatgtgcatgcctacttgaaaagcctgaaacaggaatttgaaatgcaagcataatatctggaaaatttgctgcctgccttctacttctcaaatctttcttgtaaaagtttccaattttttcactgaaacctgagttaaaaatcttgatgatcagcctgtttcataagaaactccaatcaagttaatcttagcagacatgtgtttctggagcatcacagaaggtatattgctagttacactttgccctcctgcagtttcttctctgctcccaacccccatctcatagcatccccctctatttccaatgctcctctccaaccgcttagtttctgaatttcttttaaattacagttttatgaaagcatattttatttacttggtgttgaaatagccctyataaaacctaagcacttggaaacncaataatagtattaactaactagatctattgaatttcagagaagagcctaaatagcaaantttacacaaaaacgagtatgatttagcactcatactagttgagggtttggngccgatagcgactgctaatgaac

SEQ ID NO: 1378 - DNA, 373 bp, Homo sapiens
cccctactttaaggagttctagatatgtgagatactaccttaccctttcagacagttccatgtgagtatgttaaccatacttcttagtcaaaaataaagagaagcctccgggtctttgtgggaacaaagttacaaattaattgaaatccatactcttcctaagcagcttggacctactactgtcccacatgtaagtatgcaaaactacattttgccaagaattaactcatgagaaccattgaacttgtattgaaagtcaccttaacagtggtattgtgctctgtaaaactggaatcttttcccacaagatgcatgtaaataagagatctcaaaaatagaaagactctctttctcaaagaatacaaacaggtgt

SEQ ID NO: 1379 - DNA, 821 bp, Homo sapiens
  misc_feature (1)..(1): n equals a,t,g, or c
  misc_feature (9)..(10): n equals a,t,g, or c
  misc_feature (56)..(56): n equals a,t,g, or c
  misc_feature (725)..(725): n equals a,t,g, or c
  misc_feature (775)..(775): n equals a,t,g, or c
  misc_feature (797)..(798): n equals a,t,g, or c
naagatgtnnttaaccctcactaaagggaacaaaagctggagctccaccgcggtgncggccgctctagaactagtggatcccccgggctgcaggaattcggcaccactttgtatgtatagtagccttttgccctcatcacaacttagtgtgaggtatgtgttcctgtcctaattctacagagaaggaaattggaattcagtgagttcatgttcttacagctagtgactggtcgatccasaattagagcacmggtccgtctgactccaaaacctatatgtgcttttcactataccacaataacaacgaatatttgttctgtacaattcacaactctttggtctaccttattattattattattattactaccactacttacatcttcactagtcagtargtacagccwagattatcacgacccccatttcactggtagggaaactgagactcggaagcttgcccaagatcacacagctggtaagtggaggagaaccaggacttcagacagacttcctgactccagatcttttttttctttccatgacatcacattgctgccttaattcatttgcacaatgcatgattgtatggccagtgttcactgacacctttcctacagaagtatcaatgagcccaggcattacgtagagccatgtggagaagaaaataattcatacctttcagaggagcttccattttagtgggggttgatacaaagcacccngaaagtaaatgccttgagaatagttcacaagttaagaatttaaaatatanggccgttgtttccataatgaanncccataaatttgggccataaaac

SEQ ID NO: 1380 - DNA, 423 bp, Homo sapiens
  misc_feature (400)..(400): n equals a,t,g, or c
  misc_feature (414)..(414): n equals a,t,g, or c
  misc_feature (421)..(421): n equals a,t,g, or c
caataatgtaaaatatgaagtgtatgtgtacacacattttatttttcggtatcttgggtatacgtatggttgaaaactatactggagtctaaaagtattctaatttataagaagacattttggtgatgtttgaaaaatagaaatgtgctagttttgtttttatatcatgtcctttgtacgttgtaatatgagctggcttggttcagtaaatgccatcaccatttccattgagaatttaaaactcaccagtgtttaatatgcaggcttccaaaggcttatgaaaaaaatcaagacccttaaatctagttaatttgctgctaacatgaaactctttggttcttttatttttgccagataattagacacacatctaaagcttagtcttaaatggcttaagtgnaactattccctaantgctggntg

SEQ ID NO: 1381 - DNA, 653 bp, Homo sapiens
  misc_feature (635)..(635): n equals a,t,g, or c
  misc_feature (639)..(639): n equals a,t,g, or c
  misc_feature (649)..(649): n equals a,t,g, or c
  misc_feature (651)..(651): n equals a,t,g, or c
cgggtcgacccacgcgtccgagcaacagccgtagcaaaagcagctgctgctcctgctatgagggtgtatatattttttacccaaagctctggaattgtacatttattttttaaaactcaaagagggaaagagccttgtatcatatgtgaacattgtatcataggtaatgttgtacagacccttttatacagtgatctgtcttgttcctgcagcaaaaatcctctatggacataggaggtgctgtgtcccatgccctcttgccctgacagtgtcccatgggcccccttctgctccctgccccctccctgctactgctgatgcactctcctctccctgcagcccctggcttcccagccttcctcctgaccccttccaacagccttggaactccagctgccaccaccctctgggtcggacactgggacccactggcccagtcttggctgctgcttacccctagccttgatgcctgcccagggacccccagccccctcccgttgccctgcagctttaacagagtgaaccatgtgtattgtacaggcgcggttgtcattgcagaaaccgctgggtggagaagaagccgataaagtctatgaatcaaaaaaaaaaaaaaaaaactcgagggggggcccggnaccnaattcgcccnanag

SEQ ID NO: 1382 - DNA, 907 bp, Homo sapiens
attttttactgctaccacaatactgctgctgttgctgctgctacattaatttatgttgctatgtcattccagtgaaaaatctcaactttcaattatagtgcagatacactatgtaaaatcacatgtttaggttccaagtaatatatggcctaaagaaatcccaaaaatggtaataatcccagtcatggatgccatacacttctaacctgcagcatccccactcaagaactgcctgcctatggtgcctcccactggagcacttcctacccacagcacctgagctgccactgccagggcacctacctatggccccctgccatcctctacagagctattgttttatacatcttacacattagaaaacttagactcaaagttaatctcatttgcctgtgtcagagccaggattgaaacaccagtctgtatgactctataaatcacacccttaactcagtgagctccgaaggcttttgagtgtgaatgctgccacatatcctgttttctaaaacaggcttattctgactttcacagatcacagtgttctcccagtgtgtgaaagcaagacctgaaataaacttttatgctgtatgtgctaacatgcttagggctctattttcataaaacattaacaattttaaagatgatatctaataaacagrccttgtataattatctttttaagattgccaaatgttttctaatatcttactcattgtactaaaccctaggcttctgttcattttaattttaccataaaggtaaaaacatatatataagtcaataggtaactcatttctttcattaaataatcaattaaatacgtcatctatgatgtacaaggcattgtatagaacactatattgccaatcaaagtgctagtaaaaataaaagtttaaaatgtgaaggc

SEQ ID NO: 1383 - DNA, 3036 bp, Homo sapiens
  misc_feature (28)..(28): n equals a,t,g, or c
  misc_feature (65)..(65): n equals a,t,g, or c
  misc_feature (547)..(547): n equals a,t,g, or c
tatctcctttcgtttaaggsccataccnatatttcctacctggagaatgcctggactgttctccnttgttagttcttcaaggagtgacacacgcggccatctgggcagcatgcatttcttacctcagtgcagccgttccccctgagctgaggacatctgctcagggcatcctgcagggccttcacctgggtttgggaagaggatgtggtgccatgatcggaggcgtgttagtcaattattttggggctgctgcaaccttccgaggaattggcatggcctgcttggtgatcctactgctctttgccctgatccagtggctggcagtgccagatgaggaagaagacaagacaatgttggcagaaagaattcctgttccctccagtcccgttcctatagcaaccatcgacttggtacagcaacagacagaagatgtcatgccacgcattgagcccagacttccacccaagaaaactaagcaccaggaagaacaggaagatgtgaacaaaccagcctggggagtcagctcttctccctgggtgacctttgnctatgcactctaccaaattaaagagatgatgcaactcacaagagacaaccgtgcttctgagatacagcctttacaggggaccaatgagaatagggaaaattctcctgctggtagagcccagcctgtcccatgtgagactcactctgacccatctagaaaccagccatcccctgacgcagcagcatctcagacgcagaccagccccgctcaccccagtgtggacccgtgcacagaggagagtgaagagcagcaggctcagctggccgcgggaggacactgagggcatcctgctcatctcamaccctgcatggaatcaggctcctcagccaggacacagggtgaggccccccagccaggatatgcctcccctggaggagcacagcactgcatatgcttctaaatatctaaactcattaacatggaaacacacacacaggagctacagtacatattggcaggaaaaggtaaactttcgtaatctcattggaattacaacagggaaatggagttcaatgaggactttcagttctttgcttggttaggttaaggatgatagaatttctctgccagtgcaktaagagttgaaaccggcagttacactaaktaagtggagggaatgaaagtgtttcgaggtgaatgtggatataatttccctcttctgattatttattcttatttggttcctaacacaaactgggaagagatagaattcatctatactttcttttttcttggagagaaccgtttaaaaaattacaagatatatttaaaaagtaaccagataaaagtagcacatgtgcttttgttaaaaataaagttaaaagttaaagttaaaaaatgaagttaaaagtttcatcagaaactttacatatctttagcaaatatatttttatatgtgtatggcatataatggaaataattctttgagcaacagaagctattattaactactgcaagctaagccgagcttaaaaatgccttttgttttaaatgggctttgagaaaaaaaacagaaacaagcgattatttcaaatcaaccaaccaactcagtatcctgtgttttgatagacaagagtttactaaatatattgatactgtaaatagcctctctcgctatttactatcttatagtaattcaggctctaattagctgagggaatgaaacacacaaaaatcactgaattcctaagagttccttaaataagcagtactagttacaaatcacagtataagatttaagtgcctgggggaaggatacaatttttagaaattacatattgggtcagttttgttttgtttttggtgaggaaaaggtggtaaataggaaaccatgaatgggaaggatggcaataagtagcaactatactttccaatgactaaagaaagaaaatctcagtatattcgttctcatgaagacacagtcagacactggacaatgtaatgtatgcaactgcaaacgttacaactgcagccagaacaatggctgggtggatcgcacgtaaagcttgccactaaaaatcaaagcagaggttaacaggaaacctggggggagtgtggaaaagggaaaactgttttagctgaataaaggtgaattatataatttataatagctgtggatgagcacaggagagagaggaaagaaaagaacagtcgaaatgagcaactcaccttaccctctgaccctgattagacaggatcaattgtaaagtgagggcttctccatgacaccatagttctgcccaatactgcatttgggataagaaattctacacttggatgtctcgcttcacaataaaacacagcttaaaaataaaataactgaaagaaatagaattcagcaaatagttattttttgcacttgaactgaaacgtactgtactgtaaattatgactcattttaagtgacctttaaaakcagatgtatttattatgcttgtgtaattatagaaataaagaaatgggtgacaggcttaacctcacctatgaatgtacagtatgtggatttgtgaaactgactgtaggaagtcaaaaacttgtactgtrtcttgtgtttacagttctgatttattcctttgaaaagcctgctgttttggaaatgcacagttgacatgttgaaataaaaatgaataccatttttaaatgtttcttaaatgataaagatgtgaccaaacaaaagtcctatactctaatgaatgagaccaaattcaacatgcctttgttatggaacatttactgtgacagcagaatcgataatgcagtcatttccagccttgtgagctgacaccttcatgggtttgtggactttgtgactttttcttcctgtccccaaagtgccatatgctaccttaaaaaatattaaagtgaattcaaattacattttgatttgagattttgtaacccctcttgagatccctcaacacacacaggggtgtcacagagcccaggctggtaatcactgccttaatgacttacttcctactctttctccc

SEQ ID NO: 1384 - DNA, 2652 bp, Homo sapiens
  misc_feature (685)..(685): n equals a,t,g, or c
  misc_feature (708)..(708): n equals a,t,g, or c
atgatgatctcattaagtagatcaaaacttcttagaattttcaatttgtggaagattggtctgtgtttaaaagggaaaatacttgataattttttcggtcattttgactttagaacattccaactatatttgctcatagaatacttagtttattaaccagttgctctcttgataactacagatgttgttaaattgtatcagataaacttgatagtcaagcagaagtttttatataaagatatgagcacacatttaaatgaacgttatattaatataaagtgagtatgtaatcatataatttgtaaacatgttctaatatcttaatcattaaagtgttcatgattttaatttagactatagaaattatttcttcagattatctcagtgtcactaagctttgtactatactacggtgaagggagcagtagcagtgtcagttcagagaagttaagtacagatgagaaatagtgaaggccacaggaaggacggcaagtataggatcattttccattatggacgtttccagggaacagccaggtaaaaacaagcaatactttaatctgttttttgtttttttaaggttttacccttctgtattctcccttttcactaatatttgttctttctacagaggttgttggatggatgtatgggaactaatgtcgcaggaatgcagggatgaagnaagttttaattgactcgagttgncttttagaaacactagaaacatatctgcgaaaacacaggttttgcactgattgcaaaaataaagtcctycgagcatacaatatccttattggtgaacttgctgcagcamagaaaagggctactgkgctgactttatgaaggcttgcggtgctktccacatgaacgacacatacatgtttgctgkgraacagacttcattgcacatcttttgggtcgtgctgarccagagttcgcaggagggcgaagagaaaggcatgcaaagacaatagatatagctcaagaagaagttctgacctgcttgggaattcatctttatgaaagactgcatcgaatctggcagaagctacgggcagaagagcagacatggcagatgcttttctatcttggtgttgatgtttacgcaagagttttgagatgaccgtggaaaaagtacagggtattagcagattggaacaactttgtgaggaattttcagaagaggaacgagtaagagaactcaagcaagaaaagaaacgccaaaaacggaagaatagacgaaaaaataagtgtgtgtgtgatattcctactcccttacaaacagcagatgaaaaggaagtaagccaagagaaggaaacagacttcatagaaaatagcagctgcaaagcctgtggcagcactgaagatggtaatacttgtgtagaagtaattgttaccaatgaaaatacatcatgtacctgtcctagcagtggcaatcttttggggtcccctaaaataaagaaaggcttatctccacactgtaatggtagtgattgtggatattcatctagcatggaagggagtgaaacaggttctcgggagggttcggatgttgcctgcactgaaggcatttgtaatcatgatgaacacggtgatgactcttgtgttcatcactgtgaagacaaagaggatgatggtgatagttgtgttgaatgttgggcaaattctgaagagaacgacacaaaaggaaaaaataaaaagaagaaraagaaaagcaagatactgaaatgtgatgaacatatccagaagcttggaagctgtattacagatccaggtaatcgagagacctcaggaaataccatgcacacagtgtttcaccgtgacaagaccaaagatacacatcctgaaagctgttgcagctctgaaaagggtgggcagccattgccttggtttgagcataggaaaaatgtaccacagtttgcagaacctacagaaacgttgtttggtcccgattccggaaaaggtgccaagagcttagttgaactccttgatgagtctgaatgtacttcagatgaggaaatctttatctcacaagatgaaatacagtcatttatggctaataaccagtctttctacagcaatagagaacaataccgacagcatctgaaggagaaatttaataaatactgccggttaaatgatcacaagaggcccatttgtagtggctggttgacaacggctggagcaaattaaataaataaaatagctctgtctttcaatgaaacactcacgatgactactgcgccttctctttcgaaaaactcttaatttagtgacttatggcaaaattttatcttaaatcaatgtgattctttcttgttttgggagacggtggaggtatcctcattagttctttcttcaggcttgtgtctttagttgcgtggctgcgcaggcctgccatatgatttaagccatctcttttcattaaatgtttctcttcctgtgagacttactaaagcaacttagtggcaaaaagtaatgttgtacttataattctgtacagaaatgacaatgagctgaatatatggttttacaaagtagacatccacttgcaaaatgtttggatgtaatgttaaagcgcaatgtgcaaaatttaaaataaagaatatttattaatacgcacagtaaaaaaaaaaaaaaaaaaaaaaa

SEQ ID NO: 1385 - DNA, 327 bp, Homo sapiens
  misc_feature (292)..(292): n equals a,t,g, or c
  misc_feature (309)..(309): n equals a,t,g, or c
  misc_feature (313)..(313): n equals a,t,g, or c
gcaactctgtgggatggacatgcagccgtttggcatggttatgaagttcatggaatggaaaaaataccagaagatggaccagcacttataattttttatcatggagctattcctatagatttttactatttcatggctaaaatatttatacacaaaggcagaacttgccgagtagtagctgatcactttgtctttaaaatccagggtttagtttattactggatgtgttttgtgctctacatggaccaagagaaaaatgtgttgaaattctgaggagtggccacttgttagntatctcaccaggtgganttcnagaagccctaatta

SEQ ID NO: 1386 - DNA, 1253 bp, Homo sapiens
  misc_feature (165)..(165): n equals a,t,g, or c
  misc_feature (210)..(210): n equals a,t,g, or c
  misc_feature (631)..(631): n equals a,t,g, or c
  misc_feature (641)..(641): n equals a,t,g, or c
  misc_feature (673)..(673): n equals a,t,g, or c
ggcacgagtaagacgaagcagagtagacacacccaatacctgaaaaatgttcattggttttactagagtattgaggagggtcctgctgacaccccttgggctggagaggcctcctctgaaagggagccctgggaaagggctgctctcactcttcactcctttctnctccctcagatccacctgttcctcaggtgcctgctcttccccgtnagggaagcccaggagaccaggcagctgcgctcttgacagccaggtaccaggtgagctgaggaaccctctgcttttcctcagggactattgctactgatggagtgtggcctctctctcatcccatctgtagaccttgcctggaatttttttcaatagcagactccagtttgggaattgatcctcttcggagacctggacttcacataaaccaacttcccatctccccagtgccatgagcaaactctgttttctctttgtccatggttgtgtgatgggtgcttattagatgtttaagggttatgggctttattccgtaggttctaatctgttctccctcctcctcaacgtaagtacacagtggataccctctctatgatcttcattctctggccatggtgctacaagtgttctcattcctcanagcagccagnatgtgttatttcaggagtttgtgacattcgangatgtggcttgtgcaccttactcgagaggaatggggatacctggaccctgttcagagggacctctacagagaagtgatgttagagaattatgggaacgtggtctcactgggcatacttctccgccttcccaccacccggattcatagtgtgaattcctgcccggccctgagtcatacccaggcaagtgctttctctggagaaacacttgccgtccttacagcaggaatctccaagagatggcccaagtatcggcttcccatcgatattgctcgtccctgctcggaaactccttttccacgattgtgagatattaaaattgactgatggaatagaagctccccaggatgccaccactgtgtaaaatcgcagctcctcaaattacctctgtttaatttcaaatgttagggtccaaggaagccctctgttgcaaccagatatgttttgaacccagttcattcagaaaccatggttggtggtcatcatctacttgtattgtgaaaaaccagaaattccaaattcagctcttcaaaaaaaaaaaaaaaaaaaaaaaaaaaaaaaaaaaaaaaaaaaaaaaaaaaa

SEQ ID NO: 1387 - DNA, 671 bp, Homo sapiens
  misc_feature (287)..(287): n equals a,t,g, or c
  misc_feature (645)..(645): n equals a,t,g, or c
cccacgcgtccgagaaagggagaagagtcttgtgggggctgggtaagggactcctaaaacaagagtgggcagggacttcacctcttcccgtaatggaagctctgttaaatttttaatttaggagagtttttgtgaaaatgactattttgtttagctcacatgataacatttctataataaatcatactcagcgtgcttatgcgcgaagagactgaactgaagacgctgcagactcagatagcaaaataataagcctacttcatgataaggtaactattagtcattcnaactcctatttcccttaaatatatcttaaatcagttaagggttttaatgttttttttaaattaatagtaatgttatgtttgaaaaactggtttgaaataaactttaaaacctttagaagtttaaccacttaagacttttccagtctgcctcgttatagcaaaaccaaggaaaatttcttttctaagctcctatagagaactggcaatgaaactaaaatttaattgtgtctccaggtctcttatttttctgcaaataataaattatgtactatgatcattttcagataaatcatcatgcatgttccaaaatgattggccaaggtttatttttaagaaacattaatcgtgagtggmaganacatgctatgggccttttgggagaca

SEQ ID NO: 1388 - DNA, 501 bp, Homo sapiens
  misc_feature (397)..(397): n equals a,t,g, or c
  misc_feature (494)..(494): n equals a,t,g, or c
gttgacattttcttcacttgaacaaagatggcagaatcccatttcacatgttggcaggcatgctatttaagtgtgctggtgcctctccacagtaggatcctgctgtgagccttcccttctcatgaggtccttcctgggctcccagataaatgtcatgataaatttggagttgtagctaaagggcagcctaatagatttctaatatataataaatagtagcactaggtcaaaatactgcttaggaatcactttatactccaggtggcttcctccattgtcccctcgccgcctctgcattttgatctgaaagctcgatttcaagattacaaatgagagaaacctgattctcttctgtgacaggagccaggtactgcaatggtttgcaatccaaaacctnataattgtcaagcctcagttcaagagactttaactgggatataggctggatgactgaaacctaacaggctggaaaggtaatagttttggggaatgcncatgaca

SEQ ID NO: 1389 - DNA, 962 bp, Homo sapiens
  misc_feature (795)..(795): n equals a,t,g, or c
  misc_feature (892)..(892): n equals a,t,g, or c
  misc_feature (922)..(922): n equals a,t,g, or c
  misc_feature (928)..(928): n equals a,t,g, or c
  misc_feature (939)..(939): n equals a,t,g, or c
ggcacaggcgaagaaaggaaaaaaggaacttgtcttctagtaattggttatttgcagactctgtaagtatatgtactgaacattaagggtttatagccctggggtttgttcctaaatgggctacaaggagttttacacaaaacttttgcttaatgcttttttttgtgtggagaggacccataatccttataatactctcaaagatggctcaggatcccccaaaatgctaaaaatcacggcctaaaaaattcctgctactacatggaatttgcttcatgtagagctcgcccttacctaaggatacctctgcctgctgtgtatcttagtgatggcaagatcaaggttatcaacaacaggcagacaccccgcagtagtttctctcttagagttgaatgtctggcttagtaaaattctgtccattgaaagcctttctttaaaakgtttgctacaaatgaatgcacagcatgagatatttaaaatagtatcatatactttaggatcaaacaagcaaaaaatactctgatatagtatgtgctacataagcgtttttgttacgtgctaggcctctcaaaatggatttgtagaaaatgacacagaatcacagttcatgccctagtttacggtgctctttttgacccgtgttttggaagagtgatagttatcctactgtaaatagctttcctattacaaatagtagttaacatgtcgtgtataaaatttctggttttccacaaatatctatgaccacaaatcgagaaacgtaatgagttgtgaccaatagttaatatattttcnaaatttaaatgtactaccggccacaaataactgcgttttgggattattaaactatccacagtaatttaaagtggaatcatcctcttcatttatagcnaaattctctagggccaaaggaacatgggantcaggnctggaattacnggtccgatttacattattttccg

SEQ ID NO: 1390 - DNA, 2935 bp, Homo sapiens
  misc_feature (1)..(1): n equals a,t,g, or c
  misc_feature (8)..(8): n equals a,t,g, or c
  misc_feature (14)..(14): n equals a,t,g, or c
ntacaggnaccggnccggaattcccgggtcgacccacgcgtccggcgagaacccgcgcccgcgaacaaagagcgaaccaaagcgatgcttcgaatttttaaaacggaatctctgcacccaaatgcaggactggtgacttaaggagctgcgaagtctgatttaccggcctactctcgacctgccccccacccccagctcaggggaccttttgtctgaacgccagagctactgaccaggtcggggggccgcggtggggagtggaagagccggtcctgctgtccgccctcccagccccaggtggaaggctcagttgtcggaaagacaaaagcgatttcttcccactcctgcagggccagaagttcaggctgccccgcctccactgggggatcgcacctgtgaattacctgaggtatgcatttcccagaaccgtgggcgtacccaccttggggggcatgttggttctggggggaccacctctccttgcattcaggggctgtgaagctgagtaattttcggtcacagggcaggcccctgttgaaatttcatttgtcctgctctgggcccaaaggtggtggtggtttgggtcatcagaggactgcctgggacggttcagcgggcacggagcgctgtgctggcctggctggggatggccgcggaggtgcccttttcctggtgctttgtggtggctgcagaagaccagttttgttgagaactgcttttcagcctggaatcagacatcttccagatggtttggaccctgtccatgtgtaggtcattatcacacaaagagaccaataaaaataaaaaaaataaaaaaaaaaaagacgaactattggaggtggtggccaatgatgcatttactgtttgcaggatagttaaaggtgtttaaagggtaaggcttttggtgtaaatgctggatggggtgtgtgtgtgtgtggatatagggacctccctctgtactgtgtaatcggcattaatacctagactcatatgtatggaattttaaattctcttagcctactgattggtttggatgagcacaccagctgcaggtgtgtgctgaattgcaagatggtatttttttttttaaccaagggatgtctcttgtaatactaaccgcgtgataatgggttttcagacatgatgaaaaaaaaaaacttttacaaatgaatacttaccttagaaatattcaccttaggaaaaaagactttgctctgcccttttatattcctttatgctgcaagtggtgacatgttcagatttctaatttggttcattgtggcctatctggtttaagtctttcattaaaaatgtctcgttagagtatttgatgtcatgcaccaaaaaaataaaaccccaccttgttgcaaaagctgacctcgttgcatggaattaaaagagaaggaaaaacacaaggatgaagtctttccgaattcattcttgtgggaactggccttcggagccagccagcactttgggcaaatgcaaacaacaatgagtgcttgagataaaagaaagtgtgacgtcatggtcactggtactcaggcacttcacagtttacttgaaagaggctttggaaaatagataaagtgaaagaagaataaatacatatttttaataatgtaattttaaaaatcctttataatcaggactgagtcttggtttgcagaagctgtcacttaccctgaaacacagtatcaaaagggaaacttaaaacatactgtttgatttttttatttcctcttacaatccatgttttcaggtagaattatgactttccccccattgttacacatttctttacaaaggaggcctgtagaaattggacacgatcatgcttgagcatgtgagttagtcaaattatgagtccctgcctattgtccattacacaccgaatgttaatttaagaaccagaggcagaagttctggcttcctgcttgaaacccaattcttatatgaaattttttaaaagcagaaacctagcagcccatctgctttttctcttttgtcggtgtatttggtacccctccaatgctggtctttttgtagaaactcagtagagaaagtctagctaagcagtgttgaaaagcctgcaagatttcagtttacatatcgacagcatatccactgatttctaaatgggctggtcccatcatctgaagattctgtatagaattattaaaaaaaaaatccatctttctttattttcttcacatgcgacaatttcttaagcactttgacattttggtagttccacactattgagagaataatatatttattttgtgacattgcagatgccaaatactgtaaccttctcrtgataacaatacttaggttcaagatcactgttcaaaccctgtcatgctttaaaactgatgcgagatgattttgttttttgcataatcaatacttaagggtgcaatcaactgttagtaattgtgcagtaaagtaaagccctgtggtgtatcaactactagttaagagtctcagttgatttctgtaatgtttgacctaataatagcccgtttcgtctctgacccaacagaggaagcacagatcaaatcaccttggagtggtcaccagggggacagggagccccccaccaatgtatcaatgggtgatttatgatgccttctgccctttggcgagtgaatgggtttcccataggggaagttggcctccctccgtgagctttggaaatgttttctaatagacacagggaggccagttctgtttcagagcaattatcttcccaaattctctgttctggtgttggaactgtgtgccctggtttctgttttcctttctactgctgtaattctctgtctcatcatccttctcttttgtttccatagccttttataatgcatatatgatgctgtgaacagaaataaattatttatacaatcaaaaaaaaaaaaaaaaaactcga

SEQ ID NO: 1391 - DNA, 626 bp, Homo sapiens
gtggacgcctgtaatcccaggtactcgggaggctgaggcaggagaatcgcttgaacctgggaggcagaggttgcagtgagctgagatcatgccattgcactccagccctgggcgacagagggagactttgtctcaataagtaaatacataaataaatagattaattaaaataaaaaggatctccagggctgcattgcttctggaagctctagggcaagcttttccagcctgcggcatacggccaggactgctttgaatgtggcccgacacaaatttgtaaactcttaaaacattatatatttttcttttagttcatctgctgtcgttagtgttattgtattttatgtgtggcccaagacagtcgtcttcttccagtgtggctcaggggagcaaaagatcggaagcccctgctctaggggagtgagttcattttattgccatttccagcttccaaaggctctctgcattccttagctcgtggccccatccgtctgtcttcaaacctaccagtgtagcatcttccaagcagtccctcaccactaccctgtcwccccggccctctcactccccttctgtggccacgatgcctcagggaaagatggcattttaggcagcaggtaagaacg

SEQ ID NO: 1392 - DNA, 583 bp, Homo sapiens
  misc_feature (571)..(571): n equals a,t,g, or c
  misc_feature (580)..(580): n equals a,t,g, or c
ctgtttaggttatagtctattgatactttttatatacaattttataaatataaatattataattttatattaatggtaccaaaaatacatttcttaaggttaaaagcatgcacttccatgcatacttgcttttggggagagtggggagaagacattctaataatcagtttgtgaaatagcttctgttggaaaccttttgaggggaataaggaatggtcatctaaaatgagagattctggattttaatgcagttcaaagttgagctgtatttttgttgttgatttatctggattttttttaaagccttctaaaacccagtgaattcaataccttaattagtacatactatcttatgtaatgcataaagcaatgccagtcactgagaacatttaaatatatttatattcctggagatacacattctcatttttgttggtttattataaattattcttctagatgcatcttttataactaggatttcattttgtgtgtatagcttatgtaataaattttaaaggtgaaaactctcttaaaaaaaaaaaaaaaaaaagggggggccgccccaagnggcccaagntta

SEQ ID NO: 1393 - DNA, 517 bp, Homo sapiens
acatatggaactcatcattcattttaaagtatggtggccattggcggtgacaaaaggaaaagaagcaaagagactcagtccataatgctgattagttagaagaaagggctaggattgagaaagtaccaggaacttttaattatttaaaagagaatgctgactgttaatgttttaaatcttactgttcaaatgtastaatatgaatttttaccctttgtgcatgaatattstaaacwactagaagacctccacaatttagcagttatgaaagttaaactktttattataaaaattctaaaccttactgctcctttaccaggaacatgacacactatttagcatcagttgcatacctcgccaatagtataattcaactgtcttgcccgaacaatcatctccatctggaagacgtagcctttagaaacacatttttctattaatttctctagaacttcttttcggtataatctgtaagaaattaaaaatatatatcaacttctggataaataaaaaaaaa

SEQ ID NO: 1394 - DNA, 1230 bp, Homo sapiens
  misc_feature (15)..(15): n equals a,t,g, or c
  misc_feature (18)..(18): n equals a,t,g, or c
  misc_feature (86)..(86): n equals a,t,g, or c
atgttagattggtcnacnccagggtctgctgaacagaacggatggtctgggcttctgctgactcagcagcagccttagaaacgagnctggccctgtatgccgccagggccttcaggtattcttttttggcagcttctgttttccttttatatacctgcttttgttcttctccaaggctgtcccacatagatgctacaatttktgagacctctccaaaggttgcattggggttttgacctttaattgcagcctgtgtgtctctgaaaaacagggcatatgctgacactggcttctgtggctcattgggatctttctkttkctttktctttggagtcttgggcttcttgccagagtctggagcagctcttttctctccaatggctctgttggcttcatcagcatcctcttcattgatggagctggaaggggagggagtggctgatttgcttgctggaggtgaaggagatgtgtgaggcatactggcacctcccaaattcaaccccaactgggcgctgagctgagactggttgatggtggtgagctgggcaggaggcatgaccccagaacgcgcacatcggtcatgtggacgatggaccgcatgatcagggagggatcctgccggtactgggacacttgtgtgtggctctgatccatatgcaacccactgctatgaagcacgccatcttgttccacgagatttcttgagattgtaatggaagggaggtccaggctttgagggggaaactggggtgtgaattcacttccctgggaaggcaatggatcgctgagggcttgaaagggtagcagtacatccggcatgcctagggcagggtctgactctggaggaggcgtgattggtggaatttcgaattcctcgtccccaaggcttggtgtgtggaatgtctgctcactggcagcgaagaacgcattgttcgcctcagccatattcatatagttattattatttccaaacttgctgtagccgtagtaccccaggcactgcgcgaagtccaggctggcagggtccccggccgccgcggggtagaacctcacatccatgccgaagctgggcccggggccgggggccgggactggggttcgccggggccgggacccgcctcctcgccgccgctagatccaccgtcgagggcgcccgggggtggcgcgtgggactcgcggccggaggggcgccgggacccagagcccgaggagctcgggagccgcggccgc

SEQ ID NO: 1395 - DNA, 382 bp, Homo sapiens
  misc_feature (340)..(340): n equals a,t,g, or c
aagcaacgaaatattatgatgttctaaatcctacctaaatattcttactcttaaagctatggtcataaaacccactggctttcttcaaaaggtagattacattattagaaagttgtaaagatatattatcaccaaactaaaactttgcttttgctttattcagaggaatttaaagataatagacaagaaatttctatttagggctatgtccctgtaccacactttagggaatgaaacactgtcatatgtcctgtcagataactgagttaaacatttcactttgcagttaacaaaacagctagagcctaggtataatgctgtggtatgtgtcttagttttngctttttccgttctctcataataagtgatcctgagtatgtct

SEQ ID NO: 1396 - DNA, 1202 bp, Homo sapiens
gagaactagtctcgagttttttttttttttttttttttgctttacattacttggtatgtaaataccttgattaaaaccttgtaaaccaatttcaaggttactataagttgtatagtacaagtgttttttaaaaatcttggggtgtttttaaaaattaagatatattttgcccaagaatttttttaacaagattgctaaaaacatcttatttagacacttcaatgtaccaatttataattggatattcagtttaaatagtacacagagttgtggcttttattttcaattaatttttttccttgtgggcagtgtgcatggtataataagcctgagcagaggcttaagttgtatgtgtgcagagtttgtaaaggaatcaattggaagatgcagaagaccgaggtttgctttcaaggtatttttcaggctgtgtgggtaaaatttgcctcaaatttctatcaaacaggaatgtaaaatagataaaatcctatgtatttgaattgtcagagctagggagtgcaaatgttttggcaatgtattcaaaatgctggcctgggcaccaaagagaaaatagccttttacagttacatagtaagatgcgattagtacccacaaattactgttttctaaacatttgaagttttacgattagctttaaaataatgattttataaattggtggtcacaataattttggtattactttcctccttttcccacttagcaatatagccaaatgtattcaacataaaaattcatagggtctgaaattcatagctgggccaaattttttatggcaccttagttttaccataatggtcatctattacactcttctgttataaaatatacccttatttcttttgtttatagtatctttgaggaatgtttttggaaaagttaatttatattttatagggagaacactcaataaattatgttaactgtgcccccgagttaaaaattttatgagtatatgtgaaacttgaacaactgaagactttttttaattgataaaaatgcttagtatgcctgttttggtctgccagtaaattaagtagcttattgagataactaacagctaaatatagctgtagtgtttcctgactgtatattctatgatttaataaaattatccagactagttatattgccacagtaaacatgtgactgaagtgtccttcatcttaatctgaaagagggca

SEQ ID NO: 1397 - DNA, 575 bp, Homo sapiens
  misc_feature (555)..(555): n equals a,t,g, or c
  misc_feature (559)..(559): n equals a,t,g, or c
  misc_feature (562)..(562): n equals a,t,g, or c
  misc_feature (571)..(571): n equals a,t,g, or c
gatacctctgtggtatgagtatttcagggaaaaagaaagcaggcatggcacccattcgattttccctgacagcatctgagatccttttggggagacgctgaggagtgtttgctgccatgtactcttacagctctatgctgacactcccatttgatgtggtccagaacttagacctcagtccttggatcagccctgtggtccctgcaagcaggggcatctttctgcatgtgagccagcccccttcctgttcaagggttctgctggatctgggcttttcctgtccttcacttctgggatgattcaccccacatcttccagtaccctgtaaaccattttaaaatatttagaaaactatcctcccaaaaatgcttttgaaaatgagagccctctgtccctgccacttacagctagtctctttgggataggggtgtatgtggagagattcatgtaagtctcacatgagtgacctgtgcccctatgtgtactaatgtgtgtactgggtcagaaggtgccctgggttcccacagaccttggtttcctgcctgggtgggtggnaagnaanggaacttanagaa

SEQ ID NO: 1398 - DNA, 1672 bp, Homo sapiens
  misc_feature (311)..(311): n equals a,t,g, or c
  misc_feature (1652)..(1652): n equals a,t,g, or c
atataagcaacacttcttcggattgtcggccctcagaggagagtgagctgctcacagatactaccaccaacatcctttccggcaccacttctactgtcgaatcagatatattgacccaaacagatagagaggtggctctgcacgaaaggagtagctctgtttccactattgacactgcccggctgattcaagcttttggccatgaaagagtatgcttgtcacccagacgaattaaattatatagcagcatcaccaaccaacagaggagataccttgaggaagcggrcaaacacagcaagaaagtgctgaantacaggtcatcccctagtgacttctgagcacaccagaaggagacacatccaggtagcaaaccatgtgatttcttctgactctatttcctcttctgccagtagtttcctgagctcaaactctactttttgcaacaagcagaatgtacacatgttaaacaagggcatacaagcaggtaacttggagattgtgaacggtgccaaaaaacacactcgagatgttgggataactttcccaactccaagttccagcgaggctaaattggaagagaacagtgatgtgacttcttggtcagaagaaaaacgtgaagagaaaatgctctttaccggttatcctgaggacagaaagttaaaaaagaacaagaagrattcccatgaaggagtttcckggtttgttcctgtggaaaatgtggagtctagrtcaaagaaggaaaacgtgcctaacacttgtggccctggcatctcctggtttgaaccaataaccaagaccagaccctggagggagccactgcgggagcagaactgtcaggggcagcacctggacggtcggggctacctggcaggcccaggcagagaggctggcagagacctactgaggccatttgtgagagcaacccttcaggaatcgcttcartttcacagacctgacttcatctcccgctctggggagcggataaagcgcttgaagttaatagtccaggagaggaagctgcagagcatgttacagaccgagcgggatgcactattcaacattgacagggaacggcagggccaccagaatcgcatgtgcccgctgcccaagagagtcttcctggctatccagaagaacaagcctatcagcaagaaggaaatgattcagaggtccaaacggatttatgagcagcttccagaagtacagaaaaagagagaagaagagaagagaaaatcagaatataagtcataccggctgcgagcccagctatataaaaagagagtgaccaatcaacttctggggagaaaagttccctgggactgacacaagtttattttcctcagagccttggaattctattttatgaacctagagaagcagaatccttacttttgtgagtctggttgaataaagcttattctttgtccatgtgtattttagaaatagtaacttctaaagagtctggaacaaagtggtgattaaaattcctaatggtttgggagcaatactttctgcatagtggccttgtccaatggcctgtgtgttacaatgatatgatcatttctcaagaataagtccctttttgtatgtgtttttatacttttagaaaataaaaactttagattaaaaaaaaaaaaaaaaaaaaagatatnctcggtcgtcaagggaattg

SEQ ID NO: 1399 - DNA, 448 bp, Homo sapiens
  misc_feature (334)..(334): n equals a,t,g, or c
  misc_feature (404)..(404): n equals a,t,g, or c
ggcccatcctgggtgaggctggggctctcctgggcactgtatgtattctggatacagggatactgggctcgctatgtgtgtggarccatcccttccttgccccagccccacctccctctcaaaccctctctggctctttctgagcttcctttcctgctccccagcttgcccagtgctcagtgccccacttggctcttttgctacttcgggtcaggtggaacctcttgggaatgtgaartgccttacagaaagattgcacttcaagargarargctscagggaaccatcctaaacccaaaagcctggaacttactgkgtcactttacttttgttnacaagggtctccttaatgccctcgaaaaagatcttgggcctgaacttctatcctgaaggccacctctgtncaacccaactccctcaactcttaggtgttatctcaattggaaaa

SEQ ID NO: 1400 - DNA, 882 bp, Homo sapiens
  misc_feature (867)..(867): n equals a,t,g, or c
gcttccttgtaggaaatgaccttcactctgggtttaactggagtggcatcacctcccagggagacagttacttcctggaggargtggtgtttcctccacccataggtgccctgccccatcctcatggtggcagcaaatcagcatgtgctggggagaccctggggtagcagccactgacctcacacctggaggaagctgtgtgaccgattcatgagcttatgcctgaagacagagcaagcactccccgcaccacgacgatgacgttcacttgtwttgwgtttttcgatctcttcaacgccttgacctgccgctctcagaccaagctgatatttgagatcggctttctcaggaaccacatgttcctctactccgtcctggggtccatcctggggcagctggcggtcatttacatccccccgctgcagagggtcttccagacggagaacctgggagcgcttgatttgctgtttttaactggattggcctcatccgtcttcattttgtcagagctcctcaaactatgtgaaaaatactgttgcagccccaagagagtccagatgcaccctgaagatgtgtagtggaccgcactccgcggcaccttccctaatcatctcgatctggttgtgactgtggcccctgccgtgtctcctcgtcaggggagacttttaggaggccgcagccttccatcaccggatcagtttttcctcttaggaaagctgcaggaacctcgtgggctccagggacccaggcccacatccatccagcgttcccgctggctgtgggacagacagggaggggcctgtacagaaacaccacactgtttattaaatcacaatgatttttattaaaaaaaaaaaaaaaaaaaanaaaaagggcggccgc

SEQ ID NO: 1401 - DNA, 423 bp, Homo sapiens
  misc_feature (254)..(254): n equals a,t,g, or c
  misc_feature (375)..(375): n equals a,t,g, or c
  misc_feature (417)..(417): n equals a,t,g, or c
ccaccccagggtctggtccctgacgacgcgcagtgagggccccgccgctaccccagcagtcgcctcccaagttcgcggaacgcagctgaccggctccctctggactgggtgacatgactgctcccaagcagtcgtttgtaaactgagtttctgtaaaacaattttatttttcatatgtgactgtagcggggtatgatttgaactttgttttccgtcccccagcccggattctctgtcttctcctgtacagccgntccgttttcttacctcgtctccgtcaccgaggccctcagccctgaacacaaggactgggcagtttccctattgattcctgaacctggaacttaagacatcttccgaggggcccccccttgncacaccctttagctgatcgacttacaaatacctgggattctntccccg

SEQ ID NO: 1402 - DNA, 856 bp, Homo sapiens
  misc_feature (369)..(369): n equals a,t,g, or c
  misc_feature (730)..(730): n equals a,t,g, or c
  misc_feature (747)..(747): n equals a,t,g, or c
  misc_feature (811)..(811): n equals a,t,g, or c
  misc_feature (843)..(843): n equals a,t,g, or c
cccacgcgtccgctttttttaatctatgttattgtgagcttgtgcaatgcaagtggctcttattataataatgaaatagctactccatttaattctttacatgtccaatgccagctttctctccgtttgcctgttagccgagaaccctgtgcaactctctcctggatgtcatgggaaatatgacaaagagasaacacttggtcttggcctcaaaggactcgtaatacagaagacccgagaaggatgtacctgcagggttatctacagsagaaatttaatmaaatacttggcacatcgcagttacaaagaaagttttcaacgtgggccattggccactgcaggtttctttgtgagaaacatttgtgtgtntttttatccgagggaacaaaaccctaggaaaggaagtttcatcatctactcccatttttcctccttcttgaacaaaacttttagctcaaggaacactgcttttgaaggcttgtgtttcatgcagcctgcttccttagttgatctgttcacaagatcacatcaagtaatttyttccattctgggaagatggcgaaaacaaacagatactgtcagcagatgttgatgaaccacctttccagaaataaacagtggcagggaacagagaaagcctggagaatccccatcagtcatcagccggagaagaccttttcctgggctggagtccttgctgggggaacgtctgttctctgcagcctgaagnagctctgggccaggagncagcactcagcaagtcctaagaccaattaccatcctgggtccattttgggtttgtaaagtcatngaatttttctctccagggccttagtgcccgtntgtaaatgtacca

SEQ ID NO: 1403 - DNA, 641 bp, Homo sapiens
  misc_feature (536)..(536): n equals a,t,g, or c
  misc_feature (576)..(576): n equals a,t,g, or c
  misc_feature (606)..(606): n equals a,t,g, or c
gtagtaattgaattattatcagaagtaaattgacctcaaaaaaagtaattgggaaaattaagtttatggcactttgtgtaataactgtattgatgatgaagagaaggttagtactgtaatttgttttgtataagtctagtgcatatttggattgagtatgtttttaaaaagccattgaaaaccacattttgtttggctttagttacagtctttgactgtcccaactattaactttattaactttattcatacacatagaaatacattacacaagcatcaaacataaacattcagatcactcacttcatctttctcctgggcctaaaactgtcagtatatttgcagttttctgatatgtgttgtctgcattcagaggactgtcaagagtcatagataggcatctgaatgaagctttgagcttcttaaaatgcaaggtgggtgaaacacaggataccaggaagagaaaggatattgttcatatagttgtggcagtggccttgagaactgtcttggctagagatagattaggaatctgnattaatcctggacattggggttcctttagtggatcccttnagctttccctgcccggctctacccattagntatccagcaatttatgggccagttaggaacctcca

SEQ ID NO: 1404 - DNA, 712 bp, Homo sapiens
  misc_feature (705)..(705): n equals a,t,g, or c
ggtggtggttcatggatgttgataaggaattaaaatgtaccgtgcgactctctgtttcagtggtgacttttacctgtttagtataaatattcctttgcttccaaccataaatgtgttcttagaaatgggcctatagtttagtaacctatagtttggtaataggcttgtttgttttcagatggattttggttctgtgagctaaagctattttgcattaaagccttcgtcctcacacattgttttgacatatttctagtcttcataaacttttttaatttagatttttttcccttcacaagtatacatctgttttagcaaatagccttatgaaggttgtagatgtattattttgggcatgcctggtgatttctatattttttccaattacatttaaagctttatgttttaggaatataagtacattttatttctactttttattatatatatttaattgcacaagtactactgtctagaaaaaaatgggatgttgctaacacagcattgttggcttgtaggcagtgctgtcctgtaaatagattgaaatgtatttttatcagctggtatataaatttgaggaaagaaaaaaaaaaaaaaaaaaaaaaaaaaaaaaaaaaaaaaaaaaaaaaaaaaaaaaaaaaaaaaaaaaaaaaaaaaaaaaaaaaaaaaaaaaaaaaaaaaaaaaaaaaaaaaaaaaaaaaaaanggggggg

SEQ ID NO: 1405 - DNA, 920 bp, Homo sapiens
aatttttcacttccagacggcgatacagggattccagatgcgcttttaccgttccggtactgatattcagcgctctgccgatctccttatttgattcgcccgccgctaacatggttaaaatctcccgctggcgggcgcttaacgatttgagatctttaatgtccttttccggcgtcgtccgccagtctccaggcagaaacatcatccccatcgccgcactatttaccgccaacgcaaatgtctcgacggttgaatcacgaggcacaatggccagcacattaaaatggataacttcctgtaaccaccgtttattgcaatccgtcgccgtaattaacaccttaacctcaggaaattgcaccacggttttttgcagcaaccagtagcaaaactcaccatcctgatcgccatcgagcataactaaggcttcagggtaactttccagcttttgccataactcgtctgcctgactggccccctgaatactcactcctggaatacgctgctgtaaactgattttcattccatgaataaatattgactgcctgtcaaacatgactatttgcataactgaatctccacctgaatacgttaaaaagacttaagtagtggaagggtattacccgcgagaaaaaataagaattcgccatttggcggtggccattctacagagatgacgtgtagaaaatagttaccgatataaatagttacagctaaacgcctgaaattacatgtcgagggcactatttaaaacaattttgaggatttccttatattggtggttagtacgcatgcaattaaaaatgaaattccgcgaccacaagccaaaataacaaacggcaaggagacaaaaataagcacaaatagccaacacgtcctctgttcactttaaagggaatcgctgaaaaatacgctctgtttaa

SEQ ID NO: 1406 - DNA, 1101 bp, Homo sapiens
  misc_feature (930)..(930): n equals a,t,g, or c
tcgacccacgcgtccgcccacgcgtccgcaaccccctctttaaaatgcaaaatggcccttccctaaaataacacacaaccacaaccgcagctggctctgcacgaaggccatgctgcagctcttttcttcggaagtcgattttcctccgtggaatttggctgggcttgtggtagcgtttgagactctgcaagagcacgtccacgccaaccagtctctggtcaccgactggctcgcaaattccccatttaaggaaaccagcaggcctctgttatgaaactcggggaaggaatgtgaattatgctccatgcggaggctcctgctcctgcacgttttccagccttttccatgggccacggtggagcatttggggaaggcctgtgtggattcccccccaagtccagactgatgcccctgataccttctcaggaggtggcggagggtctgggctctgtccaggctcctaggggtggggacgtgcaggtaaagcaaggcgtctgccgcagacgcgggagccttccctgggctggctgccagcaccttggagtcccaggctgccaggaaaagttcacccacacccgggctttgctggcgaagggtgagtcatatgatggccgggctcgggccctcagcagacaccaagtgtgttcccagagcagccgctcagcgcctgtaacctggaacaggccagcytttcggggsctcagttttctcatctgcctaatgggaatagcaattcccaccttccctgtgttggttgggttctcactagatgcacaggagacagcagcttkagagggactgtttggararctgttccatgtgacacccctcttaccctgtccccacggggccggaggagcaggggcttggtgatagcagctgggcgcagtcagcctctgcagggaagagggcatgtttggttcgaggctnytatgccctcattcttgttgatcttgtcacagcccctctggaaggtggagatggtactcgctcaggaacgataccactcaaggaagcatggccccctggatggggtggcccttggtgcacctgaggctcctgaggctgcagagcaccatggtgggggaggaggcggctgtg

SEQ ID NO: 1407 - DNA, 448 bp, Homo sapiens
  misc_feature (448)..(448): n equals a,t,g, or c
ttaggcagaatgatcacctccgttgtttcaggtactctgtgtttatttatgcaacagttcatgtaaaatggagacgaggccagargawtccttgagcagmcagagccagttgggcctcctaagtgaccttaaccttgcttgatttgcaagcatgtctgaaactttatttgtggtatttcttgtaaatgcctatgttaaagaaacacagaacttaagctcaaccaatcagaagcagccaacaaaaacgtaattagtaactaggacttcctcatgggatagaccaaataaggcaactgtataactgtgtaactgtataactgtaaccaatgaaatattatctttgcttttatctatttgtcctaaaaagcctcctcctcatgttctctctggggagctccctakccacttctggmtcactgctcaaataaactcytaaatattttaaaan

SEQ ID NO: 1408 - DNA, 763 bp, Homo sapiens
agatttaccttgagcactttccaaattgatactttcaaacttattttaaagcagtagaaccttttctatgaaytaawtcacatgcaaaactccaacctgtagtatacataaaatggacttacttattcctctcacyttctccagtgcctaggaatattcttctctgagccctaggattgattctatcacacagagcaacattaatctaaatggtttagctccctcttttttctctaaaaacaatcagctaataaaaaaaaaatttgagggcctaaattatttcaatggttgtttgaaatattcagttcagtttgtacctgttagcagtctttcagtttgggggagaattaaatactgtgctaagctggtgcttggatacatattacagcatcttgtgttttatttgacaaacagaattttggtgccataatattttgagaattagagaagattgtgatgcatatatataaacactatttttaaaaaatatctaaatatgtctcacatatttatataatcctcaaatatactgtaccattttagatattttttaaacagattaatttggagaagttttattcattacctaattctgtggcaaaaatggtgcctctgatgttgtgatatagtattgtcagtgtgtacatatataaaacctgtgtaaacctctgtccttatgaaccataacaaatgtagctttttaaagtccattgtattgttttttctttcaataaaagagtataattaattgtgttgtttttga

SEQ ID NO: 1409 - DNA, 319 bp, Homo sapiens
  misc_feature (274)..(274): n equals a,t,g, or c
  misc_feature (295)..(295): n equals a,t,g, or c
cgttgccagtgtatgacaaaagtaggagttagtaaactaatatattttgtacattttgttttacaagtcctaggaaagattgtcttctgaaaatttgatgtcttctgggttgatggagatgggaagggttctaggccagaatgttcacatttggaagactctttcaaattataactgttgttacatgtttgcagtttattcaagactgctgtatacatagtagacaaattaactccttacttgaaacatctagtctatctagatgtttagaagngcccgatgtatgttaaaatgnataaggtattaaatacccctttgg

SEQ ID NO: 1410 - DNA, 1575 bp, Homo sapiens
  misc_feature (1450)..(1450): n equals a,t,g, or c
gcaagttcagattcgtattttggatgtcaatgacaatatacctgtagtagaaaataaagtgcttgaagggatggttgaagaaaatcaagtcaatgtagaagttacgcgcataaaagtgttcgatgcagatgaaataggttctgataattggctggcaaattttacatttgcatcaggaaatgaaggaggttatttccacatagaaacagatgctcaaactaacgaaggaattgtgacccttattaaggaagtagattatgaagaaatgaagaatcttgacttcagtgttattgtcgctaataaagcagcttttcacaagtcgattaggagtaaatacaagcctacacccattcccatcaaggtcaaagtgaaaaatgtgaaagaaggcattcattttaaaagcagcgtcatctcaatttatgttagcgagagcatggatagatcaagcaaaggccaaataattggaaattttcaagcttttgatgaggacactggactaccagcccatgcaagatatgtaaaattagaagatagagataattggatctctgtggattctgtcacatctgaaattaaacttgcaaaacttyctgattttgaatctagawatgttcaaaatggsacatacactgtaaagattgtggccatatcagaagattatcctagaaaaaccatcactggcacagtccttatcaatgttgaagacatcaacgacaactgtcccacactgatagagcctgtgcagacaatctgtcacgatgcagagtatgtgaatgttactgcagaggacctggatggacacccaaacagtggccctttcagtttctccgtcattgacaaaccacctggcatggcagaaaaatggaaaatagcacgccaagaaagtaccagtgtgctgctgcaacaaagtgagaaaaagcttgggagaagtgaaattcagttcctgatttcagacaatcagggttttagttgtcctgaaaagcaggtccttacactcacagtttgtgagtgtctgcatggcagcggctgcagggaagcacagcatgactcctatgtgggcctgggacccgcagcaattgcgctcatgattttggcctttctgctcctgctattggtaccacttttactgctgatgtgccattgcggaaagggcgccaaaggctttacccccatacctggcaccatagagatgctgcatccttggaataatgaaggagcaccacctgaagacaaggtggtgccatcatttctgccagtggatcaagggggcagtctagtaggaagaaatggagtaggaggtatggccaaggaagccacgatgaaaggaagtagctctgcttccattgtcaaagggcaacatgagatgtccgagatggatggaaggtgggaagaacacagaagcctgctttctggtagagctacccagtttacaggggccacaggcgctatncatgaccactgaaaccacgragaccgcaaggcscacaggggcttccagagacatgggccggagcttcaggcagctgctgtttgcactgaacgaggaattcttaaaaaatttatttcactggttaa

SEQ ID NO: 1411 - DNA, 1313 bp, Homo sapiens
  misc_feature (1249)..(1249): n equals a,t,g, or c
  misc_feature (1268)..(1268): n equals a,t,g, or c
  misc_feature (1283)..(1283): n equals a,t,g, or c
  misc_feature (1291)..(1291): n equals a,t,g, or c
  misc_feature (1295)..(1295): n equals a,t,g, or c
caacaccccatctctctctctctaaaaaaagagaactggccgtgagctattgtgcccagctgggatcttgacaaagacactatttctctcctttcacctgtgctgtgtatttttccctcgcctagttcccagacctcactgctatatgtcttctccctggcaggcaggatgacgcaaaacacggtgattgtgaatggagttgctatggcctctaggccatcccagcccacccacgtcaacgtccacatccaccaggagtcagctttgacacaactgctgaaagctggaggttctctgaagaagtttctttttcaccctggggacactgtgccttccacagccaggattggttatgagcagctggctctaggggtgactcagatattgctgggggttgtgagttgtgttcttggagtgtgtctcagcttggggccctggactgtgctgmgtgcctcaggctgtgccttctgggcggggtctgtggtgatcgcagcaggagctggggccattgtccatgagaagcacccgggcaaacttgctggctatatatccagcctgctcaccctgrcaggctttgctacagctatggctgctgttgtcctctgcgtgaatagcttcatctggcaaactgaaccctttttatacatcgacactgtgtgtgatcgctcagaccctgtcttccctaccactgggtacagatggatgcggcgaagtcaagagaaccaatggcagaaggaggagtgtagagcttacatgcagatgctgaggaagttgttcacagcaatccgtgccctgttcctggctgtctgtgtcttgaaggtcattgtgtccttggtttccttgggagtaggtcttcgaaacttgtgtggccagagctcccagcccctgaatgaggaaggatcagagaagaggctactgggggagaattcagtgcccccttcgccctctagggagcagacctccactgccattgtcctgtgagcygccaaagaccccacggggtgcccgcatgtccctgtctagggcagcccagggcccccactcctggctcctcacacttgcctcccctatggccgctctccagaccctcctcctttcttctccccacatccgcacctgctgttcccactctggggttctcaagtccatgaacagatattgttgcattttccacaatgctgattaaacataataaacaatccagaaaagcaraaaaaaaaaaaaaaarggcggccgctctaaaaggatncctcgaaggggcccaagcnttaagcgttgcatgngaagtcanaagncttttccctaatagtgaa

SEQ ID NO: 1412 - DNA, 530 bp, Homo sapiens
  misc_feature (22)..(22): n equals a,t,g, or c
  misc_feature (469)..(469): n equals a,t,g, or c
cactaagggaacaaaagctggngctccaccgcggtggcggccgctctagaactagtggatcccccgggctgcaggaattcggcacgagtgaacccttgcttgatacgcacatagtgaatggagaaagagatgaaactgccacagctcctgcatcacccacaacagayagctgtgatggaaatgcttctgacagtagctacaggactccaggcataggcccagtggctccccctagaagaaagaggggcagaaacagaaaccaaggtacaagagagggaaaatggggaaagccctctggaactggagcagctggaccagcaccatgagatgaaggagactaatgagcaaaaacttcacaaaatagccaatgaacttttgcttactgaaagagcttatgtcaaccgacttgacctcttagatcaggtattttattgcaaactgttggaagaagcaaaccgaggctcgtttncagcagagatggtgataaaatcttttctaatatttcatcaataaatgcttccatagtaaat

SEQ ID NO: 1413 - DNA, 1410 bp, Homo sapiens
gaaaatgtatataataggcaaggaaagaaatacagtactgtttctggacccttataaaatcctgtgcaatagacacatacatgtcacatttagctgtgctcagaagggctatcatcaccctacaactcacattagagaacatcctggcttttgagcacttttcaaacaatcaagttgactcacgtgggtcctgaggcctgcagcacgtcggatgctaccccactatgacagaggattgtggtcacaacttgatggctgcgaagacctaccctccgtttttctactagataggaggatggtagaagtttggctgctgtcataacatccagagctttgtcgtatttggcacacagcagaggcccagatattagaaaggctctattccaataaactatgaggactgccttatggatgatttaagtgtctcactaaagcatgaaatgtgaatttttattgttgtacatacgatttaaggtatttaaagtattttcttctctgtgagaaggtttattgttaatacaaggtataataaaattatcgcaacccctctccttccagtataaccagctgaagttgcagatgttagatatttttcataaacaagttcgagtcaaagttgaaaattcatagtaagattgatatctataaaatagatataaatttttaagagaaagaatttagtattatcaaagggataaagaaaaaaatactatttaagatgtgaaaattacagtccaaaatactgttctttccaggctatgtataaaatacatagtgaaaattgtttagtgatattacatttatttatccagaaaactgtgatttcaggagaacctaacatgctggtgaatattttcaactttttccctcactaattggtacttttaaaaacataacataaattttttgaagtctttaataaataacccataattgaagtgtataatataaaaaattttaaaaatctaagcagcttattgtttctctgaaagtgtgtgtagttttactttcctaaggaattaccaagaatatcctttaaaatttaaaaggatggcaagttgcatcagaaagctttattttgagatgtaaaaagattcccaaacgtggttacattagccattcatgtatgtcagaagtgcagaattggggcacttaatggtcaccttgtaacagttttgtgtaactcccagtgatgctgtacacatatttgaagggtctttctcaaagaaatattaagcatgttttgttgctcagtgtttttgtgaattgcttggttgtaattaaattctgagcctgatattgatatggttttaagaagcagttgtaccaagtgaaattattttggagattataataaatatatacattcaaaaaaaaaaaaaaaaaaaaaaaaaaaaaaaaaraaaaaaa

SEQ ID NO: 1414 - DNA, 1442 bp, Homo sapiens
  misc_feature (1377)..(1377): n equals a,t,g, or c
  misc_feature (1419)..(1419): n equals a,t,g, or c
cttctatattagatggacagatttatatacttttccatggaggattaagtaaactgaaacctaagacacacgaagaaattctaagtggaaaggccacttattagttagtttacagcagtatcgtaagtgacaggatgataggagtgtggtaagtgatcaggataataatctgcttagtaagagaaacaatttgaattttagaaggaaattgccttaccatttgcaaattaaggtaattaaaatacagtgaatttcaaaatgcctttttaatgacaatgtgtgaacttaatttgttttaataaaccaaaattgttgttattgtgttaaggctattttacattgaatgtgtatcttgccactgatgttaacttatcccatcttacccaaggttgtaggtaacaatatactattgggtgacagtggactaacatctctagtgatccctttgtcagtggtctttaacttaaaataatttagagaatatggtttctacaacttacatttttgtttwcttgtaactacagattattatgatggttgtaatgaagattatgagtataattggagctatatgtttctgaattctgaacaactatttataaaattttatcctacttttttctgttgaacatatgacttctctggtctgctaaacacatacagacctttagttttggtttacatggatttaaatatatagatatatcactgtaaaataaacttcaggtgtaacagatttatagagaaagtaatcatatttgtttatggttgtgtacctactttgagaagaaaagaaaaatattagaatgaacagataattttacaagtgttgatcacttaccagcaaaccagaaacttcagagattttgaaagcaaatctattttctctgctgtgtattaaattcatttatctaaaatgttattgctcctggcttagaatcatcttgtgcaaattctctttttttgttgtttgtctgtttgcctgttgctcaccatagacataattttcttttcataaaacattctttgtataatcacctcagagattatgaaagtgactttgataaaatttaatggtgttcacaaaataattttcacgtgagtaatttcacagtgcgtgtattgtatgttatttagtgtattttatattttgtttcaattagagaatgctattgaatccagtttttgtttagttactgttcattttactttataaaattgacataattgagtttattaaatttattgggccaatttaagtaaacagttgaacgtttcataagtcatgaggtctttttgggcatatacatgaagtaaacaaagacaatactaggctatgtaataggraggctaccttaattaggaggtaaatattcnttttggaaattgggcccgtgggcctcgggtggaaaatggggnaatatccctaggtaaaaaaatgg

SEQ ID NO: 1415 - DNA, 1689 bp, Homo sapiens
  misc_feature (19)..(19): n equals a,t,g, or c
  misc_feature (976)..(976): n equals a,t,g, or c
  misc_feature (1671)..(1671): n equals a,t,g, or c
  misc_feature (1680)..(1680): n equals a,t,g, or c
agctccaccgcggtgacgnccgctctagaactagtggatcccccgggctgcaggaattcggcacgaggttacattcagtatggtaatgaagaacagagaaaacaggcttttgaagaattgcgagatgatttggttgagttaagtaaagccaaatattcgagaaatattgttaagaaatttctcatgtatggaagtaaaccacagattgcagagataatcagaagttttaaaggccacgtgaggaagatgctgcggcatgcggaagcatcagccatcgtggagtacgcatacaatgacaaagccattttggagcagaggaacatgctgacggaagagctctatgggaacacatttcagctttacaagtcagcagatcaccgaactctggacaaagtgttagaggtacagccagaaaaattagaacttattatggatgaaatgaaacagattctaactccaatggcccaaaaggaagctgtgattaagcactcattggtgcataaagtattcttggacttttttacctatgcaccccccaaactcagatcagaaatgattgaagccatccgcgaagcggtggtctacctggcacacacacacgatggcgccagagtggccatgcactgcctgtggcatggcacgcccaaggacaggaaagtgattgtraaaacaatgaagacttatgttgaaaaggtggctaatggccaatactcccatttggttttactggcggcatttgattgtattgatgatactaagcttgtgaagcagataatcatatcagaaattatcagttcattgcctagcatagtaaatgacaaatatggaaggaaggtcctattgtacttactaagccccagagatcctgcacatacagtacgagaaatcattgaagttctgcaaaaaggagatggaaatgcacacagtaagaaagatacagaggtccgcagacgggagctcctagaatccatttctncagctttgttaagctacctgcaagaacaygcccaagaagtggtgctagataagtctgcgtgtgtgttggtgtctgacattctgggatctgccactggagacgttcagcctaccatgaatgccatcgccagcttggcagcaacaggactgcatcctggtggcaaggacggagagcttcacattgcagaacatcctgcaggacatctagttctgaagtggttaatrgagcaagataaaaagwtgaaagaaaatgggagagaaggttgttttgcaaaaacacttgtagagcatgttggtatgaagaacctgaagtcctgggctagtgtaaatcgaggtgccattattctttctagcctcctccagagttgtgacctggaagttgcaaacaaagtcaaagctgcactgaaaagcttgattcctacattggaaaaaaccaaaagcaccagcaaaggaatagaaattctacttgaaaaactgagcacataggtggaaagagttaagagcaagatggaatgattttttctgttctctgttctgtttcccaatgcagaaaagaaggggtagggtccaccatactggtaattggggtactctgtatatgtgtttcttctttgtatacgaatctatttatataaattgtttttttaaatggtmtttttaaaaaaaaaaaaaaaaaaaaaaaaaaaaaaggggggnccccccaangggccccaa

SEQ ID NO: 1416 - DNA, 708 bp, Homo sapiens
  misc_feature (675)..(675): n equals a,t,g, or c
ggttttggatgttgctgccggcatgattaaaccaggtgtaactactgaagaaatagatcacgctgtacacttagcatgtattgcaagaaattgctacccttctcccctgaattattataatttcccaaagtcttgttgtacctcagtgaatgaagtcatttgccatggaataccagacagaaggcccttacaagaaggtgacattgttaatgtggatatcactctttatcgcaatggttatcatggggacctgaatgagacattttttgktggagaagtggatgatggagcacggaaacttgttcagaccacatatgagtgcctgatgcaagccattgatgcagtgaagcctggtgttcggtacagagaattgggaaacattatccagaagcatgcccaagcaaatgggttttyagttgttcgaagctattgtgggcatgggaatccacaagctttttcatacagctcccaatgtaccccactatgcttaaaaataaagcagttgggagtgatggaagtcgggccatgtatttacaattggagccaatggtttgtggaaggcggatggcaggatggaaacctgggccagatggttgggactgcggtggacaagagacgggaaagcggtctgcttcaattttgagccaccaacccttcctggttcaacaggacaantggttgtggaaaatccttaaccccggcggcttt

SEQ ID NO: 1417 - DNA, 838 bp, Homo sapiens
  misc_feature (753)..(753): n equals a,t,g, or c
  misc_feature (810)..(810): n equals a,t,g, or c
  misc_feature (813)..(813): n equals a,t,g, or c
  misc_feature (831)..(831): n equals a,t,g, or c
acccacgcgtccgctcataccaccaatcctgagcaaacccttcctggaactaatttgacaggatttctttcaccggttgacaatcatatgaggaatctaacaagccaagacctamtgtatgaccttgacataaatatatttgatgagataaacttaatgtcattggccacagaagacaactttgatccaatcgatgtttctcagctttttgatgaaccagattctgattctggcctttctttagattcaagtcacaataatacctctgtcatcaagtctaattcctctcactctgtgtgtgatgaaggtgctataggttattgcactgaccatgaatctagttcccatcatgacttagaaggtgctgtaggtggctactacccagaacccagtaagctttgtcacttggatcaaagtgattctgatttccatggagatcttacatttcaacacgtatttcataaccacacttaccacttacagccaactgcaccagaatctacttctgaaccttttccgtggcctgggaagtcacagaagataaggagtagataccttgaagacacagatagaaacttgagccgtgatgaacagcgtgctaaagctttgcatatccctttttctgtagatgaaattgtcggcatgcctgttgattctttcaatagcatgttaagtagatattatctgacagacctacaagtctcacttatccgtgacatcagacgaagagggaaaaataaagttgctgcgcanaactgtcgtaaacscmaattggacataattttgaatttagaagatgatggtatggtnacntggccagccaagaagggnaaccctt

SEQ ID NO: 1418 - DNA, 932 bp, Homo sapiens
tttttttttttttttaacagtttctaaaacatttttattgtaaaaagttcaagaagccatttacaagccaaaaagtatcagaattaaataacacataatttttatagacacatttttctgtacaaagggctgatctttataggaattttaaataaataatctaaaaatcaatgtcactgattgcaaaataggtctctctctcgaccgtctcaaggtgacatgcattctatgcagccaaaagatgaggggtttgacatctgtgacgagcccgggcagtgagtctctggcgaagatttctcactttcttaataagattctgtcccgtggtgtcccattctactgctcttctatttaaagaaatctgtgttgagggatccatttcagaagagtcatttaattgtgaggttctaggcaaacagcttgagtcctgttcattttggaacctgggttcttctttatgacatggattttcagcatgttctacagccgcatttatctcttgctttaaaaaccactttctagacgcatctgaaagagcagaagctttctttgctgatctcaaacggaactcttttccttcagcttccttccacttcttggcttcctcctccaccattgcatttattatctctatttctttccttctgttttccctaaggagtttggctacttcctggtaacatttgtttcgttgtagatcatcacatttttgtttatgtaaagactgaatctgccagtcggtatttaggcatgcttgttcagcctttgccaaattttctttaatcaccttctgagttttctggctctgggtttcacctgcttctatcagcttatgaaacatgtgttcttcaagatccacttttcgtctataggcatctgcatctgctcgcatttcttttgcaagagcttcttgattttcagtaagattcttc

SEQ ID NO: 1419 - DNA, 765 bp, Homo sapiens
  misc_feature (671)..(671): n equals a,t,g, or c
  misc_feature (749)..(749): n equals a,t,g, or c
  misc_feature (751)..(751): n equals a,t,g, or c
  misc_feature (760)..(760): n equals a,t,g, or c
caaaatcagtgctgtgcccggcgtcaggcgtggagacaacagaaagttgtgcttaaagctcgaatcagaaatccccggcgagtgtctctgtgtcctccctgcttctctgctctgtgccatccttactttgcaccattcctattgcaattacctcaaccagttcgctgccctcggtctctcaccagccagagtgatcatttaaaatgccaatcagttcctgtgggccttgggaatmatycagaggagccccattggctgagagataaaattctgtttttacctgggcacgcgggctctccaggatttgattccagcttacctttccagtcttgattccctatattccagtatttggaaatgtgggccttggactgaggctttaccaaataacgctgarcacctagtattgccttttgcacgaatggtactgatggtgcccaagataactgcctccamccccaagttcaggacccagatcactctctggagaaggcctcagcctcttgcctkggctttcaaggctctgcgtgatttggatactcgcttagctcttatttatatatattttaaaagcatcagcagtttatctcatgcccactaaactatcctgcctccgtaccctttgttcatactttctgctctgtgtggaatgcccttctttcttcccctgntctttctcttagacccaagggttctcaagccttatttctgcctctcccatctcaaaaaataaaataaataaataaacntnataaaaaantcaaa

SEQ ID NO: 1420 - DNA, 532 bp, Homo sapiens
  misc_feature (38)..(38): n equals a,t,g, or c
agtgagctgagatcatgccgttgcactgcagcctgggngacgagcgaaactctgtctcaaaaaaccaaaaaaacaaaaaagcaaaaaaaccccacaatccagtgagtaagacctcagccggcctgaggttcacagggtttaaatggaatgcagtgggaagtaaagagtgatcccaaggagaagtaaaaatcttgacaccttactctcttcggcttgtcccacttttcttcaactgccccgctactggaacattttctctttctcaatttcgattgtccccttaagcaatttactaattagacattaaaacttcctattctctcaatcccaaagcaaaactgatgagcagagcaaaccagagcagttggggccagaacagaacaaagacgtacctgatgcagggaattgaagccagacccaaaacggggcaacccaataggatgggccatctgcccccattaatgccagcttgtccaagtgtaattattaacagtgccccctttcactctccaaagagtcctgtccagacagt

SEQ ID NO: 1421 - DNA, 552 bp, Homo sapiens
  misc_feature (1)..(1): n equals a,t,g, or c
  misc_feature (30)..(30): n equals a,t,g, or c
  misc_feature (33)..(33): n equals a,t,g, or c
  misc_feature (363)..(363): n equals a,t,g, or c
nattatccctcactaaagggaacaaaagcnggngctccaccgcggtggcggccgctctagaactagtggatcccccgggctgcaggaattcggcacgagcaagtaatttatatttctatctgttgtgtatataatcgtctctttagagttccagacagctgctagtgtccaaatatgtttttctaaagaaatattttgtttgtgagtaccaacagtcttagtaactctcttatccctcttatgtgctgagtacagtcggaggaagaggaattggagttggtgagtgtgggtttctgcttgaaggaagttgaaaaagatgtagaaagtactaattctcttacgtgttgttatctaaccaatgtnccctttgttacacaaatttttttaaacactattcaaacactttgaataaagcaatctactggtactacagactctagttttcctatttataattgtatgtgttgacccattttatttgttggagggaacattggaatagagcctttaaaaacagtagctgtccatgagcataggatacttgttaatttt

SEQ ID NO: 1422 - DNA, 1100 bp, Homo sapiens
ggctaaattctactcttgaagggtcgtagtccacagcaccaaaatgacttaagtcctataaaaaaaaaaaaaaaaagttaattctctgcactgaagaaagtccatacctggctcattttgggcaattctttctcagttttatctttttctttggctaaatccttaatcatctgcttcagctgtttctgataatcaactgcatcaccttgaaacaaaggaaaacaatatgtggtttaatttaaataaattcagtgacagcaaaaaggaaactatgtaggagagaggagcaagggggtgaggaattccactaagcaaattccatacaaaactggaaagcaagagattcccctggagagccagtgggtggtaactgggggacttctgctctaagaggacccgtgaaacagcaaacaggaggaaggaacttggtggtgggggcaaggggcagccacccagcaacacccccactaggagcacttctgtcctctaaaggcagtgagtttggggataattcattggacgaagggaaaagacaaggctgctacaagaagagggatgagggcaaccctggtgcctcccgccactgcagtggtatgcaggggaaagcaacaatgaaaagaggtacgtgccattgggtttcccgaaaaccaggggtctcgatgttgacaacagaggattcctcaacggcgactggctgtctcggtcattttcagtgagtgcttaaaaaaagatgagaggtttaaattaaacaaattttctgccttaccaaaactgacagtaatgtagctttctaggcaactaaaggctaagccagcagctcccagcctgtggactgtagtttttgcagggtccacgaacccaaatgcacaccaagcactgtctggatacccagagaaaataaaatgtcccccacaccaagtgtgccttttcccagaggtatgtggagactgttgtaattaacaacatacacattcatagaaggacactgctaatactgatttggaaaaaatgtatgtagtgaaatcccattttgtaaaactgaaatatatccatgcacacataaagtactctagaaataaatacactaaatctcaaaaaaa

SEQ ID NO: 1423 - DNA, 563 bp, Homo sapiens
tttacatgttcctccagtgttgagaaaaacctaatgccyttttttgtgttaagtttacctattaattttaatttttgtagagatagaacttagatgacggatttaaccttgaagtaggtttgtatttttaaatctatttgctttgattaccacagacagtgattgaggtagatgggcactatctggctgcttatatgaaggttttgaaaccattctgttaatccttttaacaaatggttatctgtccttttctatcttataataaaagattgaagatatgacttagtatgctcattgtactgtttgcttagagatgggaggctattttratttttcatgctgttctaaatcatgaaagaataggtaactttgtactcatttcttaatttaaatttaagaagcacttgtagattttttgtattggtatttcagatccctattgagttttttaactgaagtcggagcaaatgaattgagcattctgagtacttggctaatcaagtgatgaagaggtagtaatatgaattctgggacctaggcatagatgacctgattctgttctc

SEQ ID NO: 1424 - DNA, 583 bp, Homo sapiens
  misc_feature (1)..(1): n equals a,t,g, or c
  misc_feature (3)..(3): n equals a,t,g, or c
  misc_feature (5)..(5): n equals a,t,g, or c
ntnantaagggaacaaaagctggggctccaccgcggtgacgaccgctctagaactagtggatcccccgggctgcaggaattcggcacgagcatataaattatcttaatgatctaggtattttgttaggggaatacatacagtcaggataggataagaggggaagtaatgagtggtttactaaatatataagacaaacatttcaagtaaaaatttcaggagaaaatttttttttaggtttctaagaaatatatttgtggatgtggaatttttctgycagatgacgtaagagcaaagttgaagatagctaatacytggggattcatakggaggtaattttttatttaaaatgagcaagaaggaccctagccttttattgtggtcttggaaactcattccccaccagtatcattccttgaagaaatggttggttctaggtctggggcaggaaatatatgrgataagctgaaacatcttgactatcagcaaagattttatcaaacgatgctagggttgtgtcagaaggactcagcagccaactgaagacgttcccactggccaaaatagggcacattgagtatctgt

SEQ ID NO: 1425 - DNA, 418 bp, Homo sapiens
ggtactctgttaaaattcctgtgtaaactgggacttttcttttcactttcytgtgtttcaagaacagtaggtgttccagggcttttgtcctgctgggtacaagcaagtaggattttgagaaggtgtgaggaggaggtcagaaaaattggtggaaataggaaagagaaagaaatatggccccgattttggggagagaaagtctggggaaagagcaaaggcaattaaagaggattttgaggaagagacttctgtaaaatatgtcttagcaacactttttggagttgaaaatatttctttttagtgtgttattttttctaagaggtgcctcaagatggataatggaagatttggagtacgattgggttgacaatccaaggagattcggtgacatccagattaccctgaaaaaaaaaaaaaa

SEQ ID NO: 1426 - DNA, 513 bp, Homo sapiens
  misc_feature (435)..(435): n equals a,t,g, or c
  misc_feature (473)..(473): n equals a,t,g, or c
  misc_feature (498)..(498): n equals a,t,g, or c
gcttacataacctacatttatttcatagcttagtgattacattacacagtcagtcagaatccttgattctgctatttactagctaagtggccacaaataagttatttaaatcctctaagcctgcttctgtagttgtaaaatgagagttatagcagcacctaccacctaagattttgaggtttgaatgagaaaatgcatgtaaagctttgggcattgtgcatgatgtaaacactcaaatgttactgaagtcaataaatgttaactattttttagcacacttcagtgggcttatatcaccagtcaaaatgatacacagtattttatttaatggctttatgtaaattatattttactagctattaataaattaactcttggaacttttgccatggtttaatttgaaaaattgaaaataaatggaaaaatcataaaaantccatctattttgggatttacacataataaccactatntggttccaaagtttaaaaatactanccatggctgggccgt

SEQ ID NO: 1427 - DNA, 442 bp, Homo sapiens
  misc_feature (24)..(24): n equals a,t,g, or c
  misc_feature (42)..(42): n equals a,t,g, or c
cctcactaagggaacaaagctggngctccaccgcggtggcgnccgctctagaactagtggatcccccgggctgcaggaattcggcacgaggccctccctgcgtttagattcagttgcaccttttattattttaactcttctccttaggacacgcagcccccaatttktccctccggcctgggcggcccctggtcccgcgcgccacatgggagagcgagggacctgcccgcggcccgccggcgtgtgcaaggaggtccagccgccgcgcccgctacccggagtctgaggacgggtgtccagggacggagaggcaggtgagagggaggtggctaagctggstatggtgacaggacgatgttggccagaaagagtatcatcccggaggagtatgtgctggcgcgcatcgccgcagagaacctgcgcaagcgcgcatccgagaccg

SEQ ID NO: 1428 - DNA, 929 bp, Homo sapiens
ggctgatagctgtgtgtgttagcttgtatatatatttttaaaaatctacctgttcctgacttaaaacaaaaggaaagaaactacctttttataatgcacaactgttgatggtaggctgtatagtttttagtctgtgtagttaatttaatttgcagtttgtgcggcagattgctctgccaagatacttgaacactgtgttttattgtggtaattatgttttgtgattcaaacttctgtgtactgggtgatgcacccattgtgattgtggaagatagaattcaatttgaactcaggttgtttatgaggggaaaaaaacagttgcatagagtatagctctgtagtggaatatgtcttctgtataactaggctgttaacctatgattgtaaagtagctgtaagaatttcccagtgaaataaaaaaaaattttaagtgttctcggggatgcatagattcatcattttctccaccttaaaaatgcgggcatttaagtctgtccattatctatatagtcctgtcttgtctattgtatatataatctatatgattaaagaaaatatgcataatcagacaagcttgaatattgtttttgcaccagacgaacagtgaggaaattcggagctatacatatgtgcagaaggttactacctagggtttatgcttaattttaatcggaggaaatgaatgctgattgtaacggagttaattttattgataataaattatacactatgaaaccgccattgggctactgtagatttgtatccttgatgaatctggggtttccatcagactgaacttacactgtatattttgcaatagttacctcaaggcctactgaccaaattgttgtgttgagatgatatttaactttttgccaaataaaatatattgattcttttctaaaaaaaaaaaaaaaaaaaataacgtt

SEQ ID NO: 1429 - DNA, 244 bp, Homo sapiens
cgcacaaactctttgaacccgctgtaaaagatttgttaattcgcttgccccaaaattatcgcactggcgacgtgattttmatcactatgcagagtctggctgggtggaattccgcactgccacccttgttgcggaagaattgcaccagctcggctattcactggcgctgggtcgcgaatagttaatgaaagtagccggatgggattacctgatgaattcactytacaacgsgaattcgagcgcg

SEQ ID NO: 1430 - DNA, 172 bp, Homo sapiens
cagcaattcggcagggacgggtcgccggctgcttacgtgggcgggcctagtgtggggctgagggtgcgggtcgctatggcggtggacatcacgctgctattccgggccagcgtcaagaccgtgaagacrcggaacaagcgctgggagtggcggtgggcgacggggtcgatgg

SEQ ID NO: 1431 - DNA, 2293 bp, Homo sapiens
tttttttttttttttttttttttttttttttttwactttttaaacaatccattttaatcatctaaattatttacaatacaataacatggattcatcctttttaagacatgggattgtaaaaatcaacaagtgaatgatgcttcaaataatacatttaaatacattaatcaaattttttcagtgcttaaaactttttctccatgggacagcaggctctggacaaaagtgcctagcatacaagttttcccaatttccttctatcataccagctgcacataaaaaggttcatcacctcctgtctccaaagtgtctccctactgagtgttcccaggcagacaatagttcctgggatagtgctgtttggtaacagaaaagcccaagcgtagaggacggattaaaaggcagggaccagaccrccatggatacaaatcccaagacagaggatgccccatgccttccccatgaagcttatctgtctgcctgtgtctccatgattgcaggcatagagctacttgggacctccaggatgatttacttagcgatatgctttttacattctaagaatcaaaatggtcctgtaattcccaatagagaaaatagagccaattcattgttctcccctctcccctctgaagccagtttttaaagatgagccttacccagaaaataagccccaaagaactctcatctaaatgatcagacccttcctaaattacctttggcaacctaggtaattcttttttattacacacctccaacctgaccctttctacagtttcaactataaatgttcatgcccctcrtcaaataacgttgctaggatgaatttgccacaggtttgagtacagagagaacaagcaagaaaaatgtcagtgtttattttaaggagagtggccaggatgtcagtcctcataattggtcccttctctctctctatcctccaaggtaagttctttgttgacttgataagctttagtccttctgtacaacttctagaagatgcacttaatggtgcttctttgcacttccagaactcaccttctattctacctgtaaggctgtaggggagcatcccaatcaacataaggcctacccctttagccacgaaaatcagccaggcatcatgtttctgcaccaccacctgccttcctgacggacactggtgctgatgacaaaaatgggacagtaccgcagctggtttctctttttcgagtgtgtagataagaaataaaaaacattttcattccctcacaagcttaatctagtaatataactgcctaaaaaaaatcaaaccataaataaacctatgtgctaaacaaatcacatgacttgatgacttctctaaaattaatgtcaaggaaaaaaggaaaagttgatcccaagtaaaatcccttgaccacagctgtctgaaattagccaggggaatgggagacaccaccaagaacctcagctctttcctgccctgtatttcaaggggagtgttgtggccttcacaaatgaaaattatgaatcacaaagataaacgtcctcacttctaacctggtgaatcctcaggaatgtcatgaggatgacaacacagggttaattcattttttctcagtctcccccctgactccacaaaagctttgccttcccaacacaaggggctgggaggtccagtctagacagagcatgctgttggggtaaacagtaaccatgtgatcccatgattcccagagctctgagcacaaagcttttcatcccagtggcaactggaatgtgggtaattctgtaaactcatggccacacctttaatgcttggggacagtgggtggagtcagccagagctcttttccaacttcatctagggtcttctctctggaaaagcttagtgacgttctccgaaggtttatttggttaaggagtattgctaaaacactttttaaaaatccactttgaacacatgtgtaagctgaaaagaaaatgacatatatacctccattgaagctgggaaagtgaaaaggctgacgaaatgtctgaaatcctgagcctttcctggttctattttaatacagcgtacaggtaacagatgatctcatttaccttctgaatgacccagcactcaatttccctaaaactgctcagctccacttggaaatcaccaggggacttgagaatcttccccttagactcagggagacacccagaccaggaagaagggcactgatgttttcagggacccaaaagcccacttttttttttttttttttttttggaattcgatatcaagcttatcgataccgtcgacctcgag

SEQ ID NO: 1432 - DNA, 1660 bp, Homo sapiens
ggccgcggatggggctgggaggggacggtcctgccgggagaggcggaggaggacagggtggggttgcgggcccggcgccgcccctcccggctcctggctcccctcgcctggtgccccgcgcctggccgggaggcggcgggtctcgatcgcgcgggcctccctggaggggcgcgggctctggcggcggggaggcccctgctcagcgcaatggcgggcttgcatccttgggtgattttttcgggccccttgtggcctttgctcacgcctagagagcaaaccacccgcaccacccaggagcagataaaatcgagaccacagcctscaagggagcgcgcctccatcctgtttgcccctcgggtcgccgtctgagggcgggcccgtgcccgctcagagcctacatccgagtcgtataaagcgctgacagcagagaaagctgcggctttgctccgtgcagatgagcaggggctgagggaggacgctgtgctctcagtagccgcgcttggcccggggaccctgcaggcttagaaacgtgagtcacgcctgcagcgtggcgaggaaacgccgttgatgtggcatcctcagcctggggttgtggctttaagccagaaggtcaaaaaaagaagtcttcctgagctgagactgccctgagtcgctttaggggcgaaattccgagcatccggttgcatttcctgaggatgacacgcgtggtgggtgtggacggcctacaggggtccatcctcagcggcccctctgcagggcagagtctcgctctcactctcccagctgactcctctcaagcctgttaaccattgtacacgttcccaaggactccaagcaggttggacttcagggaacattgcagtttgggtcttggccattgtttacactccaccttgcatargtgcttgaggatcacacaaccagatacgtagatcatccgtagatcatcgcagtcacatcgaagatttgtttataataggaaaaaaaaaaagctrcccactgtcatgcgctgggaaactrgtgagctgaaggatgacccatctgtaaatggggtgctccctaatggacagggcacccttcagaagcctgtgctgtgtctccttgaccccactgtgagctccccgtcccgcacgctgatctaaatcaagctgctagcccatggagaggcgtccgcacggcagccccggccctgagatgcggggcagtcacccattcaattaggaaacaccagcaagtgccagaagcttctcattagcaggtcagctttcaataactggtttatccaggtgtgtgagacccgataagcagaagggaaagctcttagcgacctatccagctgctctgcactgggctcctgacatcccagaaatcagtacatctgtcttctggggtccaagaggtatttcagtttctctggctttgtttcccgtcatttgtacctggccctgcagactaccccagtatttccatcataatacccctgtgggcaggtgcatacctcatgacaatatttaatattaatagatttctgtgttgtctccagaatggaaaggggctgtctattccttgagctagttggcttgctaaagactattgacttcattcttcttttcctatctacctaataaaccagtgttcatacaaaaaaaaaaaaaaaaaa

SEQ ID NO: 1433 - DNA, 310 bp, Homo sapiens
  misc_feature (115)..(115): n equals a,t,g, or c
  misc_feature (119)..(119): n equals a,t,g, or c
ggcagagttgacacccagcagtaagctaacagtggacacagatactctgactccttckagcaccctttgtgaaaacagtgtctcagaactactgacaccagccaaagcggagtgnagcngacatcctaactctgacttctttggrcaggagggagaaacccagtttggattccccaatgcagcaggaaaccatggttctcagaaagaaagaaatcttatcactgtgactggcagctcatttttggtatgaagcaactctattcattccttgccatgtggctaacttttattacagtcaattttgaggata

SEQ ID NO: 1434 - DNA, 3106 bp, Homo sapiens
  misc_feature (14)..(14): n equals a,t,g, or c
  misc_feature (74)..(74): n equals a,t,g, or c
  misc_feature (106)..(106): n equals a,t,g, or c
  misc_feature (3075)..(3075): n equals a,t,g, or c
gctccaccgcggtngcggccgctctagaactagtggatcccccgggctgcaggaattcggcacgagactggcgncaacaacaccaaggcctttgaggtcccagcgngggccaatttcctcaattccaatgatgtctttgtcctcaagacccagtcttgctgctatctatggtgtgggaagggttgtagcggggacgagcgggagatggccaagatggttgctgacaccatctcccggacggagaagcaagtggtggtggaagggcaggagccagccaacttctggatggccctgggtgggaaggccccctatgccaacaccaagagactacaggaagaaaacctggtcatcaccccccggctctttgagtgttccaacaagactgggcgcttcctggccacagagatccctgacttcaatcaggatgacttggaagaggatgatgtgttcctactagatgtctgggaccaggtcttcttctggattgggaaacatgccaacgaggaggagaagaaggccgcagcaaccactgcacaggaatacctcaagacccatcccagcgggcgtgaccctgagacccccatcattgtggtgaagcagggacacgagccccccaccttcacaggctggttcctggcttgggatcccttcaagtggagtaacaccaaatcctatgaggacctgaaggcggagcttggcaactctagggactggagccagatcactgctgaggtcacaagccccaaagtggacgtgttcaatgctaacagcaacctcagttctgggcctctgcccatcttccccctggagcagctagtgaacaagcctgtagaggagctccccgagggtgtggaccccagcaggaaggaggaacacctgtccattgaagatttcactcaggcctttgggatgactccagctgccttctctgctctgcctcgatggaagcaacaaaacctcaagaaagaaaaaggactattttgagaagagtagctgtggttgtaaagcagtaccctaccctgattgtagggtctcattttctcaccgatattagtcctacaccaattgaagtgaaattttgcagatgtgcctatgagcacaaacttctgtggcaaatgccagttttgtttaataatgtacctattccttcagaaagatgataccccaaaaggagcctatggtcctcatttcaacttctaaggtcgctagattgtttctatcctgaggtattgcatcaattttaatactcctatagttttctcttcttagaagagcacaaacactccatggaacattagagttctgaggcactaccctagcttgtcctctatcatgactcatttttatctatggcaggtaggctgaagcactttgcaggtttacatcttccccagagtaacagcttttccttttcacatatactttccttactgccttactcagtgggtaagttaaagggctgaaggagagttgaatggtccacaagactaccctcttaagaggtttcacaaattccaaacagtaccagtgagagcagcacttccactggggctaggcttgagacctaaaggcaagtatgaaatgcatatgctacttcactccctctcccaacccttaataatgaggcaaagcaagagcctagtgaaggccaatgctaggtttacaaacttacccagaagcctctgcaaagcttcacaggctcctcagatgaaaataacaggaatcaatggggactacggccagacactggtttgccattctgttccttttaagaagtaacagtgctgcaaggaagtccatgtcagaaagccaacagaaggtgatttccacaactttgaacaggttgttacaagtatcagcaagaatgtgtccttttcagaaataacagtcaaatcaaagaaggttaataaaggctttaatttcatacacacaaaaaaactctatgcataatttaaaaaggaaacaaaaacaaagaaaaaccgtaaaggatacagaggaacagttctgctaaaacacagataaaagtgccgctccatacaaaacataaagaatcagaatcaaaagtcactctgaacataaagaaaaaaaatcatctcacaaataatgtggccacagctgccagaaaacctggtagtggctcaattaggcaaagtgtaggaatctcatttttgtttttctctccttaagtttaaagaaacaacaatgacaataggccagagaagttagggagggaaagaaaagctcaaagggagggaaacctggggacaagaggtgtgcacacccacatgtggtctcactcttcacacaggcccactatttttgaagtagaccagtttagttgactgttcttctttgttctggcatctgactggaccaacctggaacctggtccagaccctcacccactctattcttatgccaatggacatacctatactttgaacctctgtacttttaagaaaagtccaatgttacaaaatcaaatgcttatattcagactggcacactttttaaataaaaactccatacacctcagacatatagcacacatggagacaacttactaattgtgtgtaagtatgatacaatgaatgagactgcctgaagtctagtaatcaaagcatgccataaggtgaatgattgtggttaaacacagcaaaataattgtcacaaaactttcaaggcctaacaaattagaattttccaataaaaaatatatattttttcagatgttaataagacatatcagtagagacaaaattaggattttgaagtaatgcaataaaaagatgttggagggcagaagtctatttagtttttgtatacacttgcaagagtgcattactcagtataaagcaaaatggggaggaaaaagacatccatccattttattggaacacttttatgtgacttgaatctggtgttaggttgttgatttttctaaaaatctcctatatatacaaaatccatatgtacttggagatccagctgttgccccctgtttaaaacaaaagaccacctcggggggtcaattaaattaaaaaggccctccaaccaccctaaatgggataactnagagtatctactgcagtcatttcagaggaca

SEQ ID NO: 1435 - DNA, 352 bp, Homo sapiens
  misc_feature (282)..(283): n equals a,t,g, or c
gtcgtctaccgtctcgctatagccgtttaagggaagaaggaggaaaataacccggtatcgttagaggttggtgtgtgggtgggaactggggacccaggggtggtgatgatgaagaccagagcggggttcgggggccgmctccgcctctttcgttctctgctttcccctcccccctcgcgctctctccctcctcccccccatytcagtgccgggaaagccgcctgtgctgcgcctggtggggaaatggtggacgctcatgaactgtgtatgtggtttttgtannatctgtctgtcttgggcccggttttcggggggacccctaaagggtgacctaaaggggaaaaacggtttt

SEQ ID NO: 1436 - DNA, 1967 bp, Homo sapiens
  misc_feature (1956)..(1956): n equals a,t,g, or c
gttgcaggccatcccagccaagaaggccccgctgcagctcttgagccgcctctgcggggaccacttgcaggccatcccagccaagaaggccccggctgggcaggaggagcctgggacgccgccctcctcgccgctgagtgccgagcagttggaccggatccagaggaacaaggccgcggccctgctcagactcgcggcccgcaacgtgcccgtgggctttggagagagctggaagaagcacctcagcggggagttcgggaaaccgtattttatcaagctaatgggatttgttgcagaagaaagaaagcattacactgtttatccacccccacaccaagtcttcacctggacccagatgtgtgacataaaagatgtgaaggttgtcatcctgggacaggatccatatcatggacctaatcaagctcacgggctctgctttagtgttcaaaggcctgttccgcctccgcccagtttggagaacatttataaagagttgtctacagacatagaggattttgttcatcctggccatggagatttatctgggtgggccaagcaaggtgttctccttctcaacgctgtcctcacggttcgtgcccatcaagccaactctcataaggagcgaggctgggagcagttcactgatgcagttgtgtcctggctaaatcagaactcgaatggccttgttttcttgctctggggctcttatgctcagaagaagggcagtgccattgataggaagcggcaccatgtactacagacggctcatccctcccctttgtcagtgtatagagggttctttggatgtagacacttttcaaagaccaatgagctgctgcagaagtctggcaagaagcccattgactggaaggagctgtgatcatcagctgaggggtggcctttgagaagctgctgttaacgtatttgccagttacgaagttccactgaaaattttcctattaattcttaagtactctgcataagggggaaaagcttccagaaagcagccatgaaccaggctgtccaggaatggcagctgtatccaaccacaaacaacaaaggctaccctttgaccaaatgtctttctctgcaacatggcttcggcctaaaatatgcagaagacagatgaggtcaaatactcagttggctctctttatctcccttgcctttatggtgaaacaggggagatgtgcacctttcaggcacagccctagtttggcgcctgctgctccttggttttgcctggttagactttcagtgacagatgttggggtgtttttgcttagaaaggtccccttgtctcagccttgcagggcaggcatgccagtctctgccagttccactgcccccttgatctttgaaggagtcctcaggcccctcgcagcataaggatgttttgcaactttccagaatctggcccagaaattagggctcaatttcctgattgtagtagaggttaagattgctgtgagctttatcagataagagaccgagagaagtaagctgggtcttgttattccttgggtgttggtggaataagcagtggaatttgaacaaggaagaggagaaaagggaattttgtctttatggggtggggtgattttctcctagggttatgtccagttggggtttttaaggcagcacagactgccaagtactgttttttttaaccgactgaaatcactttgggatattttttcctgcaacactggaaagttttagttttttaagaagtactcatgcagatatatatatatatatttttcccagtcctttttttaagagacggtctttattgggtctgcacctccatccttgatcttgttagcaatgctgtttttgctgttagtcgggttagagttggctctacgcgaggtttgttaataaaagtttgttaaaagttaaaaaaaaaaaaaaaaaaaaaaaaaaaaaaaaaaaaaaaaaaaaaaaaaaaanccccggggggg

SEQ ID NO: 1437 - DNA, 879 bp, Homo sapiens
attccccacccgagcacctccacacccgttccctcctccatataatcttctagagatcttaaccagtttctatcccttacctgcttttctcttctcttctcctgctccgttcctcatccacccctccccatctggaccataatagacaccaaaacaaacccaaattggtaaaaagaataatcaaaaagaagacattatccggttaagagtctgtgctggttgccacccaagagagaacagttgtccaggatgctggctggtggaacaacctgctggcccgaaacaaggctgccaggtgtggatacctgagaaggactacttggtatcaaatacttttgagatggctacagtcagctagctggacagcccatgctgactggggacatacacttgcatctttgttgaaagcagaagaagacagaccctttccccaccttccttacctcctcttcccccattaaggcagctcatccaagcttgtatttaactgaataaatgagtagacattgtggacctcacaagattatttaattcttaagatgtgtagaccttgatggtaggtgtgacatgttagtttttcttacttgcatttatttaagacactgttacagagatactgttgtcaccttctggggcacggtctttggggagaggggagtgcatttagacttatgtggaactgtacaaattgtgatgtggctacatagaaagccatgtgctaagaataaactccatttaaaaaacattaaaaatctaagattcatgtgttttctaagcttttcattaagaaaacaaaagtcctctggattgagatacttgaccttgcatgtaaaaaccttgtagatagcttgagctggattcacttggattctgacggct

SEQ ID NO: 1438 - DNA, 521 bp, Homo sapiens
ctgcgtccatggccaccgctgcgactgaggagcccttcccttttcacggtctcctgccgaagaaggagaccggagccgcctccttcctctgccgctacccggagtatgatgggcggggggtgctcatcgcagtcctggacacgggggtcgacccgggggctccgggcatgcaggttacaactgatggaaaaccaaaaatcgttgatatcattgatacaacaggaagtggcgatgtgaatactgctacagaagtagagccaaaggatggtgagattgttggcctttcaggaagagtgcttaagattcctgcaagctggacaaatccctcaggcaaatatcatattggcataaaaaatggctatgacttctatcctaaggcactcaaggaaaggwtacagaaagaacggaaggaaaaaatctgggaccctgttcacagartggcccttgcagaagcctgtagaawacaggaagratttgatgttgccaacaacggctcttctcaagcaaataaactaatcaag

SEQ ID NO: 1439 - DNA, 306 bp, Homo sapiens
tttttttttttttttttttggttccaaaagcagttttatttttcttcttgtaaatcatgaccagtgagaaataatgtgtgccccaccccccaccagtgaagaagctgtgcgtgagtatcccacccgctctgggacccagaaatcccatcccttcccatctcctcccccactgtcccaaactcttcgtctcctctctctgccctgggcggccttgggcttccccagctatctcctagcaacaggtccatggttgcctcagcaacaagagttcatacaggctcagaggccagctaagcccagtgactt

SEQ ID NO: 1440 - DNA, 745 bp, Homo sapiens
  misc_feature (470)..(470): n equals a,t,g, or c
aacccaagacaatgagctagttttccctaaagtttgctgaactattaaggaatatgttcttatagcttttgactagaatgagtcatgggaattctaaraagggatggcctagacatttttagctcagttaaattcagcatttaatgcaggtgagttcctgggtcgttttccaactagtctggaacagtctggttctgactcaaactggtataaagcattattttaggttttctctttgccagtttttaagcagttataaccatgtaaatcaagatgtgaggacatctatatgaagtatagtaaagaagtggtgtcagcagatcaatatgtgtgtcctgggtgtgctgctctcttaagtgagactttgtgagactatactttaaatgcattattaccattgcttacattttgggggattttcttcctcctcaaaacttccatttctattgtaatattcttaatgacaatcnttttttttttttagcagtgtatgtttgaaacagccaaagatggcgatgaaccaagtgtaaattgatctaagcagcccatgcagtttgtgttgaatcaacaaacagtgtattgttgaagtgaaattattttctgaaatgacttgttagaccagttttgaggacatactcaaaagtagagtaataatggctcctgggatggagaaatatgagatgaacctggaacattctattatggtgccacaaaggaaatctaaaaaaaaaaaaaaaaaaaaaag

SEQ ID NO: 1441 - DNA, 931 bp, Homo sapiens
cagccccaatgtccagcctctttaacatcttctttcctatgccctctctgtggatccctactgctggtttctgccttctccatgctgagaacaaaatcacctattcactgcttatgcagtcggaagctccagaagaacaaagagcccaattaccagaaccacattaagtctccattgttttgccttgggatttgagaagagaattagagaggtgaggatctggtatttcctggactaaattccccttggggaagacgaagggatgctgcagttccaaaagagaaggactcttccagagtcatctacctgagtcccaaagctccctgtcctgaaagccacagacaatatggtcccaaatgactgactgcaccttctgtgcctcagccgttcttgacatcaagaatcttctgttccacatccacacagccaatacaattagtcaaaccactgttattaacagatgtagcaacatgagaaacgcttatgttacaggttacatgagagcaatcatgtaagtctatatgacttcagaaatgttaaaatagactaacctctaacaacaaattaaaagtgattgtttcaaggtgatgcaattattgatgacctattttatttttctataatgatcatatattacctttgtaataaaacattataaycaaaacattctgtttaccttttcagggctgtattgattggggtgtagactgaactatccggggtctgtttcttttcggtgatgaaagtcttgagaaggtagtaatggataagatgtgagggagaggagagagggagatttggagtgtagggtgagtgcccctcttcttagaactgaatactcttcttctaatgaacttgtattcttgtttccatgtcttcttccctttccttctatagcaaataaagcattcactttgttttggaaaaaaaa

SEQ ID NO: 1442 - DNA, 364 bp, Homo sapiens
  misc_feature (340)..(341): n equals a,t,g, or c
aattaaattctttgcaaaattgaacttctcaactaaaacgtgtccatgtcagaattttaactgttagcaggtagtttgtggcaaagatggctaaataatgaagcaaattagaatctgcgtgtatactaatgagctgctttttttctgttgagactatcattatttgtcttattacccaagaggcaattacctgaatttggatgtctgaattataacttatgcaggaatagttctgtaaatacatttaaataaactgtaaagatatttaataaatatagtatttatactaaaaaaaaaaaaaaaaaaaaaaaaaaaaaaaaaaaaaaaaaaaaaaaaaaannaaaaaaaaaaaaaaggaaccaaa

SEQ ID NO: 1443 - DNA, 2593 bp, Homo sapiens
  misc_feature (20)..(20): n equals a,t,g, or c
  misc_feature (180)..(180): n equals a,t,g, or c
ccccgggtttaatgccattnaaaatttatgtttgaggttaccacaacttgttttaaaaagactttgttttgtgaatttgtactgtatatttgagtaactgtcaggcttttatttaaaattgtttmacatgtaccatgtacatgtcattactatatttcaatgcatcatgcttgtaacagngcatttcatttataataagaatgagttattcatttgtaagccgttcagtaatttatctactattcctaaattggcataatgttagataatctattttgaatcacctttaattacatgtcagaatgccttaactaccctaacttgacaaaacagaattctttggtagacgcggtgggggcggggtggggggtctggacggagtctctatttaaggagaaatcatcatgctatgcataaaacacagaagcatgagtggcaagtggcggggtatttattttgcacaaactatttgcagtctctgtgtatttaaaaagtaaagaaagttgcatccagaagggttttgttagaatgaatacatttatattaggactgacaacttcagctcttttgtttaggttttcaattatttttggtaagagtatgtagccttatgatctggatatattttgcattcattttccaacgcctacatttaattcctggtaagagcagtgctcgtcaagtttctggtttttctctgctctcatttaacccgtcaaacacaatctttgtaaagctagattggtggtgttttatacaacttatttactcagcttacctttttgagaaacgattgttagaaattgacgatgtgtttgttccagtgatactgaaagtagtgggggcaagaattgagtttcacagtggaattggctttggatctggcctatagattagtgacataaaatattttctctattttcccctgttctttttgtgttatgcacttaattttatgactgccgggggggtcagctggagtgctgcttaacaagtatctctcctactctcagtggtcagaggctgtgttggacccatagtagaattttccaggtcacagacccaagcttccatgggttgttactgtgctgtaccacttggtgggtctgattctgaacctgatgtgtgtgttaattatattttaagcaacacacacacacacacacgcctcatgtaatggacttttataacaaaagaaaaaatttggatttctaatttacaaatggcaaattatttatccctctctggatgcaccaaagaccagtaaagtttatagcttttccatctatatttataaagcaatactgtattataaaaatcaatatttttatcacatgcttgaaatttttattttgttgttttaaaatgtgcactctaaacatatcagaaccttatttcttcctatgaacttaagctgcctgcgcacaaaaaaaaaaaaaatttaccaaatggagatgcagtagagtccataggctctaaaaactaaaagaaatgggatgcagggggaacaagttatttgtcctgagttactgtacttgcttgacatggttgttgggtactaaatcacaaaagaatccattccaggtatgcatgtctgggggttgggctgtgtctagattagaaactgggtttcaagctttgcatgatgggagagcgtcctctcctctatcagctgcgtgtgttctggataggacagtagcccggagatggaaaccaccttcagtaccattagcccaccataccaagtaacaagttaggcaggaatcgtgggaatttattgagtcagctttgagtgtttgagagaatgtaaacaagattggctcgaattgtaaacgtttgtactttggatgagttcatggttctttaggtcaccttaataccagctatctttggtagaagctacagcattcagtttctctggaaactgtatcacatttttgcattttaaaaattttacagtatcaaaaaaccaaaatctgcttatgaaacaaaacatgaagcaggacatatttggattctatttatttaaaattaaattctttgcaaaattgaacttctcaactaaaacgtgtccatgtcagaattttaactgttagcaggtagtttgtggcaaagatggctaaataatgaagcaaattagaatctgtgtgtatactaatgagctgctttttttctgttgagactatcattatttgtcttattacccaagaggcaattacctgaatttggatgtctgaattataacttatgcaggaatagttctgtaaatacatttaaataaactgtaaagatatttaataaatatagtatttatactaatctgtgtgcttcttttggtttgaatagtaactaaatgagacaccagcccttgacattgagtttgttggtcactatcaggtcctcatttccaagcctcctagtcattctagcactgattatatgctgctactttaactggctccagctgcttcactacatcagtttagcttcctcagaaattcatcaaaatggacggacaattaaatgtaaattatagaactttttcccagctgaggctttgcaccttccgtatagtatagagggaagctacaaa

SEQ ID NO: 1444 - DNA, 1052 bp, Homo sapiens
ggtttttcccgggatacatctgtgttgagtcactttgcattcaacagtgcctcgccaccaaaatcatacataagaggaaaactaggactggaagaatatgctgtcttttacccaccaaatggtgttatcccttttcatggattttcaatgtatgttgcaccactttgttttctataccatgaaccttccaaattgtatcagatattccgtgagatgtatgtgcgttttttcttcagactccattccatctcttctcatccttctggtattgtgtcactctgtctgctgtttgaaactcttcttcaaacttatcttccccaactcttttatcatctacgagaaattggggctcaaccacttcgcatatcatttaagtggatggttcgagctttctctggatacttagctacagatcagctcttgcttttatgggatagaatcctaggatacaactctctggaaattcttgctgtgctggcagctgccgtgtttgctttccgagcagtgaacctgatggaggtgacatcactggctgcagctgaaaatctagctgcccacagtgaacagttctgcactgctcctctattccctgagctttacagagtccagatcccatgtactgctgaactcaggcagaaagaagagtgcagtttattggactccaaatctcattcaacagaacaaagaagttgaggttgcaaggaagaacctataatgatgggtcatggaatataacctagaaaagaagagaaataaaagagactgtgtttcaccatgttgcccaggctggtctcgaacttctgagctcaagcaatccaccctcctcagcctccagaagtgctgggattacaggcatgagacaccaagtccagccataaggttcttattctatatatacatgaaatgatatcacttgaaggtagactgtgataagttaaatacgtatattttttaaatcttcaaacaaccactaaaataaaagaacaaagagttacaactaaaaaaaaaaaaaaaaaaactcgtagggggggacggcgtacccaattacgccc

SEQ ID NO: 1445 - DNA, 665 bp, Homo sapiens
  misc_feature (385)..(385): n equals a,t,g, or c
  misc_feature (659)..(659): n equals a,t,g, or c
ggcacgagccgatagctgcttcgggattggcgtccgggcggctatctaggggctgctgggaagatggcggactcggtggctagccgatgaggaggccgcggggggaacccggcccccgggccccgagaccgactgagggagcgacctgcgcagggcccggggagtcatggtctccatcacccaactccatgcttcgagtcctgctctctgctcagacctcccctgctcggctgtctggcctgctgctgatccctccagtacagccctgctgtttggggcccagcaaatggggggaccggcctgttggaggaggccccagtgcaggtcctgtgcaaggactgcagcggcttctggaacaggcgaagagccctggggagctgctgcnctggctgggccaraaccccagcaaggtgcgcgcccamcaytactcggtggcgcttcgtcgtctgggccagctcttggggtctcggccacggccccctcctgtggagcaggtcacactgcaggacttgagtcagctcatcatccgaaactgcccctcctttgacattcacaccatccacgtgtgtctgcaccttgcagtcttacttggctttccatytgatggtcccctggtgtgtgccctggaacaggagccaaagcttcgcctccttcgaagncacctt

SEQ ID NO: 1446 - DNA, 1104 bp, Homo sapiens
aaagatgggcaacttacggtcggactggtgggctacctaatgttggtaagagttcaacaatcaacrccatcatgggcaacaagaaagtatctgtgtctgccacacctggtcacacraagcactttcagactctctatgtgragcctggcctctgcctgtgtgactgtcctggcttggtgatgccatcttttgtgtctaccaaggcagaaatgacttgcagcggaatcctcccaattgatcagatgagagatcatgttcctcctgtatcactagtttgccagaatattccaagacatgttttagragctacctatggcattaacatcataacgcctagagaggatgaagatccccaccgacctccaacatcggaagaactgttgacagcttatggatacatgcgaggattcatgacagcgcatggacagccagaccagcctcgatctgcgcgctacatcctgaaggactatgtcagtggtaagctgctgtactgccatcctcctcctggaagagatcctgtaacttttcagcatcaacaccagcgactcctagagaacaaaatgaacagtgatgaaataaaaatgcagctaggcagaaataaaaaagcaaagcagattgaaaatatcgttgacaaaacttttttccatcaagagaatgtgagggctttgaccaaaggagtccaggctgtgatgggttacaagcccgggagtggtgtagtgactgcatccactgcgagctctgagaacggggcggggaagccctggaaaaaacatggcaacagaaataaaaaagaaaaaagtcgtagactctacaagcacctggatatgtgaggttgggctgcaacagaaatgtcatctgcattgtgcagatggaaaagagcagaagctgcctgttgcctgtggaactgtcccaagacactagcactgtagaacgggccctgctcttgcagagcacggctgcacccaacagtctccatgtcaagaccaagggcctcctggaaacaccaactctgacaaaaaggagtcatctgggagcccgagaatcctactcctggccgggcacagtggcacgcaccaacatggagaaaccccgtctytactaaaa

SEQ ID NO: 1447 - DNA, 359 bp, Homo sapiens
  misc_feature (335)..(335): n equals a,t,g, or c
ccaggtgggtgccctgggtcttggtgttgtgactgggggaggaggggtgttaggggctgggggtcaccttatattaacatgaactagagcacacccttgtcatggctggacccaacagtaagaggcaaacccagggtgtccatgtccctaggatgctccagcctgctctggggccacgagtctcacatgaggactggccgcccttgtgtacaggggcaagagggggccaggtccctgtcctggccaggctgttagccgcagtacccacagagaccaccgccctcctctgctttccccggagaggggcttggcttctagcagtcagagcagggctnttccaaaaggttgggccttgcccg

SEQ ID NO: 1448 - DNA, 409 bp, Homo sapiens
ggaggccgtacctccgagaggctcggcgttgagccgggtagggccaggtggctgccctttcacctagggtagtccctggtcgcctccgctcttcgcccaaaaggggatgcagctccgggaaacaagtgaattcatggtattttacttttttgggaaatactrgaaatgaagacctgcaactgtaatttgraataaggaaaactttaattttcrgtataaaaattgctcaaatagaattgcctgattttaatgacaaaaggtgaattatagtttaatgtactgcaagtcctaaactacggatgggaactattacagtttataatgtcaaaaacttttcttagaccaaaggtatcttccacaaagtatatgggagtccacatttatgtaagaaatgaaactataaaatgta

SEQ ID NO: 1449 - DNA, 404 bp, Homo sapiens
gtgttgagagcggtgtggcaggtgttgtagccgctatggtgaagttcgctttgtagcggccccggctagagagttgkyctgttccctgcctttgtgacccggagagcttttgggaactggtttgtggcctgtttgattcctgtcagaggtttgctgacccaagacagtatcgaaaatgcatattaagtcaattattctagagggattcaagtcctatgctcagaggaccgaagtcaatggttttgaccccctcttcaatgctatcactggcttaaatggtagtgggaaatccaacatattggactccatctgctttttgctgggcatctccaacctgtctcaggttcgggcttctaaatttacaagattttagttttacaaaaatggggcaggcttggtattta

SEQ ID NO: 1450 - DNA, 352 bp, Homo sapiens
aattcggcagagaaattatataaacctgttgtctctcacctctacattggatcacatggtcacctgcctcatggaaatgccttttttaaaacttcgatttgcagaactccactatttttatacctagctacagttttgagaaagaagaatcagaaccctgacccacttacggttgctgggacaattccccctcccgcatgtattgctgcagtgcccaggacagtaaaatggactacaagcggcgyttcctgcttggcgggtccaagcagaaggtgcagcagcacagcaatacccgatgcctgagctgggccgagcactgagtgtcccctggcatccacggccaccaytgccc

SEQ ID NO: 1451 - DNA, 557 bp, Homo sapiens
  misc_feature (549)..(549): n equals a,t,g, or c
ttcggcacgaaggagactgtaaacaaagatatttgtgaaaagggaacaattcagcaaatgataggaatctttaaaaatataataagcaagcctaatgaaaaggaagaagccattgttttggaaatccagtctgatatattacttatcctatctggcstttgtgagaatcacattcaaaggaaggaaattttcggaactgaaggagtagatatygttcttcatgtgatgaaaacagaccccaggaagttacagagtggcttaggctataatgtacttctttttagtacattggacagcatttggtgctgtattttgggatgttatccctcagaggattattttcttgaaaaggaaggcatttttctccttttggatttgttagcattgaaccaaaaaaattctgtaatctaatacttgggaataatggttgaattttgtgaataatcccaaaactgcagctcatgtcaatgcttggcaagggaagaaggatcagacagctgctagtcttttaatttaaattgtggaggaaaggaggaaaaagaactaggngtaaaacg

SEQ ID NO: 1452 - DNA, 568 bp, Homo sapiens
tcaatgttccattttgcttttaaaagcttcacaagaacatttcatttattaaaatagtttctgtaaactctttcagaataacaaaattcacttgccttgcttaaacagcatttcaagtagaagtatttttatttcaaggcaccataaaatgatgatctctctaagaaatacctctccttccgtgtgtgaaaatccttgggggaaaaaaaatcccacacggtgttcttggccatcaggatcatgaaaacaaactttggtgaatgtgagcaactgcgccagacaggacacaggttacagggcctgacgtcactaacggtaactgacaatcttggaatggaccctactgctgatgtttcaaaaggacacagaggtgaactggtcacttctaattaagaagagccagtggggtgggggaagctgaaaaccaaaaatccacgtagacatacgtggcagtgtgaacgtctgtcctccccttccttctcctcacttcctctcctcctcctcactcaggctggtattctcctggtgtgcggatgtcagcttgccctgcagaagcctctgccgaatt

SEQ ID NO: 1453 - DNA, 654 bp, Homo sapiens
  misc_feature (12)..(13): n equals a,t,g, or c
  misc_feature (106)..(106): n equals a,t,g, or c
  misc_feature (156)..(156): n equals a,t,g, or c
  misc_feature (547)..(547): n equals a,t,g, or c
  misc_feature (549)..(549): n equals a,t,g, or c
cctcataagggnncaaagctggagctccaccgcggtggcggccgctctagaactagtggatcccccgggctgcaggaattcggcacgaggtttgcttcaaaagggntatattatactctctctagtaatccaaaggtattcctaattttgccactnctcattttcgcttctctttaagggccttatagtatgttctaatttctcatttggtagtatgcaacattcaatatttctagctctaaagttccatcattaattatttctttttttcttttttttttctttttttgagactccatctcaaaaaaaaaaaaaaagcaaaattgttggcatctctaagacagagcaagactccctctctaagagatagtagtgtctcccacttaattgaattcgttttgttttgtttgctttgctttgattcttgccacgtaaaatctgtgggtcttgaccagagatttgctcagacagttaaggaaaaataatgaagatgtatttgtgaaatttttacataatgaaaaatgagatgtatttgtgaaaattttangnataaacctctttataaaatacgtttgtaaaatataaaagaggtaggatgttttgggctaaatttagccacattctggggtccatacacacacacacacaaacagg

SEQ ID NO: 1454 - DNA, 899 bp, Homo sapiens
  misc_feature (77)..(77): n equals a,t,g, or c
  misc_feature (452)..(452): n equals a,t,g, or c
gtcttattgaactggataatccaatattatggatacaatgtcatacagtattatggaggcatatgtgtaattatcantataaataatactggagaaatttccggacgtcagaagtcggaaatggctctcactgagttcaaatcaaggtgttgggaaggctccactcctttggggggctgtggaggaggatccatttctttgccttccccaacttatggactctgcattccctggcttgtggccccttcctccatcttcaaagccagcagcgtagttcttcccatctccctcatattcctctaacgctgacctgccttcctcttacgaagaccctggcatgacatcggcccaccagataatccagcctgagcaacagagcgagactttgtctcagaaaaaaaaaaatcagcttataataagtgccataaagaaaataaaactgggagacatgnaagagactgactagggtggtagtctaacagatggggcagtcaggaagtcttycctgaggaggtgacatctgagctgagatctgaatgaaggataggatccasccacagattgatctgggggagaggcattctaggcagaagacgtggctagtgcaaaggtcctgaggtaggaatgcacttggcatgttcaaagaacacagagtcggtgtggctggagcagagcaagtgaggaagaggactgggagatgaatcaggaaggtgccggggcttgtaggctcagatgaggaatttgaggactcttggtgctgagggaagaacgtgaaggagatgattgatcagggctgacttctccggagaaccactgggctggtatggaggcagcatgagattccgagtggtcaactcagaggcgagaatcagcaaccccagcatcaacttcagttcgtt

SEQ ID NO: 1455 - DNA, 365 bp, Homo sapiens
  misc_feature (61)..(61): n equals a,t,g, or c
  misc_feature (343)..(343): n equals a,t,g, or c
ggcacgagcagagatagggtttttggagggctcctctgggaaatggcccgacagcattctnaggttgtgcatgaccagcagatactatcctgttggtgtgccctggggtgccatggctgctattcgctgtagattaggctacataaaatgggctgagggtacctgtttggggagatggggtggcctgcagtgacacagaaaggaagaaactagcggtgttcttttaggcgttttctggcttgacggcttctctctttttttaaatcacccccaccacataaatctcaaatcctatgttgctacaaggggtcatccatcatttcccaagcagacggaatgcctnatttaattgaaagttagtgttc

SEQ ID NO: 1456 - DNA, 376 bp, Homo sapiens
  misc_feature (157)..(157): n equals a,t,g, or c
  misc_feature (323)..(323): n equals a,t,g, or c
  misc_feature (340)..(340): n equals a,t,g, or c
aaaaaaagaaaaaagaaatttgtgaagttctactgctctagttatgcagggtggcaggatggcattggtaaattgacttgaagtgagaaaaaataatttctggttttattctaagtatttaaaactgtaaattcataaccatgattcatgattttgnattacaagtcttatgaattcttagaacttcagaagtggccgggtgtggtggctcacactgtaaatcctggcactttgggaggccaaggtaggcggaccacctgaggtccagaagtttgagaccagcctggccatcgtggtggaaacccccatcttctacttaaggnatacaaaaacttaattngggtattggtggtggcacatgcccgtaaatccccag

SEQ ID NO: 1457 - DNA, 303 bp, Homo sapiens
  misc_feature (281)..(281): n equals a,t,g, or c
aattcggcagagctgagatgaggaagtatatatttgggtatcatttttacatcctgttgaaagctccaggaagagtgggccaattctaagctgttcatttacagagaagttgctctcaccttttyctttccttctaaatgaactttggagccctgatcttctttgtaagggacaaccagaccctcctttcatgcattccccttcagagtcgctgctagttgcctggctcgagtgragtggcatttttgaattttggccgcttcagctgtcttgggggcctnggggcgggctcccacctctttt

SEQ ID NO: 1458 - DNA, 525 bp, Homo sapiens
  misc_feature (511)..(511): n equals a,t,g, or c
  misc_feature (522)..(522): n equals a,t,g, or c
ggcacgagggcgtgagcactgcacccagccaaaaattttacatcttttatagagggaaaaaaactctttataccatggcaaggccttttctttcacaaaaagctgggcctactgaacaattcaagctgtgcagtagtagactgaaagcaggatttgttgaggagttacagctcctgtccagagcaaatcctgtagtgatacaaggagaatgtaaacttgccagcttagacagggatcagtcctgagactgctggcagtagcaaatggctattagagtaactgtataatggttttgcctgcactttctctatgtatatacaaatgtacatgtataaatataaaaattaagkgatcatggttcttggtaacctgtcccaagtgctgkgattcacacgcctgacactaaaaggttcttcctggtccagtcagccagctgtraccaccagcagcacagctgagtgctgagaatctggctggaaaragaaatgtggctcaagtgctggctcacctnctagctgtgtnggg

SEQ ID NO: 1459 - DNA, 619 bp, Homo sapiens
  misc_feature (62)..(62): n equals a,t,g, or c
ttaccattggaatttaatttaagacaaatttagtgtgaacagtgaatttatttaagacaaanccttaaagatttgtagaataatgaccttagttttttcatgatgggcccttacccacaaaacctgctttggcatttggttaacccagacctcatgctgggttaaagtatatagatataacagtaattcagatttaatgcatatcttggattgggactgactgaggaacctcttgttttaaagtgatttgtagtatatctataacgtttgatccttttgggtaaaatagtagctgacaaaaaataaatacaaattaattttcatgctcatctttacctgaaagactcagatttctctttaagccagctcaggaatattaggctaaacccagctgttttgcagatgttcttactcagattgaaacatcaattaattaacaggtatctattcatatttaactagaaccctgctaatgtagagaaataatacttttttaggagatcttttttcagttctctctaaaatgtcattttatataaatttctcttatatttttataagattgtatactaggattgaggatgtataggtacatatttataggatgctatcaatttgg

SEQ ID NO: 1460 - DNA, 316 bp, Homo sapiens
  misc_feature (3)..(3): n equals a,t,g, or c
  misc_feature (6)..(6): n equals a,t,g, or c
  misc_feature (166)..(166): n equals a,t,g, or c
ccntgnagtagctgggactacaggcacacgccaccatgcccagctcatttttgtatttttagtagagatggggtttcaccatgttggccaggatggctccatctcttgaccttgtgatccgcccgactcggcctcccaaaatgctgggattacaggcgtragcatncaagtctggcgagagarattgtttctagatgagggtgggggcgggtgtccttagcccaaagcttgtgccagtctctatcagaaataaatgcccccaaaacctcaaaaaaaaaaaaaaaaaaaaaaaaaaaaaaaaaaaaaaaaaaaaaaa

SEQ ID NO: 1461 - DNA, 365 bp, Homo sapiens
  misc_feature (46)..(46): n equals a,t,g, or c
  misc_feature (50)..(50): n equals a,t,g, or c
  misc_feature (160)..(160): n equals a,t,g, or c
  misc_feature (353)..(353): n equals a,t,g, or c
ctcaaatgaaggtttgcagtctgtctaatcaaaggatggggcgtantgcntaaaatcaaaagatttgttaaaacaaaggtacttatttgcaaaagctggctatcctctaagaaggtctcagtctttaccaaccaccttattgagcccagtaagggttgtntcctctgtcaatgttcgattatctccaggaaaagagaccagatgcagcccaccttccttcacctataagtacacacctgaagaggagcaggaattggaaaagcgggtgatggaacatgatggtcagtctttagttaaatcgaccattttcatctctccatcatctgtgaagaaagaagaagccccccagagtnaggcgccgcggg

SEQ ID NO: 1462 - DNA, 770 bp, Homo sapiens
caagtcgaacggtaacaggaagaagcttgcttctttgctgacgagtggcggacgggtgagtaatgtctgggaaactgcctgatggagggggataactactggaaacggtagctaataccgcataacgtcgcaagaccaaagagggggaccttcgggcctcttgccatcggatgtgcccagatgggattarctwgtwggtggggtaacggctcaccwaggcgacgatccctagctggtctgagaggatgaccagccacactggaactgagacacggtccagactcctacgggaggccagcagtggggaatattgcacaatgggcgcaactgatgcagccatgccgcgtgtatgaagaaggccttcgggttgtaaagtactttcagcggggaggaagggagtaaagttaatacctttgctcattgacgttacccgcagaagaagcaccggctaactccgtgccagcagccgcggtaatacggagggtgcaagckttaatcggaattactgggcgtaaagcgcacgcaggcggtttgttaagtcagatgtgaaatccccgggctcaacctgggaactgcatctgatactggcaagcttgagtctcgtagagggggtagaattccaggtgtagcggtgaaatgcgtaragatctgggaggaataccggtggcgaagcggccccctggacgaagactgacgctcaggtgcgaaacgtgggggagcaaacaggatttagataccctggttattccacgccgttaaacgatgttcga

SEQ ID NO: 1463 - DNA, 562 bp, Homo sapiens
  misc_feature (519)..(519): n equals a,t,g, or c
  misc_feature (524)..(524): n equals a,t,g, or c
  misc_feature (557)..(557): n equals a,t,g, or c
agcctttctgctcctgaactaaaatccctagccaagaccttccacttggtgaatcccaatggacagaaacagcagctggtggacgcctttctcaaattggccaaacagcgttcagtctgcacttggggcaagaataagcctggaattggtgcagtgattttaaaaaggttttgttggctattgttacagtaaaaacatttaaaatgttgatagcacatattaacttacagtagrttgtatayttgattgaactgtaattgtttatttcagttgtagttagattgagaaggctggaaaagccttaattgcaatagcckggattctttcttgggttattattcaaaatttttgtcgtaataccgtactaatttccmggaccaagaaaaatcggarggcaataggcctttggtaaattgtagtattttattttcccgagaaaaatacagttttaagtgatccttatgggatttttaaggttaactatttagtcccaatttttattttagttttggtttactnaaacnaattatatccggcgtccttaagttgcaattttnccccg

SEQ ID NO: 1464 - DNA, 1767 bp, Homo sapiens
aggccaagcatgcaggcaggcttgtaacaaactccttggccaggagctctgagaattagcttcacttccctcagaaatgccccaattccctcctggaagaggagctgtgtgacastcaggccagggggtcgggactccccccatctcctccgcacacacatacccctgcacacatacccagccacgtacagctgggtggctgtasgcaagtcatttttctactctgagcctcagggtcttcctctgtccacctccccccaggattamtggcagaattaggtgtgagcttgcatttaaaaagaggtttgttttgtaaacccaggctttgcaaattggcagcccaagtctcaggggcctgtgcagtgactgatcattaccaacatttcgaagtgagagatgtcacataaagagcgtcatttcgagcttctcttgaaaagttgtaaggtgagctaccctgggactgtattcctgaatggcaatgtgatggcagagtcctgcagtattaccacctgwggacttgtgcaccaggttcccacccacccacttcaggcccttggttcagggatgtgcccgtcatggaaatamcaggtgctgtggctctgctggttttggctttccttctctgtaaccttccaatatctttctccttccaggtactgtaaaccacttagtaattaattagttaataaattcatctcatcagcacttttaaataatgtgctaggccacactgtcatggaccccagatatacagcagcaaacaaagcagccatggtaccttccctcagggagcagtcagtccagtggaggagtcagatatgactcaccacacagatcgaaaaatctycacaaattatgagaagaatgctgagggaagaaagaacataggtggaccgctgctgagtccaggcttacttgcagagatctatgctggccaggccctgtgctaggcagcagaggacatggaataaaatcaaataaggtcactgtgtgcaggactcacggtgtggtaaaggagcagccccatccacaggttctattaattccagcctgtgagaattggaaccacagggtgaattttggaggacaggcacttacactaatctggaagcataatatataaagagtacctacaaatcaataaaaaaaatagaaaaaaaaagagcaaagtatatgaacagaaaattcaatgaaaaggaaatagaaatggctcttaaatgaatgaaaacatactctcactcararaaatgaaaatttaacccatgtcaaratacttggggtgaaggaagtgttttaaaattcgattgtggtgatggttataaccctataaatttactaaaacttattgaagtgtacctttaaaacaaatgaactttatagtatgtcagttatatcacaataaggctattttaaaaataaaaacactttgagataccattttatacctgttggtattagcaaatgtcaaaacactggataatgcattatgttcctaaaggcatgggggagacggcctggggcaagcgtccactgatgcattcttgggttggggtgggcaacaggacgctgtcaaacatacaaatacatttacgctytgagctgggaattccactcataggacttcatctgatatatatgctttacatctgaaaaatgtataaggaaattcaccacagcctcatagattatggcaaaagtttggaaacaaaagatgtttgtctacaggtgaaargttatgccactgtcaaaaaaaaaaaaaagtcgagc

SEQ ID NO: 1465 - DNA, 400 bp, Homo sapiens
  misc_feature (112)..(112): n equals a,t,g, or c
gttttgttggctccgttcctgaggtgacacccggttcaccccacgtgttaaaccccgagccgcgggctgccctgtgctggatattgcctacatccagcagccctctgagggnatggtttctggcctgcctccgttgccagggtcctcactggtgtgaccaaccatytggcttttaacactaaaaagccccacatcctgaggaatcccaggacacagaaagtcctgggttttgtcagtgatgcagaaggttgggtggaaagtatgaaacccacacagagggatgacagcaccatttgtagcatcggatggaaatggcgtggatgatctgcctcgagtggtcactgtcgccatgttgcctgacgtggatgctggcatcaggacttgtgattcaccatggatc

SEQ ID NO: 1466 - DNA, 1012 bp, Homo sapiens
  misc_feature (2)..(2): n equals a,t,g, or c
tntgtggcagaaaaatatgttttccaggtagtttttactactacagagagtctgtaaataagtgctttaaaaaaataacaaaccaataagatatttgtytcctatataaacattctgtgtatttagcacttggaaaatcaacaaatccagaatttaaaaaaatgccacagacttttcaaagcccaactgtacttttttgagaattgtccgtacctactaatatgccttattcttcttcacctagtgttttaaaagtcctgggtagaaagagttttagaaatgtaatcagttgttcagcttcaataatatagagatctaacatagtcagtcctcaggccccctaaagaaacaagcaagaaagtgagggccatcactagggttggctttggggaggggaaaactaaggactgcttttgccaaatgatatttttgataatgtaaggaaacacagggaccacaaaacctttttttttttttaagtgtgaaagattagtgccttttggcatacttttgattttagaggatatagtatcggcattgacaaatcacgtagaaacaaagaatgctatagatgacaacagtattaaatgttactcctgattctgcagaacagcttttgaagatactggggggtatcttcaagcctcagagcagcttgtttcagatagaaattctctatgggttgaaatgccaaaaacagaaaacatgatgttgactcatgtaatttagtccattttagcagagcctttagtgttaacaccagtggcgaggagcattgcatattctctgtcagcagcagcactcccacaccaggtggttctgggctctctgtaggctggtcctagtaggtgacacccagcaacacccctgttggacaggattgattgttcgcagtcttagaccaacacttcagtcagaaatgttactgggaggaggaaaggaaaatactttttttcctccatgtggaaatgaggagagaggaaagtggattggaaaaccaaaatgtgagtca

SEQ ID NO: 1467 - DNA, 637 bp, Homo sapiens
ggttttcattgacactcttccctcctcccacctgccaccaggcctcaccaaagcccactgccatggggccatctgggccattcagagactggagtgagatttgggtgtggagggggaggcgccaaggtggaggagcttcccactccaggactgttgatgaaagggacagattgaggaggaagtgggctctgaggctgcagggctggaagtccttgcccacttcccactctcctgccccaatctatctagtacttcccaggcaaataggcccctttgaggctcctgagtgccctcagatggtcaaaacccagttttccctctgggagcctaaaccaggctgcatcggaggccaggacccggatcattcactgtgataccctgccctccagagggtgcgctcagagacacgggcaagcatgcctcttcccttccctggagagaaagtgtgtgatttctctcccacctccttccccccaccagacctttgctgggcctaaaggtcttggccatggggacgccctcagtctagggatctggccacagactccctcctgtgaaccaacacagacacccaagcagagcaatcagttagtgaattgaatggaaataaacgctttagttataaaaaaaaaaaaaa

SEQ ID NO: 1468 - DNA, 542 bp, Homo sapiens
  misc_feature (2)..(2): n equals a,t,g, or c
  misc_feature (27)..(27): n equals a,t,g, or c
  misc_feature (539)..(539): n equals a,t,g, or c
cnaccctcactaagggacaaagctggngctccaccgcggtggcggccgctctagaactagtggatcccccgggctgcaggaattcggcacgagtcttttcagactcagcccacttgcacccaagtraattaacagccttgttgctcacacaaagcctgtttaggtggtcttctatayggacatgcktgacacttggtgccaaaatctgggccagggggactccttygtgagaccggccccctgtcctggccctcaytccgtgaagagatccacctgcgacctcgggtcctcagaccagcccaaggaacatctcaccaatttcaaatcggatctcctcggcttagtggctgaagactgatgctgcccgatcgcctcagaagccccytggaccatcacagatgccgagcttcgggtramtcttacggtggaggattcccagccatatgaagacamcttagytggacgwtcatccttgtcaaaagtctgacccytcaaaytytacagcytcaatgggaccagacctaccggtcatttttagnaca

SEQ ID NO: 1469 - DNA, 531 bp, Homo sapiens
atatccgactcactatagggaaagctggtacgcctgcaggtaccggtccggaattcccgggtcgacccacgcgtccggaatcctaggcctaagattcttcatgtaaaaattataagactgaataaagaatcttaggcctaggaggagaaaatgattttctttctattacctaactagattggggcatatttctgataaagacccacctctagtgagattcatcttttttgtttgtgtgactatattccatagagaagaaagatgggatagctcaacttcattatataccaaagcaaaacacatgccaaatgatgactacattttaccaacatatttagacgagtattcttgactagtgtttactatctatacccccaaaactactactatatagacagaatggaaagtatttctatttgtcctttttttgttttctgttctaattgtcagggacatatgtagtggctataggtttacttaaaaggaataaatttggaatgctcmaaaaaaaaaaaaaaaaaaaaaaaaaaa

SEQ ID NO: 1470 - DNA, 607 bp, Homo sapiens
  misc_feature (500)..(501): n equals a,t,g, or c
  misc_feature (583)..(583): n equals a,t,g, or c
tattcacgtccccaggctcattcttcagcctcaggaggaattagaaggtcttcatctatgtcttatgttgatggcttcatagggacatggcccaaagagaaaagatcatcagtgcatggcgtatcatttgatatttcttttgataaagaagatagtgtacagagatccactccaaaccgaggaatcactcgttctattagtaatgaaggacttactctgaacaacagtcatgtatctaaacacattaggaaaaatttgtccttcaagccaataaatggagaagaggaagcagagagcattgaagaagaacttaatatagattctcacagtgacctcaaatcttgtgtgccccttaacacaaatgaactaaattctaatgagaatattcattacaagcttccaaatggagctttacaaaatagaatacttcttgacgagtttggcaatcagatcgagacaccaagcattgaagaagcattacaaataattcatgatactgnnaaatctcctcatacacctcagccagaccaaattgctaatggcttctttcttcatagtcaaggaatgagtatcttaaattcanatatcaagttaaatcaatctagtc

SEQ ID NO: 1471 - DNA, 121 bp, Homo sapiens
caggaaggataagccatgtggggtctagaactgagggctctagacttccagcccagtgctctctctgctctaccatgttgcctctagttggagagacagggcagaagtgatggtaaagaag

SEQ ID NO: 1472 - DNA, 706 bp, Homo sapiens
  misc_feature (682)..(682): n equals a,t,g, or c
  misc_feature (699)..(699): n equals a,t,g, or c
  misc_feature (702)..(702): n equals a,t,g, or c
gctgtcacaggccatggatgctccatggaggggtggtgagcatatgaataacaatcaagagaaacatcggtaatggacaggaggcatcaataaacaatgtccaccctcctctaaaacccaggaaagttctcattcaaaagacgatgtcttgaaggaaacmtaggtacaaatctttgtgaytttggattagacattttttaagtaggcacaaacaaccgaaaaatagataaatggacttcattaaaataaaaaacttgtatgcttcaaaggacactgtcaaggaagtgaaaagataatccacataatgggagaactatttccaaattgtatgtttgacacaggtctagtacctagagtrtataaggaattcatataactgagcaataaacgacaaccacatttaacaatggggaaaaaaagctgtgagtagaggtttctctaaaggaaacacacaaatggccaagaagcacatgcaaagatgttcaatgtttttcgtcattaggaaaatgtaaatttaaaccaaaatgagataccacttcamacccagcagtatgacttaagaaaaaaatwaagacmacacatgtttcaaaagtgatggagaatatggaattctcatatattactattggggaatctaaaatgatrtagctctgaagttagtaaacagtgtgtgagttccttnaaaaagtgaaaccttanagnggcc

SEQ ID NO: 1473 - DNA, 1765 bp, Homo sapiens
gagaaaacaattctgaccggagaatgctgttacctgaaccccttacttcgaaggatcataagattcacaggggtgtttgcatttggactttttgctactgacatttttgtaaacgccggacaagtggtcactgggcacttaacgccatacttcctgactgtgtgcaagccaaactacaccagtgcagactgcyaagcgcaccaccagtttataaacaatgggaacatttgtactggggaccgggaagtratagaaaaggctcggagatcctttccctccaaacacgstgctctgagcatttactccgccttatatgccacgatgtatattacaagcacaatcaagacgargagcagtcgactggccaagccggtgctgtgcctcggaactctytgcacagccttcctgacaggcctcaaccgggtctctgagtatcggaaccactgctcggacgtgattgctggtttcatcctgggcactgcagtggccctgtttctgggaatgtgtgtggttcataactttaaaggaacgcaaggatctccttccaaacccaagcctgaggatccccgtggagtacccctaatggctttcccaaggatagaaagccctctggaaaccttaagtgcacagaatcactctgcgtccatgaccgaagttacctgagacgactgatgtgtcacaagctgttttttaaaatcatcttccaattctatacttcaaaacacacagttgctcaatgtcaaactgtgatgacaaatattacgtttatctagttagaagctaatgttttgtacattttttgtatgaggaagtgatgtagcttgccctgatttttttttttttttttttggtcagctttaatatatttatgccagaattttaaaaccaacaaaattttcttgttcaagcgtgcattgaagaaccacatttattcaatggttgaygttgttttgtgatatttgtacacaaattttcttttctcagttttataaacacagaatataacaattcactttaaacttttattaccacagttgctgcctcctccagaatttttgaattttaataaaaggcaaacttttgagctgcaggaaggacaatgttggttaataataaatctcaaagtcaattgtagaaaaaaaattgtcttcaaaaagaatgttgcactctgatctcttaacaaattgttacgttcaaagtttaaagtgatatattaacaragtcacctagttatacaaacaattgtcagagaattctggatttggagggtattggggttatatgattctttcttagataatggcctctactaaataactcaagatctttctggaatgtcttctggcaggcaggtgccactgtcagcttttctccaaaaagcagccaacatcagcctcccctgtcaactcaacagttttgtatctcatattatatggactttatatgaaaatgaatattttacagtttgcacagtattattttacagaaaaggaatcagagaatctacaacatagggccccagaacaacagtttcactttgtggcttttaattattctagaattttaactgcatctcatttttctagcatggtgagaactaatatgtaactcctttgattgaaggagctcttttgtccgtacctatcagaatgttttcttgacacttccatgttggctcttctcagctttttttgtacatattttttttttctaaagagaagaaaaagttatcacaaaatgtaaaaaaaaaaaaaaaaaaaaaaaa

SEQ ID NO: 1474 - DNA, 475 bp, Homo sapiens
ggaaaacctttagactttttttagcaattagtttgacattcgctactatagtaaccaagcactcattatatatgcatcctccaaatgtttcatgcttatttataggaaagttatattaatgagattaataatgtgaaatacagttttcctgcaaaattagcattagagaattgattttagataacagatttttaaagttttagagaaaagtacagtaatacagtaaactgaargagtatatagatagcaataaaataacataagtggacatgtttatagtaaatactctgaagtaaacamccgtttttattaactgcatctcattagggaaagtttatatgtcttgttattttttattaacattttatttaccattcagagtgaaaattactaatttgrgtattaacaawtaactgrataaatggtcattacagttaggttttcccaaattgcmaaatttgccttaggcattatc

SEQ ID NO: 1475 - DNA, 198 bp, Homo sapiens
  misc_feature (40)..(40): n equals a,t,g, or c
  misc_feature (170)..(170): n equals a,t,g, or c
tggcaggggcactggcccggcccgcaccttcctagcagcnagttacccaagaggaagctgccttgggsctccagaccgttaaatgccaactcctggcttccggtatcaggctgggttgacctgacctggccccttcttgctgggccctgcagctttctaacttgccgggnggagcagtgacacccgccccacatgtgg

SEQ ID NO: 1476 - DNA, 514 bp, Homo sapiens
  misc_feature (148)..(148): n equals a,t,g, or c
gtggcagagtgccctgcgggactgccagcccctcctgtcctccctcagcaacctggcggaacagctgcaggccgcacagaacctgcggtttgaggatgtgccggcgcttcgggccttcccagatttaaaagagcggctgaggcgtaanagctggtggctggtgacatcgtcctggacaagctaggggaaaggctagccatcctcctcaaggtgcgagacatggtcagcagccatgtggagcgagtgtttcagatctatgagcaacacgcagacacagttggcattgatgctgtcctgcagccttcagcagtgagcccctctgtggctgacatgttggaatggttgcaggatattgagagacattatcgaaagtcgtacctgaagagaaagtatcttctttcgtctatccagtggggagacttggcaaacatacaagctttgcccaaggcctgggaccgaatttcaaaagacgaacaccaagatcttgtacaagatatcctattgaatgtttccc

SEQ ID NO: 1477 - DNA, 649 bp, Homo sapiens
  misc_feature (6)..(6): n equals a,t,g, or c
  misc_feature (11)..(11): n equals a,t,g, or c
  misc_feature (23)..(23): n equals a,t,g, or c
  misc_feature (36)..(36): n equals a,t,g, or c
  misc_feature (83)..(83): n equals a,t,g, or c
ggcctntattngaaagtccatcnggttcctaacagngcttcctctttccagggtctcccatggcgtgcggaacttcccagggnaacgtgaaacctgtccgcagtccytgcccytgccctttctttkggagacgtgtgaawgagcmgcasccactttaatgtgaggccasccatataaacaatraactttcacttscgccmggaggtcataaactcaggtcaccaaagaattctagcttcagctcttggtttagtaatgtaccaagtttggtattactttttgtttgttttaatcaggtttctgccctcatcttctatttgggaaattaaaactggtctgttggcatggctggtgactgagcggcaggcacattcttagtctctgactttctgcagccatctttgagtgcatataagtgttgggtaacagtctactgaatgtgctacaagtgtgcggagttgtgttcatctttaacttgttttttttaaaaaacactctcttggtaaattgggatctcctgttgaaaactgtatttgtttggcagttgagtttatgcctggagcccctagagcacatttaactggttggtggtcagttgtaccatactgaaaaaaaaaaaaaaaaaaaaactgggggggcccgaccccat

SEQ ID NO: 1478 - DNA, 479 bp, Homo sapiens
  misc_feature (219)..(219): n equals a,t,g, or c
tccagtattttcgggggctggtggacgcgtgggcgatagggtgctgtccttggggtgctgtgtatatgggatgatgacgcttatcagcaytatctagtcctttccaccccgaaattcgccccgattaaagactgwgttgcattatcaggtaatgagatgtgagggagggtctttgaaagtggaaaacctgggcgtcgaggccactgtgccatcttgggncctcagtttccttatctgtgaaatgagggtgaatgtaaagctgctatgtaaaatgtaaagctctacataaaccactctctgcattactttggatatatgagaatattaacgtttgacgtctacgagactagatcccattcgagcatcacctcccataaccttacagactaacccctcttttaaatctcagtggttcgtaatcttacagactaacccctcttttatgtctcagtggtcttgcagctggcttttgttcatta

SEQ ID NO: 1479 - DNA, 399 bp, Homo sapiens
  misc_feature (377)..(377): n equals a,t,g, or c
gtatccggatgggctcattttatatgtgttttaaactctgagctagaaggcaacactactttcttgtgaagcacaccatctgtccttggccctagggagctcctgccgtcggtcactgggtcccctgatgcacccctttcaacagacttttcattttggggtacgtsctgacttcctggcactgcagggtgctccagcctcctcttgcattccctgccctggcccgggaatcagccccttctccaaggagccccgggtccttttattggcaagtcttaagagagtgaggcctgggtgccaggcagggagccccaggtccttttattgggaagtcttagagagtgaggcctgggtgccaggtgggtgccaggtgggtncggtgctgctgggatgttgtca

SEQ ID NO: 1480 - DNA, 460 bp, Homo sapiens
ttaaccctcactaaagggaacaaaagctggggctccaccgcggtgacggccgctctagaactagtggatcccccgggctgcaggaattcggcacgaggactagtccgagttttttttttttttttttttaaaacaaatacttttattgcacatttataaaatctgcatagttgtatcaatttttttccctttcatgattccattaatctttaaaatttggttaaaacacaatatccaatcagaagccttttaaaaatgatcaatgggaagtatttttctctacatatacatatatatatagttttgcatatgtatgctggttttttttttttttttttttgtacaaacccacatcccttacttttaagggcaaaaaagaaggcsgggtacgatgacttgtctgcaatcccagactttgggaggctgagggaggcagatagatcacttgaggccaggagtt

SEQ ID NO: 1481 - DNA, 2007 bp, Homo sapiens
tacattggaacaagaacaagaagcactagttaatcgcctctggaaaaggatggataagcttgaagctgaaaagcgaatcctgcaggaaaaattagaccagcccgtctctgctccaccatcgcctagagatatctccatggagattgattctccagaaaatatgatgcgtcacatcaggtttttaaagaatgaagtggaacggctgaagaagcaactgagagctgctcagttacagcattcagagaaaatggcacagtatctggaggaggaacgtcacatgagagaagagaacttgaggctccagaggaagctgcagagggagatggagagaagagaagccctytgtcgacagctctccgagagtgagtccagcttagaaatggacgacgaaaggtattttaatgagatgtctgcacaaggattaagacctcgcactgtgtccagcccgatcccttacacaccttctccgagttcaagcaggcctatatcacctggtctatcatatgcaagtcacacggttggtttcacgccaccaacttcactgactagagctggaatgtcttattacaattccccgggtcttcacgtgcagcacatgggaacatcccatggtatcacaaggccttcaccacggagaagcaacagtcctgacaaattcaaacggcccacgccgcctccatctcccaacacacagaccccagtccagccacctccrcctccacctccgccacccatgcagcccacggtcccctcagcagccacctcgcagcctactccttcgcaacattcggcgcacmcctcctcccagccttaatgcatgagcttagtctgaatttcaagwtgggactcatcmaatggagccgtctactcaaamgcaaaggcttccttctctggcatatttggatatgacttatttgcactgaggttatctaggcttcactatccattgtgttgtaaatgtttgtcagaaatgcagccagtgttgtgggtctacaacactaaccagacgactttttccatcagtgttwtacttgaatcttcatgtacgtccattccctggctggaaccttcgctgtttggtatttggtatttcagcagcagtgtgcaatttttgcttggcccagagcttcattctcctggcttttaggtttgtaaaagaaaaagggatatcttttttatatktttttccatgaatctgcagaaaattactgagctgttgttaccctcctctcattataatagtgtttaccaaacataccaataattcagcactacaattcagacctttgaaaatctggctttcagtgtagaacagaaagttagatgaatcagtgcccaagacatattttctgtttaacagaactttctacagatacattttttacaggttattttcattgtgttattgacatccatgtctctcgtaaaacagatggcccaaagtaatgaatcatgtggctgtaccttctccacataaatgggatggataattatcgtatattaagatgtgattctcttttttatccttaatgttaatctacttaacctggccccctctaacatgagtcgataaatgttgtcctactcaccggtggtttcaatggctaattagaatgtgttatttgatttctgctgcagaaggcagtgtgattgtaacaaaaacaatgcggcttccccctttcgtacttcatttgtgttctcttaaaatagagtttgaacaaatattttaaaggtgcaaaataccattagaaaatactatttgaaatggacattatcgcattatcttggcataatggccagaaaatattgtattgcttggcagaaaagaaaataaggtctaaaggaaagtagcacattagcattgatggctgttcatttcacccagtataagcaagtgcagtgtacaaagaagtatattctgaatacattatttccattcatttagcacaaataaatcatttggtttcactttgmagtggaaaaaaaaaaaaaaaaaaaaaaaaaaaa

SEQ ID NO: 1482 - DNA, 400 bp, Homo sapiens
acagagcaagactccatctcaaaaaaaaaaaaaaaagacttaacagagcatttcacggggaagggccatgagggaacatcaccygggtgatggtaacattctgtatcttgataaggatttgagttatacaagtatatacatctgtcaaaattcaaagaatgtacactcaagatctgtgcatttcattatatgtaaatgttacmttaaaatgttgtaaacaaatattgaacaaatatacgcatgctaaagtatttaagaggaagtactggtgtctgcaaaacaaaaattttttttccattttctgtggtaaaatatacataatataaatgtattattttaagtgtacaattcagtggcattaaatacactcagaaagttrmaaamaaaaaaaaaaaatttc

SEQ ID NO: 1483 - DNA, 1278 bp, Homo sapiens
tcgacccacgcgtccgcatggagcacctggagtgttctgtctggaatgctggctgggagccttctcctggcatttgaacgaggggcagctgtgtcctctgtttgccgtgtaaagaaaagaggacagagctcagaggagatgaaccccagcagaaaggggtgcttgaccagcaggagagaagataaccaagagggtctgtgggtgtctcttctgagctacaccagtttccaggttacctgggaccatggataactctcagatcagcaacttgtcagttgatttccaagctgctgttggctggactcagactcagcagggagcacctgggcgagccctgtgctgcgggctggactccggcccatctcgctgattactcttgcttttgctccccagtgtgtcctcaagaggtcagagcctgcttgttgtttcttcatgaccacgggaggaggggcaccaacatgagggtgctagcatctccccagtggtggcttcccagggctggggaaaccctgggggaggggttgggacagggacctctgtcgcttgctgccactgcctgggtcaactgcctggcaaggctggccgctcgtgctcagaaagctgaggccttacctgccttctcctctcacccagcgcccatgtaaggacacatctgarttggcattctgtgtctgctcttgarctactcgcatgataagtctttgttgtcctgtgggatgtcaccggttcatgctgaagagaaattgtaaaggactcctttgcctgctcaggccccatggyctctgtcatgttttgtccccgtccctttgggarcacagcagcagtgggctggctggactgtgcaggcgaggttcaaggatgargtacagttgtgtgaaaggtgagcctgctggaccggggagctttcctcaaggcctccgcctggctatgatggcgttagggttgaggggaagcttcatccaaaatgcacagtacttggatgtcaagatgatgttgctgctctcaggatgagtcactctccaccactgacttcctttgatgttctgagctcagcctggagtctgamctgggactatagcacttgttctcccaaggtaaggctggcggscaaacccagtgcgcacacctgaacctgctccttggcagaratgaagggcgtcatgtttcgtagccactcaacacccatggacaatttggctccttgtwaagactwakgcatgcctttgaactgacttacttgaaatataattgskccyattttgctccaaagaacaatgg

SEQ ID NO: 1484 - DNA, 475 bp, Homo sapiens
gaattcggcacgagaaaggcaggacctcgaggcgcggccgcgcgaggtgaccggagtcacagttcccgcaggcggcgacagcagagcgcccactgcctccagcagattaatattaagattggaagtttgtgtcttttgctggatattggaaattgaatgtaatggcaacagaatttataaagagttgctgtggaggatgtttctatggtgaaacagaaraacacaacttttctgtggaaagagattttaaagcagcagtcccaaatagtcaaaatgctacgtatctctgtacctccattgacttctgtttctgtaaagcctcagcttggctgtactgaggattatttgctttccaaattaccatctgatggcaaagaagtaccatttgtggtgcgcaagtttaagttatcttacattcaacccaggacacaagaaactccttcacatctggaagaacttgaaggatctgcaggag

SEQ ID NO: 1485 - DNA, 442 bp, Homo sapiens
  misc_feature (430)..(430): n equals a,t,g, or c
cgccattttccccacaggggcgaggaggcggctttggttctcccggtgggcttgccggagtgcgttctgcagaccagaagggctttgtctggcgattgctgaatgctcaatagcagcctgctgggagggaagtcgaagggagaaataggacagaaagagagacctgacctctccctggaggctctcagtgtcggccgaggcccttggtcttgctctagggctctgcattcccgagagctgctgtatgccggggattggcttccaagcctgcctgagcttctccagtctcccgggcatcgccatgcggtgggagggtgagccttcctctcctgctgaaattccggcggcttggcaaccggccggggggtcttggattcctcggggagacamcactgatgctttgtggtttcacgtaatttggatttaaaanttgaaggcgtca

SEQ ID NO: 1486 - DNA, 1019 bp, Homo sapiens
  misc_feature (42)..(42): n equals a,t,g, or c
  misc_feature (898)..(898): n equals a,t,g, or c
  misc_feature (931)..(931): n equals a,t,g, or c
  misc_feature (973)..(973): n equals a,t,g, or c
  misc_feature (995)..(995): n equals a,t,g, or c
  misc_feature (1004)..(1004): n equals a,t,g, or c
tccggtaccggtccggaattcccgggtcgacccacgcgtttntaaaaaccacgtttctttgttgagctgtgtcttgaaggcaaaagaaaaaaaatttctacagtagtctttcttgtttctagttgagctgcgtgcgtgaatgcttattttcttttgtttatgataatttcacttaactttaaagacatatttgcacaaaacctttgtttaaagatctgcaatattatatatataaatatatataagataagagaaactgtatgtgcgagggcaggagtatttttgtattagaagaggcctattaaaaaaaaaagttgttttctgaactagaagaggaaaaaaatggcaatttttgagtgccaagtcagaaagtgtgtattaccttgtaaagaaaaaaattacaaagcaggggtttagagttatttatataaatgttgagattttgcactattttttaatataaatatgtcagtgcttgcttgatggaaacttctcttgtgtctgttgagactttaagggagaaatgtcggaatttcagagtcgcctgacggcagagggtgagcccccgtggagtctgcagagaggccttggccaggagcggcgggctttcccgaggggccactgtccctgcagagtggatgcttctgcctagtgacaggttatcaccacgttatatattccctaccgaaggagacaccttttcccccctgacccagaacagcctttaaatcacaagcaaaataggaaagttaaccacggaggcaccgagttccaggtagtggttttgcctttcccaaaaatgaaaataaactgttaccgaaggaattagtttttcctcttcttttttccaactgtgaaggtccccgtggggtggagcatggtgcccctcacaagccgnacggctggtgcccgggctaccagggacatgccngagggctcgatgacttgtctctgcagggcgctttggtggtgnttaactggctaaaggttaccgntgaaggcangtgcggtaactggcc

SEQ ID NO: 1487 - DNA, 857 bp, Homo sapiens
  misc_feature (38)..(38): n equals a,t,g, or c
ggaaccaataggattaagctggttctttggttgcttgnaagggtcaggcattaaggggtcaggaactgcaaagctaaatattttttaaaagtgttataaaacaaaataatttcccccgaattatgaaataaatgacaagcattttctaattaactctctatgtctttgctcttgtcattccttctacatggaatgcccttttctcagacctcttctatgggaatctgatcggtcatccaagatatatctcaaatgtcacttcctccaagaagcctatccttttaccccagtggtttataatctctcccttctttgaaacattataacacatggtttaatcctttcttgaaattgttttaccataaattatatactcttacaaatacatataatttgtccatccttcaccacacctctcccctgttcagacagtaagctccttgaggtaggggcctatgtatcacttacctacataagctttgtggtgttttgtacataataggcatgccataaaaatgtatttaaagratactctgttacaactatacaaaaaacrgargrgtamcaatgrtccmgaaaatttagcctggcaatgtgaataatacagattatgtgtaaatactgttttttcatccacagaactatgaagagagatctgtttgatctatcatctgctcagtgctgggataatcctctaagatttacatgtatcctgcagaaaatagatggcttagatgaatttggttttagcaagtggggattatgattagggaaaaagagaacaacctcttctagggagtctggaattactagttacttagcaggtcagtacttaaaactgaataagcggcatttca

SEQ ID NO: 1488 - DNA, 2771 bp, Homo sapiens
  misc_feature (1)..(1): n equals a,t,g, or c
nttgaggttctgggggtcctggagacttaccattgagccatgcaatctgggaagcacaggaataagtagacactttgaaaatggatttgaatgttctcatcccttttgcagcttttctttttggctctctcatgtccttggcttgctcctctattctacctctctttctccagcaataatatgcaaatgaagacatgtatccataagaaggagtgctcttcatcaactaatagagcacctaccacagtgtcatacctggtagaggtgagcaattcatattcaaaggttgcaaagtgtttgtaatatattcatgaggctggaakkaagaagaattaaaaatttgtcctaattacaatgagaaccattctaggtagtgatcttggagcacacatgaataactttctgaaggtgcaaccaaatccatttttatttctgcctggcttggtcacctctgtaaaggtttaacttagtgttgtcaagtaacagttactgaaagagctgagaaaaagaacaatgaacagcaacgatcttgactgtgcaactcagacattcctgcagaaaagacatatgttgctttacaagaaggccaaagaactatggggccttcccagcatttgactgttcattgcatagaatgaattaaatatccagttacttgaatgggtataacgcatgaatatttgtgtgtctgtgtgtgtgtctgagttgtgtgattttattaggggcatctgccaattctctcactgtggttccttctctgactttgcctgttcatcatctaaggaggctagatccttcgctgacttcaccattcctcaaacctgtaagtttctcacttcttccaaattggctttggctctttcttcaacctttccattcaagagcaatctttgctaaggagtaagtgaatgtgaagagtaccaactacaacaattctacagataattagtggattgtgttgtttgttgagagtgaaggtttcttggcatctggtgcctgattaaggcttgagtattaagttctcagcatatctctctattgtcttgacttgagtttgctgcattttctatgtgctgttcgtgacttggagaacttaaagtaatcgagctatgccaacttggggtggtaacagagtacttcccaccacagtgttgaaagggagagcaaagtcttatggataaaccctcctttcttttggggacacatggctctcacttgagaagctcacctgtgctgaatgtccacatggtcactaaacatgttatccttaaaccccccgtatgcctgagttgaaagggctctctcttattaggttttcatgggaacatgaggcagcaaatctattgctaagactttaccaggctcaaatcatctgaggctgatagatatttgacttggtaagacttaagtaaggctctggctcccaggggcataascaacagtttcttgaatgtgccatctgaraagggagacccaggttrtgagttttcctttgaacacattggtcttttctcaaagttcctgccttgctagactgttagctctttgaggacagggactatgtcttatcaatcactattattttcctgttacctagcatgggacaagtacacaacacatatttgttcaatgaatgaatgaatgtcttctaaaagactcctctgattgggagaccatatctataattgggatgtgaatcatttcttcagtggaataagagcacaacggcacaaccttcaaggacatattatctactatgaacattttactgtgagactctttattttgccttctacttgcgctgaaatgaaaccaaaacaggccgttgggttccacaagtcaatatatgttggatgaggattctgttgccttattgggaactgtgagacttatctggtatgagaagccagtaataaacctttgacctgttttaaccaatgaagattatgaatatgttaatatgatgtaaattgctatttaagtgtaaagcagttctaagttttagtatttgggggattggtttttattatttttttcctttttgaaaaatactgagggatcttttgataaagttagtaatgcatgttagattttagttttgcaagcatgttgtttttcaaatatatcaagtatagaaaaaggtaaaacagttaagaaggaaggcaattatattattcttctgtagttaagcaaacacttgttgagtgcctgctatgtgcacggcatgggcccatatgtgtgaggagcttgtctaattatgtaggaagcaatagatctcggtagttacgtattgggcagatacttactgtatgaatgaaagaacatcacagtaatcacaatatcagagctgaattatcctcagtgtagcttcttggaattcagtttctggaactagagatagagcatttattaaaaaaaactcctgttgagactgtgtcttatgaacctctgaaacgtacaagccttcacaagtttaactaaattgggattaatctttctgtagttatctgcataattcttgtttttctttccatctggctcctgggttgacaatttgtggaaacaactctattgctactatttaaaaaaaatcagaaatctttccctttaagctatgttaaattcaaactattcctgctattcctgttttgtcaaagaattatatttttcaaaatatgtttatttgtttgatgggtcccaggaaacactaataaaaaccacagagaccagcctggaaaaaaaaaaaaaaaaaaaaaaaaaaaaaaaaaaaa

SEQ ID NO: 1489 - DNA, 2065 bp, Homo sapiens
  misc_feature (1984)..(1984): n equals a,t,g, or c
  misc_feature (2040)..(2040): n equals a,t,g, or c
gcacaatggatgaagaagagaaggatgatggtgaagctaaagaaatttctacacctacccattggtctaaacttgatccaaagacaatgaaggtaaatgacctccgaaaagaattagaaagtcgagctcttagttccaaaggattaaaatcccagttaatagcccgattgacaaaacagcttaaagtagaggaacaaaaagaagaacagaaggagttagagaaatctgaaaaagaagaggatgaggatgatgataggaaatctgaagacgataaagaggaagaagaaaggaaacgtcaagaggaaatagaacgccagcgtcgagaaagaagatatattttgcctgatgaaccggccatcattgtacatccaaattgggctgcaaaaagtggcaagtttgattgtagcatcatgtctttgagtgtcctattggactacagattagaggataataaagaacattcatttgaggtttcattgtttgcggaacttttcaacgaaatgcttcaaagagattttggtgtccgtatatacaaatcattactgtctcttcctgagaaagaggacaaaaaagaaaaggataaaaaaagcaaaaaagatgagagaaaagataaaaaagaagaaagagatgatgaaactgatgaaccaaaacccaaacggagaaaatcaggcgatgataaagataaaaaagaagatagagatgaaaggaagaaagaagataaaagaaaagatgattctaaagatgatgatgaaactgaagaagataacaatcaagatgaatatgaccctatggaagcagaagaagctgaggatgaagaagatgatagggatgaggaagaaatgaccaaacgagatgacaaaagagatatcaacagatactgcaaggagaggccctctaaagataaggaaaaagaaaagactcaaatgatcacaattaacagagatctgttaatggcttttgkttattttgatcaaagtcattgtggttaccttcttgaaaaggatttggaagaaatactttatactcttggactacatctttctcgggctcaggtaaagaagcttcttaataaagtagtgctccgtgaatcttgcttttaccggaaattaacagacacctcaaaagatgaagagaaccatgaagagtctgagtcattgcaggaagatatgctaggaaacagattattacttccaacaccaacagtaaagcaggaatcaaaggatgtggaagaaaatgttggcctcattgtgtacaatggtgcaatggtagatgtaggaagcctcttgcaaaaattggaaaagagcgaaaaagtaagagctgaggtagaacagaagctgcagttactagaagaaaaaacagatgaagatgaaaaaaccatattaaatttggagaattccaacaaaagcctctctggtgaactcagagaagttaaaaaggaccttagtcagttacaagaaaacttaaagatttcggaaaacatgaatttacaatttgaaaaccaaatgaataagacaatcagraacttwtctacggtaatggatgaaatccacactgttctcaagaaggataatgtaaagaatgaagacaaagatcaaaaatccaaggagaatggtgccagtgtatgataaaatccatgtagtgatgaggaatggtgttaaataatgtaatatataaaaatcatgatataagaatgtttgaaggtgatgcatgtttgattttagtagtataaatgtattttagttcaaatgatgtataaagttttatgaatgtgagtttctgcttttgaaaattgcttgtaattcctagccttcaaattattaaacactccttgagtgaaataattttgcattgcaaagtgttttaggatgaactttgktatagttttaactccaataamgttcatcagtttaattgactgtagtatttaattaccaaatttcttttattaaaatgcctagaaatttttaatttatagaattattanggtttaaaaattttaagtctctggttaaaattcagtcaaaatcataaaatacatgngcttaaattttgcaggtttttgaac

SEQ ID NO: 1490 - DNA, 720 bp, Homo sapiens
  misc_feature (602)..(602): n equals a,t,g, or c
  misc_feature (618)..(618): n equals a,t,g, or c
  misc_feature (642)..(642): n equals a,t,g, or c
  misc_feature (659)..(659): n equals a,t,g, or c
gaaaaacaagctgagatcctggaatatgcatatcatggacagatcgccattgttgcccccgaagcccttctagcagggcacaattatacgttgaagatagagtactcggcaaatatatctagttcttattatgggttttatggcttctcctacacagatgaaagtaatgagaaaaagtactttgcagcaactcagtttgaacccctggcagcaagatctgcttttccttgttttgatgaaccagcatttaaagccacttttatcatcaagatcataagggatgagcaatacaccgctttatcaaatatgcctaagaagtcatcagtcgttctagatgatggacttgttcaggatgagttttctgagagtgtgaagatgagcacttacttggttgctttcattgtgggagagatgaagaacctgagtcaggacgtaaatggaaccctggtttctatatatgctgtaccagaaaagattggtcaagttcattatgccttggaaacaactgtgaagcttcttgagttttttcaaaactactttgaaattcagtacccacttaagaaattggatttggtggctattcctgactttgaagcaaggancaatggaaaattgggnttttgctcaccttccgaaaagganacacttctgtttgacanttacacttcttccatggcggataaaaaagctgggtgactaaaatcatttgctcattgaact

SEQ ID NO: 1491 - DNA, 1167 bp, Homo sapiens
ctatgtaactgcaagatgctgctcgccaacacagcaacaccaggcatttcaattaaataattttattgggggaaaaaaaccactttgagcaccaaagcaagaaaagtgtattattcaatcagtttcccagatcacatgccaagaacacaatgctcactgtggtgcctggcagacggtccacaaccagcgggtgcgttcagcttgaatggaccggggtcccacagtgtttgtgccacaagtcaatggccttgctcacgatcgcgtctgagctgtcctggggaatattttccagaaactttgttatcttctctgcactgttcagtgccataacttttattttaaaggttaataaaatttcgacagctacaaaaactaggatcttacaggatccactcacaactttatcccaaaccctctgtaaactggattcaggcaaacatcccgcaaagcacctcttgaaccagagatcataaggaagtttgggcgccgcggaacacatcctcagatgagtcagcagtctgccatcttccagattcaagtattgttcaaacgcttttggcaactggggcaaggaatcccggtacttggtatttaattggttcacaaagcgtcgggtgatccagtaacagtcgacactatcttccaccatttcctccatggctttagctatggcaagaaacacttcatcatctggctccagtggaaaagagggacttcgaggtaacttcccagactccagctgatacatgcggagatagacttcagcctgaggtgtggcatcactaacaaagcgaacgactttcagggcatgaaggacatccaagtactgctccttacgatacatcatcaccttggcatgggactcgtggtgtggaggcaagattcctagaagcaccttccataccaatgcacggtacatggacgggagagggaacctctgactaaaagtacaaagtttctcagtatccagacggtcatcttttaggagaatttctaatgatttcttttcttcaactccacgaaaccccactttctcataatatactgaacgaaagtttctctgagagtcctcagtcatatttcattctgggacacccgcgcgcgcccagacggcccgggagacaaaactcagcgccgctgacgctgacgctgccgctgtcgctgccg

SEQ ID NO: 1492 - DNA, 2129 bp, Homo sapiens
  misc_feature (5)..(5): n equals a,t,g, or c
  misc_feature (15)..(15): n equals a,t,g, or c
cgaanttcggagcgnccggtactgttgaaagcgagacatcaccagatagagataagaaaaaagagcagtcagaagtatctgtttctcctagagcttcaaaacatcattattcaagatcacgatcaaggtcaagagaaagaaaacgaaagtcagataatgaaggaagaaaacacaggagccggagcagaagcaaagagggaagaagacatgaatccaaagataaatcctctaagaaacataagtctgaggaacataatgacaaagaacattcttctgataaaggaagagagcgactaaattcatctgaaaatggtgaggacaggcacaaacgcaaagaaagaaagtcatcaagaggcagaagtcactcaagatctaggtctcgtgaaagacgccatcgtagtagaagcagggagcggaagaagtctcgatccaggagtagggagcggaagaaatcgagatccagaagcagagagaggaagaaatcgagatccagaagcagggaaagaaaacggcggatcaggtctcgttcccgctcaagatcaagacacaggcataggactagaagcaggagtaggacaaggagtaggagtcgagatagaaagaagagaattgaaaagccgagaagatttagcagaagtttaagccggactccaagtccacctcccttcagaggcagaaacacagcaatggatgcacaggaagctttagctagaaggttggaaagggcaaagaaattacaagaacagcgagaaaaggaaatggttgaaaaacaaaaacaacaagaaatagctgcagcagctgcagctactggaggttctgttctcaatgttgctgccctgttggcatcaggaacacaagtaacacctcagatagccatggcagctcagatggcagccctgcaagctaaagctttggcagagacaggaatagctgttcctagctactataacccagccgctgttaatccaatgaaatttgctgaacaagagaaaaaaaggaaaatgctttggcagggcaagaaagaaggggacaaatcccaatctgctgaaatatgggaaaaattgaattttggaaacaaggaccaaaatgtcaaatttaggaaattgatgggtattaagagtgaagatgaagctggatgtagctcagttgatgaagaaagttacaagactctgaagcagcaggaagaagtatttcgaaatttagatgctcagtatgaaatggcaagatcacaaacccacacacaaagaggaatgggtttgggtttcacatcttcaatgcgaggaatggatgcagtttgaaaatgatcacacttgtaaagtttgggacttatagacttcttgttctgatgtcacgtccttgttcaccaaacagctagcactctagcttgcatgggtgttgcattgactttaatttattgaaaaatacaaatttttgtaaatatcagatcagtgatactggtgttagtgttgtaatcaggttaaacccacttccattaaacttgacaggactatagaaggataatattttttagttcatgaattctacttttcaaatatataaaagctgcaggtggggataaaatctcatacatggattttttcgtgtccgctgtcttgtgtacttttgtacttaaccttgtacagttattttcatctcttgaaacatgaaagaaatgttatgtagatgttctttagaagatctggccatttggtacataatccagcacagataagctgggtggtaatgataataaaaatggttttctcaaaactggtgttaatttaagttacctgggatgtttctttgaatttgttttatagtttctgtagcatttggcaattgctgttagaaaacactagctagaaatcccctccccaccaccctttttaaggccagttaactatactacagtcaataccgtggtgagcaaaaatgtaaaaggtggaaggagaaaacttattaaaatagtatgttttcctattataagggacagacttggtattcagtatttgtcaaatattacatgtgttattcaggagatagattaatgcattaaagggatgtaagcacttttattttaataaagtgccttataacaaaaaaaaaaaaaaaaaaaaaaaaaaaaaaaa

SEQ ID NO: 1493 - DNA, 533 bp, Homo sapiens
  misc_feature (39)..(39): n equals a,t,g, or c
ggtcgaattccgggtcgaccacgcgtccgtttgcttgtnactatttttcattgaagcatgcgcttacctatgctgattcttactaaaagcataggctggggtatttattggcgaaaggaaatgtgtagtgtgggctggactgttggtggaggctggctttttagcccacttgctatacatgctgccaatggatttaagacttgaaatgttgaaagttgagtggaattatttccctcctaaaacatttatttacagtactcctctctacccctaaggttgggctctgcctcagaggagtgagtttttttttttttttctataaagtttacattgtcttactatttattgartgaatytctggtcattgcctatgcaaatataakaaatctggctttaaatattagtcagtttcatggctatgactagattgktttcttgkataactaaatacctgkataaaatgaactaatgttttctctcccctccctaccccttcctaaaaaaaaaaaaaaaaaaaaaaaaaaaaaaaaaaa

SEQ ID NO: 1494 - DNA, 901 bp, Homo sapiens
tcgacccacgcgtccgaaacaaaacaaaacaaaacaaaaacttgaaagactgcccaagaaaggtgaaggttagatctcaggggatgatcttgaagcaactgagacagacctagaaacttgcctcatatgatacaagaagacccagcttctttgtctctaccctgtaggcactgggtagacaggtaggtgatattttacttcacaaacaagggaactaaaagtatgaacatttctctgttcctcattatctctgccctaaaatattttggctatctagccccagttagagcggactggcactgtctggtacaggaggtatgcagcagatgttctgcatctgagctccattatgactgtcccccaacaaatcatcccccagccagcccaagggaacgtggaattcagaggggaactgttctaaccaggagcagccaattagatccaggccagagaaacccatatccaggcactttatctttgtcctaaaatgaacctagctaacctcttcaggctatccaaaaccctgaccactccacatagagagacatttgctagccttacatgtcactttccactgtacacataccaatgacacctgaaccagatataaagacagacccacaaaggttctgctgagcctaaggatctgctcacctatttctgatcccgaatgcccctgggacatcttccagaatgtgtgcctccaaataaagtctagaaaattggaggaaaatttaaatgcagatgaatcgagaaggaataaaagccattagaaattctgggaaaacaagaaatatagaagaaagtcacggggctgggtgtggtagctcacgcctgtaatcccagctactcaggaggctgagcaggagaatcgcttgaactggarargtggaggktgtga

SEQ ID NO: 1495 - DNA, 782 bp, Homo sapiens
  misc_feature (691)..(691): n equals a,t,g, or c
  misc_feature (746)..(746): n equals a,t,g, or c
  misc_feature (762)..(762): n equals a,t,g, or c
  misc_feature (772)..(772): n equals a,t,g, or c
  misc_feature (780)..(780): n equals a,t,g, or c
ccccccagcctcactaaagggaacaaaagctggtgctccaccgcggtggcggccgctctagaactagtggatcccccgggctgcaggaattcggcacgttttcccctgttccttggagtcagtattttgagtccatggaagatgtagaagtagagaattgcttggacccgggaggcaaaggttgcagtgagtggagatcatgcatgccactgcactccagcctgggcgacaagagcaagattctgtctcaaacaaaacaaaacaaaacaaacaaaaaacttttaaccaggattttttaaaaaaatagtaaactctacctaacacagtatttctcattttaaccatgtggaaatgaacagttcagtggcattaattacattcacaaggctgtggaccacaccactatctataccccaactttttcatcatccccagcaagaactctgtacccattaagcaataactcctgcctgcgtccccaagctctattctgcttttggtctctgaatttgcctattttaggtagctcataggtggaatcctacaatatttattttgtgtctggcttatttcgtttagcataatgctttcaagtccatccatgttgtaagtgtgtatcaaaattctgttccattttatggctgaatattttattaaatgcatattccatattttggttagccattctccngaacggacatctggggtttgcttccaccttttgacgaatggtgaataaagccggnatgaccatgggtgtanagccaatcantccattcntt

SEQ ID NO: 1496 - DNA, 891 bp, Homo sapiens
gaattcggcacgagccttgagctagcatttcattatgaccgtgattttyccccgcaccactttccagccttgtggtccacaattccactgggccttaagtatgtactgaactttcctgcctccctcattttgctctgcttgtgcaattttttccaccctccatctctgtcaaacgtaagccttcctgacctctaagacctacctttgtcatgtacctttaccctcaggcaaggagcaatctcttctcttcctcttctaccttgctgtagcttctccccaaggatttatcacattctgccttgaatcatagggaacagcatgtgtagtggaatgaacacaggcctctgaatccaagatacgagtttaaatcccagctttggaggtggttacttaaagtctcagtgccttcattcttctycctatataaagtagatattacaatatctaacttacagagtcattgggagctatacatgcagcgattgggtaaagcacctggcacatggcaagcgattagcaaatgctggttacttctacttctttctcttcccttttcccagtctatcataatttccttgararcaggcaccatgtcttatttacccttgtatttcccacagtacttcccatagtgarttacccttagtaaatacycagtaagttgaattgaatttaaattamctgtaagtcttaaaatgtgggattaaattaagaatatattgtcctggaaatacccaagtgtctattgatggatgaatggataaacaaaatgtggtatacacataatggaatattattcagccttaaaaaggaatgaaattctgacatgtgctacaatatgatgaacctggaagacattatatgtgaaataagccagacagaaaaggacaa

SEQ ID NO: 1497 - DNA, 1181 bp, Homo sapiens
  misc_feature (617)..(617): n equals a,t,g, or c
gcgaaaaataccgtttgggaccaggctggcctagacccagggatgagaatgcaccctaaaataaatatacgggaagcagcagagggcttccctgtctagtgtgtgatcctaactaaaggcagctctcttggacagccttcccctggattaggtcacatacacctggtggccaagcctctgctgggtcccaaatacacacccgagtcctgccaaagaaaggagatttttaaaaagcacagacaaattgtatgcaagtggaaaatacccataggcctagacagctgtggagggaagacctcgtgggtacctggaggctgccagagctgggagctctgcaggtatgagtcagggaaggctcagagacaagcagaatctctctatggagacaacttgcagtgccttttaggttttccaaataacctcggagttcagagcattgggtttttttctcccctccccacccccagaaaaataattagaaaaatgtttaggagaaaggaaaagaattagatgcatcagaataccagctataagccaacactgtttccagaaactcaagaaaaagctcaaacagaagacagttcccctgagaggctggaggcgttggtgctgaaggnaattttcctagctaaggggcactgggccttgctgcaccttggggctgaccttttttgcaaaacacccacccctgccctcctggcatactcaacagcaacgccagctttctggacccttggaaagatgttagctcaaacacccactttttccagatcttcctcttgctcttcactgaggaatttgtaattctgaggctagcgatgccsactcggatattccgcagcccaggtgtttagattagaatttgtccagcggtaatcctgatgctggaaaccaacaaacatttggcctcatattcacccatttaaaaactagagcccctggcaggtccccttagggccatgtgttcatggaatataagccaagtttgccytargctkgttcatggaatataagccaagtttacctctccccattttctgccctggcccacttcccactcacctccacctyattgccmggaagggatcaaaakgcctccatgccarttgttaakggctacatatttgcccttcccaagggtatttgcatttattaggaacaggccttaaattcaaggaaaa

SEQ ID NO: 1498 - DNA, 505 bp, Homo sapiens
  misc_feature (402)..(402): n equals a,t,g, or c
  misc_feature (478)..(478): n equals a,t,g, or c
  misc_feature (483)..(483): n equals a,t,g, or c
  misc_feature (501)..(501): n equals a,t,g, or c
  misc_feature (505)..(505): n equals a,t,g, or c
gtgcgagtccaagaagtggtgaaagaaaatgaagaattgcaccaagagttaaataagagtagtgctgttaccagtgaggaatggcgtcagcttcagactcawgcaaaactggttttagaggaaaacaagttgttgctggagcagttggagattcagcaaaggaaagccaaggacagccaccaggagcgcctccaagaagtttctaagctgactaaacaactaatgctcctggaggcaaaaacccacggccaggaaaaggagctggcggagaacagggaacagctggagattttacgtgccaaatgccaagaactcaaaacacactcggatggcaaaatcgcagtggaagttcataaatcaattgtgaatgaattaaaaagccaattacagaaggaagaaganaaagaaagggctgagatggaggagttgatggagaagctgacagtcctgcaagcgcagaagaagagcctgctgttanagaanaacattttgacagagcanaacn

SEQ ID NO: 1499 - DNA, 651 bp, Homo sapiens
gaattcggcacgaggtggtgggaggctccggcggggtctacgccctgtgctcggcacacctggccaacgttgtcatgaactgggctgggatgagatgtccctacaagttgctgaggatggtgctggccttggtgtgcatgagctccgaggtgggccgggccgtgtggctgcgcttctccccgccgctgcccgcctcgggcccacagcccagcttcatggcgcacctggcaggcgcggtggtgggggtgagcatgggcctgaccatcctgcggagctacgaggagcgcctgcgggaccagtgcggctggtgggtggtgctgctggcctacggcaccttcctgctcttcgccgtcttctggaacgtcttcgcctacgacctgctgggcgcccacatccccccaccgccctgaccggctacctgaggctgcacaggccagggctcgggcatgtggtggccgccaccaggggccttcacgtctgccctttgtgaacggacgtctcagggctgctgtgccccttgggtgtgggtggcctcaaaggaggccctgtcccagccacccaccccccactcccaggacttgcggtmtgagcctttttggataattaataaatattttacmcagcaccaaaaaaaaaaaaaaaaaaaaaaac

SEQ ID NO: 1500 - DNA, 2968 bp, Homo sapiens
  misc_feature (2961)..(2961): n equals a,t,g, or c
  misc_feature (2964)..(2964): n equals a,t,g, or c
aattcggcacgagatcctctggctgctctgctcccaccgcccggcccccggcaggccccccacccacaatgcacacaactggaggctcggccaggcgcccgccarctggtacaatgacacctaccccctgtctcccccacaaaggacaccggctgggattcggtatcgaatcgcagttatcgcagacctggacacagagtcaagggcccaagaggaaaacacctggttcagttacctgaaaaagggctacctgaccctgtcagacagtggggacaaggtggccgtggaatgggacaaagaccatggggtcctggagtcccacctggcggagaaggggagaggcatggagctatccgacctgattgttttcaatgggaaactctactccgtggatgaccggacgggggtcgtctaccagatcgaaggcagcaaagccgtgccctgggtgattctktccgacggcgacggcaccgtggagaaaggcttcaaggccgaatggctggcagtgaaggacgagcgtctgtacgtgggcggcctgggcaaggagtggacgaccactacgggtgatgtggtgaacgagaacccggagtgggtgaaggtggtgggctacaagggcagcgtggaccacgagaactgggtgtccaactacaacgccctgcgggctgctgccggcatccagccgccaggctacctcatccatgagtctgcctgctggagtgacacgctgcagcgctggttcttcctgccgcgccgcgccagccaggagcgctacagcgagaaggacgacgagcgcaagggcgccaacctgctgctgagcgcctcccctgacttcggcgacatcgctgtgagccacgtcggggcggtggtccccactcacggcttctcgtccttcaagttcatccccaacaccgacgaccagatcattgtggccctcaaatccgaggaggacagcggcagagtcgcctcctacatcatggccttcacgctggacgggcgcttcctgttgccggagaccaagatcggaagcgtgaaatacgaaggcatcgagttcatttaactcaaaacggaaacactgagcaaggccatcaggactcagcttttataaaaacaagaggagtgcacttttgttttgttttgttctttttggaactgtgcctgggttggaggtctggacagggagcccagtcccgggccccatagtggtgcgggcactggacccccgggccccacggaggccgcggtctgaactgctttccatgctgccatctggtggtgatttcggtcacttcaggcattgactcaaggcctgcctaactggctgggtcgtttcttccatccgacctcgtttcttttctttcctatgttcttttgttcagtgaatatccctagagctcctaccatatgtcaggccctatgcctcaccctgagaacgcagtgagcatgaggtggacctgtttgctgggaaccccaggtcacccccttttcttcctactctgtgcctggagcatcatgtccacccctgcagatccttggaaaagaaaatgtttatgttgcagggtattgcatggtcacgagtgagggcaggcccctggggacacatctgcccacagctgcacaggccagggcgcaggcacatctgttggttctcaggcctcagataaaaccatctccgcatcatatggccagtgaccgctttctcccttcaagaaaattctgtggctgtgcagtactttgaagttttaattattaacctgctttaattaaagcagtttcctttcttataaagtggaatcaccaaatcttatcacacagagcacagtcctgtagttacccagcccgctccagcagtgcgggagattgtaaggaagcggtggcggctggtgaagcaagtctcacatgtcggcgttcttggccaatggatacaaagataaagaaaatgttgcctttttctaggaactgtcagaaatcctcatgcctttcaagacttctgtgaatgacttgaattttttattccctgcctagggtctgtgaacgaggcctgtctcttccctggggtttctttccatggcctttatttctcctcttccagtgggagttttgcaggctcttctctgtggaaacttcacgagcgttggctgggcctcggcttcgctggagtgtactccagggtgaaggcagagtgggatttgagacccaggttaggcacgacccaggctgagaagggacgtttccatcattcacagtgccctccccacagcactacctcaccccgacccccaccctcactcctaccccaccccgcgatcgtcaggggtgccacggtgggccggagggtgccggctctggctgtccctgtgccggtccctcacaaacctctccccctttgaaactcaagcacagctgcgaggagggcagcgaggagggacccctctctcatggttgtctctttcccccgctatgtcataggtagtggaggaagcgaaggaagtgaacgctgaatgtgacgcatttctgaagagctcagctgtcaccgggcatagcctggaagccccaagtctgttctgactttgcctggctgtctccttgacccgcctcctagatcattgtccttgatgtccaggctgggtcatttaaaatagagatgcaatcaggaaggttgggggacttgggactgtggctgaattgagaccttgctgatgtattcatgtcagcacctgagtcacagcccaggtgcccggaagcagcctcttcgcataggcagtgatttgcgattactttaaagctcaccttttttcttcccctctctgttcgctgctgtcagcataatgattgtgttccttccctatgggatccatctgttttgtaaacaataaagcgtctgagggagtgtaaaaaaaaaaaaaaaaaaaaaaaaaaaaaaaaaaaaaaaaaaaaaaaaaaaaaaacaaaaaaaaaaaaaanagnagag

SEQ ID NO: 1501 - DNA, 529 bp, Homo sapiens
  misc_feature (373)..(373): n equals a,t,g, or c
  misc_feature (464)..(464): n equals a,t,g, or c
  misc_feature (484)..(484): n equals a,t,g, or c
  misc_feature (529)..(529): n equals a,t,g, or c
atctttaataccaggaaattttagaaatacagtgaaacacagatcttttaaataaatatttccccatttgaattgttccctagagtttacacagttgtaccttattaccagtttaaatggatatctcagttaataattttcaatagtgaaactatcaaatatcagagatttacttccttttagttactatgaaaagcacatttactttggagagcaactgtaatacacctaaaattagagcaaccaaaggcatgtatggagcattttttaatttaaaaaattgcattttgtttctcataccttatttaaaacattaagaagtaaatgtctttagtttttgagtacatttttatatgaataggaaacatgctgntttcataatccagkcttttgatgtgtgtgaaatgaatttgtgtggagcgttatgtgaatttttatgaacttatcttttattggtgatctanaaatgcttgggatacctaanaattccagacctcagtttcttatgggggataacaatggatttggn

SEQ ID NO: 1502 - DNA, 1225 bp, Homo sapiens
  misc_feature (59)..(59): n equals a,t,g, or c
gtgcactctaacgatctctttgccatcttgttttaatctgacagttctcagacataganaaaaaaggtaactcatgcatgtactaccttttttctctatgtctgagaactgtcagattaaaacaagatggcaaagagatcgttagagtgcacaacaaaatcactatcccattagacacatcatcaaaagcttatttttattcttgcactggaaggaatcgtaagtcaactgtttcttgaccatggcagtgttctggctccaaatggtagtgattccaaataatggttctgttaacactttggcagaaaatgccagctcagatattttgagatactaaggattatctttggacatgtactgcagcttcttgtctctgttttggattactggaatacccatgggccctctcaagagtgctggacttctaggacattaagatgattgtcagtacattaaacttttcaatcccattatgcaatcttgtttgtaaatgtaaacttctaaaaatatggttaataacattcaacctgtttattacaacttaaaaggaacttcagtgaatttgtttttattttttaacaagatttgtgaactgaatatcatgaaccatgttttgatacccctttttcacgttgtgccaacggaatagggtgtttgatatttcttcatatgttaaggagatgcttcaaaatgtcaattgctttaaacttaaattacctctcaagagaccaaggtacatttacctcattgtgtatataatgtttaatatttgtcagagcattctccaggtttgcagttttatttctataaagtatgggtattatgttgctcagttactcaaatggtactgtattgtttatatttgtaccccaaataacatcgtctgtactttctgttttctgtattgtatttgtgcaggattctttaggctttatcagtgtaatctctgccttttaagatatgtacagaaaatgtccatataaatttccattgaagtcgaatgatactgagaagcctgtaaagaggagaaaaaaacataagctgtgtttccccataagtttttttaaattgtatattgtatttgtagtaatattccaaaagaatgtaaataggaaatagaagagtgatgcttatgttaagtcctaacactacagtagaagaatggaagcagtgcaaataaattacatttttcccaaaaaaaaaaaaaaaaaaaaaaagggcggcc

SEQ ID NO: 1503 - DNA, 2298 bp, Homo sapiens
  misc_feature (2291)..(2291): n equals a,t,g, or c
gaattcggcacgagccactgggacatgtcgctgccgctcatcgtgactctgagcactatctccatcatcctcctagcggccatgatcaccatcgccgtcaagtgcaagcgcgagaacaaggagatccgcacttacaactgccgcatcgccgagtacagccacccgcagctgggtgggggcaagggcaagaagaagaagatcaacaaaaatgatatcatgctggtgcagagcgaagtggaggagaggaacgccatgaacgtcatgaacgtggtgagcagcccctccctggccacctcccccatgtacttcgactaccagacccgcctgcccctcagctcgccccggtcggaggtgatgtatctcaaaccggcctccaacaacctgactgtccctcaggggcacgcgggctgccacaccagcttcaccggacaagggactaatgcaagcgagacccctgccactcggatgtccataattcagacagacaattttcccgcagagcccaattacatgggcagcaggcagcagtttgttcaaagtakctccacgtttaaggacccagaaagaccagcctgagagacagtgggcacggggacagtgatcaggctgacagtgaccaagacactaacaaaggctcctgctgtgacatgtctgttagggaggcactcaagatgaaaactacttcaactaaaagccaaccacttgaacaagaaccagaagagtgtgttaattgcacagatgaatgccgagtgcttggtcattctgacaggtgctggatgccacagttccctgcagccaatcaggctgaaaatgcagattaccgcacaaatctctttgtacctacagttgaagctaatgttgagactgagacttacgaaactgtgaatcccactgggaaaaagactttttgtacatttggaaaagacaagcgagagcacactattctcattgccaacgttaaaccttatttaaaagccaaacgtgccctgagccctctcctccaagaggtcccctcagcatcaagcagcccaaccaaggcgtgcatcgagccttgcacctcaacaaaaggctccctggatggctgtgaagcaaaaccaggagccctggctgaagcaagcagtcagtacttgcccactgacagtcaatatctgtcacctagtaagcaaccaagagaccctcccttcatggcttccgatcagatggcaagggtctttgcagatgtgcattccagagccagccgggattccagtgagatgggtgctgttcttgagcagcttgaccaccccaacagggatctgggcagagagtctgtggatgcagaggaagttgtgagagaaattgataagcttttgcaagactgccggggaaacgaccctgtggctgtgagaaagtgaaaaaaraaaaaaaaaaaggcattggcattttcttgtctcttctgttgatttaaaaatgatccctcctggtgataacmcattttacagggatgaagaaagaccaatgctgctttaaggcttttagtgaacatctgaagtgcccacaagtatgttctttccactgctgatttctttttcagagataacaatggtttcgttttgaccaaacttgtattaggacagaattaatgatgcttaaagagaaaagaaaaaaaragagaagaaaaaggagagatgaaaaaggaggatgaggagaagaattaccttttgacaatctgttaggaaggtatgcagtgtgagaactgaagtatttctgatcactctcagactgtcctccgtgatttatgctgacttaactgtttacctataaaccccatacaaagcagggtcataatttgtgatctgtggtggatttctagcagtcatcacaggcttctactgaaagtcctgaaaagaccttgcagtagtccaagctacaccaaacattaacacatatttgtggtaaacatttctgtataaagttacctgacacacatataaacacaaggaacattccatatcattagtcgaaaacaaaaacaaaaaaaaaaccttyggtcatttgtaakacatctcatgtcatataaaagttaaatgtaaaaagatacagtccattttgtcctgcacacacgtagactaattcacgtcattaaagaagaagaaaacttaaagatttaaaatgcctatttagcattttagtgtccaacaaagatttaaacaatgatgaatatgttttaaatttgacatagaaaagttctaaaaaatagttaccattgagtggtaagattcagagaaaattaacttgattaatatgttttnaaaaaaa

SEQ ID NO: 1504 - DNA, 389 bp, Homo sapiens
  misc_feature (4)..(4): n equals a,t,g, or c
  misc_feature (10)..(10): n equals a,t,g, or c
  misc_feature (102)..(102): n equals a,t,g, or c
aganacccanccctcactaaagggaacaaaagctggagctccaccgcggtgacgaccgctctagaactagtggatcccccgggctgcaggaattcggcacgngcccccgcgagccgctcgagaactccgccagcgagtcgtctgacacggagctgccagagaaggagcgcggcggcggaacccaaggggcccgaggacagtggtgcgggaggcacgggctgcggcggcgcagacgacccagccaagaagaagaagcagcggcggcaacgtacgcacttcacaakccagcagttgcaagagctagaggccacgttccagaggaaccgctaccccgacatgagcatgagggaggagatcgccgtgtggaccaacctcaccgagccgcgcgt

SEQ ID NO: 1505 - DNA, 1400 bp, Homo sapiens
ctctggagccaccagcagaacctcttcaatatcttgcatgttacagatttcactgctcccaccagcttggagacaacatgtggttcttgacaactctgctcctttgggttccagttgatgggcaagtggacaccacaaaggcagtgatcactttgcagcctccatgggtcagcgtgttccaagaggaaaccgtaaccttgcactgtgaggtgctccatctgcctgggagcagctctacacagtggtttctcaatggcacagccactcagacctcgacccccagctacagaatcacctctgccagtgtcaatgacagtggtgaatacaggtgccagagaggtctctcagggcgaagtgaccccatacagctggaaatccacagaggctggctactactgcaggtctccagcagagtcttcacggaaggagaacctctggccttgaggtgtcatgcgtggaaggataagctggtgtacaatgtgctttactatcgaaatggcaaagcctttaagtttttccactggaattctaacctcaccattctgaaaaccaacataagtcacaatggcacctaccattgctcaggcatgggaaagcatcgctacacatcagcaggaatatcwrtcactgtgaaagagctatttccagctccagtgctgaatgcatctgtgacatccccactcctggaggggaatctggtcaccctgagctgtgaaacaaagttgctcttgcagaggcctggtttgcagctttacttctccttctacatgggcagcaagaccctgcgaggcaggaacacatcctctgaataccaaatactaactgctagaagagaagactctgggttatactggtgcgaggctgccacagaggatggaaatgtccttaagcgcagccctgagttggagcttcaagtgcttggcctccagttaccaactcctgtctggtttcatgtccttttctatctggcagtgggaataatgtttttagtgaacactgttctctgggtgacaatacgtaaagaactgaaaagaaagaaaaagtggratttagaaatctctttggattctggtcatgagaagaaggtaatttccagccttcaagaagacagacatttagaagaagagctgaaatgtcaggaacaaaaagaagaacagctgcaggaaggggtgcaccggaaggarccccagggggccacgtagcagcggctcagtgggtggccatcgatctggaccgtcccctgcccacttgctccccgtgagcactgcgtacaaacatccaaaagttcaacaacaccagaactgtgtgtctcatggtatgtaactcttaaagcaaataaatgaactgacttcaactgggaaaaaaaaaaaaaaaaaaaaaaaaaaaaaaaaaaaaaaaaa

SEQ ID NO: 1506 - DNA, 1484 bp, Homo sapiens
  misc_feature (464)..(464): n equals a,t,g, or c
caggcgacagagctgagccaagcgtttactgggcagctgttacgctcagattccaaatgawaatgtttgagagcgctgactctacagccacaagatctggccaggatctctgggctgaaatttgttcctgtctgccaaatcctgaacaagaagatggtgccaacaatgcattctcagactcctttgtggattcttgccctgaaggtgaaggccagagggaggtggctgactttgctgtccagccagctgtaaagccttgggctcccttgcaggattcagaagtgtatttagcatctctagagaagaagctaagaagaatcaaaggtttaaatcaggaagtgacttccaaggacatgcttcgaactctggcccaagccaagaaggaatgctgggatcggttcctccaggagaagttagcttcagagttctttgtggatggacttgattctgatgagagcaccttnggaacatttcaagaggtggctccagccagataaagtagccgtcagcacagaggaggtccagtatctgattcctccagagtcacaggttgagaagccagtggccgaggacgagccagcagccggggacaagccagcagcagcagaacagtaaattacacacacacacacacacacacacacgccgagcagctgtctcgggtccagagcgagcagcgtggagctcagtgacagcagcagggagaaatccactgaaggaaaaaacccaaatttccactccacaaagaaaacagctgcaagcccccagggacttacctggggctggcatgtgtgactgtctcggatgaagtgactgacccagtgcacactggatcaaaatgctgctttcctctgtgtctcacagcttggctgagctctgtctctgcaggttagaagtctgctaaagatcaaatgtgaaagtacttggagaaactgaggcctcttatgtgtaatgtgtaagttaagtgagccatatattttcttgcctcttccggacattcatgcttgtgtcccaagcattcccttggtgaattgtcacgtgagtggggccagtaagagtgaagtctgctccttgaatccaagccccatctggggcttctctaacaaatctgtagtaagtatacggactccagggagagaggctgggcttctytctctcatttgttccttgtggaacaaatgggcaaaagaagtgtgaaaatgtgggtgtttatgtctgtgtatatgtattttttacttcatgcatggcttctcctccaacttcctcctgcacttaaaaagggccaggttccaaattagacttgtaaatatggtgttagtgtttgacactactcctggatagttccaaacatcttccttgtggcaggtttcctggctgagcccgagcttccctccctgtttattgtgttcatgatcagtatgtgtttccatataaaacttttctcaacggaaaaaaaaaaaaaaaaaaaaaaaaaaaaaaaaaaa

SEQ ID NO: 1507 - DNA, 2192 bp, Homo sapiens
  misc_feature (2174)..(2174): n equals a,t,g, or c
  misc_feature (2190)..(2190): n equals a,t,g, or c
gcccgatttcctccgggctacaggcgacagagctgagccaagcgtttactgggcagctgttacgctcagattccaaatgaaaatgtttgagagcgctgactctacagccacaagatctggccaggatctctgggctgaaatttgttcctgtctgccaaatcctgaacaagaagatggtgccaacaatgcattctcagactcctttgtggattcttgccctgaaggtgaaggccagagggaggtggctgactttgctgtccagccagctgtaaagccttgggctcccttgcaggattcagaagtgtatttagcatctctagccattttattttaaaaatatttcctgacttcggatgtggcttgagctgtaggcgcggagggccggagacgctgcagacccgcgacccggagcagctcggaggcggtgaataatagctcttcaagtctgcaataaaaaatggcctccaacaaaactacattgcaaaaaatgggaaaaaaacagaatggaaagagtaaaaaagttgaagaggcagagcctgaagaatttgtcgtggaaaaagtactagatcgacgtgtagtgaatgggaaagtggaatatttcctgaagtggaagggatttacagatgctgacaatacttgggaacctgaagaaaatttagattgtccagaattgattgaagcgtttcttaactctcagaaagctggcaaagaaaaagatggtacaaaaagaaaatctttatctgacagtgaatctgatgacagcaaatcaaagaagaaaagagatgctgctgacaaaccaagaggatttgccagaggtcttgatcctgaaagaataattggtgccacagacagcagtggagaattgatgtttctcatgaaatggaaagattcagatgaggcagacttggtgctggcgaaagaggcaaatatgaagtgtcctcaaattgtaattgctttttatgaagagagactaacttggcattcttgtccagaagatgaagctcaataattgttcacattgttcttttatatatatttatatatatatataaaaattgggtcttagattttgatttactagtgtgacaaaataactacatcctaatgaaaatcaagtttgatatgtttgttttgaaagtagcgttggaagagttgttgggggttttttgcatccatagcactggttactttgaacaaataaataaaagctttctgtagttgcttcctttatcagaaaagaacatttgataccatggtatatcatttcctcttcattaaagaacagcttttctaaatgttgggggaaatgtccatagtcattactcagtcaaaacttgtgttctcatgagcctaaggaccattctagatttattacgtgttttttgtgtgtgtgtgtgtgtgtgtgtgtgtatccataaaatgcatatgtaaatttttttttgtttttaagcattcacccaaacaaaaaaatcacaggtaaacccatgtttctgagatgccattattccaagcaaaataagagataatcccttcaagttaaattgaaaattttcctgaaaccatacatttcaagtgaaataagtaattctagataggacaatttaaattggataattttaaagtgtctataattgcagtggtttatttgcaaaattcctaaaaggaaaaattttatcactgccatcacagcaggtttcctcatccagatgaggaaactagacaaatgctagtgtgttttaactagctaaacaaaactaagttaaatgaacatttaaaagtttccctagcgggccattccttagcaaaatgttggaatccctgttgctacattgactaaaaggtcatgatgaatggaatatgtaagacttggctcatagaaacctaatcagatggttagaggtgttggcagtttaggacctgctgtcataaatgtgtgaacaaccttttgtaacctaacctattgacctgcatgttttttctttaccccaattcattacatggaggctcaatcttgagtttgctttactggttcagcaaaagccaggaagaacaactttgtagtaatcaaaatgttatccaactgtatattgtttactttattgtaaatactggtgaacagtggttaataaatagttttatattcctttatgcaaaaaaaaaaaaaaaaaaacctnggggggggccccggancc

SEQ ID NO: 1508 - DNA, 685 bp, Homo sapiens
gggaaagctggtacgcctgcaggtaccggtccggaattcccgggtcgacccacgcgtccggtaaaaagtgactgaggacacaagcagtgttctgcgttccccgatgcccggagtggtggtggccgtctctgtcaagcctggagacgcggtagcagaaggtcaagaaatttgtgtgattgaagccatgaaaatgcagaatagtatgacagctgggaaaactggcacggtgaaatctgtgcactgtcaagctggagacacagttggagaaggggatctgctcgtggagctggaatgaaggatttataacctttcagtcatcacccaatttaattagccatttgcatgatgctttcacacacaattgattcaagcattatacaggaacacccctgtgcagctacgtttacgtcgtcatttattccacagagtcaagaccaatattctgccaaaaaatcaccaatggaaattttcattgatataaatacttgtacatatgatttgtacttctgctgtgagattccctagtgtcaaaattaaatcaataaaactgagcatttgtctaaatattagtttgccctttctttgaatgaagacaatgtacacataggcgaccaggtctgccagtagactaccagcatttctttgtgatccttttaagagattgatataaatgtcagtcagttct

SEQ ID NO: 1509 - DNA, 1049 bp, Homo sapiens
  misc_feature (1027)..(1027): n equals a,t,g, or c
  misc_feature (1046)..(1046): n equals a,t,g, or c
gctgagggatttcatcaacactagactggtcccataagaaacgyttaagggagtactttggtcagaaagaaacagacattaatgagcaacaaagaatcatctaaaggtaaaaaactcactgttaagagtaagtacacagaaaaacccaaagtgtgataacattgtaactgtggtgtgtaagtagaaagaataaatgataaaccaatcaaaaatagtaactacaacttttcaagaccagtcagaaaaataagataaaattagaaacaacaaaaagttaaaaagtggggggatgaagttaagatgtagagtttttattagttttttgtttgttaatgcaaacagtgttaccaggttaaaataatgggttacaaaatagtatttgtaatccttatggtaacctcaaacctaaaaacatacactggatacataaaaaataaaaagcaaaaacctaaatcatatcaccagagcaaactaccttccctaaaggaagacaggaagaaaagaaagaagaagaccmcaaamcaaccagaaaacaaataaatwacaaggcaggagtaagtctttacttatcgataatacattgaatggmaatatggactaaactctccaatcaaaagacatagactggctgaatgaatggagaaaacaagacccattgatctgttgcctacaagaaacacacttaaactataaagacacacataggctgaaagtaaagagttggaaagagttattccatgccaatggaaaccaggaaaaagagaaggagtattgattttgatacaaaaactatgagacaaataaagtcactatacaatgawaaaggggttaatatggtttccatttgtgccccacccaaatttcgtgttctattgtaatcctcaatgttggaggtggggcctggtgggacgtgattggatcatgggggtggatctttcatgactaattcagcaccatcttcttagtgctgttctcatgatagtgagtcctctgaatctggttgcctaaagtgtgtagccctctccanaccacccgcttgccttggncac

SEQ ID NO: 1510 - DNA, 1018 bp, Homo sapiens
cgacagaagggtacggctgcgagaagacgacagmaggggctcctcgccagcagccgtccggagccagccaacgagcggaaaatggcagacaatttttcgctccatgatgcgttatctgggtctggaaacccaaaccctcaaggatggcctggcgcatgggggaaccagcctgctggggcagggggctacccaggggcttcctatcctggggcctaccccgggcaggcacccccaggggcttatcctggacaggcacctccaggcgcctaccmtggagcacctggagcttatcccggagcacctgcacctggagtctacccagggccacccagcggccctggggcctacccatcttctggacagccaagtgccmccggagcctaccctgccactggcccctatggcgcccctgctgggccactgattgtgccttataacctgcctttgcctgggggagtggtgcctcgcatgctgataacaattctgggcacggtgaagcccaatgcaaacagaattgctttagatttccaaagagggaatgatgttgccttccactttaacccacgcttcaatgagaacaacaggagagtcattgtttgcaatacaaagctggataataactggggaagggaagaaagacagtcggttttcccatttgaaagtgggaaaccattcaaaatacaagtactggttgaacctgaccacttcaaggttgcagtgaatgatgctcacttgttgcagtacaatcatcgggttaaaaaactcaatgaaatcagcaaactgggaatttctggtgacatagacctcaccagtgcttcatataccatgatataatctgaaaggggcagattaaaaaaaaaaaaagaatctaaaccttacatgtgtaaaggtttcatgttcactgtgagtgaaaatttttacattcatcaatatccctcttgtaagtcatctacttaataaatattacagtgaaaaaaaaaaaaaaaaaaaaaaaaaaaaaaaaaaaaaaaaaactcga

SEQ ID NO: 1511 - DNA, 2031 bp, Homo sapiens
cccacgcgtccgcccacgcgtccgcccacgcgtccggcgccagcggcctcgccgcccgtcaagctgtccacatccctggcctcagcccgccacatcaccctgacctgcttacgcccagattttcttcaatcacatctgaataaatcacttgaagaaagcttatagcttcattgcaccatgtgtggcatttgggcgctgtttggcagtgatgattgcctttctgttcagtgtctgagtgctatgaagattgcacacagaggtccagatgcattccgttttgagaatgtcaatggatacaccaactgctgctttggatttcaccggttggcggtagttgacccgctgtttggaatgcagccaattcgagtgaagaaatatccgtatttgtggctctgttacaatggtgaaatctacaaccataagaagatgcaacagcattttgaatttgaataccagaccaaagtggatggtgagataatccttcatctttatgacaaaggaggaattgagcaaacaatttgtatgttggatggtgtgtttgcatttgttttactggatactgccaataagaaagtgttcctgggtagagatacatatggagtcagacctttgtttaaagcaatgacagaagatggatttttggctgtatgttcagaagctaaaggtcttgttacattgaagcactccgcgactccctttttaaaagtggagccttttcttcctggacactatgaagttttggatttaaagccaaatggcaaagttgcatccgtggaaatggttaaatatcatcactgtcgggatgaacccctgcacgccctctatgacaatgtggagaaactctttccaggttttgagatagaaactgtgaagaacaacctcaggatcctttttaataatgctgtaaagaaacgtttgatgacagacagaaggattggctgccttttatcagggggcttggactccagcttggttgctgccactctgttgaagcagctgaaagaagcccaagtacagtatcctctccagacatttgcaattggcatggaagacagccccgatttactggctgctagaaaggtggcagatcatattggaagtgaacattatgaagtcctttttaactctgaggaaggcattcaggctctggatgaagtcatattttccttggaaacttatgacattacaacagttcgtgcttcagtaggtatgtatttaatttccaagtatattcggaagaacacagatagcgtggtgatcttctctggagaaggatcagatgaacttacgcagggttacatatattttcacaaggctccttctcctgaaaaagccgaggaggagagtgagaggcttctgagggaactctatttgtttgatgttctccgcgcagatcgaactactgctgcccatggtcttgaactgagagtcccatttctagatcatcgattttcttcctattacttgtctctgccaccagaaatgagaattccaaagaatgggatagaaaaacatctcctgagagagacgtttgaggattccaatctgatacccaaagagattctctggcgaccaaaagaagccttcagtgatggaataacttcagttaagaattcctggtttaagattttacaggaatacgttgaacatcaggttgatgatgcaatgatggcaaatgcagcccagaaatttcccttcaatactcctaaaaccaaagaaggatattactaccgtcaagtctttgaacgccattacccaggccgggctgactggctgagccattactggatgcccaagtggatcaatgccactgacccttctgcccgcacgctgacccactacaagtcagctgtcaaagcttaggtggtctttatgctgtaatgtgaaagcaaatatttcttcgtgttggatggggactgtgggtagataggggaacaatgagagtcaactcaggctaacttgggtgtgaaaaaaataaaagtcctaaatctaaaaaaaaaaaaaaaaaaaaaaaaaaaaaaaaaaaaaaaa

SEQ ID NO: 1512 - DNA, 1463 bp, Homo sapiens
ggcgcggaaagttggcctcgcccctgccgacgtcgcaggctggagctcacctgggagactccaagtggaagccgagctcggttctgcctctccaggcaacgcgggaggcccagcgggaaggcaggaggcggcggcggaggaggagctctactgagccgcaactgtggcgacagcaaccggagtcgcagccgccgccacctgcacctggcgcctagcccacgtccagcgcctgcccggccgccgcttcccgccaccctgccctgcccacccgccaggtactaccattaaagataccttcttctcagcaaatctatgataaaaaatataagtaacagaagaagaaataactgttatttgtcaagtgacaagcttttaatgtcagaatggctcacctaaagcgactagtaaaattacacattaaaagacattaccataaaaagttctggaagcttggtgcagtaatttttttctttataatagttttggttttaatgcaaagagaagtaagtgktcaatattccaaagaggaatcaaggatggaaaggamcatgaaaaacaaaaacaagatgttggatttaatgctagaagctgtaaacaatattaaggatgccatgccaaaaatgcaaataggagcacctgtcaggcaaaacattgatgctggtgagagaccttgtttgcaaggatattatacagcagcagaattgaagcctgtccttgaccgtccacctcaggattcaaatgcacctggtgcttctggtaaagcattcaagacaaccaatttaagtgttgaagagcaaaaggaaaaggaacgtggggaagctaaacactgctttaatgtttcgcaagtgacaggatttctttgcaccgagatcttggaccagacactcgacctcctgaatgtattgaacaaaaatttaagcgctgccctcccctgcccaccaccagtgtcataatagtttttcataatgaagcgtggtccacgttgcttagaactgtccacagtgtgctctattcttcacctgcaatactgctgaaggaaatcattttggtggatgatgctagtgtagatgagtacttacatgataaactagatgaatatgtaaaacaattttctatagtaaaaatagtcagacaaagagaaagaaaaggtctgatcactgctcrgttgctaggagcaacagtcgcaacagctgaaacgctcacatttttagatgctcactgtgagtgtttctatggttggctagaacctctgttggccagaatagctgagaactacacggctgtcgtaagtccagatattgcatccatagatctgaacacgtttgaattcaacaaaccttctccttatgggaagtaaccataaccgtgggaaattttgactgggagtctttcatttggstggggagtcgcttccygatcatgaggaggcaaggagggaagrtgaacctacccatttaaacacc

SEQ ID NO: 1513 - DNA, 570 bp, Homo sapiens
tgcaaaaattacagctggtgcctgtaatccccgctactcgggaggctgacacaggagaattgcttgaacctgggaggtggaggtttcagtgagctgagatcgtggcattgcactctagcctgggcaaccmagagtgaaactgtctcaaaaaacaacttttatcaatgtctgcaaaaagaaagtcttctgggatttatagatcaatttagggagaaatgacattttaacaattctgagttttccaattgttgaacatggtgtactgccccatttatttagatctgttaatttctctcagtttgcagctctcacattttgttaaattcatgtatttaatatttctgcatgctattgcaagtggtaaggttttcaaaaagctgttttctagttattgctagtatatagaaatgcattagacttgtacattgatcttgtatcaagcaacttagatcagttaacttattctagtagcttttttctagattctttagcattttctatgtagataatcatgtcatctgtgaataaagtattttacttttccaatttaaaaaaaaaaaaaaaaaactc

SEQ ID NO: 1514 - DNA, 498 bp, Homo sapiens
  misc_feature (22)..(22): n equals a,t,g, or c
  misc_feature (456)..(456): n equals a,t,g, or c
  misc_feature (485)..(485): n equals a,t,g, or c
  misc_feature (491)..(491): n equals a,t,g, or c
cgcgtcgacttttttttttttntgcttttgaaaatcaactatcattttaattacaatcttaaacacttttgtttaagggaatccaattttcctcttccaagggtcttccaaacatggaatatgtaggttttcatcataatctcaatgttgtttatccaaatgtatcacgttatataaatatgtagaggtttccagatgtcaagggcagggtattaggttcaagtgtggctggctctaacctctccactgaactcctagagtgagatttaagttttatttaatctaactttactaattcaacttagtcgtgtaagaaggatatgaagaatatgaattattgtacttcacactgctactttcatgtacagtatagtagawtaatactgacmacyatagacmagragttaaaattkgtcycrggaaaatyctycargattttaamcattgrcattgccncggagcggagaattcagggcccggaaagnggggcnacttagg

SEQ ID NO: 1515 - DNA, 2061 bp, Homo sapiens
gccggcaccgcagcagcccgaggagggcgcgggcrcgrggcccggtgcgtgcagcctgcacctcagcgagcgcgccgactggcagtactcgcagcgcgagctggacgccgtcgaggtcttcttctcgcgcacggcccgggacaaccggctcggctgcatgttcgtgcgctgcgcgccctccagccgctacacgctgctcttctcgcacggcaacgccgtggacctgggccagatgtgcagcttctacattggcctcggctcccgcatcaactgcaacatcttctcctacgactactcgggatacggcgtcagtcgggcaagccctccgagaagaacctctacgccgacatcgacgccgcgtggmaggcgctgcgcacccggtatggcgtgagtcccgagaacattatcctctatggtcagagcattgggactgtccccacggtagacttggcctcgaggtatgaatgcgcagggtaattctccattcccctctgatgtctggtttgcgtgtggcttttccggataccaggaaaacatactgctttgatgctttccccagcattgacaagatatctaaagtcacctctcctgtgttggtcattcatggtacagaggatgaggtcatcgatttctcccatggcctagcgatgtacgagcgctgtccccgagccgtggagcccctttggkttgaaggggctgggcataatgacatagagctttatgcacaatacctagaaagactaaaacagttcatatctcacgaacttcctaattcctgaagacaacaacttgatcttacctcatttactgtgaacagaagagtcctctgttttgcacatgctttaactgggtagctgtaaaggcttgataaccatgaagaagtgcccaacctttagggtgttctaatcaaagagctgatgaaatctcagtcttttgtatctagaggtggttctgctaattcacacaacacgttaaactgaacagtcgtgattcccagcttcattaccttgcaggaatgggaatgagagctgaatgtagggacaattttctagtgctgtataaagtagcctcgcatctgtttctcaaccttatccatcatttctgacattcatgcaggacttgccctgttgccaccaatgttctcggtatttcacatgcagctctctttctgccactggatacatgggttcaatccatttgtgaagctgtgatagtgtaactggaaagctagtgtggtgaaaattcctttattattttttgttaacatgctgatctttcccggacaaatgaactgaagggtaatttactggaactctcgtgtacagcttcatcaactgtaaccatataaatataactggaatattcttaaacaaaaagaaactaggggtttttttaagtgtaaatttattactagccaacagagttttactattttgattgtctggttggtttaacaaagagcctagctgactttccttctgtaaagtcctccttgtaggcttttttaaagtactgtacatatttgcaatcacattgtgcatagattcttaatggtagatatgatttcttttgtcaggctacaacaatgaactgcagattccttgtttgtaatgtaaatgattgaatacattttgttaatatgtttttattcctatgttttgctattaaaaattttataacatttccaagacaaaaattccaagtttatgctttgaagaatttatgtaattaaaatttcactaaactaatctttttagtttaggaattatttgggttttgacactggaagttgcgccaaataagcatcagaaataggagatgcttaacattgctatactacttgtgttggttaggggtttggatttgggggttctttggttttaatttttttttccacatttaaaagccttaaatgtactgtaagcctcagatcgttgtacaactggactgcggttgattgccagtttgtgtactgttgcttggatgcggcacagtggttggtaatggaataaaggatgcatggatcagaaaaaaaaaaaaaaaaaaaaaaaaaaaaaaaaa

SEQ ID NO: 1516 - DNA, 2396 bp, Homo sapiens
  misc_feature (16)..(16): n equals a,t,g, or c
  misc_feature (40)..(40): n equals a,t,g, or c
cttccttccgcttgcnctgtgagctgaggcggtgtatgtncggcaataacatgtcaaccccgctgcccgccatcgtgcccgccgcccggaaggccaccgctgcggtgattttcctgcatggattgggaratactgggcctgttaggcctgttacattaaatatgaacgtggctatgccttcatggtttgatattattgggctttcaccagattcacaggaggatgaatctgggattaaacaggcagcagaaaatataaaagctttgattgatcaagaagtgaagaatggcattccttctaacagaattattttgggagggttttctcagggaggagctttatctttatatactgcccttaccacacagcagaaactggcaggtgtcactgcactcagttgctggcttccacttcgggcttcctttccacagggtcctatcggtggtgctaatagagatatttctattctccagtgccacggggattgtgaccctttggttcccctgatgtttggttctcttacggtggaaaaactaaaaacattggtgaatccagccaatgtgacctttaaaacctatgaaggtatgatgcacagttcgtgtcaacaggaaatgatggatgtcaagcaattcattgataaactcctacctccaattgattgacgtcactaagaggccttgtgtagaagtacaccagcatcattgtagtagagtgtaaaccttttcccatgcccagtcttcaaatttctaatgttttgcagtgttaaaatgttttgcaaatacatgccaataacacagatcaaataatatctcctcatgagaaatttatgatcttttaagtttctatacatgtattcttataagacgacccaggatctactatattagaatagatgaagcaggtagcttcttttttctcaaatgtaattcagcaaaataatacagtactgccaccagattttttattacatcatttgaaaattagcagtatgcttaatgaaaatttgttcaggtataaatgagcagttaagatataaacaatttatgcatgctgtgacttagtctatggatttattccaaaattgcttagtcaccatgcagtgtctgtatttttatatatgtgttcatatatacataatgattataatacataataagaatgaggtggtattacattattcctaataatagggataatgctgtttattgtcaagaaaaagtaaaatcgttctcttcaattaatggcccttttattttgggaccaggcttttattttccctgatattatttctatttaatactcttttctctcaagaaaaaaaaaaaagtttgttttttctttattgtccttcatagcaggccaagtattgcctctctgcaatagacagctactgtcaatacatgctgtaatttgacattctgggtcacagatataaggtatttaaaatctatttatgctttatagagaaaccagacattaaaacttcatgcactacttatttcgaattactgtaccttatccaaatttacacctagctattaggatcttcaacccaggtaacaggaataattctgtggtttcatttttctgtaaacaactgaaagaataattagatcatattctagtatgttctgaaatatctttaagactgatcttaaaaactaacttctaagatgatttcatcttctcatagtatagagtttactttgtacacgtttgaaaccaactactgtagaagatgaggaatctattgtaattttttgctttattttcatctgccagtggacttatttgaaattttcactttagtcaaattattttttgtattagtttttgatgcagacataaaaatagcaatcattttaaattgtcaaaatttccagattactggtaaaaattatttgaaaacaaacttatgggtaataaaggctagtcagaaccctataccataaagtgtagttaccatacagattaatatgtagcaaaaatgtatgcttgatatttctcaactgtgttaatttttctgctgtattccagctgaccaaaacaatattaagaatgcatctttataaatgggtgctaattgataatggaaataatttagtaatggactatacaggatgttaataatgaagccatatgtttatgtctggatttaaaaattttaaacaatcatttactatgtcatttttctttaccttgaagaacataaactgttatttcacttctacaaatcagcaagatattatttatggcaagaaatattccattgaaatattgtgctgtaacatgggaaagtgtaaatgtttttcatggtttctatcaatgtgaaataaaatttaattctgaaaaaaaaaaaaaaaaaaaaaaaaaaaaaaaaaaaaagggcggccgct

SEQ ID NO: 1517 - DNA, 1153 bp, Homo sapiens
  misc_feature (495)..(495): n equals a,t,g, or c
accatcacgagaggcaaagctggtacgcctgcagtaccggtccgggaattcccgggtcgacccacgcgtccgctgagattgctctgccttcttcccacaggactgcctgttcgcagcgtggattttaaccgaggcacggacaacatcaccgtgagcagggggacacagccatcctcaggtgcgttgtagaagacaagaactcaaaggtggcctggttgaaccgttctggcatcatttttgctggacatgacaagtggtctctggacccacgggttgagctggagaaacgccattctctggaatacagcctccgaatccagaaggtggatgtctatgatgagggttcctacacttgctcagttcagacacagcatgagcccaagacctcccaagtttacttgatcgtacaagtcccaccaaagatctccaatatctcctcggatgtcactgtgaatgagggcagcaacgtgactctggtctgcatggccaatggcngtcctgaacctgttatcacctggagacaccttacaccarctggaagggaatttgaaggagaagaagaatatctggagatccttggcatcaccagggagcagtcaggcaaatatgagtgcaaagctgccaacgaggtctcctcggcggatgtcaaacaagtcaaggtcactgtgaactatcctcccactatcacagaatccaagagcaatgaagccaccacaggacgacaagcttcactcaaatgtgaggcctcggcagtgcctgcacctgactttgagtggtaccgggatgacactaggataaatagtgccaatggccttgagattaagagcacggagggccagtcttccctgacggtgaccaacgtcactgaggagcactacggcaactacacctgtgtggctgccaacaagctgggggtcaccaatgccagcctagtccttttcaaacgtgttttacccacaatcccccaccccattcaagaaattggtaccaccgtgcacttcaagcaaaaaggacctgggtcggtgagaggaataaatggatccatcagtctggccgtaccactgtggctgctggcagcatctctgctctgccttctcagcaaatgttaatagaataaaaatttaaaaataatttaaaaaacacccaaaaaaaa

SEQ ID NO: 1518 - DNA, 652 bp, Homo sapiens
  misc_feature (573)..(573): n equals a,t,g, or c
  misc_feature (600)..(600): n equals a,t,g, or c
  misc_feature (622)..(622): n equals a,t,g, or c
  misc_feature (637)..(637): n equals a,t,g, or c
cccacgcgtccggcggagaaggaccccggccgctcagccccgggcgccgcctccgcagccgcggccctgaagcagctgggggactcaccggccgaggacaagtccagcttcaagccctactccaagggctccggcggcggcgactcccgcaaagacagcggctcctcctcggtgtcttccacctcctcctcgtcctcctcgtccccgggagacaaggcgggcttcakggtccccagcgccgcctgcccgccctttcccccgcatggagcgccggtctccgcatcctcgtcctcgtcgtcgcccggcggctcccgcggcggctccccgcaccactctgactgcaagaacggcggcggggttggcggcggggagctggacaagaaagaccaggagcccaagcccagcccggagccggcagccgtgagccgcggcggcggtggggagcccggggcgcacggtggcgccgagtccggggcctccgggcgcaagtccgagccgccctcggcgctggtgggggccggccacgtggcgccggtgtctcctacaagccgggccactcggtgttcccgctgncgccttcagcattggctaccacggctncatcgtgggcgcctacgccggntacccgtcttaattnctgcctggcctggat

SEQ ID NO: 1519 - DNA, 1230 bp, Homo sapiens
  misc_feature (43)..(43): n equals a,t,g, or c
  misc_feature (72)..(72): n equals a,t,g, or c
  misc_feature (1218)..(1218): n equals a,t,g, or c
  misc_feature (1226)..(1227): n equals a,t,g, or c
tgcaatttcctactaaatccagtctgtcaagatggttttggtnggtgttttttgagctccactccagcctgncaccagagcgagctcccttctcaaaaaaaaaaaaaagtaagaaagaaaaggactcccttagaatgggaaagaaaaatcataaaatattgagctgatgcctgtatatagaaattaagcgtttctcgaaagctgttctatgttttgctgttattttagtctttattctcttcctttaggtggagaaacaaagtaccaatttgaagggattttttttattttgtcttttggtttctgtcagtagaaataaccatatgtgctaaccaaatttctgtgaagaatgttttcatggttatcattatatctaactataacctcccccatagttatgaagagtaacctgaaatgccactattgtggaaataggataattgtaattgtgaaaaaataattttaaggaaatcttacaagtattacattaaaaagatactatgactgccacctgccatttaccttctaataaccctgccatgtggtttgcagaaagagatggatatagtagcctcagaagaaatattttatgtgggttttttgtttttcgttactagatttcatggatgaggggatatggttgaccttttactttttaatggagcagccagtttttgttaattactcacttgtaaattgtgagattctgaattccttacctgctattcttgtacttgtctcaggccaaatctatgctgtggttcttatgagacttgtatgaagatgccctgatttgtacagattgaccacgggaatactactgccatgtaatctgtatagttccagataatttgtcatgaacattgacagaatgacaattttttgtatttgctttttctccctttaagagcacattcttctgtaaggagaaaggcagcattctggctaaaatgtgtagaaggtaatttactacacttataaaatagtgtgacttttgtgaaaattttgaattagctttcatatgaagtgccttaagtagactcttcatttacttttctggtaatggtttaaatatcatttgttatgcatttttaagatacagttcagaatgacacattgtagtggcaaagataaccaaatgtctggctgtttgctttttgaccatatcaataaacttttacaatctaaaaaaaaaaaaaaaaaaaaagggsggccgcnctaggggnncca

SEQ ID NO: 1520 - DNA, 1013 bp, Homo sapiens
ttttttttttttttttttttttttttttttttttkytccttcaatggggkctattcatacacatatagcccctttccactgctcagtgtcggkgatgtgactcaraagggccacattttcgctgggtcccatctaaaggcctgacactgcagtgaagggcatgctaagtctaggcacaggtcctggcagcaggaaggagacagagcctctcccaggcacacatccccgggtggagacagtggaaaagaaccgaggacaggaaaggattgggtaggtgaaggggtcaggggactggtagtcacccaatcttggagaggtgcaaaaagcactgggggctacccgttagctgcatctgccctggctgtttgcccgttcatgtcacaaactgccactactatgtacctgcagtggggttgcagagatgggggagactcaagtcttactccccaggagctcccagggcccaaggaggagaatgctgcctcctttcagtctggtctacacccactttctggtagcctctctgcttcctgtaattctggctgtttttccagactcagctcaaatagtgcccctccttaagcccatccctcgcccccagcctgaggtgatctttccctcctctgaactattagagcagttactgtctgttcagttcgtttggcaggcacacacagtggcataaattctattgttttgaactctgatttaaaattaaattgcagctgggcgtggtggctcatgcttgtaatcccaacacttagggagtcaggagaatcacttgagctcaggagttctagaccaatctgggcaacagagagaccccatctcttttaaataaaaagttaaattgcttaatttcccccgtattcctggcctgtctgcccctttcacataattttaacctggtttcttgtatgtaaactccttgagggcaagaacatgtttgaacataaaaaaaaaaaaaaaaaactcgaggggggcccgtcccaattcgccctatagtgagcgat

SEQ ID NO: 1521 - DNA, 456 bp, Homo sapiens
caggaagccgcaaaaagtttctgagcccccgaacctgtagcggacgtggaaaaagaacgcccctcctcaagtgtctggctgaaagatgccacccagggaagggaactcgggctagctaaggaggccattcttgatgttgcttctagatctcatgtcatcaccgagccctcagctgctggtggcagctgctcagcagacccttggcatgggaaagagacggagtccaccccaagccatctgccttcacttagctggagaggtgctggctgtggcccggggactgaagccagctgtgctctatgattgcaactgtgcaggggcatcagagctccagagctatctggaggagctgaaggggcttggcttcctgacttttggacttcacatccttgagattggagaaaacagcctgattgtcagtcctgagcatgtatgtcagcacttggagcaggtgct

SEQ ID NO: 1522 - DNA, 2167 bp, Homo sapiens
  misc_feature (272)..(272): n equals a,t,g, or c
  misc_feature (841)..(841): n equals a,t,g, or c
  misc_feature (1006)..(1006): n equals a,t,g, or c
  misc_feature (1745)..(1745): n equals a,t,g, or c
  misc_feature (2063)..(2063): n equals a,t,g, or c
  misc_feature (2112)..(2112): n equals a,t,g, or c
  misc_feature (2156)..(2156): n equals a,t,g, or c
gatcactccccctcctcagtgatgtacatgtgtaggtgtggcatgtttctgctcttggcgttcttaccctatgtacatggctgcttgacactgcttttctgaaggttgtaaagaacctctgtgatacatgaaaagataatgaacaccttcgtcattagggaaatacgactcagaaccacagttagaggacgagtgttggcaaggatgtggagaacttggggctgtaaaatggtgcagctgctttggaaaacaatctagcagttcctcagaangttaccaaaaggtcatatagagttaccctatgacccagcaatttcactcctagctatataatcacacaaaaaacacaaatgttcatagcattacttataatagcctaaaargggaaacaacccaaagtgtccatcagttaatgaatggataaagagtgtgcattcattcatacagtaggatgttacttggcaataaaaaggaatgaagtattcatacatactgcagtatagatkaaccttgaaaacatgcggagtgaaaraaaccaaatacgaaaggccacgaattacatgrttccatttttaggaagtgtccagaatatgcaaatccatggagacagaaagtacagactggtgactgctaaggatgggacagggggaatgagcactagtcagtatacggtttctttttggggtggtaaaaatgttctgtagtggtgatggttgcacaactgagtataataaaacatactgaattatytattttaaaagggtaaggctggactcagtggctcacgcctgtaatcccagcactttgggaagctgaggtgcaaggattgcttgggaccagnctgggcaacatagtgagacgtcatctctccaaaaaattaaaaatttagccaggcgtggtggcacatgcctatagtcccagctatttgggtagccaaggtgggagaattgcttgagcctgggaggtcaaggctgcagtgagttgtgactgccccactacactccancctgggtgacagagcaataacctgtctcasaaaaaggaggtacattttatggtatgtcaaaacatctgaataaaactagtatttaaaaaaaaaaaaccttgggaaaatacaatcagtatatacctctagttggccaaaatgatattcctcaatgactatttttacgattaaataactgacagatatttaagaaactgtttgaagaaggtttaaacattcaaaagcaaagattacgagacctaagaaactatgccaaagaaaagcgagatgaacaaaggagacgccaccaggatgaactggactccatggagaactactataaggaccaggtgggctcctggcacttgcttacgctgttgtgcttagtcctgmccacttgcccttgtggcaaaacttgcttagtctgttgacaataaaccttgtgttaactgaagtttgcactctacagattagaggaccccatttcaagattgaaatttaagatcaaataatacctgaccatagtacagtatatttccctatttccattaaaatgattttaagcctgtgaacattaagaaatgttacatttggactacaaacattaaatataatatttggtttttttcttcctataaacagttttcattgctggcagaagccatatcacaggaacatcaagaacttaaagccagagagaaatctmagcccaggtaataattaagatagaagccaagtcatgcactgcatggcaatgttnctttcagcaagggacctcgtacattggtggttggagcaataggctgtatcatatagccccggtgtgcagtggactgtactctctaggtttgtgtaagtacactgacattttgcacaacaacaaaatcatttaatgatgcatttcttggaacatatctccatcattaagtgacacatgactaatttacatttttaggaagtagaaaaccaaatgtattatacctgtaaagggaatggagagaagactaataaggcaatccatctatgacccaagacatttttatcctatgattttaactttagttaggtctctgtaagngctggctgttgctagattatttgaaaattttgggagggagtttggattngctgggaggatgggagaggggaaccattggttgaggggcccggntaattgctgtg

SEQ ID NO: 1523 - DNA, 832 bp, Homo sapiens
cgctcacctctcccttccccaacccttctctacttggctgctgttttaaagtttggaaggaagaaaaataggtgtataaaatgttttccatgagaaaccaagaaacttacactggtttgacagtggtcagttacatgtccccacagttccaatgtgcctgttcactcacctctcccttccccaacccttctctacttggctgctgttttaaagtttgcccttccccaaatttggatttttattacagatctaaagctctttcgattttatactgattaaatcagtactgcagtatttgattaaccaagcttctgcagattttgtgattcttgggacttttttgacgtaagaaatacttctttatttatgcatattcttcccacagtgatttttccagcattcttctgccatatgccttagggcttttataaaatagaaaattaggcattctgatatttctttagctgctttgtgtgaaaccatggtgtaaaagcacagctggctgctttttactgcttgtgtagtcacgagtccattgtaatcatcacaattctaaaccaaactaccaataaagaaaacagacatccaccagtaagcaagctctgttaggcttccatgttagtgtagcttctctcccacaagttgtcctcctaggacaagaattatcttacaaactaaactatcatcacactaccttgtatgscagcacctgggtaacagtagrggattttwatacattaatcttgatctggtttaatcttgatctggtttagtagagatttttatacattaatcttgatctggtttaatcttgatctggtttgcctaaaaa

SEQ ID NO: 1524 - DNA, 1364 bp, Homo sapiens
gaatcccactcccttctcccacttgttaattagttacatacttttttgtaattgtttatttggttgctgtctccctctcaagaatgcagggaccatgtctgcattctgcagtaatcactactgcacacccagaatctattacagatcctggcatgtagctgatgcataaatatttgttgaatgaaagtctgtacattgtatttatgctattggtattgctatgacctgaaactaaaaggagttgtggaaaagatttcttatggaacagaaatatcccttttgattaatatcacaatctcgtaaattgagaaaacaaawaatatatactactggagcattcatgtatagttggagattatgactcatttattggtgtgtttttggactcagaacaaagatgagggaatattccttaaagctctgtattgaaataacgaaaagcagtcacattttaataatagaagcttcctagcttactctttctgtaatcttcttttcctaaatgtaagagagcctcataattatgaggcttattactagagtaaggctgtcaaaggcagcaaaatgtctttctgtttggaagaataacataaacttgacatgtatggtgggggacagaaggtttcaaaagtttaagaatctgtgttgtcttaacaaatagatgcttctcaaggassttacgytagtggttactctgtccagtcagggttttttcttctttaacttgggttcatttcctgatggcacacatgaagtttggatcatatggtttgactttagctatggtccttagctatggggagcagcatcagcgacctgtgacatgtaaattaaaaatacaatgccagggcccttccccagcccctctgatagagaacctcttggccatctgtatttttagatgttccaggttagtctgattaacacccttggttaagaaccattgggaggatctgattgccagtttaaggggaccttcaagcctgtaggtctttatagttaaaaaaaaaaaaagattttaaaaatcatgcatatgttgtggctgaawtctggtttagcacatactgcttttaatggcctgaaatgtttttcccaaataaattstcttgttatagctttcatgtgtgatttggtccagcttcttgttttgaagatacttacgggggggaacactttgtgatttctcttagtaacatattaacccacttaaaaaccctttctattacaggtcttcacatttaggcttaatgtgcttaattcaaatgtaaaaatacacctgcctttgttctcagtgaaagtatgtaataaataaatgaggggttggcaaactactgcccaccatctgtttttttatggcctatgaa

SEQ ID NO: 1525 - DNA, 1493 bp, Homo sapiens
  misc_feature (8)..(8): n equals a,t,g, or c
  misc_feature (1488)..(1488): n equals a,t,g, or c
  misc_feature (1492)..(1492): n equals a,t,g, or c
atctctgnctcgtatccgccttgcctccacaagtgctgggattacaggtgtgagccaccacacccggcctatattgttttgaaagcatactctatatatagttaygggcagaggcacaggcatcctcagcagctgattcaggagatgatggtaaagctagctaactatgaattaaacattcacatatccagtctacctggtccagtaataatacaagcaaatcttgtatttcaggaacaaatcaaggttctcttaattttttggcttatatacaatgaagtaaaaacttgataaacatggtttcaaattgaggaggagagtcttggatgtatgttttaatatgtataccttataattctgcctctagccaaatgctatgtttgcaaaatgtggcatctgttagtttttattgtctgtgtcttctttgtttactataccttgggtaattttgtgttaccaaaaaaaaaaaaaaaaaggaagtgtaatgtcagacacacaagaaaagcaaatcagtgttgtaagcttaaagtacaatttcaaaggtcattaccaacagcagggttttttttatactttaaaaacattatgctacatatcattgccattttcatattttggggttttgctactcttatacaatggaatcaatggaaatgtcatccagccactgaattgccattattatatctaaaaagtttctaagatgacagttatcactattttgttttatctccatgctgacatttgaaagaaggtactagtatccctctagccagattgcttagtttttcgttggtaatcaaacaacagttgtactaaaggaaagtaaagctaggacctaaatcagaatcatagttgcctgcatatatggtaacaaggtcgtgtgcatttgctttcacagtgatgagtgagaggatgagaagaaattatttgacatttttctgtggttgaatagaagacacctttcttttgtctttaggtttaggaggagatactaagatactggatgtttatcctatcttagtttggttggagtaataagagagaagaagagggtggactttggcttttcagtgttttttcccctaaagagtgatattgctgacgtttctatcaattttacacataatatgtggctatgaaaccatatatctcacttaagtaacaaagtaatcactttgtctatcactaagtaatagacaaaaatcattgtctattatttaaagccaacaaaacagtgtaacagttttaagttcaataatgttaagtattgtatagaaatatattggaggcaaagttcagttgatgacaattgtgtatatgttactgatgctgtaaattatttttaataaagaaaattgtattatcaaaaaaaaaaaaaaaaaaaaaaaaaaaaaaaaaaaaaaaaaaaaaaaaaaaaaaaaaaaaaaaaaaaaaaaaaaaaaaaaaaaaaaaaaaaaaaaaaaaaaaaaaaaaaaggggggcccntttna

SEQ ID NO: 1526 - DNA, 2109 bp, Homo sapiens
agcactagctttgacatccacggtgagctgcagggaagcatcacacaccagccagcatgtgagcagagggaggcagttggggttgaacttcggaactaggccgggtctyctgacagatcacaagacaccccagaggatcttcagcagtcctacttcccattctctatagagctttgaagcttggaacccttccagggtaaacattttctcttgtgctgctyaggacatytggggcctagctcctgggttcctgtctccaagaagcaatgaccttaaactctgagccatactctgtcctcaccagcggctcccatgtttttctgtgtcaggttattaagtacctagtccttgttttctgtctctstcctaagctacctctctgggtccacagaagacttggtagtatagtgagaatggctatacgtgagtacaaacrtggattttccagggcttgggaamtgattcttgagcccagaagagccamgcctgctttgaggtcttttggagtggagatgcagccctgggaaatttggggagtcagcaggccagtgtgaagctattggtcctaggagtatatgagcttgctgtttctttgatggaaaatacatgcttctcttgtatactcagaagtgactaagggcaataactcattaatagccatctatccaacttctttactgagtgatgtattccatggggttacctttttcagattattgagttgctctgtaagcactaaaactttttaatcatttttaagaaactttttagattgtattacaaatttgccttaacagtaattagatgttgaatataattttaacattttattaatgacttgggtcatcagttaataccagtactaaaaccatacgaattattggtttattccagaaaatacagtatttgttctatttttaggtagacaatcatttgggatcagagtacattagcatagtaatgctcagtcagacctgttcaagtagtagagcttggagaatgccatgaaatacttatataattaatttgattgcatgaactaagcaattttactaatgaaaaggttgtatatgtgcaagtcacttttttaaaaaccaagaaaaaactttaatagaggaaatcttattcattaatttatttttctgagtaaaaaaacgaaacccaaatctcattttatttcaactgttaaacattttgatctgttgacccataggatcaggatttgggaaccactttactaggaaagagcagatcagtaccatttgtataaaaccggcctcattatgtaagaaagaaaatgttacgtgttttcttctttagcttggttgtgggcacttctacagcaaggaccatatcatattcatctttgcatccctggcacagtgcatgagacataagtacttaataaatgcagttgaatggataatgattagtgttatttatggattagaaaaagcatgtttctatttaagtaagctgtaaaaagtattattgaatatttactgtaaatatatgttcacataaaaaaataacttggagggtctttgtgtccctggcatattatcatcttcatggaaagaatccactgtggtttctgtagagtgattggaaaaatggattattttgaggattgaagaaagtgttctttctgcgttgtcactttgttcaacagtaaaactttattctcagtgttcctactctgcattgtttacatttttgacagttttttttaatcacctacaatctgtaaagaatgtatatattcttttcagcatctcagtttgaaaagacatgcagttaaacttgaccttttgataatcgctcttacaggtcattgtctgttctaacagcaaattgtaaacatgtgcttcatagatattgtggctctcagtcatcactttgtcctatggtatttattgaatgttcacatactaatggtgcacaggtgtttttttctataaatcttctgactgtcctgtaattcattcttaagctttaacttgaaggtatcgtaattgccggcatttgatgtttagcaataaaagaataaatgtgtaccagcattttatgtttaaaaaaaaaaaaaaaaaactcgagactagtctctct

SEQ ID NO: 1527 - DNA, 590 bp, Homo sapiens
gcttctccaaatcaaaccacagtatatgttgtaacaatatctatgaccactgttagcccattatattcattccaattagaagaaatgtgaatactatattccgtgttttgagtgacaagtttcgaaaaataaaaayacwgtrtttttaaaagggaaatgcacttaaatgaaaacagttattacaaaagttaagatttaaaaagaaaaagcaagagtttttattatgatgkaataccagtagaatatttaaaaggcacaccacatctgaataatcaatgtaaatattttctttcaaagttgtaagttttcatatcatgtgctgtaaagttttcctaaatgaggctttaacgtaaacactggtgacataaaccattcattgctacgttgcttattgtgtttttatgctgttttatacttttttatgagttatgatagcagcaattaagttgtttgtattttgcttaactaaaacaaaaatgcttttatcttgctatagaataaacacatttcagtaaaaactgtggactgtattttgatgcaacaacaaagaaactgttcacttttcaaataaaatgatatgtcagaaaaaa

SEQ ID NO: 1528 - DNA, 425 bp, Homo sapiens
cgtggctgaggggacccggcgcgggaggagcgggcgcgggcgcgaaagggagatctttgtgagtgattttgcaaaaatagattgcgaggttggttggatttgcaacctgtggctctcctcgagggagtaagaatgggggaaggcgcggcggcggcggcccggggagggagtgggtagagttggagcctcagaaatcggctgagctccgggggcgggcggggagaaagggcgggggggcagcaggagctaggggccaccccgctgccggatgtagtgaccgtggtaaatgtcttgagaactgtgggttgcgttgcctttatgatgccgtgttattggaaccctggcgaaaaatggaactagtgttgcaataatgagttttaaagctcccccatggaaaacaaaaacacaaccaaaccgatttttta

SEQ ID NO: 1529 - DNA, 1186 bp, Homo sapiens
  misc_feature (1145)..(1145): n equals a,t,g, or c
  misc_feature (1155)..(1155): n equals a,t,g, or c
  misc_feature (1177)..(1177): n equals a,t,g, or c
ggaaaacttgaagtccaagccgtgctgctgattccgtctcacagtttaaagactgtccagaaactttaagctttcaaaactgtacattttaaaatcctgtgcgtttatcttcattttgctgggcagaaagccaaagtactggactgcctggttcagggctgaacgcctagtacacctgctaacttggagcttcagagccatggcaaccaaggagtcaagagacgccaaagcacagttggccctctcctcatcggccaatcagagcaaggaagtgcctgaaaacccaaactatgctctcaaatgtactcttgtgggacacacggaagcagtgtcatcagttaagtttagtcctaatggagaatggctagcaagktcttctgctgataggctaatcataatttgggggagcatatgatggaaaatatgagaaaacactctatggtcataatttggaaatatcggatgttgcctggkcatcagattcmagkcgycttgkttctgcctyaratgataaaactctaaaattatgggatgtgagatctggaaaatgtttgaaaacactgaaggggcacagtaattatgtcttttgttgtaacttcaatccgccatccaaccttataatctcgggatcttttgatgagactgtaaaaatatgggaggtgaaaacaggaaagtgtctcaagactttgtctgctcattctgacccagtttctgctgttcattttaattgtagtgggtccttgatagtgtcaggtagctatgatggcctctgtagaatctgggatgctgcatcaggtcagtgtttaaaaacgctcgttgatgacgataaccctcctgtctcttttgtaaaattttctccaaatggtaaatacattctcactgcaactttggacaacactcttaaactatgggattatagcagaggcaggtgcctgaaaacatacactggtcataagaatgaraaatattgcatatttgccaatttttcagttactggtggaaagtggattgtgtctggttccgaggataaccgggtttacatttgggaaccttcagactaaagagattgtgcaggaaattacaaggccatacagatgttgtgatctcaggcagcttgttcatcctacaggaaaacctcatcggcntcagcaggcnttagggaaaatggacaaaacanttaaactgt

SEQ ID NO: 1530 - DNA, 460 bp, Homo sapiens
  misc_feature (266)..(266): n equals a,t,g, or c
  misc_feature (304)..(304): n equals a,t,g, or c
  misc_feature (443)..(443): n equals a,t,g, or c
  misc_feature (455)..(455): n equals a,t,g, or c
tcgacccacgcgtccgcacaagargaccaaacatgtaccaagtggtgcttctgtttgttgttgtccctgagctgcaggaacatcagtccaaaccgagcaggccatcacccagagtagcagacaaccctgaagagggcagagagccacataatgacaggcctgtgagcatggcctttgggtgccagccagagcatgtgtatgctgagtgtggaaagacctacagaccgcccccaacccccaagctctttccacagtccaccgtaganaacaccaccccctcctttaccagtgggacacaagaatncttgtttgtcttccttatttccatttccagaagacttttttccactccacttttccttcctccgcaatttgcaatccctttgttggctttataagttattaagctttttccactcctgggtggctttttccccctagcnagctcccctgancccag

SEQ ID NO: 1531 - DNA, 1672 bp, Homo sapiens
  misc_feature (1583)..(1583): n equals a,t,g, or c
  misc_feature (1645)..(1645): n equals a,t,g, or c
  misc_feature (1663)..(1663): n equals a,t,g, or c
ccagcctccaggcacccgggatccagcgccgccgctcataacacccgcgaccccgcagctaagcgcagctcccgacgcaatggacccggcgctggcagcccagatgagcgaggctgtggccgagaagatgctccagtaccggcgggacacagcaggctggaagatttgccgggaaggcaatggagtttcagtttcctggaggccatctgtggagtttccagggaacctgtaccgaggagaaggcattgtatatgggacactagaggaggtgtgggactgtgtgaagccagctgttggaggcctacgagtgaagtgggatgagaatgtgaccggttttgaaattatccaaagcatcactgacaccctgtgtgtaagcagaacctccactccctccgctgccatgaagctcatttctcccagagattttgtggacttggtgctagtcaagagatatgaggatgggaccatcagttccaacgccacccatgtggagcatccgttatgtcccccgaagccaggttttgtgagaggatttaaccatccttgtggttgcttctgtgaacctcttccaggggaacccaccaagaccaacctggtcacattcttccataccgacctcagcggttacctcccacagaacgtggtggactccttcttcccccgcagcatgacccggttttatgccaaccttcagaaagcagtgaagcaattccatgagtaatgctatcgttacttcttggcaaagaactcccgtgactcatcgaggagctccagctgttgggacaccaaggagcctgggagcacgcagaggcctgtgttcactctttggaacaagctgatggactgcgcatctctgagaatgccaaccagaggcggcagcccagcccttcctgcctcctgccccactcagggttggcgtgtgatgagccattcatgtgttccaaactccatctgcctgttacccaaacacgcctctcctggcagggtagacccaggcctctaaccatctgacagagactcggcctggacaccatgcgatgcactctggcaccaaggctttatgtgcccatcactctcagagaccacgtttccctgactgtcatagagaatcatcatcgccactgaaaaccaggccctgttgccttttaagcatgtaccgctccctcagtcctgtgctgcagccccccaaatatatttttctgatatagaccttgtatatggctttaatgccgcaaaatatttatttttccttaaaaaaggtgtcaacttggaaataatggtttaaaaacaggataagcattaaggaaaaacactttcaatgtgtcttccatttgatgaatttgttttkctctctttatccccgcaagtggagtttcatgtcctcggtgaaaccagacagtgtgaatctgttccagcccaaatctgcagcattagggatgagttctcrgaagtgattctgaactgagcacgcactcatgtctgcatggggaactctggggagaagagccttccttttctttcccttgggccatttgcctttccttgtcgtcttactgagggcggaggcagggagggtctctgtnctttccagggccctgggcagggccatcctggccattcagggaaagatgggaagagttagggnctccgttttaggcagccntgggtggga

SEQ ID NO: 1532 - DNA, 588 bp, Homo sapiens
aggcgtataccaccatgactgaaaacaaaagacttttttttgagactccctctcaaaaacaaaacaaaacaaaaaaattagacaaatgctacattaatgtttgggtggtcagattctactttgaatctgaagtttgcagatatgcctatagatttttggagtttaccactttcttattctgtatcattaatgtaatattttaaattactatatatgttaccatttttctggatttagtaagaaatttgcagttttggtttgatgtaacaagggttttaatgtaatttatgttagattttgcatttttttcattactgttatattttaacctgactgactgatctaattgtattagtattgtgaataatcatgtgaaatgttttgagacagagtactatatttgtgaatataattttatggtttttttcacttagaacctttctgtgtggaaaactaagaaaattgctttctgctgtataatctggcattcattgtagattaaagcttatttttctgtgaataaaacgtattcaataaaatactattctttaaaattawaaaaaaaaaaaaaaaaaaaaaaaaaaaaaa

SEQ ID NO: 1533 - DNA, 520 bp, Homo sapiens
  misc_feature (490)..(490): n equals a,t,g, or c
  misc_feature (495)..(496): n equals a,t,g, or c
  misc_feature (503)..(503): n equals a,t,g, or c
cggcacgaggattttactgatactgcttatctgtttaaaattcagatagaaagtctgaatgacaaattacaaaatgctaaagaacagcttcgagaaaaagagtttataatgctacaaaatgaacaggagataagtcaactgaaaaaagaaattgaaagaacacawcaaaggatgaaagaaatggasagtgttatgaaagagcaagaacagtacattgccactcagtacaaggaggccatagatttggggcaagaattgaggctgacccgggagcaggtgcagaactctcatacagaattggcagaggctcgtcatcagcaagtccaagcacagagagaaatagaaaggctctctagtgaactggaggatatgaagcaactctctaaagagaaagatgctcatggaaaccatttagctgaagaactgggggcttctaaaggacgtgaagcttatttagaagcaagaatgcaagcagaaatcaagaaattgncacannaagtagnaatctcttcaaagaagc

SEQ ID NO: 1534 - DNA, 2791 bp, Homo sapiens
gtcacctgacacctcaccggtccggaattcccgggtcgacccacgcgtccgcccacgcgtccgtaatccgtggttttctggagcatttcacagcctaggaacatacaaggggggcatctccctggaatgtaaattgactaagaggaattcaataatggtcaaatgaatgcagaattttagagtcttgcttagtattctcaccacatttcgtttartctactcatactctttttctcttactgctgacactagatggaaaaactcttaattaaaagtatttcacaaaatgtgctcgttttcagtcattccgtttccactccagcctgttgtgttgtttttttgaaataataatttaaagtaattttccttttgcaggatggcatagtcaatccaacaataagaaaagatttgaaaactggaccgaaattctactgctgtccaattgaaggctgccccagaggccctgagagaccgttttctcagttttctctcgtaaaacagcactttatgaaaatgcatgctgagaagaagcacaaatgtagtaagtgcagcaattcgtacggtacagaatgggacctgaaaagacatgcagaggactgtggcaagaccttccggtgcacatgcggctgtccctacgccagtagaacagcactgcagtctcacatctaccgaactgggcacgagatacctgcagaacacagggacccacctagtaagaaaaggaaaatggaaaactgtgcacaaaaccagaagttatccaacaagaccattgaatcattgaacaaccaaccaatccctagaccagacactcaagaactagaagcttcagaaataaagctagaaccatcttttgaagactcttgtggctctaacactgacaagcagactcttacaacaccaccgagatatcctcagaagttgcttttaccaaagcccaaagtggctttggttaaactacccgtgatgcagttttctgtcatgcctgtctttgtgcctacagccgactcctcagcccagcctgtggtgttaggtgttgatcagggctctgccacaggggctgtgcacttaatgcccttgtcagtaggaaccctgatcctcggcctagattcagaggcttgctctcttaaggagagcctacctcttttcaaaattgctaatcctattgctggtgagccaataagtactggtgttcaagtgaactttggtaaaagtccatctaatcctttacaagaactagggaacacgtgtcaaaagawtagcatttcttcaatcaacgtgcagacagatctgtcttatgcctcacaaaactttataccttctgcacagtgggccactgctgattcctctgtgtcgtcttgttctcaaactgatttgtcgtttgattctcaagtgtctcttcccattagtgttcacactcagacatttttgcccagctctaaggtaacttcatctatagctgctcagactgatgcatttatggacacctgtttccagtcaggtggggtctccagagaaactcaaaccagtgggatagaaagtccaacggatgaccatgtacagatggaccaagctggaatgtgcggagacatttttgagagtgttcattcatcatataatgttgctacaggtaacattataagcaacagtttagtagcagagacagtaactcatagtttgttacctcagaatgagcctaagactttaaatcaagatattgagaaatctgcaccaattataaatttcagtgcacagaatagtatgcttccttcacagaacatgacagataatcagacccaaaccatagatttattaagtgatttggaaaacatcttgtcaagtaatctgcctgcccagacattggatcatcgtagtcttttgtctgacacaaatcctggacctgacacccagctcccatctggcccagcccagaaccccggaatcgattttgatatcgaagagttcttttcggcctcaaatatccagactcaaactgaagagagtgaacttagcaccatgaccaccgagccagtcttggagtcactggacatagagactcaaacggacttcttactcgcagatacctctgctcagtcctatgggtgtaggggaaattctaacttcttaggccttgagatgtttgacacacagacacagacagacttaaactttttcttagacagtagccctcatctgcctctgggaagtattctgaaacactccagcttttccgtgagtactgattcatctgacacagagacccaaactgaaggagtctccactgctaaaaatatacctgctctagaaagcaaagttcagttgaacagtacagaaacacagaccatgagttctgggtttgaaaccctggggagcttgttcttcaccagcaacgaaactcagacagcaatggatgactttcttctggctgatctggcctggaacacgatggagtctcagttcagctctgtagaaacccagacttctgcggaaccacacacagtctccaacttctaaaactaacggtggagtccatgtgtgaaatggcatctaccatttcctctggattaaaactacggactggggacaacagtattaattcgattgaatgtggctgatgatgcagttgcttagcttctttgtgtttctttgccttttgtacttgtaaacagaaatttgcgtataaatgtgagtgtattataaagtttgagatgttgatctaaattgtttttgtgttgcctacatttgccttttcacagctagtcttttcatgttaaaaaaaaaaaaaaaaaaaaaa

SEQ ID NO: 1535 - DNA, 687 bp, Homo sapiens
  misc_feature (686)..(686): n equals a,t,g, or c
gggtcgacccacgcgtccgcccacgcgtctgccaaatacttgctyaaactatttgacattttctatctttgtgttaacagtggacacagcaaggctttcctacataagtataataatgtgggaatgatttggttttaattataaactggggtctaaatcctaaagcaaaattgaaactccargatgcaaartccagagtggcattttgctactytgtctcatgccttgatagctttccaaaatgaaagttacttgaggcagctcttgtgggtgaaaagttwtttgtacagtagagtaagattattaggggtatgtctatacracaaaagggggggtctttcctaaaaaagaaaacatgatgcttcatttctacttaatggaacttgtgttctgagggtcattatggtatcgtaatrtaaagcttggatgatgttcctgattatctgagaaacagatatagaaaaattgtgycggacttaaataattttcgttgaacatgctgccataacttagattattcttggttaaaaaataaaagtcacttatttctaattcttaaagtttataatatatattaatatagctaaaattgtatgtaatcaataaaaccactcttatgtttattaaaaaaaaaaaaaaaaaaaaaaaaaaaaaaaaaaaaaaaaaaaaaaaaaaaaaaaaaaaana

SEQ ID NO: 1536 - DNA, 708 bp, Homo sapiens
  misc_feature (594)..(594): n equals a,t,g, or c
ttcaccataatagttctaattaaaatggtccttgctgtaggagagacaaaggggcttttcctctagctggtaactattcagatgatggacaagtcttctttcataaaagattacaaagaaggcatccgaatcactgtctgtgatactgggtcacatattaatcactgcagctaattgtaaatcttyctatgaaacactgaaaagcctctttgtgaattaatacagttctgcttgatgcacttgatttgaaaagacatttctctgtatgtggcgcatgtcggctttgctttgaaaaataacaaagttagcagaatatgttcaatatattttcttggggaatagggtttttattacatgattcattaaggatttgccttaccctgacatttgtgatataaaggaaaatcagaaaaaaagtaattttcttgatcaagatatgtttttacttaatgcaaataaatgtagtctgttgcttgcaaggaaaaaaaaatggcttctgatatctggtataaactgctaaataggataatacgtgcctcttttgttaaaccggcatttaaatgctggactgcttctaaatctgtttgtttcttntcatctgtgccatacactaaaaaacaactgttgccttcatactatatttgttagagcagaatacaaataaaatttgagaggatwatgtgaaaattataattaaaagggcggccg

SEQ ID NO: 1537 - DNA, 618 bp, Homo sapiens
  misc_feature (84)..(84): n equals a,t,g, or c
ttcacacaatatggggcagcatgcttttgtgactttaaaatagatcaaggaacttttgcttttgaagagagaaatttccttggnctggtgacaagagcagtagatgtgcccaagagtaaggatgtgtgttgtccttgggttagccactgtaggtttataacctggtaggaaattttcataggaagggccaaaaattcaagatgctcatttgcaagttgtcttctagggtgttgcctgaacctaggctgcagtagaagtggggcttggaggtaggcgatattgaaatcccaggttaatgctaatctccatctcagatccaggacaatgcagaccagcttccttttgggaaatggaggttcttarttaatatgttctggctcttacatttctgataccgctactggtgccaacctaaatcagcagcctagttctcagcagaaggcagcagaggatggcaaggttggagggtagatagaagctgtgggagttgggtggctcctgtctgcacactggacaaggggcaccctgagaaaaataattctttaaaaaattaaaaaaaaaataagctgtgggagttgagggtttaattgcttggccacttggccttctcctcgtgcc

SEQ ID NO: 1538 - DNA, 1103 bp, Homo sapiens
  misc_feature (1074)..(1074): n equals a,t,g, or c
cgcacgccaaacgggtttggaggaccctcttcgccttcggagagcagagtcaacacggagagttttgggactggaattaaataaagacagagatgttgaaagaatccacggcggtggaattaacacccttgacattgaacctgttgaagggagatacatgttatcaggtggttcagatggtgtgattgtactttatgaccttgagaactccagcagacaatcttattacacatgtaaagcagtgtgttccattggcagagatcatcctgatgttcacagatacagtgtggagactgtacagtggtatcctcatgacactggcatgttcacatcaagctcatttgataaaactctgaaagtatgggatacaaatacattacaaactgcagatgtatttaattttgaggaaacagtttatagtcatcatatgtctccagtctccaccaagcactgtttggtagcagttggtactagaggacccaaagtacaactttgtgacttgaagtctggatcctgttctcacattctacagggtcacagacaagaaatattagcagtttcctggtctccacgttatgactatatcttggcaacagcaagtgctgacagtagagtaaaattatgggatgtgagaagagcatcaggatgtttgattactcttgatcaacataatgggaaaaagtcacaagctgttgaatcagcaaacactgctcataatgggaaagttaatggcttatgttttacaagtgatggacttcacctcctcactgttggtacagataatcgaatgaggctctggaatagttccaatggagaaaacacacttgtgaactatggaaaagtttgtaataacagtaaaaaaggattgaaattcactgtctcctgtggctgcagttcagaatttgtttttgtaccatatggtagcaccattgctgtttatacagtttactcaggagaacagataactatgcttaagggacattataaaactgttgactgctgtgtatttcagtcaaatttccaggtactttatagtggtagcagagactgcaacattctggcttgggttccatncttatatgaaccagttcctgatgatggtg

SEQ ID NO: 1539 - DNA, 220 bp, Homo sapiens
  misc_feature (10)..(10): n equals a,t,g, or c
  misc_feature (206)..(206): n equals a,t,g, or c
taaaaaaagnggggtttaaaccggcccccctttggggcccaaaggagggttttaaccccccgggggggkttccccccgggggggraaaaaattttttccccccccccggggggggggtttcccgggaaacccccccccaaaaccggggcccgggktttccccccggggggggggcctttcccaaaatttttttttgcccaaaaccnttcccaaaaaattt

SEQ ID NO: 1540 - DNA, 438 bp, Homo sapiens
gaggggcggcgggctagtaaccatagcggctcgcgtgggtcggctggcaagtaaccatagcggcgagcgtggggcggagtgtggctcggtagtcctctgcgtgccctcctgggagctgggtgctgtgagtcctcccctagcgggctggtctcggcgcggagtcggcgccgaacccgagctgctgctctggggcgtgtgcctagggcgcagggctggagcgcggggctgcgcggttgctcgcgstccgctgaggtctctaggaaagggggcgatttgagggttccgccgtgaccgcttccarcggcggacacgcgcgctctggaccagagccgttgcccgctgtctcgtcacccgaagcctcctcctgacgccgtgctagtgcgagggtctccaggggaattcggggcacaagtcgggccggagcatccgggcggccgc

SEQ ID NO: 1541 - DNA, 2062 bp, Homo sapiens
  misc_feature (1022)..(1022): n equals a,t,g, or c
gcccacgcgtccgcccgactcggagcccctcggcggcgcccggcccaggacccgcctaggagcgcaggagccccagcgcagagaccccaacgccgagacccccgccccggccccgccgcgcttcctcccgacgcaragcaaaccgcccagagtagaaratggattggggcacgctgcagacgatcctggggggtgtgaacaaacactccaccagcattggaaagatctggctcaccgtcctcttcatttttcgcattatgatcctcgttgtggctgcaaaggargtgtggggagatgarcaggccgactttgtctgcaacaccctgcagccaggctgcaagaacgtgtgctacgatcactacttccccatctcccacatccggctatgggccctgcagctgatcttcgtgtccacgccagcgctcctagtggccatgcacgtggcctaccggagacatgagaagaagaggaagttcatcaagggggagataaagagtgaatttaaggacatcgaggagatcaaaacccagaaggtccgcatcgaaggctccctgtggtggacctacacaagcagcatcttcttccgggtcatcttcgaagccgccttcatgtacgtcttctatgtcatgtacgacggcttctccatgcagcggctggtgaagtgcaacgcctggccttgtcccaacactgtggactgctttgtgtcccggcccacggagaagactgtcttcacagtgttcatgattgcagtgtctggaatttgcatcctgctgaatgtcactgaattgtgttatttgctaattagatattgttctgggaagtcaaaaaagccagtttaacgcattgcccagttgttagattaagaaatagacagcatgagagggatgaggcaacccgtgctcagctgtcaaggctcagtcgcyagcatttcccaacacaaagattctgaccttaaatgcaaccatttgaaacccctgtaggcctcaggtgaaactccagatgccacaatggagctctgctcncctaaagcctcaaaacaaaggcctaattctatgcctgtcttaattttctttcacttaagttagttccactgagaccccaggctgttaggggttattggtgtaaggtactttcatattttaaacagaggatatcggcatttgtttctttctctgaggacaagagaaaaaagccaggttccacagaggacacagagaaggtttgggtgtcctcctggggttctttttgccaactttccccacgttaaaggtgaacattggttctttcatttgctttggaagttttaatctctaacagtggacaaagttaccagtgccttaaactctgttacactttttggaagtgaaaactttgtagtatgataggttattttgatgtaaagatgttctggataccattatatgttccccctgtttcagaggctcagattgtaatatgtaaatggtatgtcattcgctactatgatttaatttgaaatatggtcttttggttatgaatactttgcagcacagctgagaggctgtctgttgtattcattgtggtcatagcacctaacaacattgtagcctcaatcgagtgagacagactagaagttcctagtgatggcttatgatagcaaatggcctcatgtcaaatatttagatgtaattttgtgtaagaaatacagactggatgtaccaccaactactacctgtaatgacaggcctgtccaacacatctcccttttccatgactgtggtagccagcatcggaaagaacgctgatttaaagaggtcgcttgggaattttattgacacagtaccatttaatggggaggacaaaatggggcaggggagggagaagtttctgtcgttaaaaacagatttggaaagactggactctaaattctgttgattaaagatgagctttgtctacttcaaaagtttgtttgcttaccccttcagcctccaattttttaagtgaaatatactataacagtgaaagatagaagcyaaggttagataatatgagcrtctakaggaagrattgaaacccccctttg

SEQ ID NO: 1542 - DNA, 1158 bp, Homo sapiens
  misc_feature (161)..(161): n equals a,t,g, or c
  misc_feature (339)..(339): n equals a,t,g, or c
cccgcgcgaggcgaagtcgctgagactctgcctgcttctcacccagctgcctcggcgctgccccggtcgctcgccgcccctccctttgcccttcacggcgcccggccctccttgggctgcggcttctgtgcgaggctgggcagccagcccttccccttctntttctccccgtcccctccccccgaccgtagcaccagagtcgcgggtcctgcagtgccccagaagccgcacgtataactccctcggcgggtaactcattcgactgtggagttcttttaattcttatgaaagatttcaaatcctctagaagccaaaatgggacacagtaaacagattcgnattttacttctgaacgaaatggagaaactggaaaagaccctcttcagacttgaacaagggtatgagctacagttccgattaggcccaactttacagggaaaagcagttaccgtgtatacaaattacccatttctggagaaacatttaatagagaaaaattccgttctcaggattgggaaaatccaacagaaagagaagatgattctgataaatactgtaaacttaatctgcaacaatcgggttcatttcagtattattyccttcaaggaaatgagaaaagkggtggagkttacatagttgtgsmccccattttacgtgttgktgctgataatcatgtgctacccttggactgtgttactctwcagacatttttagcwaagtgtttgggaccttttgatgaatgggaaagcagacttagggttgcaaaagaatcaggctacaacatgattcatttyaccccattgcagactcttggactatctaggtcatgctactcccttgccaatcagttagaattaaatcctgacttttcaagacctaatagaaagtatacctggaatgwtgttggacagctagtggaaaaattaaaaaaggaatggattgttttttgtattactgatgttgtctacaatcatactgctgctaatagtaattgtatccaggaacacccagaatgtgcctatattcttgtgatttctccacactaaaaccctgcctggttcttagacagagcactttggcttttctcctgtgatgttgcagaagggaaatacaaagaaaagggaatacctgctttgattgaaaatgatcaccatatga

SEQ ID NO: 1543 - DNA, 576 bp, Homo sapiens
  misc_feature (536)..(536): n equals a,t,g, or c
  misc_feature (565)..(565): n equals a,t,g, or c
gggtgttcactattgtgaatttataatcttaaaagttggggatgctaaaagtaccagactaaaatamtacgaggttttctcatcttttaattccattttgttagaaaaaaatartcacaaccggggttcttttacctttccccagccatctagactgctttactgcaatgttgggaagattgcatacaataaaaactgtagctagttgattgggatttgggaaaattgaatcaagcatttgcattcatccagaatggtcttaaactgctgactgtggggtgcccacaggatgagcactggtggcatgggtgggaggaatttccttggatactgcaattgcatttgaaagatctattttccaaaacctgagcagagagaggctaggaggaatgcagacaggacattgaaaatgcgaattccctttactagtagaacatgaaatatctgataaatggtttaaaaaaaataagtgccaggatacattgtagtataaaggttcaactagtataatttaaaatgagtctttatattcaggnccaggtgcggtggctcacacctgttaatncccagcacttt

SEQ ID NO: 1544 - DNA, 901 bp, Homo sapiens
gtgcgcgccggtcctgcggcagctggcccaagacccggagccgaaaggaagtgttggagcctgaggtcgctccggccgctaggaggacgctgtgcctggcctgggacctccgctcccgcccaccgccctggagccgctgagggacgtccacgtgggcctgtccccgccgagccgcggccctgtccgctggcgctgctctcgggccactacctctactaccactacggctgcgacggcctggacgaccgcggctggggytgcggctaccgcactctgcagacgctgtgctcgtggccagagggccagcccgcgggcgtacctggactggccgccgtacaggcggccctggaggacatgggcgacaagccccccggcttccggggctcccgggactggatcggctgcgtggaggccagcctctgcctcgctcacttcggagggccccagggacgcctctgccacgtaccccggggagtggggctgcacggggagstggagaggctttactcgcacttcgcagggggtgggggcccagtcatggttgggggggacscagatgccaggtccaaggccttgctgggartctgcgtcgggtcaggcacggaagcctatgtcctggtattggaccctcactactggggcactccaaaaagccccagtgaactacaggctgctgggtgggtgggctggcaagaggtgagtgcagcctttgaccccaactccttctacaacctgtgcttgaccagccttagctcccaacagcagcagcgcaccttggactgaggacgaagttacagaactgagattctcgggtcccagacacgcacctatgtacctcccactggtgtccctgcaaagcctggcgcttttgacatcaataataaaagtggcagggctgagc

SEQ ID NO: 1545 - DNA, 1152 bp, Homo sapiens
  misc_feature (6)..(6): n equals a,t,g, or c
  misc_feature (17)..(17): n equals a,t,g, or c
  misc_feature (64)..(64): n equals a,t,g, or c
  misc_feature (1126)..(1126): n equals a,t,g, or c
  misc_feature (1147)..(1147): n equals a,t,g, or c
cacccncattaagggancaaagctggtgctccaccgcggtggcggccgctctagaactagtggntcccccgggctgcaggaattcggcacgagctctttcaggctttaatagatattcaagaattttatgaagtgaccttactggataatccaaaatgtatagatcgttcaaagccgtctgaaccaattcaacctgtgaatacttgggagatttccagccttccaagctctactgtgacttcagagacactgccaagcagccttagccctagtgtagagaaatacaggtatcaggatgaagatacacctcctcaagagcatatttccccacaaatcacaaatgaagtgataggtccagaattggttcatgtctcagagaagaacttatcagagattgagaatgtccatggatttgtttctcattctcatatttcaccaataaagccaacagaagctgttcttccctctcctcccactgtccctgtgatccctgtcctgccagtccctgctgagaatactgkcatcctacccaccataccacaggcaaatcctccccsagtactggtcaacacagatagcttggaaacaccaacttacgttaatggcacagatgcagattatgaatatgaagaaatcacacttgaaaggggaaattcagggcttggtttcagcattgcaggaggtacggacaacccacacattggagatgactcaagtattttcattaccaaaattatcacagggggagcagccgcccaagatggaagattgcgggtcaatgactgtatattacgagtaaatgaagtagatgttcgtgatgtaacacatagcaaagcagttgaagcgttgaaagaagcagggtctaytgtacgcttgtatgtaaaaagaaggaaaccagtgtcagaaaaaataatggaaataaagctcattaaaggtcctaaaggtcttgggtttagmattgctggaggtgttggaaatcagcatattsctggggataatagcatctatgtaaccrraataattgaaggaggtgcagcacataaggatggcaaacttcagattggagataaacttttagcagtgaataacgtatgtttagaagaagttactcatgaagaagcagtanctgccttaaagagcacatctnatttt

SEQ ID NO: 1546 - DNA, 1532 bp, Homo sapiens
  misc_feature (214)..(214): n equals a,t,g, or c
  misc_feature (231)..(231): n equals a,t,g, or c
  misc_feature (260)..(260): n equals a,t,g, or c
gaagaggacctcgatactgtccctccattgaatcaaaagttttgcgttttccaaaccgtctacatcaggtttggttggaacctgaaggaatggattctgaccttatctacccacaggggttatctatgacgctaccagctgagttacaagagaaaatgatcacatgcatcagaggcttggagaaagctaaagtgattcagccaggctacggtgntcagtatgattacttanatccccgtcagatcaccccttccctgganactcatttggttcaacgactcttctttgctggacagatcaatggcaccactggttatgaggaagctgcagctcaaggtgtgatagccggaatcaacgccatcttcgggtcagtcgcaagcctccctttgtggttagccgaacagaaggttacataggagtcttgattgatgacctcactactctgggcaccaktgaaccataccgcatgtttaccagccgagtagagttccgtttgtcactgcgccctgataatgctgacagccggctcacactgcgagggtataaagacgctggctgtgtgtcccaacaacgatatgaaagagcttgttggatgaagtcttctttagaagaaggcatttctgtgttgaaatctattgagtttttgagctctaaatggaaaaaattaatcccagaggcttctataagtactagtagaagtctgcctgtcagagctctcgatgttctgaagtatgaggaagttgacatggattcattagccaaggctgttccagagcccttgaagaagtatactaaatgtagagagctggctgaaagactgaaaatagaagccacttatgaatcagtgttgttccatcaactacaagaaataaagggagttcagcaagatgaagctctccaactgccaaaagacctagattatttgactatcagggatgtgtctttgtcccatgaagttcgagagaaactacattttagtcgtccacagacgatcggggctgctagtcgcatacccggagtaacacctgccgccatcatcaatctgctgagatttgtgaagaccactcaacgaagacagtcggctatgaatgaatcatccaagactgatcaatacttatgtgatgcagacagacttcaagagagagagttatagctttcaattcataaaagatttttaaagagcatataaataatttgatcaatacaacagtatagataaaagaattatttagcacatgttaaaatagctttattaggttactatgggtttgccattaatttctgagtgggacagaaattataattgtgctttttcgtgtatatgaaaaaactagtcgtaaacaatttgtactctttctttaaggagctgtaatacaaataactttgtgcagtgttcatcaaagagagagacagtgaacctaaaactgaacctggaataaaactcaacatgcagatttgcctactcatagggactttgcctattaagtctaccaaattaaaagtcttatcattcaaaaaaaaaaaaaaaaaaa

SEQ ID NO: 1547 - DNA, 482 bp, Homo sapiens
  misc_feature (440)..(440): n equals a,t,g, or c
  misc_feature (469)..(469): n equals a,t,g, or c
cttgggtatcggctattgcctgagtgtgctagagtcctcgaagagtaactgctgaccttattcactggctgtgggccttatggcacagtcagtcaccaggttagagacatgcttcacattcacctacccacaaactagtggatgataaattttggctattcagaagacgtttattataggagtatgtagattttccatagagtgctgttatgtgacttgaattttagtctcggccctgcctctgacattgtcggtggtttatcctggttccaggaaataagactagccttttcctcatgatagtctttggtggtttttaaaacagttgtttaagtcaacagatgtatcatatgcctgacactgctctacaccagtgaataatttacactctaatagggggtggtaactataaagatgataaacatagcatcttaattggngtgtgtatgaaggtggttgttacctcttnctagccacccagg

SEQ ID NO: 1548 - DNA, 723 bp, Homo sapiens
gagaccggaaatatgaaaggataagttcaggatgtattcgttccaagtccctttctctgcaaatgcgccacagcaagtattggaagggccccccggcagccagtccggccatgtctcccacaaccctgttggtcactggagccacttccctgcccacgccagcaccctatgccatgcctgagttccagcgggtcaccatcagcggagattactgtgccgggatcactttggaggactatgagcaggcagccaagagtctgccaaggccctaatgatccgggagaagtatgcgggctcgcctacccaccttcccgcggatcacatcccagtacctgggtcatcgcgggcggatactgcacctccggaagagggccttccagacttccaccctcctccactgccccaggaagacccctactgcctggatgatgcaccccccaacctggattacttggtccacatgcaggggggcatcctctttgtgtatgataacaagaagatgctggagcaccaggagccgcacagcctaccctaccccgacctggagacctacacggtggacatgagccacatcctggctctcatcaccgatggccccacgaaaacctattgtcaccggcgactgaactttctggaatccaagttcagccttcatgagatgttaaacgaaatgtccgagttcaaagagttgaagagtaacccccaccgggacttctataacgt

SEQ ID NO: 1549 - DNA, 937 bp, Homo sapiens
  misc_feature (548)..(548): n equals a,t,g, or c
taataatgtgtagagctaaaggaagcagtggagacaacctgaagtagaagtgtttcacagagaatgctaatttctggagcctgagccactactttttttttttttaaacagatagaacagacttagctttctgaagagctttaaaaactcttgatgcctgtgcctgttactacagaatgctctgctgtctgcctttagagtgtagaaatcctagttagactagtattctggctacttctgtagtctaaacatttacttcttgaggggcttggggcatttattcagagccaaggctctggttcattaaggataagaggaatggaataattaaagacatcggtcatcaactaattcccattcctcctttccttgctccttgtttcctcagctgtaaaatcacaatgattctgataccccactttataatattgctctgaggattaaatttggtaatcaacataaagcactgatcacattgcccagtgcatagtaagcgctctaaatatctgctatttttatcatgtagtgttggttgaaattggttttgngttctccactcttagtttaaaaaatagtatgagtcgaatgtttcatattgccctgtctcaggggaaaaaaaaaattgctttttgcatagctctcagttgattcccactcactatgatggctatatagaacacaagttctctaccatttctgcagtattttaaaaattcctttaaaaaactaaatatttattgtgggacaaaatattatatgcttacttagaatattgggaagatggtaaagaatacaaagaaaaaaacaattgtacccctcattctagacacaacttgctgttcacgtctttggggtgtatttccattcctactagatggaaccatttatatgtttacctaattcggatcatgttgcatacagttttgttcccttcaaa

SEQ ID NO: 1550 - DNA, 371 bp, Homo sapiens
  misc_feature (67)..(67): n equals a,t,g, or c
  misc_feature (148)..(148): n equals a,t,g, or c
  misc_feature (284)..(284): n equals a,t,g, or c
ggccgtggccaccaagcccgggcgcagtttctctccgcccacggcaggagcgaaggaaggccctggngcgagcgggtaaactgcccaccgggcggcccacccgctgcgcccccggcccgcaagaggcagtcccaataggttggcccgnctggccgaagtccgcccggagcccgctcacctgtcagcccccactgccgacagggacactaacaggtgaagatctcgggagaccatgactaagaaaagaattgctgtgattgggggaggagtgagcggctctcttncatcaagtgctgcgtagaagaaggcttgggaacctgtctgctttgaaaggactgatgacatcggaagggctctggaggttccaggga

SEQ ID NO: 1551 - DNA, 906 bp, Homo sapiens
  misc_feature (242)..(242): n equals a,t,g, or c
  misc_feature (358)..(358): n equals a,t,g, or c
  misc_feature (364)..(364): n equals a,t,g, or c
accaacctcactaaagggacaaaagctggagctccaccgcggtggcggccgctctagaactagtggatcccccgggctgcaggcggagtggggccctgcagcttccccgggaggaaggagacaggtcgcaggatgtctggcagtggatgctggagagtgagcggcagagcaagcccaagccccatagtgcccaaagcacaaaaaaggcctaccccttggagtctgcccgctcgtctccaggngaacgagccagccggcaccatctgtgggggggcaacagcgggcacccccgcaccaccccccgtgcccacctgttcacccaggaccctgcgatgcctcccctgaccccacccaacangctggnttcagctggaggaggmctgtcgcaggctagctgaggtgtcgaagcccccaaagcagcggtgctgtgtggccagtcagcagagggacaggaatcattcggccactgttcagacgggagccacamccttctccaatccaagcctggctccagaagatcacaaagagccaaagaaactggcaggtgtccacgcgctccaggccagtgagttggttgtcacttactttttctgtggggaagaaattccataccggaggatgctgaaggctcagagcttgaccctgggccactttaaagagcagctcagcaaaaagggaaattataggtattacttcaaaaaagcaagcgatgagtttgcctgtggagcggtgtttgaggagatctgggaggatgagacggtgctcccgatgtatgaaggccggattctgggcaaagtggagcggatcgattgagccctggggtctggctttggtgaactgttggagcccgaagctcttgtgaactgtcttggctgtgagcaactgcgacaaaacattttgaaggaa

SEQ ID NO: 1552 - DNA, 979 bp, Homo sapiens
  misc_feature (61)..(61): n equals a,t,g, or c
  misc_feature (735)..(735): n equals a,t,g, or c
aatgaacaagctgaatgagctagagaaaatatgtgaaatactgcaggctgaaaagtatganctcgtaactgagctgaatgattcaaggtcagaatgtatcacagcaactaggaaaatggcagaagaggtagggaaactactaaatgaagttaaaatattaaatgatgacagtggtcttctccatggtgagttagtggaagacataccaggaggtgaatttggtgaacaaccaaatgaacagcaccctgtgtctttggctccattggacgagagtaattcctacgagcacttgacattgtcagacaaagaagttcaaatgcactttgccgaattgcaagwgaaattctmmtctttacaaagtgaacacaaaattttacatgatcagcactgtcagatgagctctaaaatgtcagagctgcagacctatgttgactcattaaaggccgaaaatttggtcttgtcaacgaatctgagaaactttcaaggtgacttggtgaaggagatgcagctgggcttggaggaggggctcgttccatccctgtcatcctcttgtgtgcctgacagctctagtcttagcagtttgggagactcctccttttacagagctcttttagaacagacaggagatatgtctcttttgagtaatttagaaggggctgtttcagcaaaccagtgcagtgtagatgaagtattttgcagcagtctgcaggaggagaatctgaccaggaaagaaancccttcggccccagcgaagggtgttgaagagcttgagtccctctgtgaggtgtaccggcagtccctcgagaagctagaagagaaaatggaaagtcaagggattatgaaaaataaggaaattcaagagctcgagcagttattaagttctgaaggcaagagcttgactgccttaggagcagtatttgtcagacatgacagtggcacagagctgacagcgtgactctgagatgagtccagttggcgc

SEQ ID NO: 1553 - DNA, 301 bp, Homo sapiens
  misc_feature (296)..(296): n equals a,t,g, or c
  misc_feature (299)..(299): n equals a,t,g, or c
gcccaactgggaaaagaagtgtatccgtcttgctcttmaaaccagggagcaacacattcggagagacaaggctaccagcaacatctgtacagctcaggccctcttggcgaatatggctgccatgtttgcaatctaccatggttcccatgggctggrgcatattgcctaggagggtacataatgccactttgattttgtcagaaggtctcaagcgagcagggcatcaactccagcatgacctgttctttgataccttgaagattcagtgtggctgctcagtgaaggaggtcttgggncangc

SEQ ID NO: 1554 - DNA, 652 bp, Homo sapiens
ccaaataaatttgactgatgccaaaactgaagctgccaatgtaatgaaatgttaaggtggccataggacagtccttttaataaaagcttccatgtaaaaccaaaataaaggtcagtatagaaagtatcatggggtatataacaaactgaatttttggcttccaatccaaactgggctaaatggtatgtttattttaaacaaggaatttgccatggacaagatctatctggcttactgtgagttagaagtacgccctgccgtaacactggtatttccacatagtatggaagaggaagagaggaaaacttaattaagtgttgcaaaattgtttgaggacctattttggtccattccttatcaactccatgtgtgatttcaagttatctaaagggcatgtgactttatttctgactaacatcaagttcctctcctcatcataacaaggcgattcaaacctaaactgtgattcttaggagatgcttccaaggggaagctccctcgttggacatccagaagattgcattttctcttcagagtacaattttccatctgtcagagcatgtctgaataaaaatttgaacctactacaaactacattagaataattttcaagtatttttctgtcacaaaaatggtgtgacagaatgtgttg

SEQ ID NO: 1555 - DNA, 2236 bp, Homo sapiens
  misc_feature (2215)..(2215): n equals a,t,g, or c
  misc_feature (2223)..(2223): n equals a,t,g, or c
gctctaagtcacgggaactgcccttgctacttgtgacctgccctttactcagcagtttttgttctgggaagccctgggattctgctaatacctatcactgtaggtgctgaagggaaacagatgaagaacatgacctcaaggagcttcctgtcaatgagaagaccaagctgacgcctggcaaagatattaaagaggagcctgaaactgttccttggacatcttatgaatgtcagaaaataccttttggagggttagaagatcaggggacatggttgttcacatttgctgccacggaacaccgccagtcttcacttggaaacagaatcacgccttgtgaagagatcatccctaagcaggagagaagctactaaaggattgtgtcctcctccaccttccctgtgctcggtctccacctgtctcccattctgtgacgatggttcaatggaagagactctgccagctgcattacttgtgggctctgggctgctatatgctgctggccactgtggctctgaaactttctttcaggttgaagtgtgactctgaccacttgggtctggagtccagggaatctcaaagccagtactgtaggaatatcttgtataatttcctgaaacttccagcaaagaggtctatcaactgttcaggggtcacccgaggggaccaagaggcagtgcttcaggctattctgaataacctggaggtcaagaagaagcgagagcctttcacagacacccactacctctccctcaccagagactgtgagcacttcaaggctgaaaggaagttcatacagttcccactgagcaaagaagaggtggagttccctattgcatactctatggtgattcatgagaagattgaaaactttgaaaggctactgcgagctgtgtatgcccctcagaacatatactgtgtccatgtggatgagaagtccccagaaactttcaaagaggcggtcaaagcaattatttcttgcttcccaaatgtcttcatagccagtaagctggttcgggtggtttatgcctcctggtccagggtgcaagctgacctcaactgcatggaagacttgctccagagctcagtgccgtggaaatacttcctgaatacatgtgggacggactttcctataaagagcaatgcagagatggtccaggctctcaagatgttgaatgggaggaatagcatggagtcagaggtacctcctaagcacaaagaaacccgctggaaatatcactttgaggtagtgagagacacattacacctaaccaacaagaagaaggatcctcccccttataatttaactatgtttacagggaatgcgtacattgtggcttcccgagatttcgtccaacatgttttgaagaaccctaaatcccaacaactgattgaatgggtaaaagacacttatagcccagatgaacacctctgggccacccttcagcgtgcacggtggatgcctggctctgttcccaaccaccccaagtacgacatctcagacatgacttctattgccaggctggtcaagtggcagggtcatgagggagacatcgataagggtgctccttatgctccctgctctggaatccaccagcgggctatctgcgtttatggggctggggacttgaattggatgcttcaaaaccatcacctgttggccaacaagtttgacccaaaggtagatgataatgctcttcagtgcttagaagaatacctacgttataaggccatctatgggactgaactttgagacacactatgagagcgttgctacctgtggggcaagagcatgtacaaacatgctcagaacttgctgggacagtgtgggtgggagaccagggctttgcaattcgtggcatcctttaggataagagggctgctattagattgtgggtaagtagatcttttgccttgcaaattgctgcctgggtgaatgctgcttgttctctcacccctaaccctagtagttcctccactaactttctcactaagtgagaatgagaactgctgtgatagggagagtgaaggagggatatgtggtagagcacttgatttcagttgaatgcctgctggtagcttttccattctgtggagctgccgttcctaataattccaggtttggtagcgtggaggagaactttgatggaaagagaaccttcccttctgtactgttaacttaaaaataaatagctcctgattcaaagtaaaaaaaaanaaaaaaanaaaaaaaactcga

SEQ ID NO: 1556 - DNA, 356 bp, Homo sapiens
ggataatcctctctccctgttcccctcatttggctgctccagaccctgagaaacttctacctgtcccatgccagctgagggtgtctgaggagctgacatcaaccccatggatctcctgaactgtgctggaaggtagagacaggcagggaggcttcccatgggtcasgagaacctgaccccacaaatcaactgatcttcaagagacaggatggagggagggatcattctagagaaccctgctccttgttcctccctgtggcaaaatctggcgccaggaagagtttgagtgtgtaggcgtgtgtgtgcaggtgtaagtgtgcaggcacgtgtgtgcaggtgtgtatgtacagccgtgt

SEQ ID NO: 1557 - DNA, 1172 bp, Homo sapiens
  misc_feature (778)..(778): n equals a,t,g, or c
gggattacaggcgtgaccaccgtgcccggcctgattctcttaaaattgaagaggtgctgccaaggccttcagatctaacgcagatgcatagaccttgttcctggtacttgttcagcctgtgctggggagccgtggtcccgagttccctgggaggctgacagggtcaagccaccctgcccaccaccctcccacttcccctcccctttcctctccagcattaggattcaagggaaatctgcatgaagccaattttgagggtagacgtgtggggaaaataaatcattatacagtaagacctggggcttgaggggtggggaatggggagggaagggcatagcctgctcctccatgagtctgacatctcggaaactgagcagctgccggacgcctgggtcaggaatccaagaccccacctcttaaggactggttcctcagaaagcaccctcagggaaaaaggtgaaaacattacatccgtggattctcctgccacaaccgcattggaagaaaaggctgccgcaacatctcagcgaggagtgaaggacccatgtcccaggaaccgcgctgcgccacctgcactcacccccctcacattctcttaagcacccggtggccctccgaggcctggcggaatggtggtgcccacggggttgggcaagggctcaccaggacctcaacgggcaaagttgtgcacactaaaatatcaaatcaaggtgcttggttttaaagtaaatgtttttctaaagaaagctgtgttcttctgttgacccagacgaatagngcacagccctgtaactgcacgtgccttctgtcattgggaatgaaataaattattacgagaaagggacttgtcctaactggtttgaggccttacagttttgkatctacatttttcccctcctggggtttgcggggacagggacagaactacaggagtcatgggaaagaaaattctggcttcactactgctcactgctcactttctgatcactctgatacttttttttttttttttttgcaacctgataccttgaaaagcttctatgtgtctctccttttgttgcctggcagctgtctaggatgatcactgattactatttactaagtagccacatgcaaataaaagttgtttggtaaaatggaaaaaaaaaaaaaaaaaaaamaaaaaaaaaaaa

SEQ ID NO: 1558 - DNA, 1423 bp, Homo sapiens
tgccttttctgtgagctatttgttttggtttgctgaaactagtccaaaacaggaaatttaacagacagccacagccaaagagtgtcatgtgaattacaagaaatagagcccatttagggaaagatagaactagaaaggcttttcattataattccatgttgaacaattgagtcatagcttcttatctygggaggaaggacacaattcaaaggggcagtaaggattttgtaaaacgtggcatccataatttactatggagcaagtgcccacatctctaggacattaagacatttatgagaaatctcaggattcatcttctgtttttatgttaaatgcactccctccttttcagttaacattataaaaagtaaaaaatgaaaattttagaaatcttgcattagacacatgaaaaaataactaaaagtttaaatttaaatatgaaacaattttgctgaaaatagtatccatatactatttaagtcttttatggttatttcaagtatacaatttctatctgtaatgtaatatattacccacacatttttttcacaggagagagagaatatcctcatttgtttatgctcatgtgtattttctatagtgaatttcagaaacttttaatatcaggtaatttcaatttatgcctataaagcattgattgaaaaataactagaattgtgcatatataacacataatctccaacagaagttactgaatacattcatactaatgtaatgtaatttccctttatttcttgctcttctgtttcaaactgctgctattgtagtttacatatcccaacctttaaaaatattcctcttattagctttatattcactttatagaagttgagttttaattaaaattcttggcatcctgaagtatgtcacatagcatgtgctccttataaatatgttgatatctcagaagacagcatcccggttttcattttataaagtaccatacttaagaatgctgtaatacttatcttttataacatgtttccttcgctttgcttgtcttttatgtcatcagttttaactgtttacttcatttaacagtttacatcattcaacagtttacttcattaaacagtaggtggaaaaatagatgccagtctatgaaaatcttcccatctatatcaaaatacttttcaaggatatacttttcaaaacaaacgatttaaattttatgkttaaaatataaactttagatttaaactttatttaaatatctggttcctatgattttgacttcagtaagktcaaataaaatatattttgcaattcatttttacattataatttaaaaagaagaagcgataagtggagtcagtttcaatgctaggtggggtggttaatgatttttctggtgttgctgctaatgtggattaacaaataaaaacattcattgccttttaaa

SEQ ID NO: 1559 - DNA, 457 bp, Homo sapiens
ggttctggagctggaccaggaggagctgcagctgggccggggcggagcgccgcgccgcgccagggccgcgaggaggggcgtgttgctgctggcccaccgcgagccgcccccagcccgcgccgaggcgccttcccgccaggccgcctgccttccgcctctttccatttccccggaatctcagcccggcgcgcctggacccctgcccctctctgggtggagaagctcccggccgcttccggtttcactccttctcagcctgggctcccagccccctctctccttttcctggactggctctcacccccttcggtccccttcctttagctcaggctccctaccccttcctttagcccacaagcccagaagtcccaagcttctcagtcactttcctyagccaaaggtcccagccttccttcttcctttcctttgcactatccctatcctgccctttctctat

SEQ ID NO: 1560 - DNA, 977 bp, Homo sapiens
  misc_feature (219)..(219): n equals a,t,g, or c
  misc_feature (230)..(230): n equals a,t,g, or c
  misc_feature (236)..(236): n equals a,t,g, or c
  misc_feature (346)..(346): n equals a,t,g, or c
acccacgcgtccgaaacactagcagcaaaaagtaagggataccaattgtgagaaacaaatcacaactgcacatcaaatgtttgctgacattggatctgtgctgtcttccagttgtgccatcctattttactccttaagaaatgaggaaattcctatttgggggcatcaactctccctcgagaaaaacaaagctgctaagtaagattccacctagaaaanggggaaagctntttccngggaacaccatttatacccccacacaaaataatagcatgagctgtgttttagaggagatagggtgccaaaccaaattcactcctctcagatgatagtaaagatcaaaagnattcgaagggagttggtaaacgctggtgtggtacatgtggctttsctcactcatgtggatagcatggattttgattacaaaaggtgacctatagaaatagagagatgtgagcctgtgaggtccaagctagaggaagtccaaagaaaacttggatttgctctttctgacatctcggtggttagcaattattcctctgagtgggagctggaccctgtaaaggatgttctaattctttctgctctgagacgaatgctatgggctgcagatgacttcttagaggatttgccttttgagcaaatagggaatctaagggaggaaattatcaactgtgcacaaggaaaaaaatagatatgtgaaaggttcacgtaaatttcctcacatcacagaagattaaaattcagaaaggagaaaacacagaccaaagagaagtatctaagaccaaagggatgtgttttattaatgtctaggatgaagaaatgcatagaacattgtagtacttgtaaataactagaaataacatgatttagtcataattgtgaaaaataataataatttttcttggatttatgttctgtatctgtgaaaaaataaatttcttataaaaaaaaaaaaaaaaaaaaaaaaaaaaaaa

SEQ ID NO: 1561 - DNA, 2540 bp, Homo sapiens
tgcaactgtgcacccagcttgccagatttttccccattacacccccagtgtggcatatccttggtccccagaggcacaccccttgatctgtggacctccaggcctggacaagaggctgctaccagaaaccccaggcccctgttactcaaattcacagccagtgtggttgtgcctgaytcctcgccagcccctggaaccacatccacctggggaggggccttctgaatggagttctgacaccgcagagggcaggccatgcccttatccgcactgccaggtctgtcggcccagcctggctcagaggaggaactcgaggagctgtgtgaacaggctgtgtgagatgttcaggcctagctccaaccaagagtgtgctccagatgtgtttgggccctacctggcacagagtcctgctcctgggaaaggaaaggaccacagcaaacaccattctttttgccgtacttcctagaagcactggaagaggactggtgatggtggagggtgagagggtgccgtttcctgctccagctccagaccttgtctgcagaaaacatctgcagtgcagcaaatccatgtccagccaggcaaccagctgctgcctgtggcgtgtgtgggctggatcccttgaaggctgagtttttgagggcagaaagctagctatgggtagccaggtgttacaaaggtgctgctccttctccaacccctacttggtttccctcaccccaagcctcatgttcataccagccagtgggttcagcagaacgcatgacaccttatcacctccctccttgggtgagctctgaacaccagctttggcccctccacagtaaggctgctacatcaggggcaaccctggctctatcattttccttttttgccaaaaggaccagtagcataggtgagccctgagcactaaaaggaggggtccctgaagctttcccactatagtgtggagttctgtccctgaggtgggtacagcagccttggttcctctgggggttgagaataagaatagtggggagggaaaaactcctccttgaagatttcctgtctcagagtcccagagaggtagaaaggaggaatttctgctggacttcatctgggcagaggaaggatggaatgaaggtagaaaaggcagaattacagctgagcggggacaacaaagagttcttctctgggaaaagttttgtcttagagcaaggatggaaaatggggacaacaaaggaaaagcaaagtgtgacccttgggtttggacagcccagaggcccagctccccagtataagccatacaggccagggacccacaggagagtggattagagcacaagtctggcctcactgagtggacaagagctgatgggcctcatcagggtgacattcaccccagggcagcctgaccactcttggcccctcaggcattatcccatttggaatgtgaatgtggtggcaaagtgggcagaggaccccacctgggaacctttttccctcagttagtggggagactagcacctaggtacccacatgggtatttatatctgaaccagacagacgcttgaatcaggcactatgttaagaaatatatttatttgctaatatatttatccacaaatgtggtctggtcttgtggttttgttctgtcgtgactgtcactcagggtaacaacgtcatctctttctacatcaagagaagtaaattatttatgttatcagaggctaggctccgattcatgaaaggatagggtagagtagagggcttggcaataagaactggtttgtaagcccctaaaagtgtggcttagtgagatcagggaaggagaaagcatgactggattcttactgtgcttcagtcattattattatactgttcacttcacacattatcatacttcagtgactcagaccttgggcaaatactctgtgcctcgctttttcagtccataaaatgggcctacttaatagttgttgcaggacttacatgagataatagagtgtagaaaatatgttccaaagtggaaagttttattcagtgatagaaaacatccaaacctgtcacagagcccatctgaacacagcatgggaccgccaacaagaagaaagcccgcccggaagcagctcaatcaggaggctgggctggaatgacagcgcagcggggcctgaaactatttatatcccaaagctcctctcagataaacacaaatgactgcgttctgcctgcactcgggctattgcgaggacagagagctggtgctccattggcgtgaagtctccagggccagaaggggcctttgtcgcttcctcacaaggcacaagttccccttctgcttccccgagaaaggtttggtaggggtggtggtttagtgcctatagaacaaggcatttcgcttcctagacggtgaaatgaaagggaaaaaaaggacacctaatctcctacaaatggtctttagtaaaggaaccgtgtctaagcgctaagaatgcgcaaagtataaattatcagccggaacgagcaaacagacggagttttaaaagataaatacgcattttttt

SEQ ID NO: 1562 - DNA, 608 bp, Homo sapiens
  misc_feature (29)..(29): n equals a,t,g, or c
  misc_feature (565)..(565): n equals a,t,g, or c
  misc_feature (570)..(570): n equals a,t,g, or c
  misc_feature (605)..(605): n equals a,t,g, or c
tcttacattatggctcccgaggggaagcnattacttttttaaattttaaattttttttttaattgcacttcttgtaaagagtgagaaaaaaaatcaaaggcgctttgaaacaggggctctctgtgcaaggatgactaagtgtacgtctttccgtgtgtgtatgctggtgaacagtcagatttatttatatttttttgcaagcattgaataatctaagttttaaatattatttatccccatccgttcgtatttatattaaagaattctgtaccctgatggttcagaagggttcttgggccttttgttcmattgtgtattggcgtacttagaattttttttatttgaaagagaaatataattcctttaaacggtaacgatgcaataaaaccagagaagatccagcttttgaaaacagtgatttaggtttgtaacatccggcaaaactgaaaaaaaaaatctgtaaacgcgaaaaatactagatttgttttgagagttcttcattccttgctgctcacattctgagaaacaaaaagaaataaagtttttattctgaataatatccgtnttaanaaggggttctttggccgaagacgtgggtctgcgtngaa

SEQ ID NO: 1563 - DNA, 784 bp, Homo sapiens
tggccgaggtgttgcggacctggccgtctcacaggtccttccccaggtccaagaggctcttctgtgtcctgatgacaagtagctgcctagccgtggtggcacctcctatcacatgttaagggacccctccccagggccacacctggcagaaggtggcttatgatgttcgcagcttgaaagtagtgtaaaccaaagataaaattctaagcccactcccccagccatcggaatggacccctcctcttggccagggcactccaaagttaacctgaaaaaccggttcaggctgtgaagagaaggtggagtggacatgcctcatttatgtcctcctcccttttggaattcagcaaagctgaccagcatgaacattaacacagaccttaagtctgattagtggcatttacaatctatactctctgaagcgtgctacctggagtcttcctttgcatgataaaactttggtctccacaaccccttatcataacctagacactcctttctagtgataataactctttcaaccaattgccaataaaaaaattttgaatctacctataacctggaacctccccgctccaccttcgagttgtcctacctttctggacagaagcaatgtggatcttgcatgtatttgattgatgtctcatgtctccctaaaatgtatacaattaggctgtgcccagatcaccctgggcacatgttctcaggccctcctgaggtctctgtctcgggccattggtcactcagattcggctcagaataaatctcttcaaatattaaaaaa

SEQ ID NO: 1564 - DNA, 1931 bp, Homo sapiens
ggcctctggctgctctgttaacgtgtcccgcgagcgaggcgcgtcgcaaaaggtcgcggcggaacttccctgcgcttttcagaccatactctttacggtactaggcactgctgagctgggagatgtcggcggcgtgttgggaggaaccgtggggtcttcccggcggctttgcgaagsgggtcctggtgaccggcggtgctggtttcattgcatcacatatgattgtctctttagtggaagattatccaaactatatgatcataaatctagacaagctggattactgtgcaagcttgaagaatcttgaaaccatttctaacaaacagaactacaaatttatacagggtgacatatgtgattctcactttgtgaaactgctttttgaaacagagaaaatagatatagtactacattttgccgcacaaacacatgtagatctttcattcgtacgtgcctttgagtttacctatgttaatgtttatggcactcacgttttggtaagtgctgctcatgaagccagagtggagaagtttatttatgtcagcacagatgaagtatatggtggcagtcttgataaggaatttgatgaatcttcacccaaacaacctacaaatccttatgcatcatctaaagcagctgctgaatgttttgtacagtcttactgggaacaatataagtttccagttgtcatcacaagaagcagtaatgtttatggaccacatcaatatccagaaaaggttattccaaaatttatatctttgctacagcacaacaggaaatgttgcattcatgggtcagggcttcaaacaagaaacttcctttatgctactgatgttgtagaagcatttctcactgtcctcaaaaaagggaaaccaggtgaaatttataacatcggaaccaattttgaaatgtcagttgtccagcttgccaaagaactaatacaactgatcaaagagaccaattcagagtctgaaatggaaaattgggttgattatgttaatgatagacccaccaatgacatgagatacccaatgaagtcagaaaaaatacatggcttaggatggagacctaaagtgccttggaaagaaggaataaagaaaacaattgaatggtacagagagaattttcacaactggaagaatgtggaaaaggcattagaaccctttccggtataatcaccatttatatagtcgagacagttgtcaaagaagaaagttatcctacctcgccaagtggtatgaaattaagtgaccaaatgaagtgcactcttttcttttggaattagattcatgactttctgtataaaattcaaatgcagaatgcctcaatctttgggagagtttcagtactggcatagaatttaaatgtcaaaattctttctgaaaccctttctcctagaaactaggaaataataggtgtagaagactctccctaagggtagccaggaagaagtctcctgattcggacaaccatgaggggtagtggtgctagggagaaggcaaccttcactggttttgaactcagtgcctaagaaagtctctgaaatgttcgtttttaggcaatataggatgtcttaggccctaattcaccatttcttttttaagatctgatatgctatcattgccttaataatggaacaaaatagaagcatatctaacactttttaaattgataattttgtaaaattgattacgttgaatgctttttaagagaagtgtgtaaagtttttatattttcacaattaacgtatgtaaaaccttgtatcagaaatttatcatgtttactgtttaaaatgattgtatttataaaattgtcaatatcttaatgtatttaatgtagaatattgctttttaaaataatgtttttattttgctgtagaaaaataaaaaaaaatttgattataaaaaaaaaaaaaaaaaaaaaaaaaaaaa

SEQ ID NO: 1565 - DNA, 394 bp, Homo sapiens
agcatttcttctgagttgtgcttgctgaactcaaatactaggtgatttggtaatgcgcctaaagagcatggggctcctcctgccaattataagcaaagacatcacatttggagtttggcaagatcagaatatctcaggttgagcacctgctgaatgctaggattgtgtctatgcattttaaatctatttttaatctttattacagtcttataatagggattatgacaccagaacagagacagctgtcttaagattwcaaggggtgctagctgaagaaaacagagaggaaagttgggaagaagctggatccttgataacagctgagccatggacttaaccagtcttagatgagcgatacctcaccttcagatttcatgtcataccacctgaaata

SEQ ID NO: 1566 - DNA, 346 bp, Homo sapiens
  misc_feature (312)..(312): n equals a,t,g, or c
  misc_feature (314)..(314): n equals a,t,g, or c
tgggacatgtcggtgaacccgaatgcctagtaaggcagctctgatggaggaagccaagctgatggcatctctctggcacttggcagcgatggccttcattacttacgtgctcctggctgggatggcactgggcattcagaaaaggtcagtgccaagcccctcccttaccctcccctccctgtgagctcttctcccaacctccctagggcatatgtggtggtccccagctcaccctctgttgccccagtctctcttcctcacccctgcctcaggatgcctggctctgagccacccctgctttggcgcaggttntncccggaggtgctgggcctgtgtgcaagcacag

SEQ ID NO: 1567 - DNA, 1577 bp, Homo sapiens
cctccaagatggccaccttttttgcamaggcktwccccatcmagggggtcacagcccattcaggtttgascytgcwtggcccmagctccytcagtccctgcctggcaagtcctccatkggcacaacmasmttcgcctggtggaattttcagcttttctcgagcagcagcgagacccagactcgtacaacaaacacctcttcgtgcacattgggcatgccaaccattcttacagtgacccattgcttgaatcagtggacattcgtcagatttatgacaaatttcctgaaaagaaaggtggcttaaaggaactgtttggaaagggccctcaaaatgccytcttcctcgtaaaattctgggctgatttaaactgcaatattcaagatgatgctggggctttttatggtgtaaccagtcagtacgagagttctgaaaatatgacagtcacctgttccaccaaagtttgctcctttgggaagcaagtagtagwaaaagtagagacggagtatgcaaggtttgagaatgsccgatttgtataccgaataraccgctccccaatgtgtgaatatatgatcaacttcatccacaagctcaaacacttaccagagaaatatatgatgaacagtgttttggaaamcttcacaatyttattgstggtaacaamcagggatacacamgawactctactctgcatggcctgtgtgtttgaagtttcaaatmgtgaacmcggagcacaacatcatatttacaggcttgtaaaggactgaacatggttatttatatatatagatatctgtatatacacacacacatatgtgcacacacacactctctctccattatcgaacgactgactgtaaacctcaccacacagggtggtgccctggccccgaggtcaccccgacttttctaaatcttgtttgagtgaagtcattttttcatgtgttcatactatcattgtagctgtgaagttctggtacagttgtaaaaagagaaattgagttgtttctctatgttcttcagatgtgcmgcccacaattcctcgggaaaggtgaacctgaacaacccaagtctctctctgcagagccctgtttctaattgtggtagaaaatattgagacrgrgcatttgccatgggacatttacagcctttatacaaatgtatttagttctcttttttccaacataaaattcttgttttaagatacaagtaaaattaatctttaaatataaatgtaaattagtacacaaaactaagaatctttagacttatctttgtaactaattagggtggaagttatgaaagaatgtaattcactaaattattttttaaatgaaacctttttttttctttttgaaaccaaatgttaaactatagccttaagaaatgcttggtagaagtgtcctaatgagacaaatttgtacttttatcctcaaggttaacactaatctcctaatccattaaactcttgaacaggtattacaaaggaagaaaacttcaccccttatccttaacatatatagtatatttaaaaaatataaaattgtattgtactaatgtgatgatggattatttaatg

SEQ ID NO: 1568 - DNA, 278 bp, Homo sapiens
gggcagacctgcgagagcagagggggcttcggcaggcaaccgaccaccaggagctggtggaaatccccaccaggccgctgctgaccaagctgagcctgatcacagccccacggcggggagagagggcgcccgtccctctacgtgcagggggacatagtacaggagacacagcgtgaggtaagaccaccggcggggagggcctgcacgtgggccgggtgtccacacccgattgggtcttcggagggttccccagcccgggatttcggaggagcccttca

SEQ ID NO: 1569 - DNA, 751 bp, Homo sapiens
  misc_feature (1)..(1): n equals a,t,g, or c
  misc_feature (565)..(565): n equals a,t,g, or c
ntttgttcctgtcacctgggttcatcttgttgtgaagcacattaggtccaggtccttccctctgggagtctgactgtgaaactctttaacccaacaactcaattagcccctgtagataagacatgcttcccagagtgagatttttgaaatccccttttcatccagaactatatttacccacctattgtaactattcaratagagcaaaattaggaggcttgataaatactaagaatttagtaccacagaaattatttattattttccctgtagtccacaattagtgataacgaatcctatttttgttaactgtgacataactttgatgtcatatgttgtcctatgtggttcttcctaagtaaactctgtactgattatatactgacttagcaatgtggccttggaatgctgagcaaaatgtggatgtactggttgtaaatgtttatatattgtacagtacctttatatatacacttgaggttctgattagagaaagatctgtaaattgctcattattttttatatagatatttaaaaaaaacagtttatggcctgcatttctttnactgtcacattggtttaatgttgctttctaatggtggagctaggtcccatcatagtctgagtcctcaaatagattttgtccctccaagtaacaaactttcaaagtcctaaaatcaggaagagtcttataataatgattttacctctataggtatacttttatttatttataaatagagtttgaaat

SEQ ID NO: 1570 - DNA, 1938 bp, Homo sapiens
  misc_feature (20)..(20): n equals a,t,g, or c
  misc_feature (31)..(31): n equals a,t,g, or c
  misc_feature (33)..(33): n equals a,t,g, or c
agcaacctatagatcatganaggcaacggtnanctgacagtaccggtcggaattcccgggtcgacccacgcgtccrgcggtaaccgccacagctgccagcgacaggatggagagcgactcagactcagacaagagtagcgacaacagtggcctgaagaggaagacgcctgcgctaaagatgtcggtctcgaaacgagcccgaaaggcctccagcgacctggatcaggccagcgtgtccccatccgaagaggagaactcggaaagctcatctgagtcggagaagaccagcgaccaggacttcacacctgagaagaaagcagcggtccgggcgccacggaggggccctctggggggacggaaaaaaaagaaggcgccgtcagcctccgactccgactccaaggccgattcggacggggccaagcctgagccggtggccatggcgcggtcggcgtcctcctcctcctcttcctcctcctcctccgactccgatgtgtctgtgaagaagcctccgaggggcaggaagccagcggagaagcctctcccgaagccgcgagggcggaaaccgaagcctgaacggcctccgtccagctccagcagtgacagtgacagcgacgaggtggaccgcatcagtgagtggaagcggcgggacgaggcgcggaggcgcgagctggaggcccggcggcggcgagagcaggaggaggagctgcggcgcctgcgggagcaggagaaggaggagaaggagcggaggcgcgagcgggccgaccgcggggaggctgagcggggcagcggcggcagcagcggggacgagctcagggaggacgatgagcccgtcaagaagcggggacgcaagggccggggccggggtcccccgtcctcctctgactccgagcccgaggccgagctggagagagaggccaagaaatcagcgaagaagccgcagtcctcaagcacagagcccgccaggaaacctggccagaaggagaagagagtgcggcccgaggagaagcaacaagccaagcccgtgaaggtggagcggacccggaagcggtccgagggcttctcgatggacaggaaggtagagaagaagaaagagccctccgtggaggagaagctgcagaagctgcacagtgagatcaagtttgccctaaaggtcgacagcccggacgtgaagaggtgcctgaatgccctagaggagctgggaaccctgcaggtgacctctcagatcctccagaagaacacagacgtggtggccaccttgaagaagattcgccgttacaaagcgaacaaggacgtaatggagaaggcagcagaagtctatacccggctcaagtcgcgggtcctcggcccaaagatcgaggcggtgcagaaagtgaacaaggctgggatggagaaggagaaggccgaggagaagctggccggggaggagctggccggggaggaggccccccaggagaaggcggaggacaagcccagcaccgatctctcagccccagtgaatggcgaggccacatcacagaagggggagagcgcagaggacaaggagcacgaggagggtcgggactcggaggaggggccaaggtgtggctcctctgaagacctgcacgacagcgtacgggagggtcccgacctggacaggcctgggagcgaccggcaggagcgcgagagggcacggggggactcggaggccctggacgaggagagctgagccgcgggcagccaggcccagcccccgcccgagctcaggctgcccctctccttccccggctcgcaggagagcagagcagagaactgtggggaacgctgtgctgtttgtatttgttcccttgggtttttttttcctgcctaatttctgtgatttccaaccaacatgaaatgactataaayggttttttaatgaaaaaaaaaaaaaaaaagggcggccgctctagaggatccctc

SEQ ID NO: 1571 - DNA, 889 bp, Homo sapiens
  misc_feature (886)..(886): n equals a,t,g, or c
cagcacccccagcctgctgacagcagacagactgggtcctcaaaggctctggcccagaccctcccaccacccacggytgctggtgaaagcaattctgtgacctgcaactgtggccaggaggctgtgctgctcactgtccgtaaggagggccccaaccggggccggcagttctttaagtgcaacggaggtagctgcaacttcttcctgtgggcagacagccccaatccgggagcaggagggcctcctgcyttggcatatagacccctgggcgcctccctgggatgcccaccaggcccagggatccacctaggtgggtttggcaaccctggtgatggcagtggtagtggcacatcctgcctttgcagccagccctccgtcacacggactgtgcagaaggatggacccaacaaggggcgccagttccacacatgtgccaagccgagagagcagcagtgtggctttttccagtgggtcgatgagaacaccgctccagggacttctggagccccgtcctggacaggagacagaggaagaaccctggagtcggaagccagaagcaaaaggccccgggcaggttcctcagacatggggtccacagcaaagaaaccccggaaatgcagcytttgccaccagcctgggacacacccgtcccttttgtcctcagaacagatgagctcagggtagggtagagaacgccactttyttcagacctgtcccctttgtgtttaggaaatgagtttaaccagggaccaagtgggccattttagtgttcctgggaaatttaggagggacagtgtttgggccttttggagttgggggctttctttgttgttttaaggggggcacaaaggttcccagatccattcttgggagcagggccagcttnttg

SEQ ID NO: 1572 - DNA, 1385 bp, Homo sapiens
ggtcggagccgggtgtccagccggaagcggcacccggctggccccccaggagaggcacaggaggggagtgccaaggctgagcggccaggcctccagaacatggagctggcgcctgtgcagcgcaagatcgaggctcgctcggcagaggactccttcacaggcttcgtccggaccctgtactttgctgacacctacctgaaggacagctcccggcactgcccctcgctgtgggctggcaccaatgggggcaccatctatgccttctccctgcgtgtgcctcccgccgagcggagaatggatgagcctgtgcgggcagagcaggccaaggagatccagctgatgcaccgggcgccggtggtgggcatcctggtgctcgacggacacagcgtaccccttccygagcccctcgaagtggcccatgatctgtcgaagagccctgacatgcagggaagccaccagctgctcgtcgtatcagaggagcagttcaaggtgttcacgctgcccaaggtgagtsccaagctgaagttgaagctgacggccctggagggctcaagagtgcggcgggtcagcgtggcccacttcggcagtcgtcgagccgaggactacggggagcaccacctggcagtccttaccaacctgggcgacatccaggtggtctcgctgcccctgctcaagccccaggtgcgctacagctgcatccgccgggaggacgtcatggcatcgcctcctgcgtcttcaccaaatatggccaaggcttctacctgatctcaccctcggagtttgagcgcttctctctctccaccaagtggctggtggagccccggtgtctggtggattcagcagaaaccaagaaccaccgccctggtaacggtgcgggccccaagaaggccccgagccgagccaggaactcagggactcagagtgatggcgaggagaagcagcccggcctggtgatggagcgcgctctgctcagtgatgagagagcggcaactggcgttcacatcgagcsgccgtggggtgcagcctcagcaatggcggagagtgagtggctgagcgtccaggctgcgcgatgagcacacactactactgatggcctttcgggggtccctgccccarccggagaggccggtgcacagggccccgccaggggctgggggcatcccggcttccacaatgcagctgctctgggcctcgggagaggagagaccccagtcccctgggctgcscttcccgggcctcgtctgtctgggtcctttggtcaatgttgcacagtttttattgctcccatccctttttgtagtgggctgggttttaagttataaatgttaactgcctctgggtgaaaaagtttttaataaacacctattacctcttgactggtcaaa

SEQ ID NO: 1573 - DNA, 862 bp, Homo sapiens
  misc_feature (14)..(14): n equals a,t,g, or c
  misc_feature (56)..(56): n equals a,t,g, or c
  misc_feature (784)..(784): n equals a,t,g, or c
cagacctgggatcncacacacacacactttcacacacacacttcacacatcacacnactcccaccaccgtcatgatggaggaattacgtatacattcatattttgtattgattttkgattatgaaaatcaaaawttttcacatttgattatgaaaatctccaaacatatgcacaagcagagatcatggtataataaatccctttgcaactccactcagccctgacaacccatccacacacggccaggcctgtttatctacactgctgcccactcctctctccagctccacatgctgtacctggatcattctgaagcaaattccgagcattacatcattttgtccataaatatttctaacatccttaaatatacaatcggaattcaagcatctcccattgtcccacaaatgtttggctgtttttgtagttggattgtttgtattaggattcaagcaaggcccatatattgcatttatttgaaatgtctgtaagtctctttccatctacagagtttagcacatttgaacgttgctggttgaaatcccgaggtgtcatttgacatggttctctgaacttatctttcctataaaatggtagttagatctggaggtctgattttgtggcaaaaatacttcctaggtggtgctgggtacttcttgttgcatcctgtcaggaggcagataatgctggtgcctctctattggtaatgttaagactgctgggtgggtttggagttcttggctttaatcattcattacaaagttcagcattttacctgatcgtntcagtggtcattgatgatcattgctgagatccacactatattaggggcggcagaacaggtgtttttctaattctgcta

SEQ ID NO: 1574 - DNA, 3107 bp, Homo sapiens
ggaatgtttcaaaaggatatgatgaactgaggcttatcgagtcagggagcagaaagctgaaataagaccgctaagctctaaacaaatccgttaaagcttcacagggcagagcagaacaaaaatagtatactcaatgtatagtcggaaagcagccgaagaagtgaagcgagaactgataaagttaaaagtgaactattacattctagaagagtcatggtgtgtaagaagatccaagcctggttgcagtatgcctgaaatttgggatgtagaagatcctgccaatgctgggaaaactcccttatgtaacctcttggtgaaggattccaaacctcacttcaccactgtattccagaacagtgtttacaaagtcctagaagttgtaaaagaatgactgctacatgacctgctgcctacggagaactacatctgtaatggttttaatgttttgctaagtcatgtgttgttcatatcccaaaaacttttataggtaactgttttcaaatagaaaacgttttatttggtcaatttgaatgtcattctaattataaaaatgacttacacctttatcaattggttactatttcaatgcaccctttaaaatttgctatgcaaatgagtatatgcttgtacttgactttaatatttgtgctaaagtgagcaaagctaactgtataaagaaaacacagtgggttgtgacaaggatgacatgaaaatacaggacaattctgacaatgtaggggctgattttatagtgtaagaactattaatgccccttgsttcttttttctgcctcttgctcttgtcttttggacatttcagtgattgtaagttcttcggtcatgtcagcccctgtcatcaacttgagttacagtagatggggcagacatggagtgtttgctatatagaactatctgtttgttttacttccttgtgcgctttttgttctctgttctcttgttaatgaagcttttcctgcccattattaatccaaactcttggaccttgtggttaggaaattcccttaacttccagccatatggcattatcgtgtctctttctctctctctcttgctctctctcttctcctcttccccatattttctgtcaaataagtactgtttactcatttagttgcttatcaagtacttattcttggttttaaaaaaaattaatggtaactgtatttttctcatttttagcattattcaaatgtttatattttaatacctttaaaccactttaaagttttttcatgtttaattatagttttaagaaaaactattttgaacaaccccaaatatagtgcatctagaaactaatgtatatttgattagacatcatttatagtggaacagtagactgtagtacatggtaatttttcttttactattaagatacaataaaacatgactaattttgctgtcaaaaatgtaaagaataatgataaatggagtttttatattttacttttaagattgcctgtctttaataagacaaagccttaagccttatgttataattttggttctaaaaaccatcatttcagtataaggaataagtatatttcgtcctcctctttagtttttttcttcctatttatttttattttgaaaaatttctacaccttctttgaattccttgtatgaatttttgtttcttagaagttaatttgtgtgaaatgagattcttcaaaacgatgaaacctcatagctctgagaaaaggttttagggttttaaattctaagcaaagcgtgactatggctgacagactacacatttaattatacagcttctctttcttaaccacaggcagattaacctcattgtggattgtccttcagaccttagtcctcaggcatggtttctggtgcccactcctggaagccgctgttccctttctaccttcttaccagagcccaagggcaggcctggtcccggggaagcagcagcttgctgacataagtcagctgcaaaggctgaggagtgtgccctcagagaagcaccgccccccagtcttgtgccagcgcctagagccgcagctcccagggatgctccttccctggaggcagcccaggagagggactctggcagcgttcttcagatttgtggccactgtttctcatttgctggttgactgtttttatttcttaggcttttgctagttttagaaaatagggaagcagcccttgatttgtggattaaaagcaacatttgagcgatgatgcacaacagtccaggaaaatgggcggtggacacttgaggctgaggatgggagttgacatgagcagggagagggaggtgcgcgctgcttatctgtgattgttgctcacctgagtgtggctgattgtgtacatccagcagttacaatttttaaaaattatacttttacatttattttatatttttctcacccccagtaatttccttccaaagaagttcacatgtaataagtagaaattctgtataggaaaaaagcattaaaaatactattataactgcttcatttgctgggaaccattaaaagtaatataaattagctttttccagaaggatccttttgtagcagtgtttatgaatgtaacccccagcaaaatatggctatatattaggggagccagtttggagcagaggcctgaaggtccctgctatgcagccgtggccacagctcgcagcccaagcactgtggagcatccacacctttgatggcaatgcagattggtagcaggttccataggcgtacaaaacagtattaaagctcagtgttttgcatattgttagcatttacaaatatttttgctttagtatgaggaaagtaaggatgggcaaagaagcgatcaaaatagctattgctacaacattttcgaaaacaaagttggggctgtatttctttaaaaagataagcctctaaaaatgcttggcaaaaaaaatatagtgttaaaataggccagtgatattaatgagaaaatgaaagtatgtatcaggaataaagtgatattgcataggagtattgtatttttatgaattttatgccagttgtttacatgtactatatatgttaaattaaaaaaaatcatgagtaatgaaaaaaaaaaaaaaaaaaaaaaatt

SEQ ID NO: 1575 - DNA, 300 bp, Homo sapiens
  misc_feature (164)..(164): n equals a,t,g, or c
  misc_feature (297)..(298): n equals a,t,g, or c
ctcgtgccgaattcggcacgagstctctgcaggccccatcgagggaagaagctgccaagtggagccaggtccggaaagatctgtgctctttraaggtctctctgcagctgcggggggaggatggcagtgtctggaactacaaacccccagccgacagtggcggnaaagagatcttctccctgctgccccacatggctgacatgtcaacctacatgttcaaaggcatcatcagctttgccaaagtcatctcctacttcagggacttgcccatcgaggaccagatctcctgctgaaggnngc

SEQ ID NO: 1576 - DNA, 537 bp, Homo sapiens
  misc_feature (501)..(501): n equals a,t,g, or c
  misc_feature (516)..(516): n equals a,t,g, or c
ggtgacagctsccagcggcatcctcgatgtcaccgtggtctacctgaacccagaacagcattgctgccaggaatccagtgatgaggaggcttgtccagaggacaagggaccccaggacccacaggcactggcgctggacacccagatccctgcaacccctggacccaaacccctggtccgcaccagccgggagccagggaaggacgtcacgacctcagggtactcctccgtcagcaccgcaagtcccacaagctccgtggacggtggcttgggggccctgccccaacctacctcagtgctgtccctggacagtgactcgcacacacagccctgccaccatcaggccaggaagtcatgtttacagtgtcgtcccccaagtcccccggagagcagtgttccccagcaacaggtgaagcggataaacctatgcatacacagtgaggaggaggacatgaacctgggccttgtgaggctgtaagtgtgtcagcacatttgccgcantggatktgtactgangggggtggagcgaaggtggaa

SEQ ID NO: 1577 - DNA, 333 bp, Homo sapiens
  misc_feature (143)..(143): n equals a,t,g, or c
  misc_feature (192)..(192): n equals a,t,g, or c
gtggttgccttaatgatgaacacttggaagaactgggaggaatactgaaagcaaaacttgaagggcactttaaaaaccaagaattgagacaggtgaaaagacaggaagaaaactatgatcaacaggttgagatgtctctgcangatgaggatgaatgtgatgtttatattctgaccaaagtatcagatattntgcactcattatttaagtacttatgaaggaraagattttaccatggtttgaacaactacttccattaattgtaaatctaatttgtttcaagtaggccatggccagacagacatgggggttgtggcatatttggatggacat

SEQ ID NO: 1578 - DNA, 649 bp, Homo sapiens
  misc_feature (432)..(432): n equals a,t,g, or c
acgagggcagcaccagctggaaggcggccttggaggcttccaagggctgcatcaagtgcgaaggccctgcccggaggactggctgctctacggaaggaagtgctacttcttttccgaggaacccagagactggaacacaggcaggcagtactgccacacccacgaggcggtgctggctgtgattcagagccagaaggagctggaatttatgttcaagttcacgcggagggagccctggattggactacgcagagttggggacgaattccactgggtcaacggggacccgtttgatccggacacgttcaccatcgcaggtccaggggagtgtgtcttcgtggagcccaccaggctggtgtcgacggagtgtctgatgacccggccctgggtgtgcagcaagatggcctatacttgargtgggtkgggccagangtkgccmgcccctargcctgtgggargtgtctggtgtctgctcaagacctgcttccagcggacgcgcctgccctctgcaaggcgaacgggtgggtgcgtggcctccgccccaggcccctctcccaggccctggcgctctgagtccctggttcctggcctcctttgtctgcaggcaggtcgtgtggctcagcagttaaatcccatatgctaggtagtg

SEQ ID NO: 1579 - DNA, 393 bp, Homo sapiens
  misc_feature (363)..(363): n equals a,t,g, or c
  misc_feature (390)..(390): n equals a,t,g, or c
cggagccaggcccggagctgagggggccagggcctttggaggaagcattggcctccaggctgaagagcaagggccgtgtcacctgcccggagggcggtctcatctctgcagccaggtcagaggaagcagcggtggggagacggagtgcgcgagttgggaggctccacgcatcgtaggtggagagctggctgccagcctggcctgccctctcttccccgtcccaccatctcgcttggctccggcacctgcctgggaagacccacacctccgtctgcagtgcctcttccccctggaggccctgccctccgctcggggtccccgcatccttccgtggccctcagagcatcgcctggggcgcccgcngaactcatctgttaagcctgggatcangca

SEQ ID NO: 1580 - DNA, 566 bp, Homo sapiens
  misc_feature (556)..(556): n equals a,t,g, or c
gaattcggccgaggagagatctctaggggacctgatgtgcacttgacacatggccttgagcccaaagatgttaacagggaatttaggctaacagagagcagcacttgtgagccttctactgtggctgctgtcctatctcgagctcaaggctgcagatccccttctgctcctgacgtgaggacaggttccttcagccactcagctactgatggaagcgtggggttaataggggttcctgagaaaaaggttgctgagaagcaagcaagcacagaacttgaggctgcctctttccctgcargcatgtactctgagcccctgaggcagtttagggacagctctgtaggtgaccagaatgcacaggtgtgtcaaaccaattccagaaccamctgcaacaactcaggggaccacacaccctggatttaagtgaarggtctgctgagagcaagttggtggtagagccacagcatgaatgtttagaaaataccactagatgttttttggaaaagccacaattttccactgagttgagggatcacaatcgcttggattcccaagncaagtttgta

SEQ ID NO: 1581 - DNA, 1657 bp, Homo sapiens
gctacctagtgtctccttctgacctcattatctgtctgaataaacttcagatgggtactggatgtatattgactactgtcaaataaaatgaactttgttttagttaaggtcagatatgatgtggttggtatgttttggaacatgttttttcaggttgcatctggaggtggtggggttggagatggtgttcaagaaccaaccacaggcaactggagaggaatgctgaaaacttcaaaagctgaagagttattagcagaagaaaaatcaaaacccattccaattatgccagccagtccacaaaaaggtcatgccgtgaacctgctagatgtgccagttcctgttgcacgaaaactatctgctcgggaacagcgagattgtgaggttattgaacgactcattaaatcatattttctcattgtcagaaagaatattcaagacagtgtgccaaaggcagtaatgcattttttggttaatcatgtgaaagacactcttcagagtgagctagtaggccagctgtataaatcatccttattggatgatcttctgacagaatctgaggacatggcacagcgcaggaaagaagcagctgatatgctaaaggcattacaaggagccagtcaaattattgctgaaatccgggagactcatctttggtgaagagaactatgtaatactgagactttgttgactcaaaacttgctagttactgcctacctgagtagaatcttatttatgaactcctgtgtattgcaatggtatgaatctgctcatgtggagactggctataaactgaaaagtgtattccaaattgcagaacacatcacacatttaatccaaataataaatggctgtttctaaagtttcccagtatatataaaatacatcaagtctgtcttgtgacagtttcatctgaacttaacttaaaaacaactgttaatgttctagttgtgcaaagcagtttgcctgtggataagatgacctgtgtaataatctttgttagtagtcttaaagctgctgccatagtcctccaagaagaaagcaccaagacaacatttcatatgactataatgcatgtactatataagctgatctggctttgaaagatgtgagttggcaagttcctcacatagagtcattgtattccacctgtccttcaatttagttttttctgagcttctttgcagcctttgatgtgtttttaagaaagctgaatgcacaagaggatctgtgacactgacatggctgtggtgtgcatactgtgtagttacatagcccttccaattctgggtccatttgcactagcaaattaaaatatgctttgattcatacttaaacctgaaagcaggaatgcctacattaattcctacattaaaaacagccatctacccttgattatctagwaagacttggtaatgatggtcagttccttttagatttcagaaaatcaaatgatgacctaaatttcccttaatttgcaaatacagtagtaattaaggtacatctctaaagtggagcacttacaccaggctctaagattcactttgaggtggaacttaaaaccagtgtactgtatgtatgcattggtaatagctacttttgcttcatagcttcataccaacaaaatatatttattagaatagtatgaaagtactggagg

SEQ ID NO: 1582 - DNA, 1186 bp, Homo sapiens
ggcacgagaaataatcacctggagtttgttaaaccatatggattctcaggctcctctcttgaagattctgattcagtaggtctgggagtggcgccctggattttgatcaaaattgtagagcattttaaggtgagtacctgagggagaacttaaagacatcttagttggggagtagtccttttgaattttacagctagatataatcttcagtcagataaaatttatgggagctggtgtcttatgcctgactcttagtaatttcataccggtttgaagtacgtgtgcccatgcctaaagccttgactttcagaatgttgtcttttgattcttctgtcttgatttgattaggggtgaaatttagaagtcttagtaatgtaacttgaagatgttaaacaaaaatctcaagtaaaatgaaaagcaaatatgggctactgaattaagaaactggcattctagtattaaatcctcacttcaggagcttttaaaaatactgagacccccccataaccagagattcagattcaaagactgaggataggaccttagcattgtagctatttaaagtttctaatgtgcacccagggttgggaatcaccaatgtgggtgtgaaaatgcctacaaagggttttagtgccttagaagtcctaagaagcccaatctgtatcaaagcagatccattttgcaaggatctttcttttagaactttctcagttctcttagtaagaactttagaagtaatcttgataataagcacagacagcctaacagcagaggcaacttaaataactcctgagcagttggcactagaacagaatacttggaatgacaccaaagttaaccaagtccagcatatgtccaaagagttaagtgtttcatttactgtagcattctgggtgagaaattggttgctgaaatcttaagacagtggtctcaaccttggctgcacattggaatcacctgtagggttttaaagcatccaaatggtaattaacaggcagcaaaacttcagaactagttctgcatctactgtgcaaagatcatgattaactgtcaagacactggtagaacagaacaagcaaaagattaagagttcaaaagtaaatgcaaccawtttaacatgtagtgttattaaaaaattacaaaggcctagaccagcctgggcaacagagaccatgcttaaaaaaaa

SEQ ID NO: 1583 - DNA, 725 bp, Homo sapiens
  misc_feature (6)..(6): n equals a,t,g, or c
  misc_feature (13)..(13): n equals a,t,g, or c
gtgctnttttttnaatgctggggttaaacaaagtgctcttcttggacttaaagaccttttgtctcaatacccatttataattgatgcacacctttcaaacatattaagtgaagtgactgctgtgtttacagataaagatgctaatgtacgattagcagcagttcaacttcttcaattcctggcccccaaaatacgagctgaacaaatttctccattttttcctttggtaagtgcccatctctctagtgccatgactcacattactgaaggaattcaggaggactctttaaaagttttggacattctgctggaacagtacccagctctaattactggccgtagcagcatattgcttaagaattttgtagaacttatttctcatcagcagctgtccaaaggactgataaatagagacagatcccagtcctggatactttctgtaaatcctaatcggagactcacttctcagcaatggaggctgaaagtcttagtgagactcagtaaattccttcaggccttggcagatggatccagtaggttgagagaaagtgaaggacttcaggaacagaaagaaaatccccatgccactagcaactycatttttatcaactggaaggaacatgccaacgaccagcaacacatycagggttatgaaaatggggggtcacargcaaaggyaggtccargtyaagstacggatctggttggaggactgatggggggat

SEQ ID NO: 1584 - DNA, 1135 bp, Homo sapiens
caaaagcatagagaaattataaaattcaagaacagatgttagaatggaaactgatctagaggttataataaaggataatagtcttgtgctgacaccatcacacatcaaagcctacatgttgatgactcttcaaggattagaatatttacatcaacattggatcctacatagggatctgaaaccaaacaacttgttgctagatgaaaatggagttctaaaactggcagattttggcctggccaaatcttttgggagccccaatagagcttatacacatcaggttgtaaccaggtggtatcgggcccccgagttactatttggagctaggatgtatggtgtaggtgtggacatgtgggctgttggctgtatattagcagagttacttctaagggttccttttttgccaggagattcagaccttgatcagctaacaagaatatttgaaactttgggcacaccaactgaggaacagtggccggacatgtgtagtcttccagattatgtgacatttaagagtttccctggaatacctttgcatcacatcttcagtgcagcaggagacgacttactagatctcatacaaggcttattcttatttaatccatgtgctcgaattacggccacacaggcactgaaaatgaagtatttcagtaatcggccagggccaacacctggatgtcagctgccaagaccaaactgtccagtggaaaccttaaaggagcaatcaaatccagctttggcaataaaaaggaaaagaacagaggccttagaacaaggaggattgcccaagaaactaattttttaaagagaacactggacaacattttactactgagggaaatagccaaaaaggcaaataatggaaaaatagtaaacattaagtaaatgctgtagaagtgagtttgtaaatattctacacatgtaaaatatgtaaaactatgggttatttttattaaatgtattttaaaataaaaatttaattctggtttttctgattagagtgcaaaagtgagaaaagttcaatactcttgaaatgtagaattgaaaatgcattagggaaaacttaataaaaattattaccagttatttggaagatctgacccatatagtatcacaaatctgtagtagcatgggt

SEQ ID NO: 1585 - DNA, 859 bp, Homo sapiens
  misc_feature (845)..(845): n equals a,t,g, or c
taagatagcaaaccagttcgttttaagtaagctaacttgttcattagtatctgtggcttaaaatggcaaaaaagaaaatatccttgagtttgtaatctagttacagaagtaaggcatacacacacacaaagataacagtacctagagagagagtgtgtgtgagtgtgcgtgtctctgtgtgtgcacgtgcacgctcatggccaaatgtgcgcactctacataaaggaggcaggagttcctataggctatttaatgtaagagaaactatttttctcctgttccagctgtatcagatactcgttccgcaacacagaaatgactcagaatctcagacaaaatgtattatttgttcaattttaattttgctactacattcataactcttaaattgttaggctgtttcatttacatcaaagttatctcacaaaagagaaggcaggaaacgttttgtgagtgcctattctatgtcaaacactgtgttggcaccatattttacaagtttttttcctcttctcacagtgatcttgtgagttagttacttatatttttattagaactcattattctgggtaccctccaatgagaattagagaggttaaataccttttcctagattcccacagcaggaaggtgggcatagctgttttgtctgacaccagaacccatctcaccacactgctttacagtcttcctgaaggacattttgaggtggggggggcttcaaagctcagagactgggtttgaatgggtttaattttgcaakggatcatgtccatgccaggtgttacaattcttaacttcctccaaattcgkgtgtccattagacatttgggtacatccgggcnggggagggtcaggg

SEQ ID NO: 1586 - DNA, 732 bp, Homo sapiens
cgggtcgacccacgcgtccgagaaaaagagggaggagagaaggaaggtcctggaggaggctgaagcagaggaggaagaggaagagtgagggatggagaaagggcagaggaagagacatgagaaagggagaggaagagaagcccagctctgggaactgaatcaggaaactcaaatcgaatagggaagtaaaaaaacaaaacaaaaaacaaaaaaaacaaaaaaaaaaccctatttaaatgaaaggagtttaaaaacattttttaaggagggagaaaggagaaattttggtttttcaacactgaaaaaatactacctataggaaagtctgtcaggtttggtttttttgtacaatatgaaaaggatattatctacctgttctgtagctttctggaatttacctccccttttctatgttgctattgtaaggtctttgtaaaatcttgcagttttgtaagccctctttaatgctgtctttgtggactgtgggtctggactaaccctgtggttgcctgccctcctgagcctccgccttcccagcagcggcaccaaggggccttagggagccccaaaacctaccactcgcgtgttccccaagcgcctggctgctgcttcttgcttcccgtcccccagccccatgctcccttttacattctgtgtgtatctaaaggatggaaaaataaaacgcaattaaaaataaaaaaaaaaaaaaaaaaaaaaaaaaaaaaaaaaaaa

SEQ ID NO: 1587 - DNA, 1636 bp, Homo sapiens
  misc_feature (1588)..(1588): n equals a,t,g, or c
tcttgtcttggccggtggtggccaaccaagtgttgaaacttgggaaccttgagttcaagcccgaatctcgagtgaatggtctagatgaaagcaaaatcaaagataaaaatgagttaaaagaaatttgtgaattgaccggcattgatcaatcagttctagaacgagcattcagtttccgaacagttgaggccaaacaggagaaagtttcaactacactgaatgtggctcaggcttattatgcccgtgatgctctggctaaaaacctctacagcaggttgttttcatggttggtaaatcgaatcaatgaaagcattaaggcacaaacaaaagtgagaaagaaggtcatgggtgttctggacatttatggctttgagattttcgaggacaacagctttgagcagttcattattaattattgtaacgaaaagctgcaacaaatcttcattgaacttactcttaaagaagagcaggaggagtatatacgggaggatatagaatggactcacattgactacttcaataatgctatcatttgtgacctaatagaaaataacacaaatggaatcctggccatgctggatgaagagtgcctcagacctggcacagtcactgatgagaccttcttagaaaagctgaaccaagtatgtgccacccaccagcattttgaaagcaggatgagcaagtgctctcggttcctcaatgacacgtctctgcctcacagctgcttcaggatccagcattatgctggaaaggtgctgtaccaggtggaaggattcgttgacaaaaacaatgaccttmtctatcgagacctgtcccaagccatgtggaaggccagccatgccctcatcaagtctttgttccccgaagggaatcccgccaagatcaacctgaaaaggcctcctacagcaggctcacagttcaaggcatccgtggccactctgatgaaaaacctacagaccawgaamccaaactatattaggtgtatcaaaccgaatgataaaaaagcagcacacatcttcaacgaggctctagtgtgtcatcagatcaggtacctggggcttttggagaacgtccgagtgcggagggcaggctacgccttcaggcaggcctatgaaccttgcctagaaagatacaaaatgctttgtaaacaaacatggcctcattggaaaggaccagccaggtctggtgtggaggtcctatttaatgaattagaaattcccgtggaagaatactcctttggtagatcaaagatattcatccgaaacccaagaacattattcaaattagaagacctgaggaagcaacgcctggaggacttggccactctcattcagaagatatatcgggggtggaaatgccgcacacacttcctgctaatgaaaaaaagccaaattgtgattgccgcctggtacaggagatatgcgcaacaaaagaggtaccagcagacaaagagttccgccttagtaattcagtcttatatccggggttggaaggctcgaaaaattctgcgggaactgaagcatcaaaagcgctgtaaggaagcagtcacgaccattgctgcatattggcatgggacccargywcswangaagaatcaggaaattcttcagagccaatgctggaaaagaaaatctat

SEQ ID NO: 1588 - DNA, 659 bp, Homo sapiens
gaattcggcacgagaaaaatgaccctatgattgtgtcttttaaaaaggccaagcccaatcctcttcaaccccggctcaccctctggtgggcccacgttgggcacaacttccccaactgatgggcccttggcttcagctatcctccttgccgcaatttcctgggcaaagatgcttctcttaccagatgttgctgatttcccctgtggggcaaaaagaaaacccaggttactgatgctcatcatcccactttcctctcaacctctttatatcaaggcctctggaacaaagagataaaaggggatttgctcaatttccagggatcacaaccctagttctcagaaaaaggagaggtctataagagtaaaggtcttagactctgacagacttgggttgaagttctggctcttctacctattagatgtgtggtgttggacaagttatttatctctttggggtctcagtttcctcatatgaaaaatgggaataaggactcctcatccccaaggtatcatcatgatacctgccttatatgtttgttatgaagattaaaagaagtaatgggtatgaagtgcttagtatgatcctgctttgtaaattaaattgcttatcatcattaaaactacctgcctggagaaaaaaaaaaaaaaaaaaaactcgag

SEQ ID NO: 1589 - DNA, 1866 bp, Homo sapiens
gcggacgcgtgggaaacaagctgctaacaatagtttgcttttacatcttcttaaaagccagactatacctaagccaatgaatggacacagtcacagtgagagaggaagcatttttgaggaaagtagtacacctamaactattgakgaatattcagawaacaaycctagttttacagatgacagcagtggtgatgaaagttcttattccaactgtgttcccatagacttgtcttgcaaacacsgaactgaaaaatcagaatctgaccaacctgtttccctggataacttcactcaatccttgctaaacacttgggatccaaaagtcccagatgtagatatcaaagaagatcaagataccycaaagaattctaagctaaactcacaccagaaagtaacacttcttcaattgcwacttggccataagaatgaagaaaatgtagaaaaaaacaccagcccycagggrgtacacaatgatgtgagcaagttcaatacmcaaaattwtgcaaggacttctgtgatagaaagccccagtacaaatcggactactccagtgagcactccacctttacttacatcaagcaaagcagggtctcccatcaatctctctcaacactctctggtcatcaaatggaattccccaccatatgtctgcagtactcagtctgaaaagctaacaaatactgcatctaaccactcaatggaccttacaaaaagcaaagacccaccaggagagaaaccagcccaaaatgaaggtgcacagaactctgcaacgtttagtgccagtaagctgttacaaaatttagcacaatgkggaatgcagtcatccatgtcagtggaagagcagagacccagcaaacagctgttaactggaaacacagataaaccgataggtatgattgatagattaaatagccctttgctctcaaataaaacaaatgcagttgaagaaaataaagcatttagtagtcaaccaacaggtcctgaaccagggctttctggttctgaaatagaaaatctgcttgaaagacgtactgtcctccagttgctcctggggaaccccaacaaagggaagagtgaaaaaaaagagaaaactcccttaagagatgaaagtactcaggaacactcagagagagctttaagtgaacaaatactgatggtgaaaataaaatctgagccttgtgatgacttacaaattcctaacacaaatgtgcacttgagccatgatgctaagagtgccccattcttgggtatggctcctgctgtgcagagaagcgcacctgccttaccagtgtccgaagactttaaatcggagcctgtttcacctcaggatttttctttctccaagaatggtctgctaagtcgattgctaagacaaaatcaagatagttacctggcagatgattcagacaggagtcacagaaataatgaaatggcacttctagaatcaaagaatctttgcatggtccctaagaaaaggaagctttatactgagccattagaaaatccatttaaaaagatgaaaaacaacattgttgatgctgcaaacaatcacagtgccccagaagtactgtatgggtccttgcttaaccaggaagagctgaaatttagcagaaatgatcttgaatttaaatatcctgctggtcatggctcagccagcgaaagtgaacacaggagttgggccagagagagcaaaagctttaatgttctgaaacagctgcttctctcagaaaactgtgtgcgagatttgtccccgcacagaagtaactctgtggctgacagtaaaaaggaaaggacacaaaaataatgtgaccaacagcaaacctgratttagctttcttctttaaatggactgatgtacagttccct

SEQ ID NO: 1590 - DNA, 1496 bp, Homo sapiens
  misc_feature (2)..(3): n equals a,t,g, or c
  misc_feature (11)..(11): n equals a,t,g, or c
  misc_feature (23)..(23): n equals a,t,g, or c
  misc_feature (28)..(28): n equals a,t,g, or c
annctatacancatacagggaanggtanactgacagtacggtcggattcccgggtcgacccacgcgtccgctgagccattagaaaatccatttaaaaagatgaaaaacaacattgttgatgctgcaaacaatcacagtgccccagaagtactgtatgggtccttgcttaaccaggaagagctgaaatttagcagaaatgatcttgaatttaaatatcctgctggtcatggctcagccagcgaaagtgaacacaggagttgggccagagagagcaaaagctttaatgttctgaaacagctgcttctctcagaaaactgtgtgcgagatttgtccccgcacagaagtaactctgtggctgacagtaaaaagaaaggacacaaaaataatgtgaccaacagcaaacctgaatttagcatttcttctttaaatggactgatgtacagttccactcagcccagcagttgcatggataacaggacattttcatacccaggtgtagtaaaaactcctgtgagtcctactttccctgagcacttgggctgtgcagggtctagaccagaatctgggcttttgaatgggtgttccatgcccagtgagaaaggacccattaagtgggttatcactgatgcggagaagaatgagtatgaaaaagactctccaagattgaccaaaaccaacccaatactatattacatgcttcaaaaaggaggcaattctgttaccagtcgagaaacacaagacaaggacatttggagggaggcttcatctgctgaaagtgtctcacaggtcacagccaaagaagagttacttcctactgcagaaacgaaagcttctttctttaatttaagaagcccttacaatagccatatgggaaataatgcttctcgcccacacagcgcaaatggagaagtttatggacttctgggaagcgtgctaacgataaagaaagaatcagaataaaatgtacctgccatccagttttggatctttttaaaactaatgagtatgaacttgagatctgtataaataagagcatgatttgaaaaaaagcatggtataattgaaacttttttcattttgaaaagtattggttactggtgatgttgaaatatgcatactaatttttgcttaacattagatgtcatgaggaaactactgaactagcaattggttgtttaacacttctgtatgcgtcagataacaactgtgagtagcctatgaatgaaattcttttataaatattaggcataaattaaaatgtaaaactccattcatagtggattaatgcattttgctgcctttattagggtactttattttgcttttcagaagtcagcctacataacacatttttaaagtctaaactgttaaacaactctttaaaggataattatccaataaaaaaaaacctagtgctgattcacagcttattatccaattcaaaaataaattagaaaaatatatgcttacatttttcacttttgctaaaaaaaaaa

SEQ ID NO: 1591 - DNA, 3898 bp, Homo sapiens
cacacttgaagctgaaaaagaaagaagaaaatctgggctatcctcaagagttcagtttcgaaaccaaggttctgagcccaaatatactcaagaactaactctgaagaggcagaaacagaaagtgtgcatggaggaaaccctgtggctacaggataatatcagagataaactgcgtcccattcccataactgcctcagtggagatccaagagccaagctctcgtaggcgagtgaattcacttccagaagttcttccaattctgaattcagatgaacccaagacagctcatattgatgttcacttcttaaaagagggatgtggagacgacaatgtatgtaacagcaaccttaaactagaatataaattttgcacccgagaaggaaatcmagacaaatttwcttatttaccaattcaaaaaggtgtaccagaactagttctaaaagatcagaaggatattgctttagaaataacagtgacaaacagcccttccaacccaaggaatcccacaaaagatggcgatgaygcccatgaggctaaactgattgcaacgtttccagacactttaacctattctgcatatagagaactgagggctttccctgagaaacagttgagttgtgttgccaaccagaatggctcgcaagctgactgtgagctcggaaatccttttaaaagaaattcaaatgtcactttttatttggttttaagtacaactgaagtcacctttgacaccccagatctggatattaatctgaagttagaaacaacaagcaatcaagataatttggctccaattacagctaaagcaaaagtggttattgaactgcttttatcggtctcgggagttgctaaaccttcccaggtgtattttggaggtacagttgttggcgagcaagctatgaaatctgaagatgaagtgggaagtttaatagagtatgaattcagggtaataaacttaggtaaacctcttacaaacctcggcacagcaaccttgaacattcagtggccaaaagaaattagcaatgggaaatggttgctttatttggtgaaagtagaatccaaaggattggaaaaggtaacttgtgagccacaaaaggagataaactccctgaacctaacggagkctcacaactcaagaaagaaacgggaaattactgaaaaacagatagatgataacagaaaattttctttatttgctgaaagaaaataccagactcttaactgtagcgtgaacgtgaactgtgtgaacatcagatgcccsctgcgggggctggacagcaaggcgtctcttattttgcgctcgaggttatggmacagcacatttctagaggaatattccaaactgaactacttggacattctcatgcgagccttcattgatgtgactgctgctgccgaaaatatcaggctgccaaatgcaggcactcaggttcgagtgactgtgtttccctcaaagactgtagctcagtattcgggagtaccttggtggatcatcctagtggctattctcgctgggatcttgatgcttgctttattagtgtttatactatggaagtgtggtttcttcaagagaaataagaaagatcattatgatgccacatatcacaaggctgagatycatgctcagccatctgataaagagaggsttacttcygatgcatagtattgatctacttctgtaattgtgtggattcyttaaacgctctaggtacgatgacagtgttccccgataccatgctgtaaggatccggaaagaagagcgagagatcaaagatgaaaagtatattgataaccttgaaaaaaaacagtggatcacaaagtggaacgaaaatgaaagctactcatagcgggggcctaaaaaaaaaaagcttcacagtacccaaactgctttttccaactcagaaattcaatttggatttaaaagcctgctcaatccctgaggactgatttcagagtgactacacacagtacgaacctacagttttaactgtggatattgttacgtagcctaaggctcctgttttgcacagccaaatttaaaactgttggaatggatttttctttaactgccgtaatttaactttctgggttgcctttrtttttggcgtggctgacttacatcatgtgttggggaagggcctgcccagttgcactcaggtgacatcctccagatagtgtagctgaggaggcacctacactcacctgcactaacagagtggccgtcctaacctcgggcctgctgcgcagacgtccatcacgttagctgtcccacatcacaagactatgccattggggtagttgtgtttcaacggaaagtgctgtcttaaactaaatgtgcaatagaaggtgatgttgccatcctaccgtcttttcctgtttcctagctgtgtgaatacctgctcacgtcaaatgcatacaagtttcattctccctttcactaaaacacacaggtgcaacagacttgaatgctagttatacttatttgtatatggtatttattttttcttttctttacaaaccattttgttattgactaacaggccaaagagtctccagtttacccttcaggttggtttaatcaatcagaattagagcatgggaggtcatcactttgacctaaattatttactgcaaaaagaaaatctttataaatgtaccagagagagttgttttaataacttatctataaactataacctctccttcatgacagcctccaccccacaacccaaaaggtttaagaaatagaattataactgtaaagatgtttatttcaggcattggatattttttactttagaagcctgcataatgtttctggatttcatactgtaacattcaggaattcttggagaaaatgggtttattcactgaactctagtgcggtttactcactgctgcaaatactgtatattcaggacttgaaagaaatggtgaatgcctatggtggatccaaactgatccagtataagactactgaatctgctaccaaaacagttaatcagtgagtcgatgttctattttttgttttgtttcctcccctatctgtattcccaaaaattactttggggctaatttaacaagaactttaaattgtgttttaattgtaaaaatggcagggggtggaattattactctatacattcaacagagactgaatagatatgaaagctgattttttttaattaccatgcttcacaatgttaagttatatggggagcaacagcaaacaggtgctaatttgttttggatatagtataagcagtgtctgtgttttgaaagaatagaacacagtttgtagtgccactgttgttttgggggggcttttttcttttcggaaatcttaaaccttaagatactaaggacgttgttttggttgtactttggaattcttagtcacaaaatatattttgtttacaaaaatttctgtaaaacaggttataacagtgtttaaagtctcagtttcttgcttggggaacttgtgtccctaatgtgtttagattgctagattgctaaggagctgatactttgacagtgtttttagacctgtgttactaaaaaaaagatgaatgtcctgaaaagggtgttgggagggtggttcaacaaagaaacaaagatgttatggtgtttagatttatggttgttaaaaatgtcatctcaagtcaagtcactggtctgtttgcatttgatacatttttgtactaactagcattgtaaaattatttcatgattagaaattacctgtggatatttgtataaaagtgtgaaataaattttttataaaagtgttcattgtttcgtaacacagcattgtatatgtgaagcaaactctaaaattataaatgacaacctgaattatctatttcatcaaaaaaaaaaaaaaaaaaaaaaaaaaaaa

SEQ ID NO: 1592 - DNA, 447 bp, Homo sapiens
  misc_feature (434)..(434): n equals a,t,g, or c
  misc_feature (445)..(445): n equals a,t,g, or c
gcagaacccctgaatcctggaggctcacgcccccagccaaagtagggggactggatttcagcccagtacaaacctcccagggtgcctctgaccccttgcctgaccccctggggctgatggatctcagcaccactcccttgcaaagtgctcccccccttgaatcaccgcaaaggctcctcagttcagaacccttagacctcatctccgtcccctttggcaactcttctccctcagatatagacgtccccaagccaggctccccggagccacaggtttctggccttgcagccaatcgttctctgacagaaggcctggtcctgggacacaatgawtgacagcytcagcaagatcctgctggacatcagctttyctgggcctgggacgaggacccattgggscctggamaacatcaactgggtccccattttatttcntgaggttacantt

SEQ ID NO: 1593 - DNA, 1274 bp, Homo sapiens
  misc_feature (6)..(6): n equals a,t,g, or c
  misc_feature (1234)..(1234): n equals a,t,g, or c
  misc_feature (1268)..(1268): n equals a,t,g, or c
  misc_feature (1273)..(1273): n equals a,t,g, or c
gcccangcggccgcgaggcgccgccgccgccgccgcagccgccggagccgcaatgcctaaaggaggaagaaagggaggccacaaaggccgggcgaggcagtatacaagccctgaggagatcgacgcgcagctgcaggctgagaagcagaaggccagggaagaagaggagcaaaaagaaggtggagatggggctgcaggtgaccccaaaaaggagaagaaatctctagactcagatgagagtgaggatgaagaagatgactaccagcaaaagcgcaaaggcgttgaagggctcatcgacatcgagaaccccaaccgggtggcacagacaaccaaaaaggtcacacaactggatctggacgggccaaaggagctttcgaggagagaacgagaagagattgagaagcagaaggcaaaagagcgttacatgaaaatgcacttggccgggaagacagagcaagccaaggctgacctggcccggctggccatcatccggaaacagcgggaggaggctgcccggaagaaggaagaggaaaggaaagcaaaagacgatgccacattgtcaggaaaacgaatgcagtcactctccctgaataagtaactgcgacccgtgggaggagatgccggggacctgggccgcgctgccaggacctctgctgtgtctcgcccaccctgtgccctggcgccgctgcaacagcccctcatggccaggagccccccatggcctggggcctcctcttcatcttggcacagaaattgtttgggggatggggggggggactgggggaggggtagctgctatctttgagacagaaagrkgyagaagagctttcatttgtctggtagatagatagcatgtaagggggtggttgtcccaggaggcagctgctgacaggtttgctacacacagccccggactgtgttgcctgggtgctcattcagagaggggctatcatctgggagcctgtgcccctgggtcctcgagggtcatggcttgtccctggtcagtcctgtctgactgacctcagggcctcacctctctgcccttccctgcccggttcctactcacctggctagggccagtgcccattttcagccctacccattgatcatttcaagaaacctctgtttactgtgtggcacccaggcaaaacatgctccacaaattcaacttgtatatttggcagattaaacttgacattatcgtaaaaaaaaaaaaaaaaaaaaaaaaaaaaanaaaaaaaaaaaaaaaaaaaaaaaaaaaggggggnggggnt

SEQ ID NO: 1594 - DNA, 498 bp, Homo sapiens
gtcttatttttagaataatttagacaagcaggtagaaaaaacaatgcactgtgtggcataaaaagaaaaacgggaaggattcattgtcctkmsmagtttttctttttatgccacacagtgcattgttttttctacctgcttgtcttatttttagaataatttagaaaaacaaaacaaaggctgtttttcctaattttggcatgaacccccccttgttccaaatgaagacggcatcacgaagcagctccaaaaggaaaagcttgggcggtgcccagcgtgcccgctgcccatcgacgtctgtcctggggacgtggagggtggcagcgtccccgcctgcaccagtgccgtcctgctgatgtggtaggctagcaatattttggttaaaatcatgtttgtgactgtaaccatttgtatgaattattttaaagaaataaaaatcctggaaagaraaaaaaaaaaaaaaaaaaaaaaaaaaaaaaaaaaaaaaaaaaaaaaaaa

SEQ ID NO: 1595 - DNA, 728 bp, Homo sapiens
  misc_feature (663)..(663): n equals a,t,g, or c
aagctaccaagatcaacctctccctttccgctttgggtaatgtcatctctgctctagtggacggcaaaagcactcacattccatatcgggactcaaagcttaccaggctcctccaagattcccttggtggcaatgccaagactgtgatggtggccaacgtggggcctgcctcttacaacgtagaagagactctgaccactctgcgatatgccaaccgtgccaaaaacattaagaacaaaccaagggtcaatgaggaccccaaggatgccctycttcgagaattccaggaagagattgctcggctcaaggcccagctggaaaaacggtccattggtaggaggaagaggcgagagaagcggagggaaggtggtggcagtggtgggggtggggaagaggaggaggaggagggagaagagggtgaggaggaaggggatgataaggatgattactggcgggaacagcaagaaaaactggagattgagaagcgggccattgtagaggatcacagcttggttgcagaggagaagatgaggctgctgaaggagaaagagaaaaagatggaggacctgcggcgggagaaggatgctgccgagatgctgggcgccaagatcaaggtaccatacccgtacccttccttaggcccttgccctgtcactgcttttnctttcatcaaacaacaacaaaaaacataaccatatgagggatgatgtctctcatcagttttggat

SEQ ID NO: 1596 - DNA, 1808 bp, Homo sapiens
gggtgcgcgggcaacttccggtgtgggtgacgagtggtggccgaagcagggggacagcaagggacgctcaggcggggaccatggcggacggcggctcggagcgggctgacgggcgcatcgtcaagatggaggtggactacagcgccacggtggatcagcgcctacccgagtgtgcgaagctagccaaggaaggaagacttcaagaagtcattgaaacccttctctctctggaaaagcagactcgtactgcttccgatatggtatcgacatcccgtatcttagttgcagtagtgaagatgtgctatgaggctaaagaatgggatttacttaatgaaaatattatgcttttgtccaaaaggcggagtcagttaaaacaagctgttgccaaaatggttcaacagtgctgtacttatgttgaggaaatcacagaccttcctatcaaacttcgattaattgatactctacgaatggttaccgaaggcaagatttatgttgaaattgagcgtgcgcgactgactaaaacattagcaactataaaagaacaaaatggtgatgtgaaagaggcagcctccattttacaggagttacaggtggaaacctacgggtcaatggaaaagaaagagcgagtggaatttattttggagcaaatgaggctctgctagctgtgaaggattacattcgaacacaaatcatcagcaagaaaattaacaccaaatttttccaggaagaaaatacagagaaattaaagttgaagtactataatttaatgattcagctggatcaacatgagggatcctatttgtctatttgtaagcactacagagcaatatatgatactccctgtatacaggcagaaagtgaaaaatggcagcaggctctgaagagtgttgtactctatgttatcctggctccttttgacaatgaacagtcagatttggttcaccgaataagtggtgacaagaagttagaagaaattcccaaatacaaggatcttttaaagctttttaccacaatggagttgatgcgttggtccacacttgttgaggactatggaatggaattaagaaaaggttcccttgagagtcctgcaacggatgtttttggttctacagaggaaggtgaaaaaaggtggaaagacttgaagaacagagttgttgaacataatattagaataatggccaagtattatactcggataacaatgaaaaggatggcacagcttctggatctatctgttgatgagtccgaagcctttctctcaaatctagtagttaacaagaccatctttgctaaagtagacagattagcaggaattatcaacttccagagacccaaggatccaaataatttattaaatgactggtctcagaaactgaactcattaatgtctctggttaacaaaactacgcatctcatagccaaagaggagatgatacataatctacaataagggtcttagtgctttagaaaaaagttaaaattggaagtcattaaaaaaagactgttataatggtgtatatgttggggttttttttctaagcttctttgtcttaaattttaaaatagtgaatatgtttgagactccctttgacctttcagttccccaagttcattgttaactttgcatttgcaattggtgcaaaaatacagatttctgtcgtctgaatacacaaaaagttgtgtcataacttacccagatatgtttttctatcatttgaaacctttttagctactgtttgttttcattcaactaacaaacatattccaataataaaagcagtatatacataaaaaaaaaaaaaaaaaaa

SEQ ID NO: 1597 - DNA, 377 bp, Homo sapiens
  misc_feature (30)..(30): n equals a,t,g, or c
  misc_feature (201)..(201): n equals a,t,g, or c
  misc_feature (341)..(341): n equals a,t,g, or c
aattcggcagagtgcaaccctcgcttcagnaatgccaccattgtctgcaactcattggacggcagcaactgggggcaagaacaacgggaagatcacctgtgcttcagcccagggtcagaggtcaaggtgaggtcaaagggggaaagggcactgggggtgatgtcaaggggagggcccagatggaagagagcctggcctggnacacagtggctggccttgtttgagccatcaggcactgccctggcccatttccagggcctcctgcctcctttgacaccctccctccccacagttcacagtgayctttgagagtgacaaattcaaggtgaaactgccagatnggcacgaactgacttttcccaacaggctgggtcaca

SEQ ID NO: 1598 - DNA, 1486 bp, Homo sapiens
gcggacgcgtggggggcggggtgtcgtttcctttcgctgatgcaagagcctagtgcggtggtgggagaggtatcggcaggggcagcgctgccgccggggcctggggctgacccgtctgacttcccgtccgtgccgagcccactcgagccgcagccatgtctggggacgagatgatttttgatcctactatgagcaagaagaaaaagaagaagaagaagccttttatgttagatgaggaaggggatacccaaacagaggaaacccagccttcagaaacaaaagaagtggagccagagccaactgaggacaaggatttggaagctgatgaagaggacactaggaaaaaagatgcttctgatgatctagatgacttgaacttctttaatcaaaagaaaaagaagaaaaaaactaaaaagatatttgatattgatgaagctgaagaaggtgtaaaggatcttaagattgaaagtgatgttcaagaaccaactgaaccagaggatgaccttgacattatgcttggcaataaaaagaagaaaaagaagaatgttaagttcccagatgaggatgaaatactagagaaagatgaagctctagaagatgaagacaacaaaaaagatgatggtatctcattcagtaatcagacaggccctgcttgggcaggctcagaaagagactacacatacgaggagctgctgaatcgagtgttcaacatcatgagggaaaagaatccagatatggttgctggggagaaaaggaaatttgtcatgaaacctccacaagtcgtccgagtaggaaccaagaaaacttcttttgtcaactttacagatatctgtaaactattacatcgtcagcccaaacatctccttgcatttttgttggctgaattgggtacaagtggttctatagatggtaataaccaacttgtaatcaaaggaagattccaacagaaacagatagaaaatgtcttgagaagatatatcaaggaatatgtcacttgtcacacatgccgatcaccggacacaatcctgcagaaggacacacgactctatttcctacagtgcgaaacttgtcattctagatgttctgttgccagtatcaaaaccggcttccaggctgtcacgggcaagcgagcacagctccgtgccaaagctaactaatttgctaatcactgattttgcaaagcttgttgtggagatgtggctggacaggtttgccatcagagtggatataccgttgtattaaaaacaagataaaaaagctgccaagatttttggcgagtggttggtctgaagtccttgcaagacgctgatgctcaagctgttgacatactcattgcctactttaacacctgtcagagaaacgtgatatggggtaaggaggtgcttttttaaaatcgttcatagacttctgtaaaatgcaagataaattaaagttattataacagtgaaaaaaaaaaaaaaaaaaaaaaaaaaaaaaaaaaaaaaaa

SEQ ID NO: 1599 - DNA, 998 bp, Homo sapiens
cgttacacatgacaccagtgcctttgtttcattgggctgggctctctggaaggtgtgctgctgcctgagctgctggaaaagcactgacaggtgtttgctagaaaagcactcctggagcttgccaccagcttggacttctagggactttcctctcagccaggaaggattttgatattcatcagaaatacctccagaagattcaaggagctgtagaggtgaagtaagcctgtgaaggaccagcatgggaatcctatactctgagcccatctgccaagcagcctatcagaatgactttggacaagtgtggcggtgggtgaaagaagacagcagctatgccaacgttcaagatggctttaatggagacacgcccctgatctgtgcttgcaggcgagggcatgtgagaatcgtttccttccttttaagaagaaatgctaatgtcaacctcaaaaaccagaaagagagaacctgcttgcattatgctgtgaagaaaaaatttaccttcattgattatctactaattatcctcttaatgcctgtyctgcttattgggtatttcctcatggtatcaaagacaaagcagaatgaggctcttgtacgaatgctacttgatgctggtgtcgaagttaatgctacagattgttatggctgtaccgcattacattatgcctgtgaaatgaaaaaccagtctcttatccctctgctcttggaagcccgtgcagaccccacaataaagaataagcatggtgagagctcactggatattgcacggagattaaaattttcccagattgaattaatgctaaggaaagcattgtaatccttgtgaccacaccgatggagatacagaaaaagttaacgactggattctatcttcattttagacttttggtctgtgggccatttaacctggatgccaccattttatggggataatgatgcttaccatggttaatgttttggaagagctttttatttatagcattgtttactcagtcaag

SEQ ID NO: 1600 - DNA, 2122 bp, Homo sapiens
  misc_feature (22)..(22): n equals a,t,g, or c
  misc_feature (1306)..(1306): n equals a,t,g, or c
tctgcctcattctccagaggangacaattgagtttcactgatttgggcttaccacctactgaccacctccaggcctcatttggatttcagacctttcaacccagtggcatattattagatcatcagacatggacaaggraactgcaggtcactctggaagatggttacattgaattgagcaccagcgatagcgrcggcccaatttttaaatctccacagacgtatatggatggtttactgcattatgtatctgtaataagcgacaactctggactacggcttctcatcgatgaccagcttctgagaaatagcaaaaggctaaaacacatttcaagttcccggcagtctctgcgtctgggcgggagcaattttgagggttgtattagcaatgtttttgtccagaggttatcactgagtcctgaagtcctagatttgaccagtaactctctcaagagagatgtgtccctgggaggctgcagtttaaacaaaccaccttttctaatgttgcttaaaggttctaccaggtttaacaagaccaagacttttcgtatcaaccagctgttgcaggacacaccagtggcctccccaaggagygtgaaggtgtggcaagatgcttgctcaccacttcccaagacccaggccaatcatggagccctccagtttggggacattcccaccagccacttgctattcaagcttcctcaggagctgctgaaacccaggtcacagtttgctgtggacatgcagacaacatcctccagaggactggtgtttcacacgggcactaagaactcctttatggctctttatctttcaaaaggacgtctggtctttgcactggggacagatgggaaaaaattgaggatcaaaagcaaggagaaatgcaatgatgggaaatggcacacggtggtgtttggccatgatggggaaaaggggcgcttggttgtggatggactgagggcccgggagggaagtttgcctggaaactccaccatcagcatcagagcgccagtttacctgggatcacctccatcagggaaaccaaagagcctccccacaaacagctttgtgggatgcctgaagaactttcagctggattcaaaacccttgtataccccttcttcaagcttcggggtgtcttcctgcttgggtggtcctttggagaaaggcatttatttctctgaagaaggaggtcatgtcgtcttggctcactctgtattgttggggccagaatttaagcttgttttcagcatccgcccaagaagtctcactgggatcctaatacacatcggaagtcagcccgggnaagcacttatgtgtttacctggaggcaggaaaggtcacggcctctatggacagtggggcaggtgggacctcaacgtcggtcacaccaaagcagtctctgtgtgatggacagtggcactcggtggcagtcaccataaaacaacacatcctgcacctggaactggacacagacagtagctacacagctggacagatccccttcccacctgccagcactcaagagccactacaccttggaggtgctccagccaatttgacgacactgaggatccctgtgtggaaatcattctttggctgtctgaggaatattcatgtcaatcacatccctgtccctgtcactgaagccttggaagtccaggggcctgtcagtctgaatggttgtcctgaccagtaacccaagcctatttcacagcaaggaaattcaccttcaaaagcactgattacccaatgcacctccctccccagctcgagatcattcttcamtyaggacacaaaccagacaggtttaatagcgaatctaattttgaattctgaccatggatacccatcactttggcattcagtgctacatgtgtattttatataaaaatcccatttcttgaagataaaaaaattgttattcaaattgttatgcacagaatgtttttggtaatattaatttccactaaaaaattaaatgtcttttaagaaacattcttttccacttgttaaaaaaattaaatatattttaaagcactttaagaatatgaaactttcatatatgttaaaggattataatttatggaattaaaaaatgcagtgtagtccttaaaaaaaa

SEQ ID NO: 1601 - DNA, 529 bp, Homo sapiens
  misc_feature (437)..(437): n equals a,t,g, or c
  misc_feature (480)..(480): n equals a,t,g, or c
  misc_feature (491)..(491): n equals a,t,g, or c
tttctaatcctatctggggagctcctggccaggataatatatttgcagataattctggaccagagacttggtgcggggttaacaccttcatccagattgggtgccagcatacattttctggtgggccttaacatccctcctgcttttaggagaattcacagaacctactgttcctttcagatgaccttttggaaaatagttccctttgccaacagaaacatgccagaaggaatcttctcatcttttatctaactatatgtacagctctcccctcccttgtccttgaaagtaggatatagcgaaaggcgagtccaggagctcaggaagaagagatgcactatatgtttacacaattaattcatcccttaatttaagtcattttcatgtgtgtgagtttgctggttgtgaaatactttgtcctaagagatttatctttntacagattttctagaaatgttttaggttactaaaaacagggtnggggcaaactntgttaaactggtacaattttataggtggaaagaaaaaa

SEQ ID NO: 1602 - DNA, 1216 bp, Homo sapiens
ggtgctacctggctctcctgtctctgcagctctacaggtgaggcccagcagagggagtagggctcgccatgtttctggtgagccaatttggctgatcttgggtgtctgaacagctattgggtccaccccagtccctttcagstgctgcttaatgccctgctctctccctggcccaccttatagagagcccaaagagctcctgtaagagggagaactctatctgtggtttataatcttgcacgaggcaccagagtctccctgggtcttgtgatgaactacatttatcccctttcctgccccaaccacaaactctttccttcaaagagggcctgcctggctccctccacccaactgcacccatgagactcggtccaagagtccattccccaggtgggagccaactgtcagggaggtctttcccaccaaacatctttcagctgctgggaggtgaccatagggctctgcttttaaagatatggctgcttcaaaggccagagtcacaggaaggacttcttccagggagattagtggtgatggagaggagagttaaaatgacctcatgtccttcttgtccacggttttgttgagttttcactcttctaatgcaagggtctcacactgtgaaccacttaggatgtgatcactttcaggtggccaggaatgttgaatgtctttggctcagttcatttaaaaaagatatctatttgaaagttctcagagttgtacatatgtttcacagtacaggatctgtacataaaagtttctttcctaaaccattcaccaagagccaatatctaggcattttcttggtagcacaaattttcttattgcttagaaaattgtcctccttgttatttctgtttgtaagacttaagtgagttaggtctttaaggaaagcaacgctcctctgaaatgcttgtcttttttctgttgccgaaatagctggtcctttttcgggagttagatgtatagagtgtttgtatgtaaacatttcttgtaggcatcaccatgaacaaagatatattttctatttatttattatatgtgcacttcaagaagtcactgtcagagaaataaagaattgtcttaaatgtcatgattggagatgtcctttgcattgcttggaaggggtgtacctagagccaaggaaattggctctggtttggaaaaattttgctgttattatagtaaacatacaaaggatgtcaaaaaaaaa

SEQ ID NO: 1603 - DNA, 689 bp, Homo sapiens
  misc_feature (565)..(565): n equals a,t,g, or c
  misc_feature (582)..(582): n equals a,t,g, or c
  misc_feature (620)..(620): n equals a,t,g, or c
  misc_feature (649)..(649): n equals a,t,g, or c
  misc_feature (670)..(670): n equals a,t,g, or c
  misc_feature (680)..(680): n equals a,t,g, or c
ctcaggaagagtgagattttatatttgacaataaagtgttagactccatttctaaataccagacttcaaaagataaggttcaaaagtgttataagaagatattcctttttttgtcctagagaacttattttcctgtgaaaatgcctaccacaaagaagacattgatgttcttatcaagctttttcaccagccttgggtccttcattgtaatttgctctattcttgggacacaagcatggatcaccagtacaattgctgktagagactctgcttcaaatgggagcattttcatcacttacggactttttcgtggggagagtagtgaagaattgagtcacggacttgcagaaccaaagaaaaagtttgcagttttagagatactgaataattcttcccaaaaaaactctgcattcggtgactatcctgttcctggtcctgagtttgatcacgtcgctgctgagctctgggtttaccttctacaacagcatcagcaacccttaccagacattcctggggcccgacgggggtgtacacctggaacgggctcgggcatccttcgttttgngaccatgatactgttgnggcgaacacgcagtccaaccaattttccgaaagtggtncaaatgctttaaccggaaacaccagtaanggaccgaccacagttccgggncctgtttggntaaaacggt

SEQ ID NO: 1604 - DNA, 946 bp, Homo sapiens
gcccacgcgtccgctccatttctaaataccagacttcaaaagataaggttcaaaagtgttataagaagatattcctttttttgtcctagagaacttattttcctgtgaaaatgcctaccacaaagaagacattgatgttcttatcaagctttttcaccagccttgggtccttcattgtaatttgctctattcttgggacacaagcatggatcaccagtacaattgctgttagagactctgcttcaaatgggagcattttcatcacttacggactttttcgtggggagagtagtgaagaattgagtcacggacttgcagaaccaaagaaaaagtttgcagcatccttcgtttttgtgaccatgatactgtttgtggcgaacacgcagtccaaccaactctccgaagagttgttccaaatgctttacccggcaaccaccagtaaaggaacgacccacagttacggatactcgttctggctcatactgctcgtcattcttctaaatatagtcactgtaaccatcatcattttctaccagaaggccagataccagcggaagcaggagcagagaaagccaatggaatatgctccaagggacggaattttattctgaattctctttcatctcattttggcgttgcatctattgtacatcagccctgagtagtaactggttagcttctctggacaattcagcatggtaacgtgactgtcatctgtgacagcatttgtgtttcatgacactgtgttcttcattgatgctgtactcctgaaaatttttcccacaaggttggggaaatgaatgggaaatgtcgctggtctgtgtggtattcaaagcagtagtatcatgatgagcgtaacgacccttctgacctggtctcacgatctgaaataataaaaggctgtgtcatgtttaaaaaaaaaaaaaaaaaaaaaaaaaaaaaaaaa

SEQ ID NO: 1605 - DNA, 875 bp, Homo sapiens
cctacttgcagctcctgcctttggaaatggatgacacagaaacaggccttctcagtgccatctgcttaatctgtggagaccgccagaccttgaggaaccgacaaaagtagataagctacaagaaccattgctggaagcactaaaaatttatatcagaaaaagacgacccagcaagcctcacatgtttccaaagatcttaatgaaaatcacagatctccgtagcatcagtgctaaaggtgcagagcgtgtaattaccttgaaaatggaaattcctggatcaatgccacctctcattcaagaaatgctggagaattctgaaggacatgaacccttgaccccaagttcaagtgggaacacagcagagcacagtcctagcatctcacccagctcagtggaaaacagtggggtcagtcagtcaccactcgtgcaataagacattttctagctacttcaaacattccccagtaccttcagttccaggatttaaaatgcaagaaaaaacatttttactgctgcttagtttttggactgaaaagatattaaaactcaagaaggaccaagaagttttcatatgtatcaatatatatactcctcactgtgtaacttacctagaaatacaaacttttccaattttaaaaaatcagccatttcatgcaaccagaaactagttaaaagcttctattttcctctttgaacactcaagattgcatggcaaagacccagtcmaaatgrtttacccctggttaagtttctgaagactttgtacatacagaagtatggctctgttctttctatactgtatgtttggtgctttccttttgtcttgcatactcaaaataaccatgacaccaaggttatgaaatagactactgtag

SEQ ID NO: 1606 - DNA, 1257 bp, Homo sapiens
  misc_feature (1252)..(1252): n equals a,t,g, or c
  misc_feature (1254)..(1254): n equals a,t,g, or c
  misc_feature (1256)..(1256): n equals a,t,g, or c
gcccacgcgtccgcccacgcgtccgcctgggtgccagcgccccagaggtcccgggacagcccgaggcgccgcgcccgccgccccgagctccccaagccttcgagagcggcgcacactcccggtctccactcgctcttccaacacccgctcgttttggcggcagctcgtgtcccagagaccgagttgccccagagaccgagacgccgccgctgcgaaggaccaatgagagccccgctgctaccgccggcgccggtggtgctgtcgctcttgatactcggctcaggccattatgctgctggattggacctcaatgacacctactctgggaagcgtgaaccattttctggggaccacagtgctgatggatttgaggttacctcaagaagtgagatgtcttcagggagtgagatttcccctgtgagtgaaatgccttctagtagtgaaccgtcctcgggagccgactatgactactcagaagagtatgataacgaaccacaaatacctggctatattgtcgatgattcagtcagagttgaacaggtagttaagcccccccaaaacaagacggaaagtgaaaatacttcagataaacccaaaagaaagaaaaagggaggcaaaaatggaaaaaatagaagaaacagaaagaagaaaaatccatgtaatgcagaatttcaaaatttctgcattcacggagaatgcaaatatatagagcacctggaagcagtaacatgcaaatgtcagcaagaatatttcggtgaacggtgtggggaaaagtccatgaaaactcacagcatgattgacagtagtttatcaaaaattgcattagcagccatagctgcctttatgtctgctgtgatcctcacagctgttgctgttattacagtccagcttagaagacaatacgtcaggaaatatgaaggagaagctgaggaacgaaagaaacttcgacaagagaatggaaatgtacatgctatagcataactgaagataaaattacaggatatcacattggagtcactgccaagtcatagccataaatgatgagtcggtcctctttccagtggatcataagacaatggaccctttttgttatgatggttttaaactttcaattgtcactttttatgctatttctgtatataaaggtgcacgaaggtaaaaagtattttttcaagttgtaaataatttatttaatatttaatggaagtgtatttattttacagctcattaaacttttttaaccaaamaraananana

SEQ ID NO: 1607 - DNA, 941 bp, Homo sapiens
gcaccacagcgctccagcctggtcgacagagtgagactccatctcaagaaaataaaaataaagttgttctctgaagagcaaatgtctcattccagtaatgacccactcagcaggaatatggtggagttcagtccaattcaggtcagccatatccaaaagaccacaagtcattactaagttgagcaaaagagtttttatctattagcagaaagggcctctctggcagcagagattaaaaactggcccaacttcatttccatacttcagggaacagcaaattgaggatttacttatctaggacttgaattccttctttgggaccaagttaataaaagaccaagaaactcctgattaaactggataatgaaggattctgtagacagggctgcacgtatcggctttgtttgacttctcttttctcagttaacatctcagagctagaacattccacattccccagcagcgtgtgggggctgactaaagtttacaattccaactaaaaatcaccctgcttctggcttatctgaatcccttacccaccccaccccaccaccctactcctatttattcagcaccacactacccaggaaatacactagcaaattgtgcaatggaataaaatccacactttagattcttgcaactgtatcatatgtaatagtatcactttttctacattttggtcaaataaataggagtagggtggtggggtggggtgggtaagggattcagataagccagaagcagggtgattttwagttggaattgtaaactttagtcagcccccacacgctgctggggaatgtggatgttctagctctgagatgttaactgrgaaaagagaagtcaaacaaagccgatacgtgcagccctgtctacagaatccttcattatccagtttaataaggagtttcttggtcttttattaacttgggtcgacc

SEQ ID NO: 1608 - DNA, 505 bp, Homo sapiens
agcggccgcccttttyttttttttttaatatcgatctcttttaatttttaggccaattttgagtagtcaaagtcagagcagtcaatctgtgttgtgagccgaggcacagctgcagaagcgtgtctgaggtgtccggtggaggtggcagccgagctctgggactaatcaccgtgctggggacggcaccgcgtcaggatgcaggcagatccctgcagaagtgtctaaaattcacactcctcttctggagggacgtcgatggtattaggatagaagcaccaggggaccccacgaacggtgtcgtcgaaacagcagcccttatttgcacactgggagggcgtgacaccaggaaaaccacaattctgtctttcacggggggccactgtacacgtctctgtctgggcctcggccagggtgccgagggccagcatggacaccaggaccagggcgcagatcaccttgttctccatggtggccattgcctcctctctgctccaaaggcgacccc

SEQ ID NO: 1609 - DNA, 280 bp, Homo sapiens
  misc_feature (7)..(7): n equals a,t,g, or c
gaaagtnccggtccggaattcccgggtcgacccacgcgtccggattagtcccagagctcggctgccacctycaccggacacctcagacacgcttctgcagctgtgcctcggctcacaacacagattgactgctctgactttgactactcaaaattggcctaaaaattaaaagagatcgatattaaaaaaaaaaaaaaaggaaaaaaaagggcggccgtctaagaggatccaagcttacgtaacgcgtgcatgcgaaggtcatagctcttctatagtgtca

SEQ ID NO: 1610 - DNA, 1529 bp, Homo sapiens
ttttttttttttkgcctttttaagagacttttatttgagtggttcttacaaagattgttgcaatatgaaagtcatttgtttgatagaaatatcaagctgtcttgtcaaacacactgaagtaacccaaaaatatatttcagagctcacagagcttaaaaagagcaaagattatatgcaaccagacaaaacctatttctgcatttcctatttctttctcagactgctttgcctaccagactctcacgtttaaacatcttcaggaaatgcagggatcattttgtttggaattttaagacacaccagaacacatagtatttacaaagaaacttttacagatacattaattgaaaagataccatcaagaaatataattttgaaatctccctttcttgccaattgatcagaatgcaagatgagatgctaaccaaacagccctttagctgtcttgtatttccatacactaaatgtgtatttcagaaactgctcaaccatcagccaaatatcaacattagtgaaatgtgaaatgtaaccactgtgtaaaaagttaggcttctgaaacattaaaaacattacatccctggtctgcctttttacagaaagcacatttgttctcctagagctattcctatagttcattaattttctacatgaacattttaaaaggcagaacaagagaacagttttgtatacagtgggatttactatttagggagaatgagcacactgcattcctgttaacatttttattttttcaaggtaacaggaaattgcatacaaatgacagtagatccttgcctctttatttttatctaaataaaagataactcaagatgaattctcaagaaagaaaaaaagctatatacataagggactatatcttccttcatcgtctacttggaaccagtagctgtgttgctgtcatagaatcaggaaacaggttgtggtaagttggaagaggtacatatgctgctgttatcattttaccagcaaaccacctgccatgcaatgcattgacagcagcaatagctgcagcaattgatgggcacttcacatacacattgccctgagctgaatttttgtcaacataaatatgaataactcctccatgtttattacattcttcaatcacatcatccttaatctcggtatcccatccaacttcttcttctgtttgagggttaaacatgttagagagttggaaacattgtgttgcaagtggctgaacagaggcagctgcagctaaagctgaagcttcagtctgctgggaaagtcttgtttgcaaatctataacaaaagagaattctgccacagcaccaaatgccaaagagccactcatctgtagagcttgctgtgctgctggcggaatctgcaaacctgtaccctctgcaagtcttgccattaactgaagacgaccagttgttcccaaatcaattccagtcctttccagttcatcactgtccaaaaatgaactagcactcgaagcatcagtacgttcagtaacatgaccaactttcattggtcttcctgct

SEQ ID NO: 1611 - DNA, 3096 bp, Homo sapiens
gagagagctcagatggcccttttaagggggctccaagaaccaacatcactgctcttttagataaacctctgccctccactccttgcttgagtgggttaaaggaactaacagttgtccctttaggaggacaaaatggggtcaagaggacacagaagagttgtatagcaccagattggttccaaatagttaatggatgtgtgcacattttctgttcagggattaagaccagaatatcagtggatttgttttccccaccaagtggcctcttagactagtcattaacttatgattagctctaaagatttcaaatagtggcagacagtgtcttctgaatgtaagttttgagaaatacgagtctgtcagagcggccataagccataaagagtcaatctcttaattatatttttcatcatgtaaacaagtttcccatttccctttcttagattgcaccagtgaaggagatgttttgcaaagattcagagaactaatttttcactggataagacctgagtaacccagaccccccaccgtggttcttttcacagccctcgactttgcacttaaaaagggatattgtaaatgaaaggctgcagtgccagttttaagaaagaatttctgtgaagtgtgaggactctggagtctagctcacataaagagagtgttatataaaaatccgacagctgaactaggttgctcttttttggcagggagtggggatgagatttgacaccaatatgggcaaaattagataaccttttggttaatataaatgattttgatttggaggcctaatttgtagattgtgaaagcagcttttagtttaacttattcacagaccccttataattaccatgttttttttttcttcctaaatctcttggttcagcttgtgaatcttacgtgcccgtaaagttgggatgttgaattggctcttctttgttctggcagtgagtcaagtgtccagcattttttcataagtgttttttaaaattgttctccagcattttatggctcctccctcccatgtcctcagacccagcaaaagcgtagaggcagaattagaggcctctccaggccagctcctctgcccacatgtcatacaaggtgtgaatttgagcacagtccaraaatggagacatcccacccccagttgaataatggcccattcatgccaaccttgccaacacggagagggcagagatgcactagaagaccttcatcctccccttcctctgccccaagtcactacagttggttctattgaagccagtctttaagaaacctgggttaaagacaccagcacttctgcttgctgggctggctggacctgtgaagccatgggcaggtagtgccctcttgagagtcattttatttggccaccttcaggtgagactatccatagacacatgctaggataggccccgctgggagggcagttacaggagagagtaggtggtggtgacgtgagggctgtgaaggatccagagacaagacttagatgtttcgttcattcactcactcattcagttactcctaagacttttcagtttcataaggaagagtgttgcctgaggccctagggaatattggggaatagaagggattgaggaaacattaataatagttattcaaaagacccaaatgcttatacttctctctcccttcttctctctctgacacacacacacacacacacacacacacacacacacgtgcacattcctcccttacatgctcatttgtgccttaaatgtgccttataggtaaatccaggatgactgaggaatccctcgtcactgggagattttgtatatattcttttattattagattgagttgggtgtggggaaaaatttttttctgaaggctcaaaagtggtttcctaaaagtgagccactatcagatttgcacatcaggagaaaagaaatagggttacgtccattaggaaaatcccagtttgcaggagtgcaatcacatcaaaaaaacaaccagccaggattaaaggtattataaatcctcatagcggaacatttctcagggcaaaggaacctggctcatttgaagattaatgttccatgcctttgtggtcaaasggtcagcacttaacacaggaaaaaactaggtgttgttttgttttgttattttggacaacataaaattcaggaatgttttatttagccttggtttctagaaggaagggaaataatatttcttgagcatttactagggtgttgcgtgctgtgctaagtaaattttaagtctttcagttttatagatacggaaaacaagggtgactctttaccacaggatgaataaagaactaagtaatatgggaaatgcagcaatttctggactagctgagccgattccttcctgtgagcacactgtaagctttcaagttctctgggcaggaattacagcacctgtcccctgcaatggccctgctgtgtgatgctcatcgcttcccttcgtgctggagcagtcccccaggtgtccatctcctatctttttgttccaatcttctgtgagttccagctagcaggctttacatctggggaaaggaaaaccaggggttttagctctgttctctgctcccatccttcgctcaccagctgagtgagaacatgaactttttgcaccatgtacccatggcttacactacttagaaaatcaccttttcagataaaacagtttatgagttcatagagaacaccagcactctttgacaaaactgtgagtgaccctttttaaacaatgctgagcaggccctgagctataatcaacggtgagctttaatgtctatgctgacagttaggttttgctctcttttgtaacaggttacgtagaccagcagtgtttaaatctaaatacgttgtgagtctgttatctgtcctatcgcgttttttaaatgactttttattctttatcatagctaagtaaataccaaaaaaaaaaaaaagctttgtaggacacttgtacttagtttgggaaaaaaaaataaattgaaattgttatgcttttgtatttccatttcttgcaaataaatattttttcttaaatagtaagatgttgcccagtctttataatcttggtact

SEQ ID NO: 1612 - DNA, 336 bp, Homo sapiens
gtgctttgtgctttgtgcatgtggtaggcagaacactaccatatgtccccacatacttacactagaccttggagcaagagcaagaacagcaaaagcacagcgcttttgaacccaaaagacaagctcccttcttcctgcgttgtccctccagctscctctgctgaccaggtttagcatcatgtgctctgtaaaggaggaattctggagagtccagtccattattacagagctagtactgaagggtgagtttggagttaagaggcaataaattgataactggcacagaagccaaatataagagtattgactaaataatagctaagtacaagaacacag

SEQ ID NO: 1613 - DNA, 1035 bp, Homo sapiens
gtgcatcggcttcgagtcagcaattctgtctaccttcttgtccctgatgcctataaatttcatctrgtctttgcgtgtatgtggggataccatggacaagarccctctgaagttcatarctctgtcctgtcacaccaaaggtagcatctttggaaagtctgaggccttgcctagggagatggattgtatatacccagttgtcacataatgtaaggaagagaagggaatgttgacctttcagcctcagggcaatggcaccagggagtattatggaaactcttaaattcaacttccaggtattccttgggtggtaactagacaatgaatacatacaaggctgacatgatggrattctgtcctcaggggtacttcggtccttggtggaagcatctagctcaggtgtgtcggtactgagcctgtgtgagaaaggtgatgccatgattatggaagaaacagggaaaatcttcaagaaagaaaaggaaatgaagaaaggtaaaaaaaaaaaaatccctcactaattttccgtttgacccttatttggtcctatatgtttttatttttttcactgtaatgacgcaycccaccccagctctggctgaggtatttggaaatttggwatggcaagtgggatacaagcagtttcctacctaatccaaactgatgaaacttaagcaagaccctgaaaaaatccttctacatttctgaagggcactagggctcccgggagacagcaaggcagtaggctgatgattctttctttacaggtattgcttttyccaccagcatttcggtaaataactgtgtatgtcacttctcccctttgaagagcgaccaggattatattctcaaggaaggtgacttggtaaaaatgtaaggttaaaccgttttaaagcatttttctttttttaaagcatttacaaaatgccagttcctaaatgcagtactctgatcttgcctttcagtgaccttggggtccatgtggatggcttcatcgctaatgtagctcacacttttgtggttgatgtagctcagggg

SEQ ID NO: 1614 - DNA, 2231 bp, Homo sapiens
cccacgcgtccggcacagacagcacttccatatgccatgaatagcgagttctcaagtgtcttagctgcacagctgaagcatcactctgagaataagggcctagacaaagtgatggagactcaagcccaagtggatgaactgaaaggaatcatggtcagaaacatagatctggtagctcagcgaggagaaagattggaattattgattgacaaaacagaaaatcttgtggattcttctgtcaccttcaaaactaccagcagaaatcttgctcgagccatgtgtatgaagaacctcaagctcactattatcatcatcatcgtatcaattgtgttcatctatatcattgtttcacctctctgtggtggatttacatggccaagctgtgtgaagaaataggaaagaagaagttaccattaaccaaggatatgagagaacaaggagttaaaagcaatccatgtgactcaagcctttcacatactgacagatggtatctgccagtctcttcaaccctcttctcactttttaaaatcttgttccatgcctccaggtttatctttgtcttatctaccagtttattcctgtgaacttcagattgaaccattcattgcagcagtagccttaaaaaggcttttgtttatttctttggtttgttaactagtgtcatctatttagagaaacatttttgtttttaattgctcaaagctgtcgccgctagtcttatgagctatctactaaaactatggagaaactttgtatgtgcacacaaaagtattcaagagacagtattgctaacatctcatcttaatgtcttttgttattgagaagttttaggtgcttcaaaacaatataaatggataatagttgttatttggggaattgtaatgatgttggtgctgcttccttctaagagctcagacaagtaaagtatgaaacattcttatttcagttagatggggaacattttgctagcccattagaagcacacagaattatccttgtcctcctaatattgactttcaggaataaagttcagtgtgctgatcattcacaatacagtggatagcttgatatcttctgttttcccattgcagttgatttgagaagatgaaggtttaaatattgttgaaagttgcagttttttaaatgtgttcctttttcttctgtgaatatttagggcaatcgtgtcgctaatagaatatgtagtagagggggtggggaggtaaattcctctgacttgccaaagaaaaagaagggaaccacagtggatatgctagcattttagctgtgcaaagggaggtagtgtgggaaaagtgtttccattctgggaaaagcccaaaccgaatacggtcagcagtcaactccagggtttgggcttgattcctgttgaataatagttttgagcattctttgtggttaaataaattcttaaatctgcctagttttgatgaattcttttgtgaaacttgaaagagaatagacagtatgacatatagaattaatacaaaacagtttaacaaccatttaactgcagtgtaagaaaattggactgtaatcatatcgctactggcatctgttatctagtatgcatttctggtgtgtatctgaaaggaagacattttctaccctagatccaattgcatttatttatcaataagtgccattaaattgaaattatattacattttacactttctcaatgaatgaacaaattagtctgtagaatctagccacctgtttagcctagtcatgtgccttgaacatatatgtgtcccataatctggctcatggtacctgttcttctatccaaacctttcaattcatgctacctgattcatttatttgacatagatcttaggcccacttgaactcttttcttgtttatctagcatagcacaaacgtttttccagtcttctttatcaacactaatgcctcttaattgcatcagtatttcctattggaaaatacatctgttccagaaaaacatttggcattcctgaataatttccaaatgtttttaatccaaagaaaaaggtttaaagcttatttccctttcttatacacacctgaataaaattgatgtgcatgttttagggatcaattacctaactgttccttggtctatttatgtataagaatgctttttaaagcacatgtctcattttaaatgacgcacaaactgaagatgttaataaaatttaagagtaatacaatgaaaaaaaaaaaaaaaaaa

SEQ ID NO: 1615 - DNA, 679 bp, Homo sapiens
  misc_feature (590)..(590): n equals a,t,g, or c
  misc_feature (595)..(595): n equals a,t,g, or c
gaattttggcatcaaggacaaacccaccttcatcaaagggattggagctggagggagcatcactgggctgaagtttaaccctctcaataccaaccagttttacgcctcctcaatggagggaacaactaggctgcaagactttaaaggcaacattctacgagtttttgccagctcagacaccatcaacatctggttttgtagcctggatgtgtctgctagtagccgaatggtggtcacaggagacaacgtggggaacgtgatcctgctgaacatggacggcaaagagctttggaatctcagaatgcacaaaaagaaagtgacgcatgtggccctgaacccatgctgtgattggttcctggccacagcctccgtagatcaaacagtgaaaatttgggacctgcgccaggttagagggaaagccagcttcctctactcgctgccgcacaggcatcctgtcaacgcagcttgtttcagtcccgatggagcccggctcctgaccacggaccagaagagcgagatccgagtttactctgcttcccagtgggactgccccctgggcctgatcccgcaccctcaccgtcacttccagnacctnacacccatcaaggcagcctgggatcctcgctacaacctcattgttgtgggccgatacccagatcctaatttcaaaagttgtacc

SEQ ID NO: 1616 - DNA, 1677 bp, Homo sapiens
  misc_feature (1668)..(1668): n equals a,t,g, or c
  misc_feature (1673)..(1673): n equals a,t,g, or c
  misc_feature (1676)..(1676): n equals a,t,g, or c
atccttcactaagcctgctttagtttccaccacctgcttctgcattcttttaatggctccttaggtctccaggaaagctaacagccagggagaggatcagtctcttgctggaccctggcagctttkttgagagcgacatgtttgtggaacacagatgtgcagattttggaatggctgctgataagaataagtttcctggagacagcgtggtcactggacgaggccgaatcaatggaagattggtttatgtcttcagtcaggattttacagtttttggaggcagtctgtcaggagcacatgcccaaaagatctgcaaaatcatggaccaggccataacggtgggggctccagtgattgggctgaatgactctgggggagcacggatccaagaaggagtggagtctttggctggctatgcagacatctttctgaggaatgttacggcatccggagtcatccctcagatttctctgatcatgggcccatgtgctggtggggccgtctactccccagccctaacagacttcacgttcatggtaaaggacacctcctacctgttcatcactggccctgatgttgtgaagtctgtcaccaatgaggatgttacccaggaggagctcggtggtgccaagacccacaccaccatgtcaggtgtggcccacagagcttttgaaaatgatgttgatgccttgtgtaatctccgggatttcttcaactacctgcccctgagcagtcaggacccggctcccgtccgtgagtgccacgatcccagtgaccgtctggttcctgagcttgacacaattgtccctttggaatcaaccaaagcctacaacatggtggacatcatacactctgttgttgatgagcgtgaattttttgagatcatgcccaattatgccaagaacatcattgttggttttgcaagaatgaatgggaggactgttggaattgttggcaaccaacctaaggtggcctcaggatgcttggatattaattcatctgtgaaaggggctcgttttgtcagattctgtgatgcattcaatattccactcatcacttttgttgatgtccctggctttctacctggcacagcacaggaatacgggggcatcatccggcatggtgccaagcttctctacgcatttgctgaggcaactgtacccaaagtcacagtcatcaccaggaaggcctatggaggtgcctatgatgtcatgagctctaagcacctttgtggtgataccaactatgcctggcccaccgcagagattgcagtcatgggagcaaagggcgctgtggagatcatcttcaaagggcatgagaatgtggaagctgctcaggcagagtacatcgagaagtttgccaaccctttccctgcagcagtgcgagggtttgtggatgacatcatccaaccttcttccacacgtgcccgaatctgctgtgacctggatgtcttggccagcaagaaggtacaacgtccttggagaaaacatgcaaatattccattgtaaacaaatcaaaggaaaagaaaccaagaactgaattactgtctgcccattcacatcccattcctgccttttgcaatcatgaaacctgggaatccaaatagttggataacttagaataactaagtttattaaattctagaaagatcaaaaaaaaaaaaaaaanaaaanaana

SEQ ID NO: 1617 - DNA, 1209 bp, Homo sapiens
  misc_feature (1150)..(1150): n equals a,t,g, or c
  misc_feature (1156)..(1156): n equals a,t,g, or c
gctgggaaggaccggtgtgctaggagatgatcggggaaagcatagtcccctgtctgtggcaccagacactcccgactgtgcgctgactctccccgcccagccagcagccttttccagagaggctgtggtccatagcctctgttcgttttcactgcaggaccaggcacgaaagttaaaacaaaatgaagattttttctgaatctcataaaacagtgtttgttgtggatcactgcccttatatggcagaatcttgcaggcagcatgtcgagtttgatatgctggtgaagaatagaacccaaggaatcattcctttggcccccatatctaaatcattgtggactkgctcagtagaatcttccakggaatattgtagaataatgtatgatatatttcctttcaaaaagctggtgaattttattgtgagtgactctggagcacatgttttaaattcttggactcaagaagaccaaaatttacaggagctaatggcagcattagccgctgktgggcctcctaatcctcgggcagatccagagtgctgcagtattctgcatggccttgttgcagcagtggaaactctctgcaaaattactgaataccaacatgaggctcgtactctactcatggagaatgcagaacgtgttggaaatagaggacgaataatctgtattactaatgcaaaaagtgatagtcatgtgcgaatgcttgaagactgtgtccaggaaacgattcatgaacataacaagcttgctgcaaattcagatcatctcatgcagattcaaaaatgtgagttggtcttgatccacacctacccagttggtgaagacagccttgtatctgatcgttctaaaaaagagttgtccccggttttaaccagtgaagttcatagtgttcgtgcaggacggcatcttgctaccaaattgaatattttagtacagcaacattttgacttggcttcaactactattacaaatattccaatgaaggaagaacagcatgctaacacatctgccaattatgatgtggagctacttcatcacaaagatgcacatgtagatttcctgaaaagtggtgattcgcatctaggtggcggcagtcgagaaggctcgtttaaagaaacaataacattaaagtggtgtacaccaagggncaaatnaacattgtgttttcttctatttcaggaattacactattgtactggggctttat

SEQ ID NO: 1618 - DNA, 2608 bp, Homo sapiens
  misc_feature (3)..(4): n equals a,t,g, or c
cgnnccacgcgtccgcagcagggccaacagtcacagcagccctgaccagagcattcctggagctcaagctcctctacaaagaggtggacagagaagacagcagagaccatgggacccccctcagcccctccctgcagattgcatgtcccctggaaggaggtcctgctcacagcctcacttctaaccttctggaacccacccaccactgccaagctcactattgaatccacgccgttcaatgtcgcagaggggaaggaggttcttctactcgcccacaacctgccccagaatcgtattggttacagctggtacaaaggcgaaagagtggatggcaacagtctaattgtaggatatgtaataggaactcaacaagctaccccagggcccgcatacagtggtcgagagacaatataccccaatgcatccctgctgatccagaacgtcacccagaatgacacaggattctataccctacaagtcataaagtcagatcttgtgaatgaagaarcaaccggacagttccatgtatacccggagctgcccaagccctccatctycagcaacaactccaaccccgtggaggacaaggatgctgtggccttcacctgtgaacctgaggytcagaacacaacctacctgtggtgggtaaatggtcagagcctcccggtcagtcccaggctgcagctgtccaatggcaacatgaccctcactctactcagcgtcaaaaggaacgatgcaggatcctatgaatgtgaaatacagaacccagcgagtgccaaccgcagtgacccagtcaccctgaatgtcctctatggcccagatggccccaccatttccccctcaaaggccaattaccgtccaggggaaaatctgaacctctcctgccacgcagcctctaacccacctgcacagtactcttggtttatcaatgggacgttccagcaatccacacaagagctctttatccccaacatcactgtgaataatagcggatcctatatgtgccaagcccataactcagccactggcctcaataggaccacagtcacgatgatcacagtctctggaagtgctcctgtcctctcagctgtggccaccgtcggcatcacgattggagtgctggccagggtggctctgatatagcagccctggtgtattttcgatatttcaggaagactggcagattggaccagaccctgaattcttctagctcctccaatcccattttatcccatggaaccactaaaaacaaggtctgctctgctcctgaagccctatatgctggagatggacaactcaatgaaaatttaaagggaaaaccctcaggcctgaggtgtgtgccactcagagacttcacctaactagagacaggcaaactgcaaaccatggtgagaaattgacgacttcacactatggacagcttttcccaagatgtcaaaacaagactcctcatcatgataaggctcttacccccttttaatttgtccttgcttatgcctgcctctttcgcttggcaggatgatgctgtcattagtatttcacaagaagtagcttcagagggtaacttaacagagtatcagatctatcttgtcaatcccaacgttttacataaaataagagatcctttagtgcacccagtgactgacattagcagcatctttaacacagccgtgtgttcaaatgtacagtggtccttttcagagttggacttctagactcacctgttctcactccctgttttaattcaacccagccatgcaatgccaaataatagaattgctccctaccagctgaacagggaggagtctgtgcagtttctgacacttgttgttgaacatggctaaatacaatgggtatcgctgagactaagttgtagaaattaacaaatgtgctgcttggttaaaatggctacactcatctgactcattctttattctattttagttggtttgtatcttgcctaaggtgcgtagtccaactcttggtattaccctcctaatagtcatactagtagtcatactccctggtgtagtgtattctctaaaagctttaaatgtctgcatgcagccagccatcaaatagtgaatggtctctctttggctggaattacaaaactcagagaaatgtgtcatcaggagaacatcataacccatgaaggataaaagccccaaatggtggtaactgataatagcactaatgctttaagatttggtcacactctcacctaggtgagcgcattgagccagtggtgctaaatgctacatactccaactgaaatgttaaggaagaagatagatccaattaaaaaaaattaaaaccaatttaaaaaaaaaaagaacacaggagattccagtctacttgagttagcataatacagaagtcccctctactttaacttttacaaaaaagtaacctgaactaatctgatgttaaccaatgtatttatttctgtggttctgtttccttgttccaatttgacaaaacccactgttcttgtattgtattgcccagggggagctatcactgtacttgtagagtggtgctgctttaattcataaatcacaaataaaagccaattagctctataaaaaaaaaaaaaaaaaaaaaa

SEQ ID NO: 1619 - DNA, 2013 bp, Homo sapiens
  misc_feature (40)..(40): n equals a,t,g, or c
  misc_feature (48)..(48): n equals a,t,g, or c
ggacccagtttctgaggaaggagaaggcctcagctgccangatcagtnccacagagaccctctcggaagaggagcaggaagagctaagaagagaacttgcaaaggtagaagaagaaatccagatgctgcaagcgaggtccaagcacatcttgtcaacatgcattgccatgaatttctaccagatgtgcttttatttagctttacatattcctttgaccaaatagtttgtgggttaaacaaaatgaaaatatcttcacctctattcttgggaaacaccctttagtgtacatttatgttcctttatttaggaaacaccattataaaaacacttatagtaaatggggacattcactataatgatctaagaagctacagattgtcatagttgttttcctgctttacaaaattgctccagatctggaatgccagtttgacctttgtcttctataatatttcctttttttcccctctttgaatctctgtatatttgattcttaactaaaattgttctcttaaatattctgaatcctggtaattaaaagtttgggtgtattttctttacctccaaggaaagaactactagctacaaaaaatattttggaataagcattgttttggtataaggtacatattttggttgaagacaccagactgaagtaaacagctgtgcatccaatttattatagttttgtaagtaacaatatgtaatcaaacttctaggtgacttgagagtggaacctcctatatcattatttagcaccgtttgtgacagtaaccatttcagtgtattgtttattataccacttatatcaacttatttttcaccaggttaaaattttaatttctacaaaataacattctgaatcaagcacactgtatgttcagtaggttgaactatgaacactgtcatcaatgttcagttcaaaagcctgaaagtttagatctagaagctggtaaaaatgacaatatcaatcacattaggggaaccattgttgtcttcacttaatccatttagcactatttaaaataagcacaccaagttatatgactaatataacttgaaaattttttatactgaggggttggtgataactcttgaggatgtaatgcattaataaaaatcaactcatcattttctacttgttttcaatgtgttggaaactgtaaaatgatactgtagaacctgtctcctactttgaaaactgaatgtcagggctgagtgaatcaaagtgtctagacatatttgcatagaggccaaggtattctattctaataactgcttactcaacactaccaccttttccttatactgtatatgattatggcctacaatgttgtatttgttatttattaaattgtgattgttttattattgtttatgccaaatgttaactgccaagcttggagtgacctaaagcattttttaaaagcatggctagatttacttcagtataaattatcttatgaaaaccaaattttaaaagccacaggtgttgattgttataaaataacatgctgccattcttgattgctagagtttttgttagtactttggatgcaattaaaactatgtgctatcacatgtgaaaagcttaataaattccatctatcagtagtataggtctcaatatttattatgagaccagtggtctggaaacagcttgttgtaccgaatcaactggagtctatgcttaaaaaaaaaaaatttttttttaaccatccttaaattattgcttaatggtatcatattaacatattctaaataagggctttaaggcacaggctgttgaagcattttctcagaggagtggatctgtagaagtctgtctttctatagaaatattgtgcttactcaagtgttaaattattttttctatgaactagtctacttcttaaaattcaaacatattcttttgatcacattgtttcttgagcatcctgccctgmyactaacttttcaacaaggcaaaatggagtaaarwggcaayttctttaratgagtgaaaaaaaaaa

SEQ ID NO: 1620 - DNA, 604 bp, Homo sapiens
ggcagagcgccgacgcagacccctctctgcacgccagcccgcccgcacccaccatggccacagttcagcagctggaaggaagatggcgcctggtggacagcaaaggctttgatgaatacatgaaggagctaggagtgggaatagctttgcgaaaaatgggcgcaatggccaagccctgagatttccttcatactgggccaggaatttgacgaagtcactgcagatgacaggaaagtcaagagcaccataaccttagatgggggtgtcctggtacatgtgcagaaatgggatggaaaatcaaccaccataaagagaaaacgagaggatgataaactggtggtggaatgcgtcatgaaaggcgtcacttccacgagagtttatgagagagcataagccaagggacgttgacctggactgaagttcgcattgaactctacaacattctgtgggatatattgttcaaaaagatattgttgttttccatgatttagcaagcaactaattttctcccaagctgattttattcaatatggttacgttggttaaataaactttttttagatttaaaaaaaaaaaaaaaaaaaaaaaaaaaaaaaaaaaaaaa

SEQ ID NO: 1621 - DNA, 979 bp, Homo sapiens
  misc_feature (263)..(263): n equals a,t,g, or c
  misc_feature (303)..(303): n equals a,t,g, or c
cagggaaccattgctggacaaggcacaggagccacctccatttctgagctctgcaagggacaagaactagagccatcaggggctgggctcactgtggccccaccccaagccgtcagcctccagggatctacaccctgccttggctgctacagctttttcactccactgccctaggggagttcagcaacctaatgatctctatctctgaacatctcttcatcccatgctccaagtccagcaacctgcaccctggaaccaggagnggaccctacccaggctgttcttgaactcctgacctcaggngctccgcctgcgctggcttcccggggtgctgggatacaggagtgagccactgcgcctggctgatcccagcacttttcaaatgatgccgctcaaagccgtgacttggcctactttgaacagcaaacttgttgctgctgttgtcaacctgaaggcctctcaaatgccagcttcaagcagggtgtgaattggccagtgtcagatctcaggagtcctgtgttgagagtgtggctttcagctgcggggagctgcacttggtggggaaagccaggcaggtcaccctcacagccagataatgtggaggtcagaacccaaggaagggagtgagacctccactcccagtgggggacctggccacccatccttggggacctgagaaagcgtacttcaccttggggtgaaggctgggtggggccagagggaccagtgccctcctcagtgcttaggggcagagccacctgcagcaatggtatctgcatattagcccctctccaccttctttctcccgctgaatcatttccctcaaagcccaagagctgtcactgcttctttctccctgggaagaatgcgtggactctgcctggtgatagactgaagccagaacagtgccacaccctcgccttaattccttgctaggtgttctcagatttatgagacttcttagtcaaatatgaaggga

SEQ ID NO: 1622 - DNA, 504 bp, Homo sapiens
gaacatagttctttccaacatgtaaggtctgattcatgtgaaataaatcctttgcaacatcttcttcacatgaatcagacctaacatagttctttccaacatgtaaggtaaatacattgattaactttctcttttccaaaattaggtttaaggatttatttcacaaattttaaaggrgatatgagtaaaagtttttatcttttcttgactttttctcctgaacacttatgtcttagcaagtggtcaacatgaggatttgaacgcctaattgttggtaaatggttgaggcatgacaaaaatattaatatccactgtttaccatcatgttatttgaaacaaaagtgaccatgtatactatcttgcttgaagaagtctttgacagaaaaagcaatatcatgtcatttataaattttcttgttctaaagaaagcagttatatatatatataaattatgtaaataaaagttattttatatcaaaaaaaaaaaaaaaaaaaaaaaaaaaa

SEQ ID NO: 1623 - DNA, 1650 bp, Homo sapiens
gagtacggcagcccgtcggtcatcagcgtcagcaaaggcagccctgacggcagccacccggtggtggtggcgccctacaacggcgggccgccgcgcacgtgccccaagatcaagcaggaggcggtctcttcgtgcacccacttgggcgctggaccccctctcagcaatggccaccggccggctgcacacgacttccccctggggcggcagctccccagcaggactaccccgaccctgggtcttgaggaagtgctgagcagcagggactgtcaccctgccctgccgcttcctcccggcttccatccccacccggggcccaattacccatccttcctgcccgatcagatgcagccgcaagtcccgccgctccattaccaagagctcatgccacccggttcctgcatgccagaggagcccaagccaaagaggggaagacgatcgtggccccggaaaaggaccgccacccacacttgtgattacgcgggctgcggcaaaacctacacaaagagttcccatctcaaggcacacctgcgaacccacacaggtgagaaaccttaccactgtgactgggacggctgtggatggaaattcgcccgctcagatgaactgaccaggcactaccgtaaacacacggggcaccgcccgttccagtgccaaaaatgcgaccgagcattttccaggtcggaccacctcgccttacacatgaagaggcatttttaaatcccagacagtggatatgacccacactgccagaagagaattcagtattttttacttttcacactgtcttcccgatgagggaaggagcccagccagaaagcactacaatcatggtcaagttcccaactgagtcatcttgtgagtggataatcaggaaaaatgaggaatccaaaagacaaaaatcaaagaacagatggggtctgtgactggatcttctatcattccaattctaaatccgacttgaatattcctggacttacaaaatgccaagggggtgactggaagttgtggatatcagggtataaattatatccgtgagttgggggagggaagaccagaattcccttgaattgtgtattgatgcaatataagcataaaagatcaccttgtattctctttaccttctaaaagccattattatgatgttagaagaagaggaagaaattcaggtacagaaaacatgtttaaatagcctaaatgatggtgcttggtgagtcttggttctaaaggtaccaaacaaggaagccaaagttttcaaactgctgcatactttgacaaggaaaatctatatttgtcttccgatcaacatttatgacctaagtcaggtaatatacctggtttacttctttagcatttttatgcagacagtctgttatgcactgtggtttcagatgtgcaataatttgtacaatggtttattcccaagtatgccttaagcagaacaaatgtgtttttctatatagttccttgccttaataaatatgtaatataaatttaagcaaacgtctattttgtatatttgtaaactacaaagtaaaatgaacattttgtggagtttgtattttgcatactcaaggtgagaattaagttttaaataaacctataatattttatctgaaaaaaaaaaaaaaaagggcggccgctcgcgac

SEQ ID NO: 1624 - DNA, 987 bp, Homo sapiens
gctcgtgccgaattcggcacgagtcggcacgaggtccaagggggtgtgtgttcacgggaatgctgagtaccagcccggttctccagtttattcctccaagtgccaggactgcgtgtgcacggacaaggtggacaacaacaccctgctcaacgtcatcgcctgcacccacgtgccctgcaacacctcctgcagccctggcttcgaactcatggaggcccccggggagtgctgtaagaagtgtgaacagacgcactgtatcatcaaacggcccgacaaccagcacgtcatcctgaagcccggggacttcaagagcgacccgaagaacaactgcacattcttcagctgcgtgaagatccacaaccagctcatctcgtccgtctccaacatcacctgccccaactttgatgccagcatttgcatcccgggctccatcacattcatgcccaatggatgctgcaagacctgcacccctcgcaatgagaccagggtgccctgctccaccgtccccgtcaccacggaggtttcgtacgccggctgcaccaagaccgtcctcatgaatcattgctccgggtcctgcgggacatttgtcatgtactcggccaaggcccaggccctggaccacagctgctcctgctgcaaagaggagaaaaccagccagcgtgaggtggtcctgagctgccccaatggcggctcgctgacacacacctacacccacatcgagagctgccagtgccaggacaccgtctgcgggctccccaccggcacctcccgccgggcccggcgctcccctaggcatctggggagcgggtgagcggggtgggcacagcccccttcactgccctcgacagctttacctcccccggaccctctgagcctcctaagctcggcttcctctcttcagatatttattgtctgagtctttgttcagtccttgctttccaataataaactcagggggacatgcaaaaaaaaaaaaaaaaaaaaaaa

SEQ ID NO: 1625 - DNA, 1487 bp, Homo sapiens
ggcagagcggcagagcacaaatttaaatcgcctcatgaccatgtctgtragccagggtcaagctggtttggccttcttgatgcattttccaaggcccactggtggagcagcatgagtttttatacagttactaacgattgtggaaaaaaagagctttagccatttcttactaaaaacaaaacaagtttataattaattctctgagcgagcatttttagggataagcctaggaggtattcatcggtgatggtaacaaataacatggtatttgaaagaatawattactaggatcttttaaatagtgataatacaaaagtaatcttaattagtatcacatactaaaagacaactataacttctgaaaaatatttattcttgtttgatgaaagcaacgtttctcagcaatgcattttaaaaaatattttagctgtaaattaaaaatggccataatgtacccttggcagacttcagcatataccaaattttaaatttaaatcagcttgaattcagtggggtatacaaatcattttagttgttttagggctttttattgaatagaaaaaatataaacaatgttgtagagtaatgagaaatcctccacactgaaaaaaaactagtagttttaatttttttggaatcatattttctgaggtgtaactggctttcattagatgatcatacttttcctgacatttttacaatgtattctttctttaaatataaaaactgacaagataaatatagtgtttcaacttcttagcctatttgtgatttttctgttttcctctgacccatcattgattctataaaaaagtgccaggccaagaaacaatagttagagtaattcttcctttaagttctttcagcagtcttgccaagcaagcatgtatcattcctgatgtacttctaccattgacagcaagaagaatatcaccacatctaattcttccatcattgtatgctggtgttccttcaacaatggatttgatgaaaaaaggtttgtttccattgtattcttcataacctcctacaatgcagaagcccagacttccagctgtgtttcttcgtaatacaatatctttacagttatacaagcaccgtggtaattccagccacatgacccaggatggggaccagtcactgggtggggccatgttgtggttggagtccagggctgctgggctgctgcagtcttcctggggctcatactctttgacttccaaagctttgagtactatcgaggatgatgttcttttcaataatgccactgcctcactccggctgacctctgtcagttcgaccccatccacattcaacaaaatgtcacctgtttttattcttccatctctgcttatgactcctccgggctcaacactgatgacatagataggcaaatcccattytctatgtgatgctccccctgcgacggtcatgccgagagattcaccggggtctttttggatatttaccaccttctcatgacaagc

SEQ ID NO: 1626 - DNA, 713 bp, Homo sapiens
ttttttttttatagaaaaccttttttacaatttatttcctgttgttaatctttaaaaatgaggttctagctaagtgcagggtttcagtggtgaaattttgaccatgtgaacacataaataaatatttacagtctttggcaaaacacatgacgtttcatcaacctatacgataaatttgtttagaaaaacataaataatttacaaaaaatatggtacattctaaatattcacatcatcgtcactcccacaccattgtacggttgaccccacaacacagaaacagaaaacctgcacgctgttgacagtcgctacatttaatgaagtatcccaacgcttcgttggtctcgggaatacagctccacacgcaaaaaagtaaaaagtgcagcaaaacaacaacacaacgatcaacctcaaaggaaacaacaaaattaattttatcaaaatgcaatgtgtacattaaractaaagttatggatygttcctgtttggcatagaaatgtgatgactattaacagarmggggaaaaagatttgccccctatccatcatcagacagacagacttctcttactaaaccccttatgtggagtgggatgagtgactatttcctgcagaaagatcatgcaacttaaagcaaaaaaacaaaccaaccaacaaaaaaaacaaaaacaaaaacaaacttgtgcatattacacatgactgattattgggtgt

SEQ ID NO: 1627 - DNA, 3522 bp, Homo sapiens
  misc_feature (22)..(22): n equals a,t,g, or c
  misc_feature (3503)..(3503): n equals a,t,g, or c
  misc_feature (3507)..(3508): n equals a,t,g, or c
agtccggaattcccgggtttgntgacgcgtccgcagcaaggtgcctcgctgtgtcaacactcagcctggcttccactgcctgccctgcccgccccgatacagagggaaccagcccgtcggggtcggcctggaagcagccaagacggaaaagcaagtgtgtgagcccgaaaacccatgcaaggacaagacacacaactgccacaagcacgcggagtgcatctacctgggycacttcagcgaccccatgtacaagtgcgagtgccagacaggctacgcgggcgacgggctcatctgcggggaggactcggacctggacggctggcccaacctcaatctggtctgcgccaccaacgccacctaccactgcatcaaggataactgcccccatctgccaaattctgggcaggaagactttgacaaggacgggattggcgatgcctgtgatgatgacgatgacaatgacggtgtgaccgatgagaaggacaactgccagctcctcttcaatccccgccaggctgactatgacaaggatgaggttggggaccgctgtgacaactgcccttacgtgcacaaccctgcccagatcgacacagacaacaatggagagggtgacgcctgctccgtggacattgatggggacgatgtcttcaatgaacgagacaattgtccctacgtctacaacactgaccagagggacacggatggtgacggtgtgggggatcactgtgacaactgccccctggtgcacaaccctgaccagaccgacgtggacaatgaccttgttggggaccagtgtgacaacaacgaggacatagatgacgacggccaccagaacaaccaggacaactgcccctacatctccaacgccaaccaggctgaccatgacagagacggccagggcgacgcctgtgaccctgatgatgacaacgatggcgtccccgatgacagggacaactgccggcttgtgttcaacccagaccaggaggacttggacggtgatggacggggtgatatttgtaaagatgattttgacaatgacaacatcccagatattgatgatgtgtgtcctgaaaacaatgccatcagtgagacagacttcaggaacttccagatggtccccttggatcccaaagggaccacccaaattgatcccaactgggtcattcgccatcaaggcaaggagctggttcagacagccaactcggaccccggcatcgctgtaggttttgacgagtttgggtctgtggacttcagtggcacattctacgtaaacactgaccgggacgacgactatgccggcttcgtctttggttaccagtcaagcagccgcttctatgtggtgatgtggaagcaggtgacgcagacctactgggaggaccagcccacgcgggcctatggctactccggcgtgtccctcaaggtggtgaactccaccacggggacgggcgagcacctgaggaacgcgctgtggcacacggggaacacgccggggcaggtgcgaaccttatggcacgaccccaggaacattggctggaaggactacacggcctataggtggcacctgactcacaggcccaagactggctacatcagagtcttagtgcatgaaggaaaacaggtcatggcagactcaggacctatctatgaccaaacctacgctggcgggcggctgggtctatttgtcttctctcaagaaatggtctatttctcagacctcaagtacgaatgcagagatatttaaacaagatttgctgcatttccggcaatgccctgtgcatgccatggtccctagacacctcagttcattgtggtccttgtggcttctctctctagcagcacctcctgtcccttgaccttaactctgatggttcttcacctcctgccagcaaccccaaacccaagtgccttcagaggataaatatcaatggaackcagagatgaacatctaacccactagaggaaaccagtttggtgatatatgagactttatgtggagtgaaaattgggcatgccattacattgctttttcttgtttgtttaaaaagaatgacgtttacatataaaatgtaattacttattgtatttatgtgtatatggagttgaagggaatactgtgcataagccattatgataaattaagcatgaaaaatattgctgaactacttttggtgcttaaagttgtcactattcttgaattagagttgctctacaatgacacacaaatcccgttaaataaattataaacaagggtcaattcaaatttgaagtaatgttttagtaaggagagattagaagacaacaggcatagcaaatgacataagctaccgattaactaatcggaacatgtaaaacagttacaaaaataaacgaactctcctcttgtcctacaatgaaagccctcatgtgcagtagagatgcagtttcatcaaagaacaaacatccttgcaaatgggtgtgacgcggttccagatgtggatttggcaaaacctcatttaagtaaaaggttagcagagcaaagtgcggtgctttagctgctgcttgtgccgctgtggcgtcggggaggctcctgcctgagcttccttccccagctttgctgcctgagaggaaccagagcagacgcacaggccggaaaaggcgcatctaacgcgtatctaggctttggtaactgcggacaagttgcttttacctgatttgatgatacatttcattaaggttccagttataaatattttgttaatatttattaagtgactatagaatgcaactccatttaccagtaacttattttaaatatgcctagtaacacatatgtagtataatttctagaaacaaacatctaataagtatataatcctgtgaaaatatgaggcttgataatattaggttgtcacgatgaagcatgctagaagctgtaacagaatacatagagaataatgaggagtttatgatggaaccttaatatataatgttgccagcgattttagttcaatatttgttactgttatctatctgctgtatatggaattcttttaattcaaacgctgaaaacgaatcagcatttagtcttgccaggcacacccaataatcagtcatgtgtaatatgcacaagtttgtttttgtttttgttttttttgttggttggtttgtttttttgctttaagttgcatgatctttctgcaggaaatagtcactcatcccactccacataaggggtttagtaagagaagtctgtctrtctgatgatggatagggggcaaatctttttcccctttctgttaatagtcatcacatttctatgccaaacaggaacgatccataactttagtcttaatgtacacattgcattttgataaaattaattttgttgtttcctttgaggttgatcgttgtgttgttgttttgctgcactttttacttttttgcgtgtggagctgtattcccgagaccaacgaagcgttgggatacttcattaaatgtagcgactgtcaacagcaaaaaaagancttnnaaaataataaggaa

SEQ ID NO: 1628 - DNA, 902 bp, Homo sapiens
agcggccgcccttttttttttttttttttttttytatatacacagcatttttattaaatatactctgtgagaaaaagaacaccctaaagtgccagatttcatgtaaatccaataacttagtaaatacaatggtgaaaaaaaatcagagggaaacataatttaaataatcttataaaagagcaagaacatatcttaatcttaagaaaacaatcatcaaaatataaaagggaaagaaatctcttttgtagaagaatatatttcaaattccacctgttgatcatttcatttaaaaaattctattctaaacacatgggcagtctctcttaccaatatatatatttaaatcaatggtagaaagggaatttagactactcattcacactgagataaagtgacatttttgttgcacaacagtattgctcactggcactaacagtggaagatggagaaagtagatttctggattcaattgttagcagcagaaatggactaatgctaaaaatttagaaaaaaatagtccaagctgtagcgatttccaagtaatacaaacattaaccaaacattgccaatttgtaacgggctgtgaaaaacatatgaaaatactctacattgaatactagctttatgttactttctattaaagatattcagtgggcatattctaaattatatagggcttctatagagacctaaactagcaagtataatatgaagctaacaggacagtgtcagcatatcttgggatgttctagccaatgtttggctacaagtatttggaaggggtcaaataactatatgcacattcaaaatgaatacttataaaaagaaatcttaatgtatcagatatccacagactgaaaagtgttacacatgttgtggggggaaaatactgatggttggcc

SEQ ID NO: 1629 - DNA, 1158 bp, Homo sapiens
  misc_feature (1108)..(1109): n equals a,t,g, or c
  misc_feature (1145)..(1145): n equals a,t,g, or c
tcgacccacgcgtccgagccgagactgcgaaggagaacgcagcaagcccaggcggcggtggaaaggctggaggacacacctaaacatgtggaatcccaatgccgggcagccagggccaaatccatatccccccaatattgggtgccctggaggttccaatcctgcccacccaccacctattaatccaccctttcccccaggcccctgtcctcctcccccaggagctccccatggcaatccagctttccccccaggtgggccccctcatcctgtgccacagccagggtatccaggatgccaaccgttgggtccctaccctcctccatacccaccgcctgcccctggaatccctcctgtgaatcccttggctcctggcatggttggaccagcagtgatagtagacaagaagatgcagaagaaaatgaagaaagctcataaaaagatgcacaagcaccaaaagcaccacaagtaccacaagcatggcaagcattcctcctcttcctcctcctcttccagcagtgattctgactgaatacaggccctggacccttccctcaagtctcaccagttctgctctcccatcaagcttcagatgccatgttgtactgggggaatgtagcccttgtgctccccaccccctacctccacctgagcctcaccctgctgttgagccctgagtggctaggggaaatgggaagaggattgccatggcctggccatcttgttgctgcttggttagatcatatagctaatgaattaggcaggggagctattttttgaagatgatgaactaaatgttgaagacaagtttgagatctgtaaaatgtgattttttacttccacttataatacttgtgattggggaggtttgtggaaattcaattatgatgaaaaacctatcttttttgtaatgttggcatacttggggaatttagtggcaaatacattccccagcaggccttttgttggttgcactaactgcaaggttgctgggaagtagagtccatttggttgatgagctttgactgcggttttggaaccttacctctcctccttagcccaatatgctgtcttgggtcctattcaaataaagttatttctcctggtnncaaaaaaaaaaaaaaaaaaaaaaaaaaaaaaacccnggggggggcccgg

SEQ ID NO: 1630 - DNA, 2260 bp, Homo sapiens
acagcaaatgcaaagacccagaggcatgcaagggaaaggagataaagtaggcctgggctgcagcgaaagaggagagtgatgggaggcagcaggggtggaagcctcagtttccacctctataaagtgggaataaaaaagctaccaacttaaaacaaatggtgagaattcatcaagatctagcctgtaaagcatttgtgcttggcattgagaaagtgctcgtaaatgttagcatcattcccttttatttatttattttttcaagacagagtttcaccatattggtcaggctattctcgaactcctgacctcaagtgatccgcctgcctcagcctcccaaagtgctgggattacaaagcatgagccaccgcacctggccgaggtactttctttctaacaccaaacccagaaggacattgctgcagttccaggcagcactggtgcagagcaggctttccttatatggggcagagagaagggcacagcctgctcctaatagggaaaggttgagctgatctgagcatgcccagtttatgctctccagactctccaagcacatgagtcttggcatctccccgagcacagcaagtaacaggcaggaggagtgttaagcctgwrgctccatcttcagggaagaaaacatcccaactagagaagaagggacaccttcccctcctaacaaatgaatgagcgggcaagtgagtaaatgaatgagtgattctgattgggggggtgcagggatgtcccttcactcaccctcttgtccacagttgcaggggctctcattgctgacttcttgtctggcctggtacactggggtgctgacacatggggctctgtggagctgcccattgtggggaaggctttcatccgacccttccgggagcaccacattgacccgacagctatcacacggcacgacttcatcgagaccaacggggacaactgcctggtgacactgctgccgctgctaaacatggcctacaagttccgcacccacagccctgaagccctggagcagctatacccctgggagtgcttcgtcttctgcctgatcatcttcggcaccttcaccaaccagatccacaagtggtcgcacacgtactttgggctgccacgctgggtcaccctcctgcaggactggcatgtcatcctgccacgtaaacaccatcgcatccaccacgtctcaccccacgagacctacttctgcatcaccacaggctggctcaactaccctctggagaagataggcttctggcgacgcctggaggacctcatccagggcctgacgggcgagaagcctcgggcagatgacatgaaatgggcccagaagatcaaataacttctccgagcctgctacctggttgccaaccttccctagcccccaaaccgaagccatctgccaaattccagcctctttgagctggcccctccagatggagaggacatctcctgggctgggcccaggtaccccagcccacccctcatgacacagaatacttgagccactgatttttcatttctttttttttttttcctcggcccctcctcagccacctgagttgctctatctgcaagcctgactctgccagcctcccctggtagagaggaggtttacccactccctgcacgcctgccgtccctgccccgctgggcagcccttcagtgtggctggcgttggggccagtgagttgcctctttccctccttgtctggccccagtggtctggggagcccccaggcacacctaagcgtcgtggagcattgttctgccacagccctgcatactgaccccgggaggctgggcaggtggacagccccagccaccaccttcagcctagcctgtcccccaaggatggtgaagctcagcaggggtctgagggtagccggccagaagaggctggaacctcctgctcaagtctagacccctacttctctgctgcccccaccctgccagagctgatgtttccaataccaagatgtcttcacagggcacagcccctgcagagcatcttggtcatttggaagaggacacggtatcccctctggccagagtatgtcagagaaggaagagtagggcttttttgttttgtttttttttaaaggtgcttgcttgtttaatgtaaataatagaaagccttaatatcttttctgtaacacggagtaatattttaatgtcatgttttggatgtacataatatatttataacaaagcagcaagagtctacttaaaaaaaaaaaaaaaaaaaaaaaaaaaaactcga

SEQ ID NO: 1631 - DNA, 1077 bp, Homo sapiens
  misc_feature (1014)..(1014): n equals a,t,g, or c
  misc_feature (1028)..(1029): n equals a,t,g, or c
aaatggctattggtgaattttgactgttctgccatgtgggtgaaaaagagaacagacttaacgggagcctttagactggaccccacttacctgaagcacagccatcaggattcagggcttatcactgactaccggcattggcagataccactgggcagaagatttcgctctttgaaaatgtggtttgtatttaggatgtatggagtcaaaggactgcaggcttatatccgcaagcatgtccagctgtccmatragtttgagtcactggtgcgccagggatccccgctttgaaatctgtgtggaagtcattctggggcttgtctgctttcggctaaagggttccaacaaagtgaatggagctcttctgcaaagaataaacagtgcmaaaaaaatccacttggttccatgtcacctcagggacaagtttgtcctgcgctttgccatctgttctcgcacggtggaatctgcccatgtgcagcgggcctgggaacacatcaaagagctggcggccgacgtgctgcgagcagagagggagtaggagtgaagccagctgcaggaatcaaaaattgaagagagatatatctgaaaactggaataagaagcaaataaatatcatcctgccttcatggaactcagctgtctgtggcttcccatgtctttctccaaagttatccagagggttgtgattttgtctgcttagtatctcatcaacaaagaaatattatttgctaattaaaaagttaatcttcatggccatagcttttattcattagctgtgatttttgttgattaaaacattatagattttcatgttcttgcagtcatcagaagtggtaggaaagcctcactgatatattttccagggcaatcaatgttcacgcaacttgaaattatatctgtggtcttcaaattgtcttttgtcatgtggctaaatgcctaataaacaattcaagtgaaaaaaaaaaaaaaaagggccggccgctctagaaggatcccaacttacgtacgcctgcnttgccacgtcattnnctctttctaataggggtcaccctaaaattcaaattcactgggccgtcg

SEQ ID NO: 1632 - DNA, 2377 bp, Homo sapiens
  misc_feature (6)..(6): n equals a,t,g, or c
  misc_feature (2355)..(2355): n equals a,t,g, or c
  misc_feature (2376)..(2377): n equals a,t,g, or c
ggctcnaacatccttttgctgtgacgagctacgggaagaatctgtatttcacagactggaagatgaattccgtggttgctctcgatcttgcaatttccaaggagacggatgctttccaaccccacaagcagacccggctgtatggcatcaccacggccctgtctcagtgtccgcaaggccataactactgctcagtgaacaatggcggctgcacccacctatgcttggccaccccagggagcaggacctgccgttgccctgacaacaccttgggagttgactgtatcgaacagaaatgaagacaagagtgccttatttcctttccaagtatttcacagcaacactctacttgaagcaacttggtccagattgaaaagtgtcctctggstgagtggccactaggcccagacccagcccagcctgagccccaacaacttttccctcactgttccccaaaacatgcaccctggacttctctaatagaaaagtctccacccctacacaaggacagaaccctccacccctacccccaaccctcagacagacttatacacccctgagtgaggattacatgcccatcccagtgtcctaggaccttttcccaatactagccccccagtggtgaacagaacctcccaaatttgagttgcacccttccctgtggccttatgagctcagcctcgctttgaggtacccaccgtcctgtcagctccttgacctatgagccggggcctgactaggaaaagttgggagttaaggaggaaattagcattccttaatgttttgttttggtgctctgaatttcttctttattatagtcctatagttttactcctcagttcctcaccatcatcatcttgtctaagacccccattataatattcatgcgctgctttttcatcaaaacctaccctgtcctagagatctatgggcatttggtggatgataatgagcagcccctcccagatagaatgtcaatatttgagcagtaggatattggcatttgttagttaaaggcttaaatcaaaagaatgtccaatggtaggaatttcaaggtgtaggtcagatatttgagaataggggatttttttgatgtgccttaaattataccaaagattactaattattcctctttgcccaaaatacttgcatccaaggttctagtctctgttgctgtgctggtctttagccccactgctkgcactgatgtccctccttttcacggagacctatctgaggtacaggatggggctggcaccagatgatgtcccaccacagtccctcacctccggcctccacatgacagaaccaatttacactcaaccatgacctcacccctccttggtttctccctcgatctgtggccctttttggatgtattcttatctaacaacacaatccggaaagactgaattgaatatttatactaatggttcatatcctttattgctcaatgatctaattaaagggatcattgccacatttcatgtttatatttctacaatttgtttagaaaacatctcctgaccatatcagtagctcgtgttatctttttatcaactgcttcccagagtcctaaaacaatagaaattttggattgaaaagttcagcataaggagtttgagtcagtaaaggatgggataaaggagtcgagatgattcaatgaaaagtatcacaaaaaagagattgatcaacaagagaaataaaaaagcccaagaggaagtggtaggggaaggaatttaagaacagcaataagtaaaactcttaagtaactccaaaaagaaaatggtacattttgccaaagaccacttatacttgagaacatggaagaatttgcctgatactctctttggggaaaagagtctctcctcttttcctcaaaccccagtacactcagcctctctgccccaccttctcctgactttgtcctcacttgcttctgcagtacattggaacctgaattgaaagaaagtcttccttgaataattggagtttgtcttgagaggcaaatatagccccaagaatcacaagattcgaggaccatgtaggtcttttacgtagcccaaatccataaattagtctcactttttgtatttatcgtttcatattaaaccctctatatcaaatgttcatcatgattttgtatgatttttataactattttattcattttattagatttattctaaaattttttaatggtaaattcttaaactgtggaaaccactgaaggtgcttattaactgttctcccagatttgtacaagtattggatgattccttgagtttacagctgtacaaatagtgtggaaaataaactttttttaaaaaagaaaaaaaaaaaaaaaaaaaaaanaaaaaaaaaaaaaaaaaaaann

SEQ ID NO: 1633 - DNA, 1258 bp, Homo sapiens
ttgagaagttggatgaatatatatatagacacttctttggtcacactttttcccctccatatggacccagtcgacctgataaaaagcaacgtatggtaaatattgaaaactccaggcatcgaaaacaagagcagaagcaccttcagccacagccttataaaagggaaggtaaatggcataaatatggtcgcactaatggaagacaaatggcaaatcttgaaatagaattggggcaattaccttttgatcctcaatactgattcacaattgagttaaattagacaactgtaagagaaaaatttatgctttgtataatgtttggtattgaaactaatgaaattaccaagatgacaatgtcttttcttttgtttctaagtatcagtttgataactttatattattcctcagaagcattagttaaaagtctactaacctgcattttcctgtagtttagcttcgttgaattttttttgacactggaaatgttcaactgtagttttattaaggaagccaggcatgcaacagattttgtgcatgaaatgagacttcctttcagtgtaagagcttaaagcaagctcagtcatacatgacaaagtgtaattaacactgatgtttgtgttaaatttgcagcagagcttgagaaaagtacattgttctggaatttcatcattaacattttataatcttacactcacttcttgtctttttgtgggttcaagagccctctgacttgtgaagaatttgctgccctcttaagagcttgctgacttgttttcttgtgaaattttttgcacatctgaatatcgtggaagaaacaataaaactacaccatgaggaaaactaaaggtctttatttaaaatctggcattgtattaacatgtaattttatactatgtggtattttatacatttcctcagtagtgatatttggtaaagcagttcatacagcttttttctaagttccatgaatcttacccagtgtttaccgaagtatttaagcagcatctgaatatttccacccagcaatgttaatttatctaggaaagttcagaatttcatcttcatgttgaatttcccttttaacttccgttcatagacatatatgtgacttccaattcgaccctctggcaagtgagtgtggaagaaaacagcagttcttttataattgcttgaaattaggaaagcgcttatttcctagaagcaaataaatgtttaagtaaataaaggctacattttgctgagtactgtttcagtcaaa

SEQ ID NO: 1634 - DNA, 2469 bp, Homo sapiens
aaaggtgagaatgcacaaagacagctctgggttgggtaccacagttttgcttggtagaaagaaaccagtgtaggaaaggagacgccaccagacatcttcaacagacaagattctttctgcctttttcaaaagatgctctctgcagcagtaagactatagatagagttgattggaatatcatgtgacccagtatgctactgctaggcataattatcaaaaattcatttttctcattaaatattgttaattgctcgccacataaagagaagctagagctcaccagtcttggtggtgtcctagaccttcctctaaagcagtcttgggaagctggatcatcagwtctttagcctagacagagtgtcgctggtaaataaaggagacacaggtaacccagagtggacagtgatttgcgtggggagwcacagtggatctggggcctctgatactttgyttcckaaaacagcccccagttttcggcttgcctatgagatgatgttcatgtgcttccttgaaaccaggtggaaagaaaggggaagaattaattttctcattctgttgctgttgaacgtaatgtaatcttaatactgtagccttcctagaagcccttccctctttttcatgctgtaaagtcaaatatttgatatccttaacataaattttaaaaattaaggtcattaggragcaaatgtctatttccaaagcaatgagcttgttgtgactgtgattttattcttctatagtatttttttcctcattttaactgagaggagaaaataatactcttttgcaatatccttaggttctccccttccccctggtgccccttctagtgtcttaagactttgtcttaacaagtataacattacattttgttgttaaaacctttcgaaactgtattcagtgattcttccaagtttatctgctctgcactatttcactaataaaccctggctaccacgtagcccttgatctccaagtagtttacctatgcaagacctgtgacactctgaattcacttctctttctttcagaaagtagtcataaatggagcttaattataaaggtaaaacttgtctccaaccagtttcattttggccatttctttttcaaaatgtcagctgttttcctccaagatttttcaccaaaacaatgatcataagtgctggaatatataatactttgcaggcataaaataacccagacatactctcatatttctttggtgtattttggttggtaaaacttaccagcattaaatgtaaaatataatgaggagttaattccttacctagaactatttcttccttttaagattcataagtaaccttttatttttacagagctacgtataacttccacattacagtcagggacctgaggtgtaacttactaagtgaaccccaaggttattttatcttgcaaaagaaacctaaaccaaactaagggccttacagtttatggttagactgaatcaaaagctataacctcaatttttccaaaaacagcttctgactgcaaaagcaagtcatacagttgttaggtatgaaatagcactgatcaggaaatgcatcttcgcagatggtatttccttcagaaaagacttttctacttttaatataaattaagccataacagtttcatgctgtggaaagagggtgaaaaggttcattttaagagattatataatatgaactttcacatttactgtgaaatgtctaactttgccagtgcttcagcaagtttttttggggggtgatggggaggggtagtattggttttagaggtttcaaatctgtgaactttggagaggggacagttgttggctctggtatttactagttttgtagtaacgttttgctagcctgactgacttttcttactggtttttatgcccacggtccgaggggactgttcttcttgttkggggtgtctgcggaatagcgtctcgtcttgtttgtataggcagtcaatgtgtgtgacatgtgtgtcctttcagtccggaagcccactgtgtgacaatggcgtggggtgtggctgggaggtggggtgctgaagcttgaagagcatttctttgctgattcataacagtatttcccatcttttgcctgcaggcagggaaagtgtacagtatttattttgtttctgttttactttaaatttgtaagtctttaagtagcttacattgattattataggggaggacaagtgacttgtttaaagttgtatttagtattctttccaatttctgtattttaaaatattgaaattaaaattgtattacttctgttttgatttttttagcactcagtgtattttttgctcattttgtttgaaagtataaatgttgaaaattgtataaaatgcgtccttgaaagaaaaagaatctgaattctatatccaattctgactttgttccctttttctgctgattgaatcatgggaaattatttaaaagtatgaaaaactggg

SEQ ID NO: 1635 - DNA, 1281 bp, Homo sapiens
  misc_feature (1224)..(1224): n equals a,t,g, or c
gcacccctttgcacatcagcattttaacagctggtcttttgagaagcctgtatctttttcctcttcagtagatacccttcttcatggtcctttgcctaatcaaacagaggcctttggctttgaaaatccatgacaaggcctcagaaatcagtgttgtggaggattactccatgccaccggagaaactctggtgaaagagaaacctcgtggtctttaggatgttgggattttragtgaacctgacctgatagcctcaggattcagggaaaggacaatcagatggcggtgttttccagggggacgcgccaaatcatgtggtttcagacaattgtgtttgcctttgtscctccctggaagggaggccaactaagggtatcaccaagaagccaaaagagaaataggcatgagcctgtggttttaaactttacaggctgggcaaaggatttagaaagacccttagcatgattttcctaaaagagaccttagctgctccaacctggtgctgatagctgctttgttgatctatgctttaaaattttyctttataatgcccccagatggctcctggaactagtcgtaattgcaaactgtaaaaatccctcctccccagtgtagatatttaaaccagagtaagtgaggggagacattctgtggtctctgaatgtgccttcccsctcaycgtgtgttaaaacacaaaagccgaagttccatggcrtcatgattccgaggggctggagggataggacccactccacatctaaaggggatctgctttgggctcggtcccattagcgagtgggggactcttgctgtgtgctaagaggctgctaggactcacccagttggaattctgggtgggctcaggaagtttagagccacgtaaaaagctggtaggcatgagtgtgccaggtctttgccagcctgcgtctccttttgcaccccccaatccagagtttgctttcttttgactaaattggctcctgcagggggaagggcagaaagctaggccctctgctctggaaagtcggcctgaggtttccggcaagttaacccttaaaatggacacccctcagcccgccctcccctttggccttcccagaatctccttcagtggttgctctcacacctgtgccataacatcatcttccatgacttggacgggcacttccttgacaattcctattggcatcacacgggctacaaattatgctgttttctaaagantttgaacttttttttttttcctttgcttgagacacggttcttgctctgttggccagg

SEQ ID NO: 1636 - DNA, 1355 bp, Homo sapiens
ggtgagagcgcgcgcttgcggacgcggcggcattaaacggttgcaggcgtagcagagtggtcgttgtctttctaggtctcagccggtcgtcgcgacgttcgcccgctcgctctgaggctcctgaagccgaaaccagctagactttcctccttcccgcctgcctgtagcggcgttgttgccactccgccaccatgttcgaggcgcgcctggtccagggctccatcctcaagaaggtgttggaggcactcaaggacctcatcaacgaggcctgctgggatattagctccagcggtgtaaacctgcagagcatggactcgtcccacgtctctttggtgcagctcaccctgcggtctgagggcttcgacacctaccgctgcgaccgcaacctggccatgggcgtgaacctcaccagtatgtccaaaatactaaaatgcgccggcaatgaagatatcattacactaagggccgaagataacgcggataccttggcgctagtatttgaagcaccaaaccaggagaaagtttcagactatgaaatgaagttgatggatttagatgttgaacaacttggaattccagaacaggagtacagctgtgtagtaaagatgccttctggtgaatttgcacgtatatgccgagatctcagccatattggagatgctgttgtaatttcctgtgcaaaagacggagtgaaattttctgcaagtggagaacttggaaatggaaacattaaattgtcacagacaagtaatgtcgataaagaggaggaagctgttaccatagagatgaatgaaccagttcaactaacttttgcactgaggtacctgaacttctttacaaaagccactccactctcttcaacggtgacactcagtatgtctgcagatgtaccccttgttgtagagtataaaattgcggatatgggacacttaaaatactacttggctcccaagatcgaggatgaagaaggatcttaggcattcttaaaattcaagaaaataaaactaagctctttgagaactgcttctaagatgccagcatatactgaagtcttttctgtcaccaaatttgtacctctaagtacatatgtagatattgttttctgtaaataacctatttttttctctattctctgcaatttgtttaaagaataaagtccaaagtcagatctggtctagttaacctagaagtatttttgtctcttagaaatacttgtgatttttataatacaaaagggtcttgactctaaatgcagttttaagaattgtttttgaatttaaataaagttacttgaatttcaaamaaaaaaaaaaaaaaaaaaaaaaaaaaaaaaaaaaaaaaaaaaaaaaaaaaaa

SEQ ID NO: 1637 - DNA, 1188 bp, Homo sapiens
  misc_feature (1164)..(1164): n equals a,t,g, or c
  misc_feature (1167)..(1168): n equals a,t,g, or c
  misc_feature (1176)..(1176): n equals a,t,g, or c
  misc_feature (1178)..(1178): n equals a,t,g, or c
cgcttccggcaccggccgaggtgcgggtcgcctccagaggtgcgtggtcgtggcgcgagggatcctgaggctgctccagcagtgcgccgccgccgtctcctggggcggcttgggttagccgggagatcctgtgccttcaaaccctacgagtccatactttaaaacaaaatgaagaaagtaaggcttaaggaactagagagtcgcctgcaacaagtggatggatttgaaaagcccaagctacttctggaacagtatcctaccaggccgcacattgcagcatgtatgctctatacaatccataacacttatgatgacattgaaaataaagtcgttgcagatctaggatgtggttgtggagtacttagcatcggaactgcaatgttaggagcagggttgtgtgttggatttgacatagatgaagacgcattggaaatatttaataggaatgcagaagagtttgagttaacaaatattgacatggttcaatgtgatgtgtgcttattatctaacagaatgtccaagtcattcgatacagtaattatgaatcctccctttgggaccaaaaataataaagggacagatatggcttttctaaagactgctttggaaatggcaagaacagcagtatattccttacacaaatcctcaactagagaacatgttcaaaagaaagctgcagaatggaaaatcaagatagatattatagcagaacttcgatatgacctgccagcatcatacaagtttcacaaaaagaaatcagtggacattgaagtggacctaattcggttttccttttaaaagccccgcaaacaaaagtcgtttaaaacctatttaaaatgaataaaaaattggtttactaaaaaaaaaaaaaaagggcggccgctctagaggatccaagcttacgtacgcgtgcatgcgacgtcatagctcttctatagtgtcacctaaattcaattcactggccgtcgttttacaacgtcgtgactgggaaaaccctggcgttacccaacttaatcgccttgcagcacatccccctttcgccagctggcgtaatagcgaagaggcccgcaccgatcgcccttcccaacagttgcgcagcctgaatggcgaatgggacgcgccctgtagcggcgcattaagcgcggtgggtgtggtgggtacccncanngtgaccgntncacttgcaag

SEQ ID NO: 1638 - DNA, 1389 bp, Homo sapiens
  misc_feature (10)..(10): n equals a,t,g, or c
  misc_feature (64)..(64): n equals a,t,g, or c
agagcctgtnctaacctgagattggcagattcacctaaatattacgtgtttacatgtgtttttntggggaaaatgggtccatgatactctaagggagctaatgatgaaatcagattgaacagtgaaagtttcttttgaaggtaaactttcctgagaatggctttctctctcctgataaactgtctttgctggaaaaactcctacccgagaggaaggaagtggaagagactgatgagatggaccaagtagaactggtggactttgatccaaatcaggaaagacggcgccactacaatggagaagcatatgaggatgatgaacatcatcccagaggtggtgttcagtgtcagacctcttaatgggccagtgaataacactcactgctggcatttaatgtgcagtagtgaatgagtgaaggactgtaatcataatatgctcactacttgctcttgtttttgttttaataaactatagtagtgttwtaaaaagttaaatgaagaataaacgcaaatataaaagctctgattttgccctgtatgtatgatgacttcagtgtgcaagatgaagtttaatacctgtaaaaactacaaagaagttcccctagcatttctaggccaaaccttgtaattgacttcagctatgtacgtggacaagcttagactgaaatgctaggtatatgtattggcttcagtgtatgacccttcattgttaagctatgaaagtaaaactctgtatttaactggcaatgaggaaaaaaaaattttgtagagaagtgttggtctgtatagttctttatattaagtgggattcattgtaatgcctctgcatttattctgttgcctcagctgttacttgaagatggcgtaatatataatttatcctgtggtatcagtgataaaaatgatacctttctgtaggaggggtttatcataatatgctgcttcttgaaggcttgcacttccagaattgtgtttccttctgctgtgccattcatatatatatacatatatatatataatcttgaccagtcctggtcatttgctcccctccttgtctgtggaccatgataagcccaagtagtgacttcagagctgggtaacagaaattaaagtgaaaagacctttacgtggagaatttgcatgcgtaatataggaaggtgttctttaggtatgttacaggattactttaaaccatttgactttcgctccaaagttatgttggtagtatagcaaattatgatgaatagctttaattgtatgtttaaaagtctcatatgttcacatgcttaaatctgggtatcagaatttaagcaattcttgaaatgtattgtctccttaatatactaattacaaagcatctccaatgtgtgtcaaaaaaaaaaaaaaaaag

SEQ ID NO: 1639 - DNA, 621 bp, Homo sapiens
atggagaaggtccaggacacgtgggtgggggaagctgagcgctgagaccaagggctaaagctgggagactgaaaaaatgcagaccgccggggcattattcatttctccagctctgatccgctgttgtaccaggggtctaatcaggcctgtgtctgcctccttcttgaatagcccagtgaattcatctaaacagccttcctacagcaacttcccactccaggtggccagacgggagttccagaccagtgttgtctcccgggacattgacacagcagccaagtttattggtgctggggcagccacagttggtgtggctggttcaggggctggcattggaaccgtgtttggcagcttgatcattggctatgccaggaacccgtctctcaagcagcagctcttctcctatgccattcttggctttgccctgtctgaggccatggggcttttctgtttgatggtcgccttcctcatcctcttcgccatgtgaggctccatggggggtcaccggcctgttgctactgcaactccacaccattcttggtgctggggtgtgttaagctttaccattaaacacaacgtttctctaaaaaaaaaaaaaaaaaaaaaaaaaaaaaaaaaaaa

SEQ ID NO: 1640 - DNA, 1158 bp, Homo sapiens
  misc_feature (888)..(888): n equals a,t,g, or c
  misc_feature (948)..(948): n equals a,t,g, or c
  misc_feature (1053)..(1053): n equals a,t,g, or c
  misc_feature (1156)..(1156): n equals a,t,g, or c
gaattcggcacgagcacacagtagcgcaaaccactttccttcccaaagcaagacatcaaagggacagaaagctggcacttccctgagaaagacgtttctagtgaagggaacattctgttgtttaattaggggaggtatcattgtctacggccccatctcacagcccacagcctttcctccaagggacttgtagccaccatcctgccctctgccacagcttacctctgatgtttcagagggagagaaagggttccaaacagcggactggttaaattttcccaaaacttgggtctaaaaagggaaataaatgtttgaaatcataactttttccctctcacagtcattttctcctctctcaagctccctttggtggtcacttcatattttaccagtctcaatcctaatatgtgtctgataagtcagttgttcccgtataaatgaaaggtttccatagataaaattacattttcctctcatgaatcacacttatgcattatagagttgatcaataaaaactcttcaagattccttccactgtagattcccaaaagccccacagaagaggagggagggaaataagacagcagactcccaaatttagccttttaacactccttccctttgtgccagcaggtccaatagaacggaatgtttcattcaatccagtgacttgagcaagcgcctctctcctgaatctactgtttctcaagaataatgagtttkgatgcagctagttagcaaaaggcaggaacacaaaagcaactgaaccttccaggtgcttaatatttaaagatccttaatacttgcagcagcattagaaagagaattagtgtaaaactcccaggtattgaaccargactaagcactcttattcccagtgaactgtcncaacaaacctctgggataagagctattattactcccattttatagaccagaacaatgaanctactcccagaggcagacttacttggttcggaggaccagcatggcactgtccctccgatcctgccacagagcatgcaaaaaggcaatggcggcacgatgcagcangggtgggcaccagtatcgatcttgctgttgggaatcaatcagctccagcactgcatggagacagctccacatcccaaggctgaattcctgcaagaagggacangt

SEQ ID NO: 1641 - DNA, 679 bp, Homo sapiens
agcctgggtgatggagcgaggcttttctcaaaaaagaaaaaaaatatatagcatataacatacaaaatgagtttatcaactgtttgttattggtaagtcagcagtgggctattggtggttaagttttgggggagtcaaaagttacatgcaaattttttactgtgcggggtgtcagcatccctaaccccatgttgttcaagggtcaactgtagtttaaaatgactcctgtctcaaaaaaccaaaggataacctttaagggattggtaactttgactcaaaactgctttgtaatcttttcacaatgtactgaaaagtgtggctagttatgtttgatccacattctagagaaatttgtaggttttaatttcttttctcttggtcctctcttcatgtataatggttgcttttaacagctgttcgctgatgtggtcctgctctgtcccagtctagcagctttagtgtatggaaaaattgaactaggaattgagttttgaagaaataaaggtgtaagagcaaacattcaacagttgctgtccccagtaatgaagttcatacagacaaaagatggcatgtcactgtacatcataccttgcaataaatattctgttaaattgtgctggtgcaatttaacatgcttttgtcaaagtaaaaaaaaaaaaaaaaaaaaaaaaaaaaaaaa

SEQ ID NO: 1642 - DNA, 4601 bp, Homo sapiens
gtcagccctcgcgctgggggcgcaggaaacaatagaggccgcgcgcacagagcgagctcttgcagcctccccgcccctcccgcaacgctcgaccccaggattcccccggctcgcctgcccgccatggccgacaaggaagcagccttcgacgacgcagtggaagaacgagtgatcaacgaggaatacaaaatatggaaaaagaacaccccttttctttatgatttggtgatgacccatgctctggagtggcccagcctaactgcccagtggcttccagatgtaaccagaccagaagggaaagatttcagcattcatcgacttgtcctggggacacacacatcggatgaacaaaaccatcttgttatagccagtgtgcagctccctaatgatgatgctcagtttgatgcgtcacactacgacagtgagaaaggagaatttggaggttttggttcagttagtggaaaaattgaaatagaaatcaagatcaaccatgaaggagaagtaaacagggcccgttatatgccccagaacccttgtatcatcgcaacaaagactccttccagtgatgttcttgtctttgactatacaaaacatccttctaaaccagatccttctggagagtgcaacccagacttgcgtctccgtggacatcagaaggaaggctatgggctttcttggaacccaaatctcagtgggcacttacttagtgcttcagatgaccataccatctgcctgtgggacatcagtgccgttccaaaggagggaaaagtggtagatgcgaagaccatctttacagggcatacggcagtagtagaagatgtttcctggcatctactccatgagtctctgtttgggtcagttgctgatgatcagaaacttatgatttgggatactcgttcaaacaatacttccaaaccaagccactcagttgatgctcacactgctgaagtgaactgcctttctttcaatccttatagtgagttcattcttgccacaggatcagctgacaagactgttgccttgtgggatctgagaaatctgaaacttaagttgcattcctttgagtcacataaggatgaaatattccaggttcagtggtcacctcacaatgagactattttagcttccagtggtactgatcgcagactgaatgtctgggatttaagtaaaattggagaggaacaatccccagaagatgcagaagacgggccaccagagttgttgtttattcatggtggtcatactgccaagatatctgatttctcctggaatcccaatgaaccttgggtgatttgttctgtatcagaagacaatatcatgcaagtgtggcaaatggcagagaacatttataatgatgaagaccctgaaggaagcgtggatccagaaggacaagggtcctagatatgtctttacttgttgtgattttagactccccttttttcttctcaaccctgagagtgatttaacactggttttgagacagactttattcagctatccctctatataataggtaccaccgataatgctattagcccaaaccgtgggtgttttctaaatattaataggggggcttgattcaacaaagccacagacttaacgttgaaattttcttcaggaattttctagtaacccaggtctaaagtagctacagaaaggggaatattatgtgtgattatttttcttcttatgctatatccccaagtttttcagactcatttaagtaaaggctagagtgagtaaggaatagagccaaatgaggtaggtgtctgagccatgaagtataaatactgaaagatgtcacttttattcaggaaatagggggagattcaagtcgtatagattcctactcgaaaatcttgacacctgactttccaggatgcacattttcatacgtagaccagtttcctcttggtttcttcagttaagtcaaaacaacacgttcctctttccccatatattcatatatttttgctcgttagtgtatttcttgagctgttttcatgttgtttatttcctgtctgtgaaatggtgtttttttttttgttgttggtttttttttttttttttttaacttgggaccaccaagttgtaaagatgtatgtttttacctgacagttataccacaggtagactgtcaagttgagaagagtgaatcaataacttgtatttgttttaaaaattaaattaatccttgataagagttgctttttttttttaggagttagtccttgaccactagtttgatgccatctccattttgggtgacctgtttcaccagcaggcctgttactctccatgactaactgtgtaagtgcttaaaatggaataaattgcttttctacataaccccatgctgatgggttttatttagtataaaacatccatcaaacaccagtctctggcttctagaagagtccttcagatgacagttgttgtccatggtctttgactatcaagagcagaattaaatgtaatagtcccagagctgtagaaaagaactttactccttcccagggaaagtgaaagacataaaacactgaatcagaggtggcacagattagtctttgataaggtaacgtttctttgaagtctgtctgtagagaactacatggacttccaagagtgtcaaaggcagtgtggtagagagaatttaaggcaagatttaaatttggaaaaggtgcttgaaccttttctcagaggttttatttccccagtatgtttttcactggggcctttacttaggttagaaataataggctttgaaggcctctatcaccagatgcaataaccagataaaattcctgttttttcccaatcgcttagttttttgttgttgttgttttttaactgagtagatcattctgacccagaactactttcatgaggtaagatctttgggaaaatctgaatagcgttaaccattagattcaaatctcaaatggtttcttttcaagtctagttgttttagagtatagtgagaaataccttgacacaattttaagagtaaactatatgggtcagcatatccttgaacaaaaagtagactttgtaaaagtattcatttaaattctaacactcgtggcacaaaagaatggaaattgtaaacccatgtaatggaaattggctatctttttgaccccacatgtgcccctcaaaaatgtttttggtttgggtcaacacaaggcaagatacattctttaaaatactcccagatgtgtccatacattcatcctttactcagtgcatatgtgagggttgttgctggaagacaggaggctcatctttcctttccttggtgcattgagatcagtatcaacagcagatgaaatagaatccagcaaagagttgacatgttctgcctccggccaactctagaatctttttaagcaggtcagccagtatttgcaacttccacaggatgaattgcttgccaagtttctggcactcttgtctggttggaagagtacatccaaagggtacttagtgatcctttgctaagaagttttttgctgtttccgggttacagatttggccatatatttctaaacagccccttgagactgtgtctccattccacctgcctgagaagtgggagcatcarcctgttccaggctcttgggtagtagcatagccttawaagtagagagccattttccatgtgtttttggataagcacaatttgaaaatcatttcccaaatcctctttttgtttttgattctaaggtaaaattttccctaagccctcccaccatcccctcagccagtattagatgagatttgtatagcagcagaaactgacttataagtagagagctcttcagcaagactgagccttagctgttccatctctttgttcttctgttgctggagttgcaccccatttcttaactgcctctggcgttcttccatttcctccagctgttcctgcatgagatggccaagaacatttctaatgagccaaacaataaaaactcacattgtccactcttacttataaaacacttttttgttcattgtttaatcttgatagcagtattgaggctggtatttatatgataggttatgaaacaggttcaaagaagttgtgtcttggaaaaaaagtgacaatgcttttgaaaatgatgacgaaaaaggcatcttgtctgttaaccacagcttgctttaatagaatcctgggagggtgattgggactttttagtattacaaccttagtgtcattgaggaggattttggtctagttagtgggctgagtttcatatacctctccctccatgtgcaggtttgttaagataattggtagtttttaataatataaaatacttaagttgaaatacaaaagtgtggcaacaattattaaatattggctagaattctaggagagttacacaactagtggaagtccatgtttagaaaataaatggcttgtttaaggaaaagtttttgtgtccaaagctccttaaagtcagagagatttctacctggtacttaacatcatatggaaattgatgctttagtgagggtgttggctatcctattgtcaatttcctgcatccttttttcttctttatttttgtatagagacaggtctcgctatgttg

SEQ ID NO: 1643 - DNA, 376 bp, Homo sapiens
gagaagacgacagaaggggaggatggttaactcctgccgcatcctttttcttgtgttcacgtggcattctctaacccagggcagtggttccttcccaggccatgcacagaggctgggtgcctgccagacccacggagggttcgcgaaggaaggggcatcctccttcttgagctgcaagctttagctgaggcagtaagtcacacagtagttagttcagcctgggctggcacataagtccccagtgtccctgttgagaggggaaagttgcctgctggttgaaaaactggcttttcctttctcgctgcctaatttcactctcagagtgaggcaggtaactggggctccactgggtcactctgagagggttgtggctctg

SEQ ID NO: 1644 - DNA, 3643 bp, Homo sapiens
  misc_feature (16)..(16): n equals a,t,g, or c
  misc_feature (45)..(45): n equals a,t,g, or c
  misc_feature (63)..(63): n equals a,t,g, or c
  misc_feature (81)..(81): n equals a,t,g, or c
taattctccccctatntgtgtaatattcccttgacccttggctgnataggagttggtattttnaggttatgcatatcaacntgatgtatttcaaagttcaacgtctttgacatccacacatttttaaaccttcaaaattttcttaaagttgggatatttgtacgtctttaattgacgaactcagctatttcaaacagaaagctgctttctatgtgttacctgctgttaaatttgacttacctgttagatacctcacattatcaaaaccaaaacaaattatcatagaaacaaattaacctggtctttttggttttcttaattcagataaatgtccaaataaacacatttaaaaagcaacactgatattcatttactcagtgtaaaccacaataaaactaattgacatttgacaatctagcacatattgtaaacctcagtgcttctgcaaagccacttaatctggaccactccagccggttaacctttaaaatccatgattttcaaaatgccaccagtattgctaaacgtaaaagtaaagccagaaactttaggagtactcaaacgctgaatatacagtgcataatgaacagcattttattggggacagccaataatgtccacaatgctcttctcatttacctgttaatattaaaatatgcatagctttgtgaaactgcttttaaaaatttaggggatggtgatcttttagacaaccaaatatttatagaacaagattcacacattttatgtgtaaacattacaccaagtatttggatacaaaaagtatttattttataaactttatatttaaaatagaattgtaatctgtctactcacaaaacctaatttaaaacatgatacatttatctctctagccaatttgatgttactgttttacaaacaacactcattttgtaattgttttatatcaagaacctcaactaaatgtttgttttatcagaaaacatttcccttttattttaaagagtgctttttaaatgaaggcaccaacaagaactactttcagatggtacagaatttcttatttcttgaagactctgtggttgaccacttcttcattagttacctgcagcaagacaccttcctgccaaaggaaaaaaaaagtatctgaagaagtttatcatgtttgtccaaaagaacctaaacaacttcagtggtggtcttaggatcaaagaagactcattggtgtatagagtaagccctgagtatcacattcctgtaaaggcaataaagccgggcaatcaaactgatcatatctaaggaatgaatttcaacagccaacctacaactttctcttcagggtaagacactgaactagaattaccacatttaacccacctatttagtactggatacataccaggcttcataatgcagacaagacacttcactcaagtatgaactactatctgaaaatagattcaaccatttttgccctaccttctttcagtctcatcctgataagcatgtacagttacaaccataaatacaacaaatgtctttaataaaaacccctagttcactcaaaatgtttgatccaagaaatgtgaatacacaagggtgtaacgatgggaaatctcatgatttattgaacttgcagcctaacttttacctaccattttactaccaacaccactgaaggaaccaagaaaagctttattaatgatcacttggcttgcctcagctgttgaaatgaagcactttacagtctttgtggcagcagaatatacttgtccatggttcatatcaatgctaaaattccggcagggaaaaaaatgatatgttaagcacccaaatcttcacatggagggggagggggtgggaaaagaaggaaaaaaagggaaaaacaaccaaaataatttaagtaaatgacagattggaaaacagggtttataaaaattattctcttgagtttataaattgttaaactcaatttatagctatgttaaactacgtaagaaccactatactgaaagaccatttaagagtattagtttatcttttagggaggaaaattaagaaaggaaaagtaaataagatcttacctaaagaagtttaactgaagcttagaactattttgctctacaccctcagctttcgttggcatccttataaactactgtagttaaagttttgtagaaacagcacagttttttaagactggctgaacttagtagccgtcaagagttctcttgtactagacctgtgtccctgaagagtacctcgctggggttatttcctttccttgcattgaagaagcagcatctaaaagatctaaaaaggtgtttctccttgcagagatatcccttaagttatctacataatttaatcctgatgaattgcagacaacacacttacatctgaccagcatttatcttatacaaatataacaacagctttgcaacggaccttaattatactacccactccttaacttatttaaaataaaaagtctataattacacaatttcctttagaattattttattaaatcataaatgtacaacagcttcttaactctacacacgcacttaaatttttttaaaggaaaaacgttatgtcttattacaccatgatcctggctaatagcttttcaaaactttgagaaaaatcttaaaaaaggtttcacatgtcacctgaaacttacaaatttaacattatcaaagaaggaatgcttctacactcttacaaagaccactagaaagaaacaacaattaaaaagctaagaaactgtctcaaaggcatttttttttacaatccttcctccacagtaaggtaatgttattaaataatccaatccattcacaaaatggctctctgcatctgctctggtgtcttctgccatatcactgcatatttatgcatgactgagataagagtttccttaacattgttatttcgataacctgaagctgttctgttacctctgggctctcatcctctcctatttatacagtgaagcccatggcaaataggaagaagctcagtatcggctcctcccaccataacccccacttcctccactgcctcctggaccatagtttcctccaccatatggtccccccatgttcctgctaccaccaaagtttccactcttcattggaccgtagttagaaggttgctggttataatttccaaaatcattgtaatttccacttccataatttcctcctccatagttgtcataaccacctccgtagcccccaccctggttgccatatccaggtcctccaccaccatatcctcctcttcctcctccataaccggggctacctccaaaattgccacctccaggtcctcctccatacccattatagccatccccaaatccacgtccactgccatatccatcagatcctcctctaaagttacttcctggtcctggtccgaaatttccaccgccaccacgtgaatccccaaagccaaagttgcctcctcttccactcctagaactctgaacttcctgcatttcttgtctagacaaagcctttcttacttctgcattatgaccattgatggtatggtatttctgcaatacgattttatccacaggatcatggtcatcaaaagtaacaaagccaaagcctcttttctttccagactgcctatcagtaattatctc

SEQ ID NO: 1645 - DNA, 4051 bp, Homo sapiens
  misc_feature (24)..(24): n equals a,t,g, or c
  misc_feature (32)..(32): n equals a,t,g, or c
  misc_feature (2234)..(2234): n equals a,t,g, or c
  misc_feature (2278)..(2278): n equals a,t,g, or c
cggaaatcattcagtgggtcagtncgagaaanatgcccggggttaccttcaagctcttgcttccaagatgccgaagagctcgaggctttgaggagttctagtctggggtcaagaacactggacccgctgtggaaggtgcgccgcakccagaarctggacatgtccgcgcggctggagctgcagtcggccctggaggcggagatccgggccaagcagcttgtccaggaggagctcaggaaggtcaaggacgccaacctcaccttggaaagcaaactaaaggattccgaagccaaaaacagagaattattagaagaaatggaaattttgaagaaaaarawrraagaaaaattcagagcagatactgggctcaaacttccagattttcaggattccatttttgagtatttcaacactgctcctcttgcacatgacctgacatttagaaccagctcagctagtgagcaagaaacacaagctccgaagccagaagcgtccccgtcgatgtctgtggctgcatcagagcagcaggaggacatggctcggcccccgcagaggccatccgctgtgccgttgcccaccacgcaggccctggctctggctggaccgaagccaaaagctcaccagttcagcatcaagtccttctcagccctactcagtgcarccactgcacctycctgatggttgggctgatccggcagggctacgcctgcgaggtgtgttcctttgcttgccacgtgtcctgcaaagacggtgccccccaggtgtgcccaatacctcccgagcagtccaagaggcctctgggcgtggacgtgcagcgaggcatcggaacagcctacaaaggccatgttcaaggtcccaaagcccagggggtgaagaagggatggcacgcgcatatgcagtcgtctgtgactgcaagctcttcctgtatgatctgcctgaaggaaaatccacccagcctggtgtcattgcgagccaagtcttggatctcagagatgacgagttttccgtgagctcagtcctggcctcagatgtcattcatgctacacgccgagatattccatgtatattcagggtgacggcctctctcttaggtgcaccttctaagaccagctcgctgctcattctgacagaaaatgagaatgaaaagaggaagtgggttgggattctagaaggactccagtccatccttcataaaaaccggctgaggaatcaggtcgtgcatgttcccttggaagcctacgacagctcgctgcctctcatcaaggccatcctgacagctgccatcgtggatgcagacaggattgcagtcggcctagaagaagggctctatgtcatagaggtcacccgagatgtgatcgtccgtgccgctgactgtaagaaggtacaccagatcgagcttgctcccagggagaagatcgtaatcctcctctgtggccggaaccaccatgtgcacctctatccgtggtcgtcccttgatggagcggaaggcagctttgacatcaagcttccggaaaccaaaggctgccagctcatggccacggccacactcaagaggaactctggcacctgcctgtttgtggccgtgaaacgctgatcctttgctatgagatccagagaacgaagccattccacagaaagttcaatgagattgtggctcccggcagcgtgcagtgcctggcggtgctcagggacaggctctgtgtgggctacccttctgggttctgcctgctgagcatccagggggacgggcagcctctaaacctggtaaatcccaatgacccctcgcttgcgttcctctcacaacagtcttttgatgccctttgtgctgtggagctcgaaagcgaggagtacctgctttgcttcagccacatgggactgtacgtggacccgcaaggccggagggcacgcgcgcaggagctcatgtggcctgcggctcctgtcgcctgtagttgcagccccacccacgtcacggtgtacagcgagtatggcgtggacgtctttgatgtgcgcaccatggagtgggtgcagaccatcggcctgcggaggataaggcccctgaactctgaaggcaccctcaacctcctcaactgcgagcctccacgcttgatctacttcaagagcaagttctcgggagcggttctcaacgtgccggacacctccgacaacagcaagtaagcagatgctgcgcaccaggtagcaaaaggcggttcgtcttcaaggtcccagargaaganagactgcagcagaagcgagagatgcttaaagacccagaattganatccaaaatgatatccaacccaaccaacttcaaccacgtggcccacatgggcccaggcgacggcatgcaggtgctcatggacctgcctctgagtgctgtgcccccctcccaggaggaaaggccgggccccgctcccaccaacctggctcgccagcctccatccaggaacaagccctacatctcgtggccctcatcaggtggatcggagcctagcgtgactgtgcctctgagaagtatgtctgatccagaccaggactttgacaaagagcctgattcggactccaccaaacactcaactccatcgaatagctccaaccccagcggcccaccgagccccaactccccccacaggagccagctccccctcgaaggcctggagcagccggcctgtgacacctgaagccgccagctcgccacaggggccagggagctggagatggcctccagcgtcagtgccaagactgagcgggccctccagtgttgtccaaggaaatgtagaatcactttgtagatatggagatgaagaagacaaatctttattataatattgatcagttttatgccgcattgttcgtggcagtagaccacatctgttcgtctgcacagctgtgaggcgatgctgttccatctgcacatgaaggacccccatacagcctgtctcccacccctgacaacccgagagggcatatggggccctgccaacaccacttcctcagcagaaacccgtcatgacgcggctgcttcggaagcagacatctggggacacagcctcagtacccagtcttttccctagttcctgaaactttcctaggaccttaagagaatagtaggaggtcctatagcattcccagtgtcactagaattttgaagacaggaaagtggaggttagtctgtggcctttttttcatttagccattgcacagtcagctgcagaagtcctgctgaccacctagtcatggacaaaggcccaggaccagtgacaccctgcgtccctgtgtgcrttaagttcattctgggtcgcagccatgaagtgtcaccagtatctactactgtgaagtcagctgtgctgttttccattcgcttccacggcttctgcctcctgccataaaaccagcgagtgtcgtggtgcaggcaggccctgtggcctgctgggctgagggaagtcagagccccagggcgccacgaagcagccactgggataccccaccccgccccgccctgcccgccccccccccccaccagtcctgcccccgcatggagcccccgtgattagtagcccgtatgatcacgtagacccacccaacacactcctgcacactggccccggcccacggcacagcaatcccctgcgcgtggatttcacctcaccctttgtaccagatgttgagtgaccagctctgtggccctgtgtcgtcagaggcttgtgattaactgtggcggcagacacagcttgtccacagcttgggccaggcttcccctgtcctcccaccggtcggctgcttggcaaggctgttcaggacgtgcacttccccaagtcggcactgagtggcccagcaccgcctagccctgccaccccactgccctcctgggccttctgctggatgggcacctggggggttctggtttttacttttttaatgtaagtctcagtctttgtaattaattattgaattgtgagaacatttttgaacaatttacctgtcaataaagcagaagacggcagttttaaagttaaaaaaaaaaaaaaaaaaaaaaaaaaaaattaaaaaaaaa

SEQ ID NO: 1646 - DNA, 1242 bp, Homo sapiens
  misc_feature (1210)..(1210): n equals a,t,g, or c
ttgaaaaacgggtcgactggcccgtccgcccggagccagcggttctccaagcacccagcatcctgctagacgcgccgcgcaccgacggaggggacatgggcagagcaatggtggccaggctcgggctggggctgctgctgctggcactgctcctacccacgcagatttattccagtgaaacaacaactggaacttcaagtaactcctcccagagtacttccaactctgggttggccccaaatccaactaatgccaccaccaaggyggctggtggtgccctgcagtcaacagccagtctcttcgtggtctcactctctcttctgcatctctactcttaagagactcaggccaagaaacgtcttctaaatttccccatcttctaaacccaatccaaatggcgtctggaagtccaatgtggcaaggaaaaacaggtcttcatcgaatctactaattccacaccttttattgacacagaaaatgttgagaatcccaaatttgattgatttgaagaacatgtgagaggtttgactagatgatggatgccaatattaaatctgctggagtttcatgtacaagatgaaggagaggcaacatccaaaatagttaagacatgatttccttgaatgtggcttgagaaatatggacacttaatactaccttgaaaataagaatagaaataaaggatgggattgtggaatggagattcagttttcatttggttcattaattctataaggccataaaacaggtaatataaaaagcttccatgattctatttatatgtacatgagaaggaacttccaggtgttactgtaattcctcaacgtattgtttcgacagcactaatttaatgccgatatactctagatgaagttttacattgttgagctattgctgttctcttgggaactgaactcactttcctcctgaggctttggatttgacattgcatttgaccttttatgtagtaattgacatgtgccagggcaatgatgaatgagaatctacccccagatccaagcatcctgagcaactcttgattatccatattgagtcaaatggtaggcatttcctatcacctgtttccattcaacaagagcactacattcatttagctaaacggattccaaagagtagaattgcattgaccacgactaatttcaaaatgctttttattattattattttttagacagtctcactttgtcknccaggccggagtgcagtgggtgcggttctcag

SEQ ID NO: 1647 - DNA, 2124 bp, Homo sapiens
  misc_feature (34)..(34): n equals a,t,g, or c
caacctgtaggtgcccaccaagcccatgacgacnctgctggccagggtcctagccctattcaggcaggagctgctcttctggggtatcgcgatccacttaaggatgaggcagacttggtgacaagctggtctgagcagcgcttccagagccagaactgagcccagtgagagcgcaccctggggcagcctggattcctggggtgtccccggcagccacacacagccatgcactacccaactgcactcctcttcctcatcctggccaatggggcccaggcctttcgcatctgcgccttcaatgcccagcggctgacactggccaaggtggccagggagcaggtgatggacaccttagttcggatactggctcgctgtgacatcatggtgctgcaggaggtggtggactcttccggcagcgccatcccgctcctgcttcgagaactcaatcgatttgatggctctgggccctacagcaccctgagcagcccccagctggggcgcagcacctacatggagacgtatgtgtacttctatcggtcacacaaaacacaggtcctgagttcctacgtgtacaacgatgaggatgacgtctttgcccgggagccatttgtggcccagttctctttgcccagcaatgtccttcccagcctggtgttggtcccgctgcacaccactcctaaggccgtagagaaggagctgaacgccctctacgatgtgtttctggaggtctcccagcactggcagagcaaggacgtgatcctgcttggggacttcaatgctgactgcgcttcactgaccaaaaagcgcctggacaagctggagctgcggactgagccaggcttccactgggtgattgccgatggggaggacaccacagtgcgggccagcacccactgcacctatgaccgcgtcgtgctgcacggggagcgctgccggagtctgctgcacactgcggctgcctttgacttccccacgagcttccagctcaccgaggaggaggccctcaacatcagtgaccactaccccgtggaggtggagctgaagctgagccaggcgcacagcgtccagcctctcagcctcactgttctgttgctgctatcactcctgtcccctcagctgtgccctgctgcctgagcgtccccctacccccccagggcctgctgccttttgggacttaaaccccagcctcccccgtccatccagccctggggctggggggcttcaactatagttgccctgtgactgtagtccacccctgcctgccttgtttgatttggctcttgttctttggttgggcttgtgcctagattaggagaggaagccaggggccctgcactcatgccacctgccaggtagtgtagtatcaggagtggagacaaagtgggctctgggttggggtaggggaagggagggttcagaaagaggaatgaagatgttgtatgacaagaaggaaagttactgagaacaaaaacccagattggtgagataggacacttgtgcagcagatatgccaatgggccatgtttattgtggattggtaagaatcaccaggaaaccattaagccccaatagctacaaggagggtggttaatctgctatatcaaactccttccctgaaaccagcaaacaccgggaaacattttggctcattataatccggtgaacaatgcagtcaggcctgttataaccgctgagcagccacactcgcacctcctgggtgctgtagtctgtgttggtacaggcttctgcatgcctggtaaagtccagccaaggctggtcaaggcaacatctccacacagaaaatctgcaccagttatgtaagctaaaaagctgtgtgaacccaggtgtcccggaaaggggctgcaggacacagcaaaatgccagcagcatgccggacccctcccttccatcctcctctccaaagaagagaggtcaggaaaaacactggctgggacgctagaagggtcatgtgttaactataatcacatttatggtttggaaccatcaccccaaggtaaaaaaaaaataaaaggtattcccaggtatgtttggcaaaataaaataaaggtaattaaaaacctaaaaaaaaaaaaaaaaaaaaaaaaaaaaaagtcgtatcgatgt

SEQ ID NO: 1648 - DNA, 1435 bp, Homo sapiens
  misc_feature (1419)..(1419): n equals a,t,g, or c
  misc_feature (1426)..(1426): n equals a,t,g, or c
gtgattctcctgcctcagcctcccaagtagctgggaaaacaggcctgtgccaccacaccggagtagtttttgtatttttagtagagatggggtttcaccatgctggccaggctggtcttgaactcctgacctcaggtgatctgtgtgccccagcctcccaaagcgctgggattacaggtgtgagccactgagcccagccatttaggaagtattataaaggcccttaaagtttgtaaggaaatgaaagggctttgtattaccttttcaataggcaacaatgtactttttctttccttagactttggcttactggaagatttaattaaaaggtagaggagaagtaaatttgctgtaataattttgctgtaaataaaacaaagagtttattttattagataaagaatgtgaagtaagcatgaagagacaggctttgggagaaataccagaaagggatttttcaaagatggcattgtttaatctccgtgtggccctcggttgtgcaatcacagatgagccagaagagggccagccccctacttgtttgggctccgaaactcttaccaaacatcaatttttattcttgggatagaaaaatagtatgtgctatctctaatacgctacttcgatatttattaaagaagtatttttaatgtagtgtccacaggctcatttcattgaaaacaactgactatgatgatagacagctcctgattggcaaaagttcgatggtatattcagaattaaattttgcctgcrcacctaaacactgacaacatttagcttaaaggttttccatggagaagagtggtaagagctgtagttagcaaaattggcatcctctttagggtgtcaattctgtgctgctttgcaaattgttgaaacttttgattttctgtttggcaatgctagtcagtgttcacttcttacagattagccaagaatttttatctaaatgcagaaacttattaatgaaatccatttaaactaacacaacattttgggaggccctgctggtaaaattatatatggatgcagaagtattgcaagagtccattttccatttttaaatctgcaatatctgattacattgatgaattccgttgtattgtatgtgtgaatataaatatctgaattctcccgggggacttggttttcgtccaaggatgttggcagtggacacttagtttacctcaggaattgcaatcatgtaagactatattcggaaaaaatgctggagtatataattttggatactgatataaaatcatcaagatggaagttaagcagaattgtcacgtgtagtccatagcgcttttatatgcattattctgtaatttgtttgtactgcggcaactttttatactttcaatgtatcatttaataaaaaaaataagcaagtcaaaaaaaaaaaaaaaaaanggggggnccgttttaa

SEQ ID NO: 1649 - DNA, 1631 bp, Homo sapiens
  misc_feature (1084)..(1084): n equals a,t,g, or c
  misc_feature (1612)..(1613): n equals a,t,g, or c
atcaatttggaggaggttggtaccatctgtttggggttctttaaatcaagtactaatctctctgaatttgtcatgcggaaaattggagacttggcttgtgctaacattcagcatctgagtagtcgctccttagtgaatattgttaaaatgttccgtttcactcacgtggatcacatcaatttcatgaagcagattggagagatagctcctcagcgaattccttccctgggagttcaaggtgtcatgcacctgactctttactgctcggccttacgcttcctgaatgaaggagtaatgaatgcagtggctgcgtctttgcctcctagagtggcacactgtcgaagtaaagatgttgccaagattctgtggtcatttggaactctgaattataagccacccaatgcagaagaattttactccagcctgataagtgagattcacagaaagatgcctgaattcaaccagtacccagaacacctgcccacctgcctgctgggcctggcatttttggagtactttccagtagagttaattgatttcgctctcagtccagggtttgtcaggttagctcaggagagaactaagtttgacctccttaaggaactatataccctcgatggtacagttggcattgagtgtccagattacagaggcaatcgtcttagtactcaccttcagcaagaggggtctgaattgctgtggtatttagcagagaaggatatgaattcaaagcctgaattcttagaaactgtctttttactggagaccatgctgggggggccccagtacgtcaagcaccatatgattttgcctcatacccgatcttctgacttagaggtccagcttgatgttaacctgaagccattaccatttaatagagaagccacgccggctgaaaatgtagccaaattaaggcttgagcatgtgggagtcagccttacagatgatttgatgaataagttactaaaagggaaagcaagaggacatttccagggcaaaactgagtcagagcctgggcagcagccatggagttggagaataaggcagctgtacctctggggggcttcctttgcaatgtagcagntaaatcaggggccatggagatggytggcctktgccccgcagcctgcatgcagaccccaagaatgaagctggctgttcagttcacaaacaggaaccagtattgctatggctccagggatctccttggactgcacaatatgaagaggcggcagctggctcggcttggctaccgtgtggtagagttatcctactgggaatggctcccactactgaaacgaactcgcttagaaaagttggcgtttcttcatgagaaagtattcacctctgctctctgaagggcatttaggggcatttctatggcaaagctataggtgtatactgtaccaggtgttgcaaaatgattataaaagccagaatgtaagtttggcgataaaatagtgtgttgaggagacttaattgtatccaaggcaggttagagctagtgtatgttactgtgaattgtaatgtagttggattgtacaaattactgcaaatgtatacatgttactcttagtaaataataaacatcttaatatgtcctacggtcaannaaaaaaaaaaaaaaaaaa

SEQ ID NO: 1650 - DNA, 853 bp, Homo sapiens
gaataaacccaacctacagagcatcatagcttagcctagcctgctttaaatgtgctcagaaaacttccattagcctgcaattaggcaaaatcatcaaacataaaaccatcaaacataaaatatttataaagtgttgaatatctcatatagtttattgaatacctgcatccaaaagatgctggcaacacagcacactttagagcattggttgtttactctcttgatggtatggctgcccagcatcaagagttatcatactgcaaatcgatagcccaggaaaagagcaaaattcaaagttcaaagtagagtttttactgaatgcttgcttttgcaccgtcgtaaagttgaaaagaatttaaattgaaccatcataagctgcagactgtgcattttatattgaaaagttaatatttttaatttttaatgcagagaagtacccaaagcataagaacacaacacattttcacaaagcaaacacagccatggaaccagcacccatatcaactaacaaaatactagtttgggcttttttgtactttatacaaatggactcatataatgttcatcttttgggtctgcctgctttcattcaatattaggtttgtgggttcatctctgctgtgtgtagttctttcctgttctttatacagtgttccaaagtatagtatattacagtttacccattctactcttgatagtaaatgttttcacatttgggctattacaaatagtgctgcagtgaacattcacatacacatcttttggtgaacatgtgttacatttccaagtacaattgctgggtgatgagtatgcatactcttaaaacatggttgtaccaatttacacctctacg

SEQ ID NO: 1651 - DNA, 688 bp, Homo sapiens
gggcagatgcgtggaagcactgtcttggtgatctggggtaagatccaagagaattccctgcattaccaggcagagactcttttccccttctcttgccttcctgcaaacaaatggagtctctctccatactgrgctccctggatcctggggcaggggtgacacaagagcccatatggccaccaccactgggactgcactggatcagacctaaagccagggcaacactgggtcttgcctaaggcccacagtgaccactgcctggctattgctgatgttcacccaaggcccaggggctkttcagtcagcagttggtgaacccagccagacccatgtccttcccttcaaggcaataagcttttctccctgctggcccaagtgggttcccttctggccctgggtgtgtctggaaatgtcatctgggagctagggcctggatgagtgcatcagggctctgcctggcaccctatcctactgtggctgagctggtgtacaagttgcaagacagtcttctttactcctcctcctcctctcctgtagcagaaagaaggaatctctcccaaagctgcgagctgtactgcttggggttgggggaggggtggcacaagcactcccttagccaccctggctggtgtctcactaatttgtgtgcaccccaagtccactggctccaagggcagcgcagcaccat

SEQ ID NO: 1652 - DNA, 1916 bp, Homo sapiens
gcgccgccgtcgtgcgtgccgctcggcggaggggacgggcctgcgttctctcctccttcctccccgcctccagctgccggcaggacctttctctcgctgccgctgggaccccgtgtcatcgcccaggccgagcacgatgccccctaaaaagggaggtgatggaattaaaccacccccaatcattggaagatttggaacctcactgaaaattggtattgttggattgccaaatgttgggaaatctactttcttcaatgtgttaaccaatagtcaggcttcagcagaaaacttcccgttctgcactattgatcctaatgagagcagagtacctgtgccagatgaaaggtttgactttctttgtcaataccacaaaccagcaagcaaaattcctgcctttctaaatgtggtggatattgctggccttgtgaaaggagctcacaatgggcagggcctggggaatgcttttttatctcatattagtgcctgtgatggcatctttcatctaacacgtgcttttgaagatgatgatatcacgcacgttgaaggaagtgtagatcctattcgagatatagaaataatacatgaagagcttcagcttaaagatgaggaaatgattgggcccattatagataaactagaaaaggtggctgtgagaggaggagataaaaaactaaaacctgaatatgatataatgtgcaaagtaaaatcctgggttatagatcaaaagaaacctgttcgcttctatcatgattggaatgacaaagagattgaagtgttgaataaacacttatttttgacttcaaaaccaatggtctacttggttaatctttctgaaaaagactacattagaaagaaaaacaaatggttgataaaaattaaagagtgggtggacaagtatgacccaggtgctttggtcattccttttagtggggccttggaactcaagttgcaagaattgagtgctgaggagagacagaagtatctggaagcgaacatgacacaaagtgctttgccaaagatcattaaggctgggtttgcagcactccaactagaatactttttcactgcaggcccagatgaagtgcgtgcatggaccatcaggaaagggactaaggctcctcaggctgcaggaaagattcacacagattttgaaaagggattcattatggctgaagtaatgaaatacgaagattttaaagaggaaggttctgaaaatgcagtcaaggctgctggaaagtacagacaacaaggcagaaattatattgttgaagatggagatattatcttcttcaaatttaacacacctcaacaaccgaagaagaaataaaatttagttattgctcagataaacatacaacttccaaaaggcatctgatttttaaaaaattaaaatttctgaaaaccaatgcgacaaataaagttggggagatgggaatctttgacaaacaaattatttttatttgttttaaaattaaaatactgtgtacccccccccmcyccatgaaatgcaggttcactaaatgtgaacagctttgcttttcacgtgattaagaccctactccaaattgtagaagcttttcaggaaccatattactctcatgatacttcattaatctccatcatgtatgccaagcctgacacatttgacagtgaggacaatgtggcttgctcctttttgaatctacagataatgcatgttttacagtactccagatgtctacactcaataaaacatttgacaaaaccaaaaaaaaaaaaaaaaaagtactagtaacgggtcttgttccatctcgagggggggcccggtaccaggtaagtgtacccaattcgccctatagtgagtcgtattacaattcactcgatcgcccttcccaacagttgcgcaacctgaatggcgaatggagatccaattttta

SEQ ID NO: 1653 - DNA, 1344 bp, Homo sapiens
  misc_feature (1338)..(1338): n equals a,t,g, or c
  misc_feature (1343)..(1343): n equals a,t,g, or c
ggcagagcacatgcgcaccgcagcgggtcgcgcgccctaaggagtggcactttttaaaagtgcagccggagaccagcctacagccgcctgcatctgtatccagcgccaggtcccgccagtcccagctgcgcgcgccccccagtcccgcacccgttcggcccaggctaagttagccctcaccatgccggtcaaaggaggcaccaagtgcatcaaatacctgctgttcggatttaacttcatcttctggcttgccgggattgctgtccttgccattggactatggctccgattcgactctcagaccaagagcatcttcgagcaagaaactaataataataattccagcttctacacaggagtctatattctgatcggagccggcgccctcatgatgctggtgggcttcctgggctgctgcggggctgtgcaggagtcccagtgcatgctgggactgttcttcggcttcctcttggtgatattcgccattgaaatagctgcggccatctggggatattcccacaaggatgaggtgattaaggaagtccaggagttttacaaggacacctacaacaagctgaaaaccaaggatgagccccagcgggaaacgctgaaagccatccactatgcgttgaactgctgtggtttggctgggggcgtggaacagtttatctcagacatctgccccaagaaggacgtactcgaaaccttcaccgtgaagtcctgtcctgatgccatcaaagaggtcttcgacaataaattccacatcatcggcgcagtgggcatcggcattgccgtggtcatgatatttggcatgatcttcagtatgatcttgtgctgtgctatccgcaggaaccgcgagatggtctagagtcagcttacatccctgagcaggaaagtttacccatgaagattggtgggattttttgtttgtttgttttgttttgtttgttgtttgttgtttgtttttttgccactaattttagtattcattctgcattgctagataaaagctgaagttactttatgtttgtcttttaatgcttcattcaatattgacatttgtagttgagcggggggtttggtttgctttggtttatattttttcagttgtttgtttttgcttgttatattaagcagaaatcctgcaatgaaaggtactatatttgctagactctagacaagatattgtacataaaagaatttttttgtctttaaatagatacaaatgtctatcaactttaatcaagttgtaacttatattgaagacaatttgatacataataaaaaattatgacaatgaaaaaaaaaaaaaaaaaaagggcggccgccccagagganccccng

SEQ ID NO: 1654 - DNA, 1109 bp, Homo sapiens
  misc_feature (1075)..(1075): n equals a,t,g, or c
  misc_feature (1077)..(1077): n equals a,t,g, or c
ttgttgaccagctaccctgagccaggcaccaccctgaaggagcttcttttcctctggggagaagcaaattcatgatgtgtgtgctggagatctggcactcatggccagtgctttccagtatcttgaactcttcgggggtcctgttgacccatttcgtgacctacctccgtgactgctctttttcctctgtctcttaagtgtgatggttttccagagtccaatcctcaggactttcccgtccacacacaggcctggtagtcaggtggctctaaaccattaggtgggttgtagacctctctcaagctgccacctccttgctgtcgccagatcgtatttcagtctgtcaggggttatctgtatctggaggttccactgttgcttcagtctcagttacttagaatggaacccagagtcctgcccctttccacctacatgctcttacttgaaagcacctgagacttattgggtccctgattcctgcttcgtctgtatccgcagagtagttgcatgtcatttggcctgttttctaaataatcccacatcatgtcctccctgcacttacattgccactgctctgatttgggcttttttttttttgggacaatgcctctgtcccaattctgagtaacagctctggttcttgccactaccagagttctctagcaaatctgagcatctgacagggtgaaaaattctgaatggcttcctgatgcctgactttatgggatcaaattcaagttgcacgctgcactcagtgcccttctggtatcatctgccaagaccagggcctgcttcaccacagccacaataaagtcctttcaagccctgawaatgccatgttttgtcctaaccttttgctgcagttaattactcttcctattatcttccatgaacttaagactgggcaaaaatgtttccttatctgtgagccactctgaacacaaacaggtcatgaagatagtgttgaaaacaataaatgacaaccaaaaggaaaagtggaatattacctagttacaaatagtgtaaattgagacmgaaatgttaaagctagaaagcaaggggcaatatttctagnantacaaattagtggcttggcctactacaatatt

SEQ ID NO: 1655 - DNA, 2173 bp, Homo sapiens
  misc_feature (2170)..(2170): n equals a,t,g, or c
acagagatttgatttctaatgctatgaattggaccagttggctgacatgccacaagaaacttcatattaagaaacctgctaatattttagttatgggtgaaggtcctgagcgaggaagagtaaaaattgctgacatgggctttgccgattatttaattcacctttgaagcctttagcagatttggatccagtggttgttacattctggtaccgagcccctgaactacttcttggagcaaggcattataccaaagctattgatatttgggctatagggtgtatatttgcagaactactaacgtcagaaccawtatttcactgtcgacaagaggacatcaaaactagtaatccttatcaccatgaccagctggacagaatattcaatgtaatgggatttcctgcagataaagattgggaagatataaaaaagatgcctgaacattcaacattaatgaaagatttcagaagaaatacgtataccaactgcagccttatcaagtatatggaaaaacataaagttaaaccagatagtaaagcattccacttgcttcagaagctgcttaccatggacccaataaagcgaattacctcagaacaggctatgcaggacccctatttcttagaagacccacttcctacatcagacgtttttgccggttgtcaaatcccttacccaaaacgagaatttttaacggaagaagaacctgatgacaaaggagacaaaaagaaccagcagcagcagcagggcaataaccacactaatggaactggccacccagggratcaagacagcagtcacacacagggacccccgttgaagaaagtgagagttgttcctcctaccactacctcaggtggacttatcatgacctcagactatcagcgttccaatccacatgctgcctatcccaaccctggaccaagcacatcacagccgcagagcagcatgggatactcagctacctcccagcagcctccacagtactcacatcagacacatcggtactgagctgcatcggaatcttgtccatgcactgttgcgaatgctgcagggctgactgtgcagctctctgcgggaacctggtatgggccatgagaatgtactgtacaaccacatcttcaaaatgtccagtagccaagttccaccacttttcacagattggggtagtggcttccaagttgtacctattttggagttagacttgaaaagaaagtgctagcacagtttgtgttgtggatttgctacttccatagtttacttgacatggttcagactgaccaatgcatttttttcagtgacagtctgtagcagttgaagctgtgaatgtgctaggggcaagcatttgtctttgtatgtggtgaattttttcagtgtaacaacattatctgaccaatagtacacacacagacacaaagtttaactggtacttgaaacatacagtatatgttaacgaaataaccaagactcgaaatgagattattttggtacacctttctttttagtgtcttatcagtgggctgattcattttctacattaatcagtgttttctgaccaagaatattgcttggatttttttgaaagtacaaaaagccacatagtttttccagaaaggtttcaaaactcccaaagattaacttccaacttataagtttgtttttattttcaatctatgacttgactggtattaaagctgctatttgatagtaattaaatatgttgtcattgatataaacctgtttggttcagcaaacaaactaaaatgattgtcatagacagtgttttatttttcctgttggtgttgctgatttgtgagcatgctttaagatgaaaaaagcatgaatgataacttccttaaaaaggtgcggcatccaattcaaatattttcgtcctgattttaaagctggttggtgtagtgctattaaaatttcgttcagttaattttccttttgaaaacttgttcgcacgttgtttagggtgcccttacttcagcaaaggagaaggagtaggagagccttagaatttttgaggaaaaaaaaacctataacatacaatgtactgtatcaaactattttacatgaatgacacaagtattctgaataaaaaataattgaacattgttaaaaacaaggtgttatgtaataaatttatttttcataaatcaaaaaaanaaa

SEQ ID NO: 1656 - DNA, 1394 bp, Homo sapiens
ggcggcgtcttccggggcctggcgggccggggaccgagggggcggggaggtgacccggcgggggcggagccagcgggcgggcgcggcgcgggaggcgaccatgcgcggcgcgggggcgatcctgcggccggcggcgcgtggtgcccgggacctgaacccgcggcgggacatctcctcctggctggcccagtggttccctagaaccccagccaggtccgtggtggccctgaagacccccatcaaggtggagctggtggcagggaaaacctacaggtggtgtgtgtgtggccgcagcaagaagcagcccttctgtgacggctcccacttcttccaacgcactggcctatctccactcaagttcaaggcccaagagacccgcatggtggcactctgtacctgcaaggccactcagaggcccccgtactgcgatggcacccacaggagtgagcgcgtgcagaaggcagaagtgggctccccactctgagggggctgctgctgtccagccacaggtggccttggctccaggcctctgacaggcacccccttctgtgggaaaggaaacaggtgctgagcccaagagactctggtacccactgctggctcatgaaggaagaattattccttataacctaaaagtctccagtctggggcaggcgggagtgggccctggttcaatgtttgctgatggggaagatggcaaaaacaagcctgcccaaccagactggtagtcctgcagtcactgctatgaggcccatgtgctgcctcctgctccagattttaacctctctgtgggctgggggcacctgaccagccacaggagagggcagttcagattcattctgtatggggtccccaagccaggctaaacccagagatgagaggcacccttcccttcttccctccaccccaaagaactacaggctccagaaagtatgcagcatttattacaaagccaagagatacagatgtcccagggcaaaggagggtacagtcacaggacctcagacacaggacaaggtgcaaacacagacaagcccatcagggggctcccaaccccacacacctacgctatgatggaatctcgagtctcgactcccgactcctctcagatctatgcacacttgaggaaatctcggtgggcagcgacctgccagggtctgtccctaaggaggtggtccgctgacctctcaaggggtgggggtggggtcagagcttacaggtttctgtcttcttgtgcttttagatgcagttgctctgtcctgaccaggtgaccgggcctcagactcggacgccccgctggtgttggtgcctcggaggggtgggcacgtggctagggtgagcgcttgaggctggctggacaggtacttgagggggagaggccgttccgccgcagg

SEQ ID NO: 1657 - DNA, 725 bp, Homo sapiens
  misc_feature (9)..(9): n equals a,t,g, or c
tacaggccnggtccattaaccagccagggaatgaacmtcagcagacagtytcccmccttgaatttattgccctctagtgcgcacttcaggccttccacctacaaaaaatcttcaggccccctcaaagctamcaaactcatcatccactggaactgttgggaagacagcttgagtggaattgcaatgaatgtacctgccagcagaggtagcaaccttaactcaagcggagctaataggactagtctgtctgggggaacaggaagtggaacacagggtgctaccaaaccattgtctactccacatagaccatccactgcctcagggtcttcagtggtaacagccagtgtgcagaagctcattcacacagaagacccatttaatgatgaacatcaggagaggcaagaggtggaaatgttggctaagaagtttgaaatgaaatattatgatgaattagttcccgcttctctaacaacaaaatatggaggcttttatatcaacactggcactctacagtttcgccaagcttcagatactgaagaagatgatattacagacaaccaaaagcacaagccacccaaggtccccaaaataaaagaagatgatattgagatgaagaagcggaagcggaaagaggaaggggaaaaggagaagaagccaaggaaaaaagttcccaaacaactgggagttgtggctctaaattcacacaagtctgaaaaaaaaaaaaa

SEQ ID NO: 1658 - DNA, 1593 bp, Homo sapiens
  misc_feature (697)..(697): n equals a,t,g, or c
  misc_feature (1032)..(1032): n equals a,t,g, or c
  misc_feature (1078)..(1078): n equals a,t,g, or c
ggctggatcgcgttgtcccgcctggcgcgcccgcagcgcctgccggtggccactcgcgcggtgctcatcaccgggctgtgactctggttttggcaaggagacggccaagaaactggactccatgggcttcacggtgctggccaccgtattggagttgaacagccccggtgccatcgagctgcgtacctgctgctcccctcgcctaaggctgctgcagatggacctgaccaaaccaggagacattagccgcgtgctagagttcaccaaggcccacaccaccagcaccggcctgtggggcctcgtcaacaacgcaggccacaatgaagtagttgctgatgcggagctgtctccagtggccactttccgtagctgcatggaggtgaatttctttggcgcgctcgagctgaccaagggcctcctgcccctgctgcgcagctcaaggggccgcatcgtgactgtggggagcccagcgggggacatgccatatccgtgcttgggggcctatggaacctccaaagcggccgtggcgctactcatggacacattcagctgtgaactccttccctggggggtcaaggtcagcatcatccagcctggctgcttcaagacagagtcagtgagaaacgtgggtcagtgggaaaagcgcaagcaattgctgctggccaacctgcctcaagagctgctgcaggcctacggnaaggactacatcgagcacttgcatgggcagttcctgcactcgctacgcctggccatgtccgacctcaccccagttgtagatgccatcacagatgcgctgctggcagctcggccccgccgccgctattaccccggccagggcctggggctcatgtacttcatccactactacctgcctgaaggcctgcgggccgcttcctgcaggccttcttcatcagtcactgtctgcctcgagcactgcagcctggccagcctggcactaccccaccacaggacgcagcccaggacccaaacctgagccccggcccttccccagcagtggctcggtgagcatgntgcacctatggcccagccactgcagcacaggaggctccgtgagccnttggttcctccccgaaaacccccagcattacgatcccccaagtgtcctggaccctggcctaaagaatcccacccccacttcatgcccactgccgatgcccaatccaggcccggtgaggccaaggtttcccagtgagcctctgcgcctctccactgtttcatgagcccaaacaccctcctggcacaacgctctaccctgcagcttggagaactccgctggatggggagtctcatgcaagacttcactgcagcctttcacaggactctgcagatagtgcctctgcaaactaaggagtgactaggtgggttggggaccccctcaggattgtttctcggcaccagtgcctcagtgctgcaattgagggctaaatcccaagtgtctcttgactggctcaagaattagggccccaactacacacccccaagccacagggaagcatgtactgtacttcccaattgccacattttaaataaagacaaatttttatttcttctaaaaaaaaaaaaaaaaaaaag

SEQ ID NO: 1659 - DNA, 572 bp, Homo sapiens
  misc_feature (90)..(90): n equals a,t,g, or c
  misc_feature (228)..(228): n equals a,t,g, or c
  misc_feature (244)..(244): n equals a,t,g, or c
  misc_feature (475)..(475): n equals a,t,g, or c
  misc_feature (553)..(553): n equals a,t,g, or c
aaagaactgtgtgagaacactgaaaactcaaaaagtcagaatgccttctttcctccaaatgactgtatcaactctccagcaagtgttcanaactgggctgaggctgagatgtctggaatgatacaagcagggttcaggatatgcgtaggaacaaagttcactgagtgaaagaagtatgttgtcatgcaatacaagtgagctaaaaatcattgtaaaacattgcagganctaacagacaaaatancaagtataaagaagacataaccgacctratagagctgaaaagcacactasaagaattttcataatgcartcacatggtgattatgtgtgactggattatgaaaattattgtagtgtgtgtgggcacccgagattgccctgtaagcaggacgcctgcacattacctctccatactgcagccctttatatggaaacttcctacatcactttgctgtgtgtgtttacacatgtngggttttgctgtacttgccctgacagcacaccgggagtgcaggccacaccccaacccacaccaactgccacttgaaanacaaaaccttgggtggggc

SEQ ID NO: 1660 - DNA, 405 bp, Homo sapiens
  misc_feature (85)..(85): n equals a,t,g, or c
  misc_feature (303)..(303): n equals a,t,g, or c
  misc_feature (353)..(353): n equals a,t,g, or c
  misc_feature (384)..(384): n equals a,t,g, or c
gcactagcgctatcacattctctccgggatttccccccctgctctgtggcttcttgttgagaggttgtttggttatggtttagcngttgaaaagattcaggttatccttttaaatgactttacgttttagtggagctgggagattacttgcctggcttctaatcttcatgttggttcattttatttccatatgtgtgtgggttatttgttcagtaattagaattagataaagtattctgcttttaagtagttttgagaaggcctaaaaatactaaagtgtattcataaatatttttattatgntcaagtagaagacacacctttgccatgtaaattttaacttttcttcaagncttcagtgaatctacagacctattttctcangagctcaacctggccttactt

SEQ ID NO: 1661 - DNA, 995 bp, Homo sapiens
  misc_feature (919)..(919): n equals a,t,g, or c
  misc_feature (987)..(987): n equals a,t,g, or c
gcaaaaccaacaaaacaaccaaatacaggtctcaagcgatttacagctcggtgcttaactcggtcaccggccgaggggcagccctctggcgccaaagccccgcctctctatgacgtcacacgaggagccctgaagtggcggtcaagcttgaggcgtcatctggctgcgctaagtgggccgttgccttacagttgctgagaggaggcgagaggcgggggcgctagggccgagatcatgtctgactgggagaggtttccttggcagcagaggacgctaggtttgggatgaaagaagctgggcagatgcaaaatctggagagcgcgagggccgggcggtcagtcagcacccagactggcagcatgaccggtgagtgtccgggaccctgctcccgccaccctacctttcgctctgccctgtgcgtctcccgtcattgaactccagattccttgtctgagcctctttgcctcccctgctgcttttggatgtctcctgcccgccctctgcgtgtcccctccgcggtcgccaggaccaatcggctcggtcgcactggcttttgaagtctcgctttttacccctgttagctacttctcacaggacctagagctggggcctctgaggtcaaagagcctgaacatttccaaacggcgcttttgccttgatttccaaattaaccgcacgtgacgctttcctgtatttcgactgctttaccgtcgaaggtcagataccaaggctttctaaagtcaaccttttcactctgctcagcctctggatggagctctttccagcagaagcccagcggcaaaaatctcagaaaaatgaagagggaaagcatggacccttaggagataatgaagagaggaccagagtatctactgacaaaagacagaaaaccatgttctgcttgtttgaaaatgattgnaaatgcaaagccttaacagtaatgatcagatctatgtctaggtcagtgccttgagctataaatggcanaacttcta

SEQ ID NO: 1662 - DNA, 636 bp, Homo sapiens
gcggacgcgtgggaaataattgcattaaaatacaaaaggtgatagggaagaattaaaagatttgcagtattgtacacaaaagctaataattttgtgtactttttatttattttggaggttttatatgatcttcaattgagtattaaataatttgcctagattaagcctaaaatgatgaccagctaattaaagaagatattttgaatctggttctgagctaaagttgagtaaattcttagctaagaaaaaattggaaatccatcatctatattagcaacagattctcagagtaaattgttaacttctatgatttatgataatcaagctggacttgatcatacaagttagtctcataatgtattggaccaaaatgtaaacttcattggtcagatttagaagcattcatgctcacaagttttgggaaagtgaaaaataataaaatcatcttggattttattctgtatattaaaatttatcttttaaggaaacaatctgtatactacttgcttgtatagccttttgacccttcttgagtttttcagaagcctttaatttttatactttcaataccatatttacattatatactttaattaacaatgtgagtttctctgtgaaaaaaaaaaaaaaaaaaaa

SEQ ID NO: 1663 - DNA, 1255 bp, Homo sapiens
  misc_feature (1251)..(1251): n equals a,t,g, or c
ggcagagcaggaggagcacgggaaaagaaagaagaaaggcaaggggctagggaagaagagggacccatgtcttcggaaatacaaggacttctgcatccatggagaatgcaaatatgtgaaggagctccgggctccctcctgcatctgccacccgggttaccatggagagaggtgtcatgggctgagcctcccagtggaaaatcgcttatatacctatgaccacacaaccatcctggccgtggtggctgtggtgctggatttgatgagttaactgtgaaataccacaagcctgagaactgaattttgggacttctacccagatggaaaaataacaactatttttgttgttgttgtttgtaaatgcctcttaaattatatatttattttattctatgtatgttaatttatttagtttttaacaatctaacaataatatttcaagtgcctagactgttactttggcaatttcctggccctccactcctcatccccacaatctggcttagtgccacccacctttgccacaaagctaggatggttctgtgacccatctgtagtaatttattgtctgtctacatttctgcagatcttccgtggtcagagtgccactgcgggagctctgtatggtcaggatgtaggggttaacttggtcagagccactctatgagttggacttcagtcttgcctaggcgattttgtctaccatttgtgttttgaaagcccaaggtgctgatgtcaaagtgtaacagatatcagtgtctccccgtgtcctctccctgccaagtctcagaagaggttgggcttccatgcctgtagctttcctggtccctcacccccatggccccaggcccacagcgtgggaactcactttcccttgtgtcaagacatttctctaactcctgccattcttctggtgctactccatgcaggggtcagtgcagcagaggacagtctggagaaggtattagcaaagcaaaaggctgagaaggaacagggaacattggagctgactgttcttggtaactgattacctgccaattgctaccgagaaggttggaggtggggaaggctttgtataatcccacccacctcaccaaaacgatgaagktatgctgtcatggtcctttctggaagtttctggtgccatttctgaactgttacaacttgtatttccaaacctggttcatatttatactttgcaatccaaataaagataacccttattccataaaaaaaaaaaaaaaaaaaatntctc

SEQ ID NO: 1664 - DNA, 518 bp, Homo sapiens
  misc_feature (31)..(31): n equals a,t,g, or c
  misc_feature (198)..(198): n equals a,t,g, or c
  misc_feature (448)..(448): n equals a,t,g, or c
  misc_feature (458)..(458): n equals a,t,g, or c
  misc_feature (471)..(471): n equals a,t,g, or c
ggaatctcctactatagtgaaagctggtacncctgcaggtaccggtccggaattcccgggtcgacccacgcgtccgcccacgcgtccgggactccttgaaccctggacttcaaagggggtagagattgctgcagccccgcattataaacacttgggtttagaagccacagaataccatttcctgcatattctattggncaaagcaggtggagaaccagctctgaccaagagggtaggggatcaaaccttcacctcttgatgggagaggcatcacacacacacacatgcacacatacatatrcatatatacattaatgacttggcatttatagtgcttgataaattagagttctattaatagaatgtttggactagggctacaggataaactgttgccctcacttaagagaatcaggaaatggactttgggagtcctgcttggcattantttgtggcanggttgcagatgcnctgtatttacacttaagaagtcttcgaacatttccctctttgacatt

SEQ ID NO: 1665 - DNA, 793 bp, Homo sapiens
gcttgaaactccagaatgttcccaccatgggtggccaagccacatcacagggaagaaaccttcaatgtgctttctgtgcagcacactcctctcttctgtgatctgaacacgaaccaccacctctaggctaggactcagatgcagtgagctccactatacccacagtcacatacggacagtaacttctcttcccgaatcctgtctggatccaagtgtccctgggccagagtctccctaagagacagccctgagtccaagcccctgagaagctcagggccatgcaaagcaggaggcctgggtgtggaaggggtatgggtagggcctgagaatggactgaggggcagacagttcagggaagggaagatcactggggtagagaggtgacctgragggaggtcagcgtgggcaggggtgagaccaaggaaaagattgaagaacagaaggcattggccttacagcttcaaaaccagagattgcaggagcgggaacattcagtacatgattcagtagaactacatcttcgtgtacctcttgaaaaggagattcctgttactgttgtccaagaaacacaaaaaaaaggtcataaattaactgatagtgaagatgaatttcctgaaattacagaggaaatggagaaagaaataaagaatgtatttcgtaatgggaatcaggatgaagttctcagtgaagcatttcgcctgaccattacacgcaaagatattcaaactctaaaccatctgaattggctcaatgatgagatcatcaatttctacatgaatatgctgatgggagc

SEQ ID NO: 1666 - DNA, 1062 bp, Homo sapiens
gggcacgagtttctgtcctccttcctggctcctccttcctccccacccctctaataggctcataagtgggctcaggcctctctgcggggctcactctgcgcttcaccatggctttcattgccaagtccttctatgacctcagtgccatcagcctggatggggagaaggtagatttcaatacgttccggggcagggccgtgctgattgagaatgtggcttcgctctgaggcacaaccacccgggacttcacccagctcaacgagctgcaatgccgctttcccaggcgcctggtggtccttggcttcccttgcaaccaatttggacatcaggagaactgtcagaatgaggagatcctgaacagtctcaagtatgtccgtcctgggggtggataccagcccaccttcacccttgtccaaaaatgtgaggtgaatgggcagaacgagcatcctgtcttcgcctacctgaaggacaagctcccctacccttatgatgacccattttccctcatgaccgatcccaagctcatcatttggagccctgtgcgccgctcagatgtggcctggaactttgagaagttcctcatagggccggagggagagcccttccgacgctacagccgcaccttcccaaccatcaacattgagcctgacatcaagcgcctccttaaagttgccatatagatgtgaactgctcaacacacagatctcctactccatccagtcctgaggagccttaggatgcagcatgccttcaggagacactgctggacctcagcattcccttgatatcagtccccttcactgcagagccttgcctttcccctctgcctgtttccttttcctctcccaaccctctggttggtgattcaacttgggctccaagacttgggtaagctctgggccttcacagaatgatggcaccttcctaaaccctcatgggtggtgtctgagaggcgtgaagggcctggagccactctgctagaagagaccaataaagggcaggtgtggaaaaaaaaaaaaaaaaaaaaaaaaaaaaaaaaaaaaaaaaaaaaaaaaaaaaaaa

SEQ ID NO: 1667 - DNA, 612 bp, Homo sapiens
  misc_feature (583)..(583): n equals a,t,g, or c
ggcttcgtaagatttaacatatcagaactggggaaagagaaaggagggggttatttttttgcagcattttccagtcacatatcagggttatactgaactgcaacaaagatcaacttttaaaaattagccttcttaaaatacaaaatgatttaagtattttaaagataatttatttgccttgctcttgccttctaacattagccatttcatggagaggctaaaacttatactccaaaaaatgtggaagcacattttaatgggagtaaaattaaaaaattttgagaaagggtaaaatcttatgaatatgcatcttcttagctttatcttccctttgataggtaggcacttatgctcttccatctgctccatgtcaaatagggctcagggaagccagtcatttccttagcgagatgattactcctttgccttgaaacatttattggggcccaccatgtatggatcagtgtgtggtartgartcatactcccaaatcartgattcccaartcttggctttgggraccmgtatgccttgtattctcttaaaaagcaacaataatttcttgaaacaaaattagttcaanaattggaattaaaaaatatttccagttgt

SEQ ID NO: 1668 - DNA, 521 bp, Homo sapiens
  misc_feature (74)..(74): n equals a,t,g, or c
  misc_feature (486)..(486): n equals a,t,g, or c
catcttaggtgacactatagaaggtacgcctgcaggtaccggtccggaattcccgggtcgacccacgcgtccgnccacggtccggctttcagcaattgatggtgctttgttgtggtgtctgctggaagtctactgccattatagggaaccttgcttgttagcttctctagatctctattctaaacaatctgttagtgatgataaattctgtaggagggtctattctgagccgttaacttcctgtaaggggaaaatgggtgggttaccagaaataccattgaagcagggtgggctgtggggtggaaggttggggtatttgtcttgagaattaaaaactacgaaacacttttgtacacaactgattttttaaaaaataaacacatttttaaagatgttgaatttttccccccttattgggaattcttaaaaataaatgcatgcatgttttcccctgaaaaaaaaaaaaaaaaaaaaaaaaaaaaaaangaaaaaaaaaaaaaaaaaaaaaaaaaggggggccg

SEQ ID NO: 1669 - DNA, 887 bp, Homo sapiens
  misc_feature (38)..(38): n equals a,t,g, or c
ctcaaaaaaaaaaaaaaaaattaaaaacttccttttantcgcagagctggaaaagttggagttgtttttggtatacttggagagctggctttctaaagtgctgctttgaggactgttgtgtaaagcacttgattcgtcttccctttgctggagttatgggcctgggcttttacactggggttctgaagtaacaaacaaagtcagtccagaaatagttgctcagcaatctcattgttacagtgtcgcaaaatgagctcatattagctttattttctgctaccaatagagtgttcctaagtatttaaagtgtgtgactcctttcttatagagccagcaagctgtattggaatcacttttccagtgttgtaaatgttatttttgtgggtcagtcagtatactcgtgaatgacagaaaaacagatcccaacaatgcaaagtattatatgtgtaaaaaagaacagaaaaaagaagctgccttgttagtaacgggctctatggtttttctcatcaagaggtcatgacgccagtcagatcacactagccttggscacagctgcctcctaccccagggcctgccaggctctcggggccatgctgtccaaaggagccctgaaccctgctgacatcaccgtcctgttcaagatgttcacaagcatggaccctcctccggttgaacttgaagttgcttctcaagaatccccaatgtcagctggtaaggtgactttggaaagtctgtgcttgtctgattgtctgaaggctgtgaatgcaaatccatcattgtcctggtccttcctcagtcacactctctgcctggagcctgttgggcccctgctgtgtagggataccctgaggggaggtgggtgagcagtgccctcacgcctgccatcc

SEQ ID NO: 1670 - DNA, 847 bp, Homo sapiens
gattgtgtctccagcccctcaggctgaagacactgccttccccctacacctccccaggggtgcgggttaccagcactgggaggccaggccatgctcacgcttcatggaggacacagcagcagagaagctsacaaggttgtaaactccatcctggcattccgggagaaggaatggcagaggctgcagtcaaacccccacctgaaagaggggtccgtgacctccgtgaacctgactaagctagagggtggcgtggcctataacgtgatacctgccaccatgagcgccagytttgacttccgtgtggcaccggatgtggacttcaaggcttttgaggagcagctgcagagctggtgccaggcagctggcgagggggtcaccctagagtttgctcagaagtggatgcacccccaagtgacacctactgatgactcaaacccttggtgggcagcttttagccgggtctgcaaggatatgaacctcactctggagcctgagatcatgcctgctgccactgacaaccgctatatccgcgcggtgggggtcccagctctaggcttctcacccatgaaccgcacacctgtgctgctgcacgaccacgatgaacggctgcatgaggctgtgttcctccgtggggtggacatatatacacgcctgctgcctgcccttgccagtgtgcctgccctgcccagtgacagctgagccctggaactcctaaacctttgcccctggggcttccatcccaaccagtgccaaggacctcctcttcccccttccaaataataaagtctatggacagggctgtctctgaagtactaacacaaggaaaaaaaaaaaaaaaaaaaaaaaa

SEQ ID NO: 1671 - DNA, 508 bp, Homo sapiens
tttctcttccccaggtgcctcaccttcccttcatgggctttctgcccgcctttgggtacccctagcgggcccgaggctcaccctggtttggagccagggatgctagtgtccccggggcccagcgcagcgctgatgggaagggacttttgtccgtggggaacccaggacccacttctcygaggtgasctttttttttttctgccgcagtgcctcacctctcctccctcaaagctcaccttcccctcatgagccctctgtccgcctagaggtaccgctagcggcccgaggcacaccctgtggctgaaccagggactccagggtccctgcggcccagcacaggcgctgatgggaagacacgttcgttcgtggaggacccaggccccgtttctcagtggcgtggttttttttctctgcccgggtgcctcaccttcctctaatgggccttttgcccgctttggggtacccctagcgggccctattcgcaccctgcgctcgaaccagggtcgca

SEQ ID NO: 1672 - DNA, 544 bp, Homo sapiens
gcccagcatagagaggatggctgcccatcctcagctcccctccttgcttcctcgagtgttctgactccgcactagccgcgccctgtaggaagaatagggtgtccacctctccycggtgctcgcctagtcactccagttgaagacgggacgcgtgcccgatctcaagagagcccccgacccgtccgtggggaaccacatcgacgcttcttctcagcctccagtctccagttccaaggatgggtcatctccaaccmcttgccctgcctcagtttctccatctccctgctgcagccccgaggaactgggcaccctcgagccgtgcatggcccgcgtgcgctccgaggtcccggccgggtcgcgccgcagtcttcctcaagtatgcgcggccccagcgccaggggaccagccttgccgccgccttgcctgccgccgcctccagtctgagcctccctgagtactgggactcagtcacaaaaaaatcaacaacaaaaaacaaaaccctcccagtgtgtgtccgtctctcatctcaataaaagaatttatt

SEQ ID NO: 1673 - DNA, 444 bp, Homo sapiens
ggtcggacatgcaaaaaggagttaacaaggaaagatactatcatggcacatgtgactgaatttcataatggacacagatatttttatgagatggatgaggtagaaggtgaaactttgccatcatcctctacaacattggataatttgactgctaacaagccttcatcagctattactgttattgatcattccccggcaaatagttctccgaggggtaaatggcaatgccggatttgtgaagatatgtttgattcccaggaatatgtaaaacagcactgcatgtctttggcaagccacaagtttcatagatacagctgtgctcactgcagaaagccttttcataagatagaaacattgtaccgacattgccaagatgagcatgacaatgagataaagattaaatacttctgtgggctttgtgatcttatctttaatgtggaagaa

SEQ ID NO: 1674 - DNA, 1279 bp, Homo sapiens
  misc_feature (1273)..(1273): n equals a,t,g, or c
tcccgggtcgacccacgcgtccgcggacgcgtgggatcaacaaactcatccgaattggcaggaatgagtgtgtggttgtcattagggtggacaaagaaaaaggatatattgatttgtcaaaaagaagagtttctccagaggaagcaatcaaatgtgaagacaaattcacaaaatccaaaactgtttatagcattcttcgtcatgttgctgaggtgttagaatacaccaaggatgagcagctggaaagcctattccagaggactgcctgggtctttgatgacaagtacaagagacctggatatggtgcctatgatgcatttaagcatgcagtctcagacccatctattttggatagtttagatttgaatgaagatgaacgggaagtactcattaataatattaataggcgcttgaccccacaggctgtcaaaattcgagcagatattgaagtggcttgttatggttatgaaggcattgatgctgtaaaagaagccctaagagcaggtttgaattgttctacagaaaacatgcccattaagattaatctaatagctcctcctcggtatgtaatgactacgacaaccctggagagaacagaaggcctttctgtcctcagtcaagctatggctgttatcaaagagaagattgaggaaaagaggggtgtgttcaatgttcaaatggagcccaaagtggtcacagatacagatgagactgaacttgcgaggcagatggagaggcttgaaagagaaaatgccgaagtggatggagatgatgatgcagaagaaatggaagccaaagctgaagattaactttgtgggaaacagagtccaatttaaggaacacagagcagcgcttcctggctgtaaatcctagacttgaaagttttccagtattgaaaacttcaaagctgaatattttttatttctaagtatttaaatgttctaacagatcagaacatgaaatgccctcctaaatgtcagctgttgtcacacagtagctccaacactttgagcatttttaagggagtggcctcatttcactagagacaaatctttaagaatagttctaaaattgggcttgtgatttccatttctgatgtctccagattggcacccctttctagttcaatgcctcacgagatttgccaggggcatccaaggcaaacaatcccaatctttctatataaaatgtattcaagcaaacatcaaataaatttctgggatatttaaaaaaaaaaaaaaaaaaggggggggccttaaagaaccaagtttantttggg

SEQ ID NO: 1675 - DNA, 2509 bp, Homo sapiens
cggctcaggtgctggcgttccgcgcggcgccgcctctgctgcgggycgggggagccagacgaggtgctgccgggtaggaaaaaatccagggctcattcataccccaggtcacgattccggggtcgcccccagcacttctccgccgggtgcatcaacctgaaaaagccccktcttcctggaaaccctccttctccagcgtttcaacggggaaactgatcagctgacaccagccccagtcctgcgaggggccggcgacctttgacctttctccaaargggaccacctggcttcatgtgtggatttccacggctcttgcccagaggcgggtacactgtgttccaatgtgccacggaactcacgcagtggcactttgtggcttcatgaaggaagaggcaggccacgcaacacttcctccccaagccaaggagaagtatcacttttagaggcagaggagcggaaggcagtgggtgtgaccaaaagtgccatttgttaaagactgttggagcagaactactgagaaaaaccaggcattgtatcttcagttgtcatcaagttcgcaatcagattggaaaagctcaacttgaagctttcttgcctgcagtgaagcagagagatagatattattcacgtaataaaaaacatgggcttcaacctgactttccacctttcctacaaattccgattactgttgctgttgactttgtgcctgacagtggttgggtgggccaccagtaactacttcgtgggtgccattcaagagattcctaaagcaaaggagttcatggctaatttccataagaccctcattttggggaagggaaaaactctgactaatgaagcatccacgaagaaggtagaacttgacaactgcccttctgtgtctccttacctcagaggccagagcaagctcattttcaaaccagatctcactttggaagaggtacaggcagaaaatcccaaagtgtccagaggccggtatcgccctcaggaatgtaaagctttacagagggtcgccatcctcgttccccaccggaacagagagaaacacctgatgtacctgctggaacatctgcatcccttcctgcagaggcagcagctggattatggcatctacgtcatccaccaggctgaaggtaaaaagtttaatcgagccaaactcttgaatgtgggctatctagaagccctcaaggaagaaaattgggactgctttatattccacgatgtgacctggtacccgagaatgactttaacctttacaagtgtgaggagcatcccaagcatctggtggttggcaggaacagcactgggtacaggttacgttacagtggatattttgggggtgttactgccctaagcagagagcagtttttcaaggtgaatggattctctaacaactactggggatggggaggcgaagacgatgacctcagactcagggttgagctccaaagaatgaaaatttcccggcccctgcctgaagtgggtaaatatacaatggtcttccacactagagacaaaggcaatgaggtgaacgcagaacggatgaagctcttacaccaagtgtcacgagtctggagaacagatgggttgagtagttgttcttataaattagtatctgtggaacacaatcctttatatatcaacatcacagtggatttctggtttggtgcatgaccctggatcttttggtgatgtttggaagaactgattctttgtttgcaataattttggcctagagacttcaaatagtagcacacattaagaacctgttacagctcattgttgagctgaatttttcctttttgtattttcttagcagagctcctggtgatgtagagtataaaacagttgtaacaagacagctttcttagtcattttgatcatgagggttaaatattgtaatatggatacttgaaggactttatataaaaggatgactcaaaggataaaatgaacgctatttgaggactctggttgaaggagatttatttaaatttgaagtaatatattatgggataaaaggccacaggaaataagactgctgaatgtctgagagaaccagagttgttctcgtccaaggtagaaaggtacgaagatacaatactgttattcatttatcctgtacaatcatctgtgaagtggtggtgtcaggtgagaaggcgtccacaaaagaggggagaaaaggcgacgaatcaggacacagtgaacttgggaatgaagaggtagcaggagggtggagtgtcggctgcaaaggcagcagtagctgagctggttgcagstgctgatagccttcaggggaggacctgcccaggtatgccttccagtgatgcccaccagagaatacattctctattagtttttaaagagtttttgtaaaatgattttgtacaagtaggatatgaattagcagtttacaagtttacatattaactaataataaatatgtctatcaaatacctctgtagtaaaatgtgaaaaagcaaaaaaaaaaaaaaaaaaaaaaaaaaaa

SEQ ID NO: 1676 - DNA, 421 bp, Homo sapiens
gtgagtgtggctgcgggccttgctgcacggaccccatgggagctgtgagtgggtcagacttccctggttcaggagacagacagcggacggatcccaggctgggcagctggagggaggkrcccggggcgctgggcagccgggctctacacagtcagcagctccggggccgcaggccggcggggtccacacaggctggccgggctgggcctccttggagcctgctacgccctcgtgggcacgtggagaagggcccactgtctccacacgccagccacaggggagccctggccaggcgcccagccaggggagcgtgtgcctgggatgggtcacagaaccagcgggcacctgtgaggctggccagcaccgtggggctgtgggaatcgctcttatttatatttwaacmccttgrattttcaaaaaa

SEQ ID NO: 1677 - DNA, 525 bp, Homo sapiens
  misc_feature (205)..(205): n equals a,t,g, or c
  misc_feature (421)..(421): n equals a,t,g, or c
  misc_feature (435)..(435): n equals a,t,g, or c
  misc_feature (502)..(502): n equals a,t,g, or c
  misc_feature (514)..(514): n equals a,t,g, or c
gggacatctacagccactgtgtaaatagaactgcctaatgttgagagtggtttytagcattaggtttagcaagggggagatccgtgggttgtgcgtcagctttgggtgaattttgtttctaccctgtcacggggaaagttcgggttgagtccaggagtgcacactgctgctgccacccaatgcgctacatatcacttttttttgntttgttttgttttgtttttaaaagatcattttatcttaaaaaggaaagctgatccaagtaaacacgaaagtatttgacacaccccacagattttacatgtgtgtaaatgtttcactttaaaatctctatgacagatacacaggaaacatgagatggtttctgctaatgagtggcccttgagtacacacttagatgctgtctgccctgtaaatttgnatctggtgccccanggcactcaactcttctagcacaggctgaaaacacgtgtgtgtcaactgaggttcacacccacttggngaatgagcctgntttctttccca

SEQ ID NO: 1678 - DNA, 1349 bp, Homo sapiens
  misc_feature (9)..(9): n equals a,t,g, or c
tcccggtcnacccacgcgtccggcggcgccgcgcgaaggttcagcagggagccgtgggccgggcgcgccggttcccggcacgtgtctcggcacgtggcagcgcgcctggccctgggcttggaggcgccggcgccctggatccgccggccgtggtcgccgagtcggtgtcgtccttgaccatcgccgacgcgttcattgcagccggcgagagctcagctccgaccccgccgcgccccgcgcttcccaggaggttcatctgctccttccctgactgcagcgccaattacagcaaagcctggaagcttgacgcgcacctgtgcaagcacacgggggagagaccatttgtttgtgactatgaagggtgtggcaaggccttcatcagggactaccatctgagccgccacattctgactcacacaggagaaaagccgtttgtttgtgcagccaatggctgtgatcaaaaattcaacacaaaatcaaacttgaagaaacattttgaacgcaaacatgaaaatcaacaaaaacaatatatatgcagttttgaagactgtaagaagacctttaagaaacatcagcagctgaaaatccatcagtgccagcataccaatgaacctctattcaagtgtacccaggaaggatgtgggaaacactttgcatcacccagcaagctgaaacgacatgccaaggcccacgagggctatgtatgtcaaaaaggatgttcctttgtggcaaaaacatggacggaacttctgaaacatgtgagagaaacccataaagaggaaatactatgtgaagtatgccggaaaacatttaaacgcaaagattaccttaagcaacacatgaaaactcatgccccagaaagggatgtatgtcgctgtccaagagaaggctgtggaagaacctatacaactgtgtttaatctccaaagccatatcctctccttccatgaggaaagccgcccttttgtgtgtgaacatgctggctgtggcaaaacatttgcaatgaaacaaagtctcactaggcatgctgttgtacatgatcctgacaagaagaaaatgaagctcaaagtcaaaaaatctcgtgaaaaacggagtttggcctctcatctcagtggatatatccctcccaaaaggaaacaagggcaaggcttatctttgtgtcaaaacggagagtcacccaactgtgtggaagacaagatgctctcgacagttgcagtacttacccttggctaagaactgcactgctttgtttaaaggactgcagaccaaggagcgagctttctctcagagcatgcttttctttattaaaattactgatgcagaacatttraaaaaaaaaaaaaaaaaaaa

SEQ ID NO: 1679 - DNA, 486 bp, Homo sapiens
  misc_feature (393)..(393): n equals a,t,g, or c
  misc_feature (459)..(459): n equals a,t,g, or c
  misc_feature (478)..(478): n equals a,t,g, or c
  misc_feature (484)..(484): n equals a,t,g, or c
gcgttctgcaggtgggcgtcgcgccgacttaccaacaaccgggtcgggggctcccggaagtgctcttgcggcttactgcctggcacagctgtcattcttctctacagaagagcttctcctcatcaactggggatgattacagttcttcctaaaaaaggatggctgctctttttctaaagaggttaacactacaaactgtaaagtctgaaaatagttgcattagatgttttggtaaacacatcctgcaaaagacagcaccagcacagttgtcccctattgcttctgccccaagactctccttcctaattcatgcaaaagcctttagtaccgctgaagacacccagaatgaaggaaaaaagacaaaaaagawtaaaacagcttttagtaacgttnggaagaaaaattagtcagcgagttatttcacttatttgrtgagragggcaatggttttggggaacnggcaccgggccaatgtggnttggantt

SEQ ID NO: 1680 - DNA, 1957 bp, Homo sapiens
tattaacataatattgagacgtaatacgtcgaacagtggaggagcggaagcttaagctagaaatggagaaacaagaatttgaacaactgagacaggaaatgggmgaggaagaggaagaaaatgaaacctttggattgagcagagaatatgaagaactgatcaaattaaaaaggagtggctctattcaagctaaaaacctaaaaagcaagtttgaaaaaattggacagttgtctgaaaaagaaatacagwaawaaatagaagaagagcgagcaagaaggagagcaattgaccttgaaattaaagagcgagaagctgaaaattttcatgaggaagatgatgttgatgttaggcctgcaagaaaaagcgaggctccatttactcacaaagtgaatatgaaagctagatttgaacaaatggctaaggcaagagaagaagaagaacaaagaagaattgaagaacaaaagttactacgcatgcagtttgaacaaagggaaattgatgcagcactacaaaagaaaagagaagaggaggaggaggaagaaggtagcatcatgaatggctccactgctgaagatgaagagcaaaccagatcaggagctccatggttcaagaagcctcttaaaaacacatcagttgtagacagtgagccagtcagatttacggttaaagtaacaggagaacccaaaccagaaattacatggtggtttgaaggagaaatactgcaggatggagaagactatcaatatattgaaaggggagaaacttactgcctttacttaccagaaactttcccagaagatggaggagagtatatgtgtaaagcagtcaacaataaaggatctgcagctagtacctgtattcttaccattgaaagtaagaattaatcactctttttatcttttattctattaatttttttttccttaaaatcacttttcttcttctcttttttagctgatgactactagctcccctcccctctccctggaactttctctttcactccaactttcttactacatccatcttttctgtggcggggccaaaaaaggaaaccaggagtgccactatgctgacttcttattccttttcataacagtcttcaaagcacagctcatctaaagaatgcctacttcttttccaaataagcatcagatttatcgcctattatgcagtaacagtcaataaaatgtacttatgggggggaattactcaattattctatcagaacctattataaagactgtatttcccatagacgtttacagcaactatgtttaaaaaacaaaaacaaaaaaaaaacacacaaacctaagtagaatacattattttgcatgaaggaatgtcatttctgagctttttacacctaaaattaggctgaaatagctgagataattaatttggaacctatcaatttgagtggactttttctttagtagtacaccattttggttgttgtagtttcaaagtctttctgaagcagatatattgggattggagcggggtggggaaaactgtcactcctttcagaggaaaaggggaggagcatggagaaaaacaaaaattaaaggacttaaagaatggctatacagtgttgagtgttgaggatattaaacatgttatttttcaaacgtatgtaatatatattaaatttataaagcaaatttatgttgtgatcttgcctgaacaaattatattttaatgaaaaaactttctattaatagttcacgcaagagaaaacactttcaacatagtcgaaggcttcaagatctaagtgtatcagacttagggaaaaagtggcacaaccttcgatttaaaattctagtctttaaaatgagtttgtaaataattagctattacgttctattaagttgttttatattttaattttctggaagacaattttattttacaacgtgaacccaaataaagtaacttctgtatttaaaagtcaaaa

SEQ ID NO: 1681 - DNA, 815 bp, Homo sapiens
  misc_feature (28)..(28): n equals a,t,g, or c
  misc_feature (33)..(33): n equals a,t,g, or c
  misc_feature (43)..(43): n equals a,t,g, or c
  misc_feature (73)..(73): n equals a,t,g, or c
  misc_feature (91)..(91): n equals a,t,g, or c
  misc_feature (646)..(646): n equals a,t,g, or c
  misc_feature (721)..(721): n equals a,t,g, or c
tggcattatgggatgtatggccaggctnttccntgccaggaanttattccaggcatggtggaatccttcatcnggaatggatggttttccntttatgccaaaaggcccatgtctaaccctttattattaattccagcagcatggggactggtaccagtggttcctcaaaagtgtggaccccggacccagccagtgrgagcatcatctgggaacttggttaaaaaatgtaaattattaggtcctaccttaaacctcctaaatcacaagctttgctttaacaagcaacctgcactttaaacaaactctctaggtgattctggtgcatgctaaagtttgagcytcttataataammtasaaactgtaccacaactgataattatagtctcctttagggataaatcaattattagttacaaattaggcaataaaaggcaaaatactagagaaaataaccaagagattaagtttcttcacatatcagtgaaaaaaagtaaagaacattttatggtgaattwgagatatacagagaattacatttaacattcaccataaaaagtaaagaacattttatggtgaatttgagatatacagagaattacatttaacattcactgatgtttcatctgtcagtagaaagaaggccgnaagaaaggtgatcccaaactgggtaatgtcgagtaagaggaatgtaaaatggcaaaaccaggaagcaaaaattangaagcaagagctgctctaaaggaaaaggaaaagtctcttcactaacacagaagagcgcaggagctgcagggccggttaatcaaccacccagata

SEQ ID NO: 1682 - DNA, 832 bp, Homo sapiens
  misc_feature (50)..(50): n equals a,t,g, or c
  misc_feature (86)..(86): n equals a,t,g, or c
ttgcaggtaccggtccggaattcccgggtcgacccacgcgtccgaggttngaaggcgagatctgattcttcacccctcacccctgnccgggctggtgacactgaaggcaaagactgggacaccaagggtccagaactggctcgtgccccactctgtgcggcatgagcagcgcccccgcgcsgggcccggcgcccgccagcctcacgctctgggacgaggaggacttcmagggccgtcgctgtcggctgctaagcgactgtgcgaacgtctgcgagcgcggaggcctgccmagggtgcgctcggtcaaggtggaaaacggcgtttgggtggcctttgagtacccgacttccagggacagcagttcattctggagaagggagactatcctcgctggagcgcctggagtggcagcagcagccacaacagcaaccagctgctgtccttccggccagtgctctgcgcgaaccacaatgacagccgtgtgacactgtttgagggggacaacttccaaggctgcaagtttgacctcgttgatgactacccatccctgccctccatgggctgggccagcaaggatgtgggttccctcaaagtcagctccggagcgtgggtggcctaccagtacccaggctaccgaggctaccagtatgtgttggagcgggaccggcacagcggagagttctgtacttacggtgagctcggcacacaggcccacactgggcagctgcagtccatccggagagtccagcactaggctccacggccccagacaccttccctgaggacactcaataaaggttcctgaatcttcctgccaaaaaaaaaaaaaaaa

SEQ ID NO: 1683 - DNA, 591 bp, Homo sapiens
gcaagaaggacttctttgggaaatcagaccccttccttgtgttctacaggagcaatgaggatggcacgttcaccatctgccacaagacagaggttgtgaaaaacacgctgaatcctgtgtggcagcccttcagcatccctgtgcgggctctgtgcaatggagactatgacagaacggtgaagattgatgtgtacgactgggaccgggatggaagccacgatttcattggtgagttcaccaccagctaccgggagctgagcaaggcccagaaccagttcacagtatatgaggttcttaaccctcggaagaaatgtaagaagaagaaatatgtcaactcaggaactgtgacgctgctctccttctctgtggactctgaattcacttttgttgattacatcaagggagggacacagctgaacttcacagtagccattgacttcacggcttccaatgggaatcctctgcagcctacctycctgcactacatgagtccctaccagctcagcgcctatgccatggccctcaaggcagtgggagagatcatccaggactatgacagtgataagctcttcccagcttatggctttgggg

SEQ ID NO: 1684 - DNA, 616 bp, Homo sapiens
agttttatcatctgtaaaatggagataagtattgtcagagtaaacatgaagattagaaagaacacttaatgtgctgggccttttataggttaacactgacatctcaggctgaactatatacattttccttcacaaccatatcaatccttataaactatggatttatgctccttaaaacaatatataatgctgatcactactataaatgcgtggttttaaccaactgtactgaaacagctttgagtttatattctgtttggatatttggagaaaacaacaagtgctctcaagagyayttgcttagaggccggctgtgtgagtggataactttgaaagctgcttttgagacgccagtgtctggcatttcctgcattctggcctggaggccggacgtgaatctgacttctagtaaaaatacacggttcccttgacaaagtcgagctgtttatcccagagactgcacaattttccgttgataggcatggaccaatgctaactggaaatcattgcaaaaagtttttttgtcgggcggagggtgtggtgttaagataaacagtgtgcaacagaagaaattaaaactggaagaaattaaagggttttttttagaaaaaaaaaa

SEQ ID NO: 1685 - DNA, 667 bp, Homo sapiens
  misc_feature (601)..(601): n equals a,t,g, or c
  misc_feature (622)..(622): n equals a,t,g, or c
  misc_feature (639)..(639): n equals a,t,g, or c
  misc_feature (664)..(664): n equals a,t,g, or c
  misc_feature (666)..(666): n equals a,t,g, or c
aaaacgaggcagaacaggacgtgattttaaacatttgctgggctgtgccacattcctctggcagttagctcagaggaagctcccttcgctctggggaacggttctgtgtctcattggttcatttctcttgagctcttcggcagtcaaatttgcttttttgaaaacttaagctgggggcgcttgcaagtagtaaatagaggagttggggtgggggggggcgttcaytatctaggtttgttaggggcctcacggttttcgggtcggagaatccactgcgtgctcctcctcttcccctggcccggactcccagcttcattgtgtcatcccgcctgggggaaagcacccaccgggatcgtcagcccactccacgccagcctagcctgsaagtctcagaaaaaaagcaaaactgggagaaaatagaaggtgtgagggaggagtgcacccctaggcccacccataacaaaaggctgttattccgaaagggctgaggaaggttttaaaactgctcgcccgagaagggtggagcctacacacaggaaatgtcttaactgtcctctcttggacaacgtaaagttttaaaattttaaaaaaaatcaatgtnccccttgatatttttaccttnataccctgtttcttaanggaaaatcccttcaaaaggggtaancnt

SEQ ID NO: 1686 - DNA, 831 bp, Homo sapiens
  misc_feature (269)..(269): n equals a,t,g, or c
  misc_feature (275)..(275): n equals a,t,g, or c
tttaagaattgttggcatctgtattcttgattaatacccttgtttttcaagatgtacttgcagtaaatatatttgctttttaattcttggttagcagttgaaatggtgagtttcagaaggttaaaaaggtaattttgtcttaagtgaataaaacaaattattataacagcatcttataaattagggatcccaagctgatttctaaacatttctactgagtaaagaaattataccaaatatttgattagctcattctatttaatttttgnttttgntttgtatcatggattaggtactagaaccacagaatgtcgatccttctatggttcaaatgacctttctagatgatgttgktcactctttgttaaaaggtgaaaatattggcattacatcacgacgcaggtctcgtgccaatcaaaacgtcaacgctgttcacagccattatacacgtgcccaagcaaatagtcccagaccagcaatgaactcccaagctgctgtaccaaaacagaatacacaccagcaacagcaacaaagaagtatccgtccaaataagaggaagggctcagatagcagtataccagatgaagakaagatgaaggaggaaaaatatgattatatatcacgaggagaaaatcctaaaggtaaaaacaaacacttgatgaataaaagaaggaaacctgaggaggatgaaaagaaactaaatatgaaaagacttcgaactgacaatgtttcagacttttctgagagcagtgactcagaaaattcaaataagagaataatagataattcctcagaacagaagccagagaatgaawtgaaaaaaaaatactt

SEQ ID NO: 1687 - DNA, 1319 bp, Homo sapiens
ggctggcttctgcgtggtgcagctgcgcacgtgtttcagccggcagcgctttaagatttccggggatggaatccgaaatggaaacgcagagcgccrgggcagaggagggctttacccaggtcacccgcaaggtggccgacgggcgaagaaacgacaggctgaacagctgtccgcagcaggagagggcggggatgcgggccgcatggacacagaggaggccaggccggcgaagaggcccgtcttcccacccctctgtggggacgggctcctgagtgggaaagaagaaacaaggaaaattccagtcccagctaacagatacacaccattgaaagaaaactggatgaagatatttactcctattgtggaacatttgggacttcagatacgctttaacttgaaatcaaggaatgtagaaatcaggacttgtaargaaaccaaggatgttagtgctctgacaaaagcagctgattttgtgaaagcttttattctcggctttcaggtggaggatgcacttgccctcatcaggttggatgacctcttcctagagtcttttgaaattacagatgttaaacccctaaagggagaccatctatccagggcaataggaagaatcgctggcaaaggaggaaaaaccaaattcaccatagagaatgtgacacggacaaggatagttttggctgatgtgaaagttcacatccttggctccttccaaaatatcaagatggcaagaactgccatttgcaacctaatcttgggaaatcctccttccaaggtttatggcaatattcgagctgtggctagcagatcagcagatcgattctgatttcaagtcagagactttttatcttgcctttggactctggtgaaaaatactttacagtggtcggtcacaagaaaccatctgaacaatttcagtcatttgaagcctccgtcccttcttccattctcagccagaagcataaacagaaaagaaagatttaagaggattcacactcaacaggttttaggataatttaaatatcaaaaattgattgttatacttacacattaggtataatttatcatttatctgaaatcacatgtagcagattgcatagtctgtaatcctctcagagggaaacttcttgtttaaacagctctatatggatttatacttttatatttataaatttataacttcatacaaatttataaacatttctttataaattgtaatttaatagattatctcagaaaaacctctctgaatgatgacccttccttaatactgggtgatgtgtgaatatttgtttgttggcagacagggtctcactttgtca

SEQ ID NO: 1688 - DNA, 470 bp, Homo sapiens
gcatacacaggaatgtgtcttctaagatatgccactgattacatgtgagtacctgagagagaagaaggcgaaggagaagaaactccaaattttagccactggggcccaccgagaattgttgagatttttagagaacccaatgtgtcycttgggatcagtattgttggtggacaaactgttataaaacgtctaaagaatggagaggagccttaaaggtatattcatcaaacaagttttagaagacagtccagcagggaagacgaacgcacttaaaactggagataaaatacttgaggtgtctggagtagatttgcagaatgcctcacacagcgaagcagttgaggccattaagaatgcaggaaaccctgtggtgttcattgttcagagtttgtcatccactccacgagtcattcctaatgtacataacaaggccaacaaaatcaccggtaaccagaaccaggacacccaaa

SEQ ID NO: 1689 - DNA, 1126 bp, Homo sapiens
  misc_feature (1120)..(1120): n equals a,t,g, or c
aattcggcacgaggtgaccaggagtcgacgtgtgcagaagtcctggtaatctggtccttgttcccgtctggataccagcttccttcagcagcgcaggcggtggtccctgaggcccgtggaaggagtcaaacttgcgggaattttgcagtttatctgcagggctgttgtttccagcaagacccaaagctagaaaaggaggaggaagaaactgacccgatcagtgccagaagtcattgtattcaaagaagaataagcaagaaagaaaagaaggaaggaagagaggtagacagatacaagatgaaatcctgtcaaaaaatggaaggaaaaccagaaaatgagagtgaaccaaagcatgaggaagagccaaagcctgaggaaaagccagaagaggaggagaagctagaggaggaggccaaagcaaaaggaacttttagagaaaggctgattcaatctctccaggagtttaaagaagatatacacaacaggcatttaagcaatgaagatatgtttagagaagtggatgaaatagatgagataaggagagtcagaaacaaacttatagtgatgcgttggaaggttaatcgaaaccatccttacccctatttaatgtagtttaccttgatttttatctgatattaacaataccatatagcttgctttttattagcatttcctgatattcctttgtccatatttctacttataacctgttgctattaatggttttagatgtatctcttgttatctgcatctcattgtttattgtattttgaaccaatctacaagtctctgtcttttaataaaagaactttacacatttgtaaaaaagaggttcttggtaagatataaaatggaaaaaggctaagtaatatgtgaatatcatatttttgaaaggtaaaaagtacatttgtatattacatatatggacataacttgtgaaggatgaaagaaagtacagcctctcggtggtgggattatgaatgatttttctccttttgcttgtttgtattttctatattcctaaaattaacacacattattattgctagaataataaaagttttataaaaaagaaaaaaaaaaaaaaaaaaaaaaaaaaaaaaaaaaaaaaaaaaaaaangggggg

SEQ ID NO: 1690 - DNA, 630 bp, Homo sapiens
  misc_feature (45)..(45): n equals a,t,g, or c
  misc_feature (511)..(511): n equals a,t,g, or c
accctcactaaagggacaaaagctggggctccaccgcggtggcgnccgctctagaactagtggatcccccgggctgcaggaattcggcacgagaaatggtcatgcctctacggatcagttaagtgaagaaaaggagaaaggggcatgtggctgttgagaagtcaagtaagygacatagtagttcaggtggcccatgcctgggatcttctctatgattgatacatggcacagtgagagattaatgggcattgtgtacaaattgcttctcaccatccccattagacctacgaataaagcatccggttctaaaattaatttgttgcagctttgtaaatatttctttaagattcagcctgagagttaggrgaaatatttcagagccaaaagtgccttatacaaccttagcctattatagtraakcattcaagggattcagaatttttggcagtcacargaagagtgtatttattatgtagratggaatgagggtacctgtcaccctgcccttaantgtaggtagggccccagagtcttaccattttaaggatctttaccatgccaggtttataaaaacccggccaccaggtctttcaatccaggattttgaaaggcttcattgcccatagggtg

SEQ ID NO: 1691 - DNA, 612 bp, Homo sapiens
  misc_feature (575)..(575): n equals a,t,g, or c
gcgataggctatagcatgtttatgactctggtttctttctcttcaggtggttttataccattactgttaatgttattttaacttggcatgtataacattgccatatagagtagagtagaaagttgcaaattttgatagtttacagagttaaacactaaacatatccaaagtccatttagagttttgggtgttgtattttgccatttttgtgatgtgtggccttttattctgtaatctcttctaaataaaacattgaacatccagcaaacataaaacctgcctcatttgaaaaggaatttcaaaattccaattaataggattctctagagagttttgtactttaatatttgtcagtgtagtgtcaactctgttaccaaggtagcttcttggtaaatccagtagctactcaatgctatttgtactgaataaagcaattattaacatgatacttcccactattgattaatgcaatattgatatatttggcgttgtggtagctgttgcagaatgaatagtgtaatgaccataagattgcttggaaaattgtaatmcagatatccacaatgaattctttnccaaaatttttttttccgatgataaaagtagtagatg

SEQ ID NO: 1692 - DNA, 1194 bp, Homo sapiens
taaaacggccgcccttttttttttttttttttttttttttttttttttttttttttttttttttttttttttttttttttttttttttttttttttttttktwktaaaagaaggattttaggtttctttggtgaaacaaaagcagatataaaaagttacaaagattttagattttcattcacaaaaaaagtcattcacattttacactatacacgttatgatataaatacaggaaagtattatgtgcattgtaaagagaaaggaaaaatagaaacctactagatcaacacagtgttgttctgtgctctaaaatacctaaaggtggattacatttaatgcaacaaccaagggaacctgcttaaacatactgtgtattattgtagctagagtcattccttctaagccaaaggaggttttataaaaaagaatcaatattgggccaatccctttgtgccctttttctctttttctatgtgcattttattttttgtctactcttcttcaagttgctctaaactgaaattagggaaggagtctyactttccattacaggtttttctttaaacattaaattaagtggataaggattcaaagtcatcttcagcagtcactttattcaaataatggggagaaaacagagtgggaagagatggggagaaatgtcaacacatacactccacctaacaggaagaaatgcccacactatttctatatattcgctcatttcttagaatgggcaaacaccttttgctaaaagctatatacttttccactcttttcataataaacacttgatgcattctatccgtcacattatttaatcagggacaaagtacctatattatatgattccaaattgtgtgaggaaagtaaaaggctaacactgaaaaataactagcatactatgttcattttcaggtcttagggaaaataacatccaataaattaaatcagtatggcttacttcatttatttatgtatgcttcacagctgcagcattcatacatgaacattcaaaactttataaaagattaaaatggttatatatacaaaatttcttttttttttttttttgcatgtgttttaacaatcccccaccctccagagccctaggtctatatccgtatgaaatgcattgatcggtaaccttatgagttagtgttatgaaagccattaaaaagtagacctggttgc

SEQ ID NO: 1693 - DNA, 1014 bp, Homo sapiens
acacctccaacagactctcattaagattcagttatttccgctccccagccccacactcctttcagattatcgttcatgggcgtaagtctcttctcagagttaacaagtctttggtagtcatcctctgtccaaatattgtatattattaaaaggcatttttaataattaccagaattagctcaaacctttagggatctttcagccatgattattaaggatatgtatgtgaatttttgggaaacctctcggtgctggatgccagcctacagcagggtccattgctggcaatggatggcccaggaaggtccctagagatcactcacttgaaaaatgagggtcccatgaaagtatttggttgccttctgatgccacttcttctcactttactttttgcttattttcaaaatattataaaatgtcaacatataatttcagaaaggcaggtgggggtaggggagaaatgaatgaataaattctctaggtatttagaaagataagaaactgaagaccgagagactaataaggctgcttacctaattattataatcatttcatttgcctgaatgttttaagcaggaagtagaaatactttggctgcccaaatgtatcttttgttcctcttagaagtaaaataagctacatacaataaaaatttatttcagaaccccatttctagaaaataccaccccagagtcctcatttgatagcatctgtctcctgcagacctcatcattccacagtatttccctgccatgtaaaaatcctgactttgtgcgtatataaaatgtatgcaattaagtctgtttaaatgatatttaagttttaaagactgtattttgttgacacatactttgtgcagtttttatgtatgtatgtattataaaaaaagttaaggttaaaaacatctcatttaatagtgagttcactatttttttttttttgtctctgggttgtaatttaataatcttcaaacaaaatgtttacgaaaaatgccaaagattctaaatcttaaaa

SEQ ID NO: 1694 - DNA, 431 bp, Homo sapiens
  misc_feature (423)..(423): n equals a,t,g, or c
ggaaaagcacctacaagagagctgcatggagctgtgggtgcatttcctgttaccaccagggcatcccagaatgctgacaaagagaaaactaagaccttcccactctgatttgttacatgtcataacaccaagcaagtgacagaggagacaattatggggcccagaggaaggtgcctgtatcatgtagacaaaatccaaagcagcttgtttcagacaaaacattttgctttggaaacttttgaaacttccatggccgttgaatatagcagagatgatctaaaaattttagaagcggttgaggtacccgtggtaggggcaaggcatgggagtggtgatccttaaggggcttgtctttagtttgagggccacacacagaggaggtgggcagaaaactgaggtctycccagagcagctttycagacnaaaaaaaa

SEQ ID NO: 1695 - DNA, 569 bp, Homo sapiens
gcggacgcgtgggttgactattctgaggacaagagtagttgggacaaccagcaggaaaacccccctcctaccaaaaagataggcaaaaagccagttgccaaaatgcccctgaggaggccaaagatgaaaaagacacccgagaaacttgacaacactcctgcctcacctcccagatcccctgctgaacccaatgacatccccattgctaaaggtacttacacctttgatattgacaagtgggatgaccccaattttaaccctttttcttccacctcaaaaatgcaggagtctcccaaactgccccaacaatcatacaactttgacccagacacctgtgatgagtccgttgacccctttaagacatcctctaagacccccagctcaccttctaaatccccagcctcctttgagatcccagccagtgctatggaagccaatggagtggacggggatgggctaaacaagcccgccaagaagaagaagacgcccctaaagactgaacatttarggtgaaaaagtcgccaaaacggtstyctytytctgatcacyttccaggacccacccaagtt

SEQ ID NO: 1696 - DNA, 922 bp, Homo sapiens
  misc_feature (11)..(11): n equals a,t,g, or c
  misc_feature (19)..(19): n equals a,t,g, or c
ttttttttttntttttttnttttttttttttttttttttttttttttgatttattccaagtatttaatacacaatgacgcaactgtgatcccaagtgtgcaaagttaaagccttcgactgcagctgaggagaagggaggaatggttcacctggggacggtggtgagtcaggaatgacaggcaggcggccatgaccagggcagtctcctacccatggccagggacaggggagcggcctgaggagcaggacccaagggtagcccagggccggggaagggggcagagacctccccttggcctaggtcaggagctcagaagtgccacatggctgaggggcagcggccsgggaagggccagaggcagggccaggagagcaccatttcctgggaggctaggggcagggaggtgccctacaggagaagccaggaggggccgcctgcccctggggtgggggccaggctggagcaggctgcagcaagaaagacctgaggcaggcgcagggcctgagagcctggctggctgggctcggaggggggctcccagggcagcctggccccgggagcagtcctgactctgcaggggatgccgagtgaggggcagcagtcccctcaggacctcccctcctctctgcctggaaaggagctggagaacccgtagtgcaaatctgtggaccactcagttatggagggaggctgtgcccaaaagtggacactggggtgcatcccctccaccacctcggcctccaccgctgtcctcagtacagccgcttttcgtaagagtgcaggccatggacaccaccctcaatctgggccgacatggtccgcttctcaaacttgagctctcctgagtacatcatggaccgaaggacagacaggctgcgggccccgatatcctggcagccgtgttggatgcctgctatgagg

SEQ ID NO: 1697 - DNA, 1596 bp, Homo sapiens
  misc_feature (499)..(499): n equals a,t,g, or c
  misc_feature (1397)..(1397): n equals a,t,g, or c
  misc_feature (1404)..(1404): n equals a,t,g, or c
  misc_feature (1498)..(1498): n equals a,t,g, or c
  misc_feature (1508)..(1508): n equals a,t,g, or c
  misc_feature (1515)..(1515): n equals a,t,g, or c
  misc_feature (1558)..(1558): n equals a,t,g, or c
  misc_feature (1589)..(1589): n equals a,t,g, or c
tcaccgggtgcgccgtctagactagtgaccccgggctgcaggaattcggacgagggcgcccaggttctttagtggaagaacgcgaagcgaggatgagtgatccgtggaggcagtaacaggcgcggcgagggagaagtgattcccgaagaatcaaggctgggccggacccggtggcctggcaacagggtaataagagaaatgaagccaacaggtacagacccaaggatcttatctatagctgctgaagttgcaaaaagccctgagcagaatgtccctgttatactgttgaagttaaaagaaataataaacatcacacctttaggaagctcagagttgaagaaaatcaaacaagatatatattgttatgatctcattcaatattgcctcttggtcctcagtcaagattattctcgaatccagggtggttggaytacaatttcccagcttacacagatattaagccattgctgtgtgggcttggagccaggagaagatgcanaggaattttacaatgaattacttccatcagctgcagaaaattttctagttttggggagacaattmcaaacatgttttatcaatgcagctwaggctgaagaaaaagatgaattactacactttttccaaattgtgactgattctctcttctggcttttgggaggccatgttgaacttattcagaatgtactacaaagtgatcatttcttacatttactgcaagctgacaatgtccaaataggatctgcagtcatgatgatgctacagaatataytacagatcaacagtggtgatttactcagaataggaagaaaagccctgtattcaattttagatgaagttattttcaagcttttttcaactcctagtccagttataagaagtactgctacaaaactcctactgttgatggctgaatcccatcaggaaattttgattttactgagacaaagtacctgctacaaaggactcagacgtctactaagtaaacaggaaactgggactgaattcagtcaagaacttagacagcttgttggccttttaagcccaatggtctatcaggaagtagaagagcagaaactacatcaagcagcatgcttgattcaagcctattggaagggttttcagacaagaaagagattaaagaagcttccatctgctgtgattgctttgcmgaggagtttcagatccaaacgatcaaagatgttgctggagataaataggcagaaggaagaagaggacctcaaattacaattgcaacttcaaagacagagagccatgagactttcccgagaattgcagctgagtatgctcgaaatagttcatccaggtcaggtggagaaacactatcgggaaatgggaagagaaatcagcactgattatccagaaacattggaganggtacanggaaaggaaaaattttcaccaacagaggcagtctctcatagaagtataaaagcaactgtcacacttcaaaagagcaagcgctttaaattcctanccgaaattgnccgttangaaaaaaggaaactattttgcctcccttgggcgaagggacctnccaaagaaacctcaacctgaaatgccaacgnccccaaa

SEQ ID NO: 1698 - DNA, 329 bp, Homo sapiens
  misc_feature (154)..(154): n equals a,t,g, or c
ataaaagaagcaatcacccccacattttcccctgccaaccacttgcctgtaccaagtgtgagctctgaaaggggaagtctttaaggttaaacaagtgttgaagtcttaattttttttattacatggactttaccaaactgactttttgtttgtntctttttagtggctagaagtgaccccaggatttttttattatcaagagagactagaagaatcatgagacttttcctagttgcctttcaagaatatgaagaaaaaaatggttctcaaagtgggtttgaatgagtattgttccaataaatgaacttatattcataaaaaaaaaaaaa

SEQ ID NO: 1699 - DNA, 1273 bp, Homo sapiens
  misc_feature (5)..(5): n equals a,t,g, or c
  misc_feature (31)..(31): n equals a,t,g, or c
  misc_feature (89)..(89): n equals a,t,g, or c
  misc_feature (1262)..(1262): n equals a,t,g, or c
  misc_feature (1273)..(1273): n equals a,t,g, or c
tccgnaattcccgggtcgacccacgcgtccngttagtaactacttcaatgatcatttcacaagaaaaagactataaattaagtagagancaacatttttattgaacatttttggcttgcaatcaaactttgccactaaaaattaacttcataaaacactagtccgttatcaacttcttcacagagaaagtagctatactataccctacatatttatttatttattattctactatagcagaataacaaaacttgatgcattaagccagttctttgcaactgaaaattacctgtttctccttccctttcacactccatgtatatatgatcagcctctccattaaaaagaagctggacatgcaartacatcatattatgttttctccatattttatgtttttctatgtatctgaatacagtgggataaataattgaaagtagtgttcctatggcattagtgtttttgtgagaagggtaaatgtagtgagaaaggttttttcatggcattaataagaaagcccttctgtaatatatatattattttgtaaacatttcactgaagggccaaaagttaaattataactaaatcactgtgttttcagaatgatatttaacaacaaacccgtggtcaaaccaaaatagtgggttgaagtgtattattcatcttttagtgcattggcaattgcaaaaaaaaaaaaggaatttaatataaggctatagagattaattcagtgtctaacatttgtatttatttaaatagttattgacctatgatgactttctagtcttaacattttayctttttattgttgttgttcttcctttcaaagatgtggttcttaataggttcactgaatgcacagttgaggcacttcttgtgacaccagttcccaagtagcgttaataattgggcctgtgtcataaaatgcacggatcattaataactaaatgtccctgacacttttcactacagggctggacttagtaactgaccaacttcggggggagggttggggcaagggggggtgggcgttagaacatgatcaaaaaatgtctccgctcagggatttatggtggattattgcagacagtgctaaaaatatagagcacaagacaagtttactaaattaaaattttattttttgagaaactgttatttgtataaattatcaagatttgtaggctttccttttgtagaaataattgttttatgtgccagagaatttcaattttgttttcaacaataaagcattgataagaaanaaaaaaaaaan

SEQ ID NO: 1700 - DNA, 1020 bp, Homo sapiens
  misc_feature (859)..(859): n equals a,t,g, or c
  misc_feature (986)..(986): n equals a,t,g, or c
ttttttttttttttttttttttttttgkattarattttttttttcctagtaccttccagctctaaaaaaatttgaaatagcataataaaagacaaaakgaaaacgaaattttaattgkaatattttctgkcacagcagcatatgtatatttgaaatactggtaacaattttaaggtagcattctgtggtattaatatttattaatatgctcatgaacttctaagtgccacaccagacatatagactctttactttaaaagagcatatatttaaggcattgaaatggatacagctatattcattctcaattgtcttaggctattatatggaaagatatgtgtcaattataggtaggtaggtaggtaggtagattttctggaaacacagaagtacttgacggagagttaggcctgtattctataaatctattaatggtagcaaagtgcataagacagggatttctttgagatgaaaggagtgctgaagaagagcattggaattaatatttggatgtggtattgtgaaattcaatgggtaaagtaaccctaatgtgggaataaaagtcaagggaaaggtcttgaataagtacacagaaaaataggctaaaaatattaaggggagggaaattggaatacagggagacagtgtgcaagaaagcaagccaggaatctgcctatgtggtagacccaaccattactacttgaacccccttagaaaagcttttccagcattccataactcaggttcctcatttataaagtgggaaactcataattgtcctacctacctcacaggggtgttgtgaggatcaaaggaacagatgaatgtatgagcactttcagacatgtaaggcactgtncatgtaacaagtaggggaaagactctgggagcacattagtgttgggtgtgtgccaagcccgtgggttgtttggaccgtaagggatkatttcaagttagggagggagggaagagaagktgggcwttgnttattaaaggttgttgttacacaccttagggttt

SEQ ID NO: 1701 - DNA, 1636 bp, Homo sapiens
  misc_feature (6)..(6): n equals a,t,g, or c
  misc_feature (16)..(16): n equals a,t,g, or c
caagtntaagccccanattgctgctctgaaagaggagacagaagaagaggtgcaagatacaaggctttagagagcagcataaatgttgacatgggacatttgctcatggaattggagctcgtgggacagtcacctcatggaattggagctcgtggaacagttacctctgcctcaraaaacaaggatgaattaagttttttttaaaaaagaaacatttggtaaggggaattgaggacactgatatgggtcttgataaatggcttcctggcaatagtcaaattgtgtgaaaggtacttcaaatccttgaagatttaccacttgtgttttgcaagccagattttcctgaaaacccttgccatgtgctagtaattggaaaggcagctctaaatgtcaatcagcctagttgatcagcttattgtctagtgaaactcgttaatttgtagtgttggagaagaactgaaatcatacttcttagggttatgattaagtaatgataactggaaacttcagcggtttatataagcttgtattcctttttctctcctctccccatgatgtttagaaacacaactatattgtttgctaagcattccaactatctcatttccaagcaagtattagaataccacaggaaccacaagactgcacatcaaaatatgccccattcaacatctagtgagcagtcaggaaagagaacttccagatcctggaaatcagggttagtattgtccaggtctaccaaaaatctcaatatttcagataatcacaatacatcccttacctgggaaagggctgttataatctttcacaggggacaggatggttcccttgatgaagaagttgatatgccttttcccaactccagaaagtgacaagctcacagacctttgaactagagtttagctggaaaagtatgttagtgcaaattgtcacaggacagcccttctttccacagaagctccaggtagagggtgtgtaagtagataggccatgggcactgtgggtagacacacatgaagtccaagcatttagatgtataggttgatggtggtatgttttcaggctagatgtatgtacttcatgctgtctacactaagagagaatgagagacacactgaagaagcaccmatcatgaattagttttatatgcttctgttttataattttgtgaagcaaaattttttctctaggaaatatttattttaataatgtttcaaacatatataacaatgctgtattttaaaagaatgattatgaattacatttgtataaaataatttttatatttgaaatattgactttttatggcactagtatttctatgaaatattatgttaaaactgggacaggggagaacctagggtgatattaaccaggggccatgaatcaccttttggtctggagggaagccttggggctgatgcagttgttgcccacagctgtatgattcccagccagcacagcctcttagatgcagttctgaagaagatggtaccaccagtctgactgtttccatcaagggtacactgccttctcaactccaaactgactcttaagaagactgcattatatttattactgtaagaaaatatcacttgtcaataaaatccatacatttgtgtgaaaaaaaaaaaaa

SEQ ID NO: 1702 - DNA, 835 bp, Homo sapiens
  misc_feature (832)..(833): n equals a,t,g, or c
  misc_feature (835)..(835): n equals a,t,g, or c
caaaaaaaagaaaggaaaaacagggccaggtagccattktggagagagcacacttaggawtcctgggatgttagtkttaaaagaaagctcctggagccagtgattctcaggtttgtcccagaacccttttttctaagccccatataaaaggtagattaaaaaaacaaagtagcatgagtgaaattgagagagggacaggtaatgccttccagcccctaacttctaacaatctggaagcacaacgtgaaaatcackkagcccaaccctatcattttcatattatgaaactgagtccaggtaagtgaatctgtccaaggtcacccagcaaggtatcagtagccctgagggtaaggactctgataaggctcgggagggtcctggaaagcctgaggcggcaggaagagtgtgcagagttgagcgtgtctggaaggctgatccactgctgggcccacatcaaagcccccatggggagcagacccgactgcacatggctcttttgctggaagaagagcatggctgcgcagaggactaaaatttcatctgggaaggcttcttttgactgtcagtagcaggatgtcaccagatgagggtgctatgggaccacagctgtctttgttcccattgcaactcaaccctgcrggaggccgcctgcatccctgagagccttctggagcctacagaggagacattggccagccaaaaggaaaggagtggccagggtacgacctggagtagggaagggaaaaagttcccggaaagaagagaattggatgagaggtctcggtggaaataaaggttttctggcattggtcaaggaaaaaaaaaaaaaaannan

SEQ ID NO: 1703 - DNA, 607 bp, Homo sapiens
  misc_feature (513)..(513): n equals a,t,g, or c
  misc_feature (585)..(585): n equals a,t,g, or c
  misc_feature (597)..(597): n equals a,t,g, or c
gtttgaccctacgtggaagcctacaagaaggggaattctgggcaatgtggttcagcccagccacatcacatactattatttagtagtcatgaagagagagacataggtaaaaacagcagttagtatttcttcattctgatatctggcagcaagtgagtgatgctaccattatcggctaaaatcaggaactggtattaatgcattttgttttgttttgttttctgctttattctcctctgtcatagacagtgaagagtaagtgaagaatttgagggtcatcaaccattgtgaactcatcaaagttagtagcacttaaaatttgcttttaaaatgaatggaaagatkccaagttttyaatagcacaaatatttttttctcatttgtaccttttttttgtcttttgtatacagatattcccactctggccactgcccaaaggggctcttatctgaggaatactgctgacttcgagtacctagttttacagagccatctttctgaagcataaattanattacattattctacagcttaaatccctcctgaacttcccatcaccccaagagtggatctgaaacgccttanagtggcattcangacccttctg

SEQ ID NO: 1704 - DNA, 1273 bp, Homo sapiens
  misc_feature (838)..(838): n equals a,t,g, or c
ggggcgagcgaggaggatggcggagtcggggctcctgacggaactctaatgaatcattgattgaccagcactattttaccagttggaatgaatgatcagaaatgggcatagtgcttttagatccaacatgtaacagatggatgttactccatgctgattacttcttcaagccagtacttttttgattgtgtaggatctttgtctcttcatctttgaattcaattactggaaaataaaaggagttcatgtagtttttgtccaggcttgagtcaccatgagtagtagtttaggaaaagaaaaagactctaaagaaaaagatcccaaagtaccatcagccaaggaaagagaaaaggaggcaaaagcctctgggaggttttgggaaagagagcaaagaaaaagaacctaagaccaaagggaaagatgccaaagatggaaagaaggactccagtgctgcccaaccaggggtggcattttcagttgacaatacgatcaaacggccaaacccagcacctgggactagaaaaaaatccagcaatgcagaggtgattaaagagctcaacaaatgccgggaagagaattcaatgcgtttggacttatccaagagatctatacacatattgccatcatcaatcaaagagttgactcaattaacagaactttatttatacagtaacaaattgcagtccctcccagcagaggtgggatgtttagtaaatctcatgacactggctctaagtgaaaattcacttaccagtttgcctgactctcttgataacttgaagaagctgcggatgcttgatttacggcataataaactgagagaaattccttcagtggntgtataggctggattctctcaccactctttaccttcgctttaatcgtataactactgtggaaaaggacatcaaaaacttgtcaaaactcagcatgcttagcattcgagagaacaaaattaaacaactacctgctgamattggtgaattatgtaacctcattacgctggatgtagctcacaatcaacttgaacaccttccaaaggagattggaaactgtacacagataaccaaccttgacttgcagcacaatgaactgctagacctcccagatactataggtatgagaggagaraggagakattgatagctgttaatagctaactggatattaataggactatttttgatccatttggtaatgaaaattcaggagtaaaattcacaattaccaaagttgtaaaacttttaagataatattttaaaatcatttttca

SEQ ID NO: 1705 - DNA, 800 bp, Homo sapiens
  misc_feature (11)..(11): n equals a,t,g, or c
  misc_feature (57)..(57): n equals a,t,g, or c
ctatggtgtgncctgtactggcacttttattctggttttgacttgacttagattgtntgatactttggttttggttttggttttgacctggcttgggtttttggatactctgattttggtttggtgtaaactgcaaaagtgtgtgtgccctgtttttttgttttgtagtgcaygtgtggtgtgrgygtggtgttttgtctcgaagaagcatgggtcaggtacaaataagcccaccccactaggaactatgttaaaaaaaaattcaagaaagaatttaagggagattacagtgttactgtgacaccaggaaaacttagaactttgtgtgaaatagactggccagcattagaggtgggttggccatcagaaggaagcctggacaggtcccttgtttcaaaggtatgacacaaggtaacccgtaagccaaggcacccagaccagtttccatacatagaaagttacagctgcttttatacccccttgccccgccaacgtagttaagagaacagcagcataagcggctggcagaggcaaggaaagaccagtagagagaaaaaaaggccatctataccaattctaagttaatttagactaaacaaggtcttaatagcaaaggataattgaaatcccaaacttacaaggttttcaacaaaagtgaagtttgcttaaagttaacagtgtaacatgtattatggtaacttctaatcttgtggccttagacagtctagtccaaaggcataaagaaagtttgctttaaaaaaaaaaaaaaggaatggttatcttcaaaaaaaaaaaaaaag

SEQ ID NO: 1706 - DNA, 518 bp, Homo sapiens
  misc_feature (496)..(496): n equals a,t,g, or c
  misc_feature (517)..(517): n equals a,t,g, or c
ccagcactttgggaggccgaggcaggtggattacctgaggtcagcagttcgagaccagcctgaccatctctactaaatgtacaaaagtgagctgggcatggtggcgggcacctgtaatcccagctacttgggagactgacgcatgagaatcgcttgaacctgggaggcgaatgttgcagtgagccgagaccacaccaccgcactccagcctgggtgacatgagtgagactccatctcaaaaaagtaaaataaaataaatggattaaagacatgaatgtaaaatacaaaaagtcaaatccaagaagaaaattatgkttatcgtaggagtgagtgtgaagttaggaaacccaaagaaacaacgggcaagggggatgaacaagcagtttacagacacggaattcagatcgccaggaaatatgtgaatggtgttcgagtytgccggtattccatatgcaaattaaggcaacactgtgctcagtggctggcacagcattgnccaaggcagtaagcgctattna

SEQ ID NO: 1707 - DNA, 544 bp, Homo sapiens
  misc_feature (505)..(505): n equals a,t,g, or c
  misc_feature (517)..(517): n equals a,t,g, or c
  misc_feature (543)..(543): n equals a,t,g, or c
cggaatagtgggttttgctgcaaccggtttattttccttctgttttcacccattctggcacaatctggcgccatcgtccttcttgtgaggccaagcctgaaaatgcgaagcagagaggcaggaccaaaattgaggcgaatccaggaacctgccaatgggtctccgggtgcggtctctgaaactggaggatatcgggaggaaaggctctccgatgcggagataatggggaagctcttggcatggttggctgtaggtatgtgataccggaggagcaggagtcaaataggatacgccgacttttaattcaaggaacccttttctgaaacactttgccacaatgaaggaaataaggaattgtactctcagagatgttgagaaaagatacatgggtcttgggaagataattactcaaaatatgcagggaagggatctagtttggaagcacttaaggaagaattaagacctccagtttggaaaagagggcttctatcaggaacaacacganttctgcttaaantggaagccaagaacaaacctccaatnt

SEQ ID NO: 1708 - DNA, 532 bp, Homo sapiens
  misc_feature (396)..(396): n equals a,t,g, or c
  misc_feature (467)..(467): n equals a,t,g, or c
  misc_feature (499)..(499): n equals a,t,g, or c
gaagaccctggctctctataaaacagaaaacgcaaactttaatattatcaacaatcaatatattataagagattgcaatttctaagtttctacctgagtgtttcacaaatacaaactggacattttccctttaaatgagttttattataaaatgtacatattgattgtaaaaacaaaaaattcaaatagtacaaaascatataagtaactaataaaagctccctttctgcattaggcccctcagttcttcccagggaaaatgattaatagtttacattcttgcagaaattttttatgtataaatttttacccaaatgaattcattatataaattttttccaacttagtgtttttttacataataatagcaagtttaaaaattgttcttcaggccangcacgggtgggtcacgcctgtttatctcacactttgggaagctgaagcaggaaaacacttgaagtcagganttcaaaacaaccctggccactggtgaaaaccntctctactaaattacaaaatcacttggcttggt

SEQ ID NO: 1709 - DNA, 189 bp, Homo sapiens
  misc_feature (188)..(188): n equals a,t,g, or c
gcaacatttgtkaaaagtagagggctaaagtaacacccctctaagcatttgttttcagtacttcctaggagtggttgcatttgggaatggaattgttaaaacttgatgcttaggagcgtatgctgactattcactgcgtggtggggtggagaggaggaggaggtatgcagggagaagggttctgtgcnc

SEQ ID NO: 1710 - DNA, 638 bp, Homo sapiens
  misc_feature (13)..(13): n equals a,t,g, or c
  misc_feature (25)..(25): n equals a,t,g, or c
  misc_feature (28)..(28): n equals a,t,g, or c
  misc_feature (518)..(518): n equals a,t,g, or c
  misc_feature (570)..(570): n equals a,t,g, or c
  misc_feature (612)..(612): n equals a,t,g, or c
  misc_feature (619)..(620): n equals a,t,g, or c
  misc_feature (638)..(638): n equals a,t,g, or c
aattcccgggtcntcccacgcgtcnttnagagagcgagaggaggttttgagagaggagattcagacacttaccagcaagctccaagaattgcaagaaatgaagaaagaagagaaagaggattgcccggaagttcctcataaggtacagtgaccattcagttgagtctcccgtcaggtgcggtgagactttggtcgtgacggttctgaccgtttccctgtccagagttttttctgaccagccactgaaaatcccactcccctttatcatcaccattgatttctataactcatgtcgtgtgtatcgaagtccgggttttggattaattgactgtcagcaaattgacttctcgaactgatatttgagtctcaaggctggtgagtaaagagttttccaaatcttggtcatgcggagggtgtagttatgcggccggagctgtcactgagaggcaggaggggcttggggggaaaggacgaaggctcaaccaggcccctgcatggacctgggcatgcgtcctctnctctcatctaagttccagaacacaagttggcaaaagcctcagcgggcactgncctctgggtggggtggggctttctgtgcccttccttgccgtnacttcannttgtgcacgggttgaaan

SEQ ID NO: 1711 - DNA, 695 bp, Homo sapiens
  misc_feature (639)..(639): n equals a,t,g, or c
  misc_feature (647)..(647): n equals a,t,g, or c
  misc_feature (678)..(678): n equals a,t,g, or c
  misc_feature (691)..(691): n equals a,t,g, or c
ggccctggtgagtgtcctcaccaaggagtatgaggacgccgtcagcatcgccacggcagtgcttgtcgtggtcactgtcgccttcatccaggagtacaggtcggagaaatctctggaagagctgaccaagctggttcctccagaatgtaactgcctaagagaaggaaaactccagcacctgcttgctcgagaactggttcctggtgatgtcgtatctctctcgatcggagaccggatccctgcagacatccgactcactgaggtcacggacctcttggtggatgaatccagtttcaccggggaagccgagccatgtagtaraacagacagccccttgacaggcggtggggamctcaccaccctcagcaacatcgtcttcatkgggamcctrgtgcagtatgggargggccarggggtcstgattggaacaggggaaagctctcarttcggaraaktgtttaagatgatgcaggctgaagagacacctaaaactcctttgcagaaaagcatggacaggctaggaaagcaactgacactcttctcctttggcataatcggtctcatcatgctcattggctggtcgcaagggaaacaactcctgagtatgttcacgatcggggtcagcctggctgtggcggncatttcanaagggtctgcccattcgtcgtcatggtgacnctggtcctgggantgct

SEQ ID NO: 1712 - DNA, 545 bp, Homo sapiens
ccgccctgcaggtcgacactagtggatccaaagaattcggcacaggccagagggaccatagtgttgggcactgtctgaccatgttgcatttggaaggctaaatggggccatgaagaaggctggaagggacagggggtgatggcagcctacctggtgtcccctaccccacctgttctcggagaaccaagttgctacacaggaagttctccaaggtccagtttcctttctcccaccagttggtggaggcttcagggaagaccagagtcctggacagagagggtaacaggaggagtcggggataaacatcaaacatcaatcgtgtgtcctgatttgggagtgattggggggatggggtgggagagggttagttggtattctcatggcctgattttttttgtttctattccttttatatcactgtgtttgaatcgagggggaggggtggtaaccggaaataaagacctccgatcttccgccccaaaaaaaaaaaaaaaaaaaaaaaaaaaaaaaaaaaaaaaaaaaaaaaaaaaaaaaaaaaaaaaaaa

SEQ ID NO: 1713 - DNA, 1620 bp, Homo sapiens
  misc_feature (66)..(66): n equals a,t,g, or c
  misc_feature (1591)..(1591): n equals a,t,g, or c
  misc_feature (1600)..(1600): n equals a,t,g, or c
  misc_feature (1608)..(1608): n equals a,t,g, or c
aattcggcacgagggaactctacctctgcagcgagtgcgggcgctgcttcacccacagcgcagttncgccaagcacttgagaggacacgcctcagtgaggccctgccgatgcaacgaatgtgrgaagagcttcagtcgcagggaccacctcgtcaggcatcagagaacacacactggggagaaaccattcacgtgccctacctgtggaaaaagcttcagcagaggatatcacttaattaggcatcagaggacccactcagaaaagacctcctagckaggtccccatgtgaggagatctgctttcagccctcacctaagggaggtgaggaagaggaaaagccctcttgtcagcctgggaagaccttttcgagggagtctccctgacctgctcagatctgacattacctcttcctgcaactaaacacgagcctgggcagaacctctcagccttcctctacgccttgaggggatgtttcatccaaagtacaacctgaattgaggcttctccttcactggagtgcacctgcctctacctcatgggtataaagtaggagaactaagagacttaagaggtcgtggttcctatatcgtccaaaaaataggctgttacatatcctaaagactgctcaacagcttcaagttgaaagtggccaaggacagccccttaggtttgggaagggacgagcctgaaggattctgtctttactggggtcaaatcttaaagcacacagctctggactcaagacaggaggtttgcgtcctgatggctttgcacacattcacaggataactgcatagatccctcgctgtctgattcacttcttaccatgcactttcctttgatgctgaggagaaatggaagtgggcgaaaaatctcaaggctgcttcatgtggaccttgtcaagctgctccctcccccagcgtcaaattgttatcaggtgccaaacactgctagaaaggagggcctagtcagaagcctctttccatacgagttttggttttgtttttaatatttttttctattaaaatactcatgcatttaaccttcccgttattcaaccagtctcttggttgcatccctagcacttctactacaagtgagatggtagtgtttgagtgcttattgagtaaagcataattcggtcataatgaaatcgttcacattccctcatatgcacaagcccaccaaccccttcacaccccccttcacaggggtcgtatgagtaaggggatttggaaactgtcaacttacaaaggcactataacaattacagaatcatgattgccatgggccactttatttacatgaagacaactggagaacgactaagaccaaattatggaaaataagaaaaagctgttgctggcaagaccatcaagactgttctgacaccctgtccccatcatccctgactgagtactctgacatcacggaaagtgttgaacctgggaccctgaggaattcaccaggagtaaatggctttcatgtatttgtgttgtttgctttttcttacgtggattttatgttcataggagctaggaaagtagcctcttctggtgggccccaacattcttcttgtttgcccgtttnagggttccnttgggagntggagggcttga

SEQ ID NO: 1714 - DNA, 405 bp, Homo sapiens
  misc_feature (321)..(321): n equals a,t,g, or c
  misc_feature (334)..(334): n equals a,t,g, or c
  misc_feature (399)..(399): n equals a,t,g, or c
tgcacccgcccctgggaaagatgctgataggtcttgctggctacctgagtggatatgatggtacctttttgttccagaagcctggggataaatatgaagcatcacagctacatgggaatgaagaaggagtkaaggcttcctgacttgaaatgggactgactgaaccctggggccacacttaaaccagaaatgttatagtttagcagccctggcgtggtgggcaggtgcaaattaaaggggactttgggtggtggagggagaggggaggatgattcagacccttcccctgtgggtgttaggattactcaggaactgaggttnagggaagaagggnagaggaggttgcaattattacagggatgacatagttagaaggcaggcacgcatttttcaccgttngccctg

SEQ ID NO: 1715 - DNA, 1592 bp, Homo sapiens
aattcggaacgaggcggacagtgagaaggtcaggtgagggcggcaaccagctccccttgtcccgccctgttcatcctcccattaccaccgcccccacacactcacacgcacacttacgcacagatcattgcagcggatgagatggggctatgacagaagcctcaggctcgtttcctyctccctcctccagccccctcccggcttccagcccattctctttgcagctggggttcctaccctaccctactcccagctccttttccccgcggatggagagatggactctgctgcttacccacccactcccctgcagggggtggaggactgattcagctactgtatccccactgctgtgactggaaatgggggtggggagtgactggtcttttcaaccctggggagttgaggaaaatgtctgctttcacttcagctttcatttgaatactgtgatctggtttttattttgaaatgtataaaaagcaaacccagctacaaaggccttttcacccttccactttgtaactaatcccagtctcttctcatcactcctcctcttacagtactctgctattcatgctcatttcatgttcttaatcttctttcctgtttaaaaatttttttttggaaaaaatttgaaatcatggtccttttttctgctgaatatattctatatattatatatatataaattatatatatatatatacatatatatgtctggctacctcgttttagtttactttttttctgaagccctggaattctacaagagagatattttgagactgaaacatgtttgtgcctagactggaaagatgcccttgggtttgtccgtctttytgtgttggcktcttcccagcctccatccgtccagtgtgccccacttccacattctggctataatttcctttttctccttgttcattgggatttgaggacctatttctaaatcttaatttatagcacaaatatgtgggagcaatgagagttgaaccgttgtttttgttggagatgcagattgtgtcttgaaaatgatgattatatatgcaaattctgccctaccctcaccctcttccaagtttccccccaaaaaggtcacacagtgcggcttcctgtgggaaacaggagcagagctggcctgcagagcccctggggctgtgatgaagctcatatcttatctctgttctattaacaaaatgggagtttgtgggttttaaaaaattccgtttctaaatggaggaatagatgactttctttcttttggtgggggttgggacttgtggctttaaagaaatcacttctgagtaggatgtatattttcgttggatttttgttgttatttctttagaaccctccacagcaacatgcaagaccatggagttaaagaaacccagagacctttatcaattaattgtactgtttgtgaatttgtataaataataacaaagatcctcttaaaacgtttatattcttacagtaaaaggttaaactgatatttatataataaaagaggaaatatgaagtatgtttttgaaaaaaaaaaaaaaaaacaaaaaaaaaaaaaaaaaaaaaaaaaaaaaaaaaaaaaaaaa

SEQ ID NO: 1716 - DNA, 1442 bp, Homo sapiens
aaaaaaactctctaatcagttgtacacacattgaaacttatagccatggccagattttatgctaaaaatggtagtttgtcaaagacaaaattctcttagaatctaatccaacttgccagccctgagaaaatcccttttaaggccaaggaaagctgaatgctagcagccaggcctgtggtacttccatgagaaaccatagcagacaatgccctcccaagtactgaaatcacactggaatcccccttgttgggttcatttgattgtttaacacaggatgtgttgtgtcattctgaagtttttatttggggcagaagtctttatggagatgtaaatgacagcgtttctgggttatgcataacttctcactggtcagagacaccggtgtgtcaagcatggatattgcattgcaagacttgaatctataaaaattagaatcacacagtcagtactacaagcaaaacagagaacctgaaagaaggtgcacagactgtaagaaaaaacccaagtttgtgatatttcagtgattccaaagaacattctaggttttttgtttgtttttttgttttttgggttttttttttttactgcagaaaattggtggtattttcacattcatagtgtttctatccaatttcagtacccacatttaatgaggaaaaaatgttttaccaatgaaggaggaattcttaaattagctgtaatgttaggttggagaaaatttggtatttagggtattttcaaggtaccatcaaatcagatttctgtttttttgttaaaaaaaatttttttaatcagtattgtttttacaagtaatatactttgaaactcttgaactaatagtctcaaaaactctagaggacagtctgagaacacgtatttctattgttctaaataaatacatgtttttgaatagttcaatcatgaattattgactatgtcttcatcaaaagtgttaatccctctcagggtctctggtgaagaccttcaagagtttggttttttctcccaggaaattggaaggtagaattgtaaattcatagaacttcttttataatggtgtacctcagcagctgcctttcaatttatgccaagtccttacagagtttatacttgaatagtaaatatgtcttctgagttttacagtgtcttaaactcaatgcacatttttttttcttctttttccaccccttcttgtttgtagttcattatacctgtcctattacagaactgatttccttcctggctgtacatgttggggtgctggatttttttccgtgtctttagtcttccataaatccacacacacacacacacacaaaaaatatatatatatataaatatatatgtaggatacatgttctcttctttagcttgtggtgaatacagtaatttgcattgaagaataaaacatctgttgccttttttgactaaraaaaaaaaaa

SEQ ID NO: 1717 - DNA, 808 bp, Homo sapiens
gtttcaggtctttgtgtgtggctttcttaaagccctgttgtaaaaaattactatgtggatggcagtctctcacatcacagatgtggaaagtataattttatatttgtattttcaaataaataagtttgtgaaaggtttccatcctctactgtggtccagaaagatgcttgagatatatatatakatagatacatatatatgtatatatataaaaaaaatactcactacaaaagttccagagcctccctcgaaggttctctactactgtattctgtacataatgtaccatcccatgtggaatctgtgagtgtcctcttaagtagcgtgggctagccaatctgccgttcatggtgtattgtaaactccgaattccatatgtaataggatgcaagtctaagcgtttcatgtggacataaatgtatctaaataaaactttccctagcactgtggctgacctcacccttacttttatactttagtatgaaactgatgagaactttggtagtgagtattttttttatatatatacatatatatgtactatctatatatatatctcaagcatctttcaggtctttgtgtgtggctttcttaaagccctgttgtaaaaaattactatgtggatggcagtctctcacatcacagatgtggaaagtataattttatatttgtattttcaaataaataagtttgtgaaaggtttccatcctctactgtggtccagaaatcaatgtgtttgtctgacaaaaaaaaaaataaaataaaataaactgttttgaaaaaaaaaaaaaaaaaaaaaaaaaaaaaa

SEQ ID NO: 1718 - DNA, 1055 bp, Homo sapiens
  misc_feature (996)..(996): n equals a,t,g, or c
  misc_feature (1010)..(1010): n equals a,t,g, or c
  misc_feature (1025)..(1025): n equals a,t,g, or c
  misc_feature (1030)..(1030): n equals a,t,g, or c
gataaatctatcaagaataaagcagaacgggaaaggcgagtcagggagttaaacagcagcaacactaaaaagtttctggaagaaagaaagagacttgccatgaagcagtccaaagaaatggatcagttgaaaaaagtccagcttgaacatctagaattcctagagaaacagaatgagcagcttttgaaatcctgtcatgcagtgtcccaaacgcaaggcgaaggagatgcagcagatggtgaaattggaagccgagatggaccgcagaccagcaacagtagtatgaaactccaaaatgcaaactgaagcagcaaacccacaaagcatcaaaagactcactcacaaacttctgaacacaaactccatggatgaaagctgtttattttgtttcctttatgtgtaaacaagatgatatctgaaaccagagagacttggaatgtctgactgacttctatttaacagcttgagtattgcatttccttggccaaacaaaaatagctacaaatccacaaaaatttactattccagtaaggcagagtccaaccattgataatacaacttaaacatgtttgctataaaataccatcacaagtaaatgagcttggtgtgaacaactctcctttgtgatgccttaggacatgtttgaactgcagcaaaaaacaaaaacaaaaaacagtgcattagcaatttcatagcaagtgcatgcactaggaaaagaaaactctgtctacaagtttattagcagaagtggtggtctgctagacaaataattttgcaaaatttttctacatctaagttacctcatcagtaagtgccatgtctctaccatgccatcagaggctaatttcctgtaaaagttgtggaaattgttagamcaatagaaaaatagagcagtgtatgtgtgccaaactcatcattactcaagggagactgtgttaggacattaagaagttacactgrcatgctttataggattgttctgcmgttccggtattntattccacctaagntttgagtggtattgnaacgntgtaatgtgcccagataaggttatc

SEQ ID NO: 1719 - DNA, 1044 bp, Homo sapiens
caaagcattaggattataccgtgtgagccatcatgcctctgttaaagtttttaatgtcctgattaatatgtgattcagattagtaagactaaaatctatgatcatatcccatcattttgaagcttttaaaaatagataataatgatttgttacatgcagcttccatctagatgcataacgttatttctggaaatgcgggccacctacaatgtaaagcaggctaaacaaggcagcttgtgatttcattttaatcagaaacacaccaaataggcatcatggcagcagatctggctgctagtgttttaaatacagatggattgttaacatctttattattcataattgtctgtcaatgttctctggatgatcaagaaactctttgtgcctcaccctaatcactgaagtaatgaaaggagatacccgcagcaaggactgcaactgtaaatgctgcaatcacacctatgttttgctgaattttcaataacattgtagttttaattggttgttttggttgttcatcatctgtgttgtccaatgaagcttgactattcatagaagaactcatacaagctgtgtttgtttcctctgcaatttccaaatcttctatttgaattgtgtgatccaacatctccataaaatggtccctgatttcttcagctgactcatcgtcaaatttataatcacacaacattacagtggatccaggaaggggaacaaagactcgataagggaggacgtggaactctttttcagaaycttttttttctggaatttcattcaaaagcagatcctcaaatagcatttcacaacgatcagcaactgtgttcaatatatccctctttactgcctgcacagcatctttaactttgggtttactgctgtggatataagctctgcatttcacagcacccttaaggtttacagaaccgctacatatctggactgtggctgtggatctgtggtctgaattcaggagcaactgcgttagcactctgacatcaaaagaatgactagttgcttgagtatttcctctagaagattttt

SEQ ID NO: 1720 - DNA, 895 bp, Homo sapiens
  misc_feature (863)..(863): n equals a,t,g, or c
  misc_feature (883)..(883): n equals a,t,g, or c
  misc_feature (889)..(889): n equals a,t,g, or c
aattcggcttcgagcggccgcccgggcaggtgttctaaagggggatggccaaggggtgacatcttaattcctaaactaccttagctgcatagtggaagaggagagcatgaagcaaagaattccaggaaacccaagaggctgagaattcttttgtctaccatagaattattatccagactggaatttttgtttgttagaacacccttcagttgcaatatgctaatcccactttacaaagaatataaaagctatattttgaagacttgagttatttcagaaaaaactacagccctttttgtcttacctgccttttactttcgtgtggatatgtgaagcattgggtcgggaactagctgtagaacacaactaaaaactcatgtcttttttcacagaataatgtgccagttttttgtagcaatgttatttctcttggaagcagaaatgctttgtaccagagcacctccaaactgcattgaggagaagttccagaaccatcccctttttccatttttatataatttataaagaaagattaaagccatgttgactattttacagccactggagttaactaacccttccttgtatctgtcttcccaggagagaatgaagcaaaacaggaatttggttttcttttgatgtccagttacaccatccattctgttaattttgaaaaaatataccctccctttagtttgttgggggatataaattattctcaggaagaatataatgaactgtacagttactttgacctattaaaaaggtgttaccagtaaaaaaaaaaaaaaaaaaaaaaaaaaaaaaaaaaaaaagaaaaaaaaaaaaaaaaaaaaaaaaaaaaaaaaaaaaaaaaaaaaaangggcggccgttttaaagganccaagnttactt

SEQ ID NO: 1721 - DNA, 1614 bp, Homo sapiens
  misc_feature (353)..(353): n equals a,t,g, or c
  misc_feature (361)..(361): n equals a,t,g, or c
  misc_feature (366)..(366): n equals a,t,g, or c
  misc_feature (1606)..(1606): n equals a,t,g, or c
  misc_feature (1614)..(1614): n equals a,t,g, or c
tggggatgaaaggatctctgagaccacagaggctcagactcactgttaagaatagaaaactgggtatgcgtttcatgtagccagcagaactgaagtgtgctgtgacaagccaatgtgaatttctaccaaatagtagagcataccacttgaagaaggaaagaaccgaagagcaaacaaaagttctgcgtaatgagactcaccttttctcgctgaaagcactaagaggtgggaggaggcctgcacaggctggaggagggtttgggcagagcgaagacccggccaggaccttggtgagatggrgtgccgcccacctcctgcggatactcttggagagttgttcccccagggggctnctgscacnctggnagaaggaagctgcctggtgtggagtgactcaaatcagtatacctatctgctgcaccttcactctccagggtacatgctttaaaaccgacccgcaacaagtattggaaaaatgtatccagtctgaagatgtttgtgtatctgtttacatccagagttctgtgacacatgccccccagattgctgcaaagatcccaaggcattgattgcacttgattaagcttttgtctgtaggtgaaagaacaagtttaggtcgaggactggcccctaggctgctgctgtgacccttgtcccatgtggcttgtttgcctgtccgggactcttcgatgtgcccaggggagcgtgttcctgtctcttccatgccgtcctgcagtccttatctgctcgcctgagggaagagtagctgtagctacaagggaagcctgcctggaagagccgagcacctgtgcccatggcttctggtcatgaaacgagttaatgatggcagaggagcttcctccccacttcgcagcgccacattatccatcctctgagataagtaggctggtttaaccattggaatggacctttcagtggaaaccctgagagtctgagaacccccagaccaacccttccctccctttccccacctcttacagtgtttggacaggagggtatggtgctgctctgtgtagcaagtactttggcttatgaaagaggcagccacgcattttgcactaggaagaatcagtaatcacttttcagaagacttctatggaccacaaatatattacggaggaacagattttgctaagacataatctagttttataactcaatcatgaatgaaccatgtgtggcaaacttgcagtttaaaggggtcccatcagtgaaagaaactgattttttttaacggactgcttttagttaaattgaagaaagtcagctcttgtcaaaaggtctaaactttcccgcctcaatcctaaaagcatgtcaacaatccacatcagatgccataaatatgaactgcaggataaaatggtacaatcttagtgaatgggaattggaatcaaaagagtttgctgtccttcttagaatgttctaaaatgtcaaggcagttgcttgtgtttaactgtgaacaaataaaaatttattgttttgcactaaaaaaaaaaaaaaaaaaaaaaaaaaaaaaaaaaaaaaaaaaaaaaaaaaaaaaaaaaaaaaaaaaaaaaaaaaaaaaaaaaaaaaaaaaaaaaaaaangggggggn

SEQ ID NO: 1722 - DNA, 530 bp, Homo sapiens
  misc_feature (499)..(499): n equals a,t,g, or c
  misc_feature (517)..(517): n equals a,t,g, or c
  misc_feature (528)..(528): n equals a,t,g, or c
aattcggcacgagtagatatgaagataccaccaccaccaccaccgctatccatacctagcctaaagatgtagagccctctgctggggctgaggaggagctgtggggtgctttctaagtagactttccaccagcccgtctggtttgtctagtcccattttcaccccacatccagagttactattattaccaactcctgagcatttgcaggattctgtagtatgaattgggatgcttcttggctttccctacagccagcttagaattgtgctttctcaggtctactaagttcaataccatccttcagcctgctctccagtttccaacatgttactgttaaggccttttccctcattttctatcattgtgagtatgtgccctttgaaaacccttttgctgtcatttttgtgggatttggtgaagaagcagtggtaaatgcatgtattattctgtcatctaagtgttcaatgttagctcttctcataagtggggatgttaggnctcagttgctttctctgntgaaatgaggngg

SEQ ID NO: 1723 - DNA, 728 bp, Homo sapiens
  misc_feature (468)..(468): n equals a,t,g, or c
  misc_feature (572)..(572): n equals a,t,g, or c
  misc_feature (625)..(625): n equals a,t,g, or c
  misc_feature (724)..(724): n equals a,t,g, or c
gagaattgaggttgcaaggctggctaactcagctttgccttcacgagccctagaggccagccgaagatgttctgcaggtcagggagacaggaccaggtaacccagctgtyactgaagattatatagagtttgagaatgttggaatatttgaaaatgctcccccaaaaaagctgctgatgagttctggaaatgtcaggagattaatctatacggacactgctgaagaaaaaggtagaagaataaaagatccagtacttcttcctgggtaagcagttatgaccagagatggaaccggcaactctttggccagaaagctgtatccaaaagacagagaagatgagaaacagggagggcaaaggcgaaaaagcaattggacatgatagctagatttgtttcaggaaaacatcctgctttccaaggatttagatgaatgtttttgttcactggtgactcaggtaacacgtcttncaagaagccataggggaggtttgagggagggaagtcaagaagggaggttgaggactgcacttttgatttacttctgacttcacgagtcactttctggccaaagnaaatctctccttttgcttctagcaccgactagatttcccttcagccttgatgnatttggactccccagaaattccgaaaagaaaactgagttccccacaaaagctcttgttctgatcctgggagcttcgccagccccagttccaattaatcnttcc

SEQ ID NO: 1724 - DNA, 1595 bp, Homo sapiens
  misc_feature (1592)..(1592): n equals a,t,g, or c
  misc_feature (1595)..(1595): n equals a,t,g, or c
ggcacgaggaaagctccacacacacagcccagcaaacagcagcacgctgctgaaaaaaagactcagaggagagagataaggaaggaaagtagtgatggatctcatcccaaacttggccgtggaaacctggcttctcctggctgtcagcctgatactcctctatctatatggaacccgtacacatggactttttaagaagcttggaattccagggcccacacctctgccttttttgggaaatgctttgtccttccgtaaggctattggacgtttgacatggaatgttataaaaagtatagaaaagtctggggtatttatgactgtcaacagcctatgctggctatcacagatcccgacatgatcaaaacagtgctagtgaaagaatgttattctgtcttcacaaaccggagkcctttcgggccagtgggatttatgaaaaatgccatctctatagctgaggatgaagaatggaagagaatacgrtcattgctgtctccaaccttcaccagcggaaaactcaaggagatgttccccatcattgcccagtatggagatgtrttggtgagaawcttgaggcgggaagcagagaaaggcaagcctgtcaccttgaaagacrtctttggggcctacagcatggatgtgatyactrgcacatcatttggagtgarcatcgactctctcaacaatccacaagacccctttgtggagagcactaagaagttcctaaaatttggtttcttagatccattatttctctcaataatactctttccattccttaccccagtttttgaagcattaaatgtctctctgtttccaaaagataccataaattttttaagtaaatctgtaaacagaatgaagaaaagtcgcctyaacgacaaacaaaaggtaaaatctgatggtggttaaatgacgatgtttaggttttgataaatttagattttatacacatgatagagcatgtatctgtatttttaaaaataaagacagagaacttatgtttagaacaagagaagccatttggtagaaataaagaaggagattggggaaggagatgagaatgagtcagagagatagcatttaaaacttgaaatcaggcacaacaattagtatgtcatgatataaacagtattgagataaaattttaccacttctcttycctttaataaattgtcaaaggataaagtttcctgtttgaaaatatattttactggtattgtgctttcctcatatcacagattggtaaagaatcattttaagtccaagactcttattttacatattctgcaattaaaggtcctatgaggctacctgccgactgctgacatgtagtgtgtggtaaatgtgagtgtttcacagcctggagtgaacaggggtcttctctgagaattgaggttgcaaggctggctaactcagctttgccttcacgagccctagaggccagccgaagatgtctgcaggtcagggagacaggacmaggtaacccarctgtcactgaagattatatagagtttgagaatgttggaatatttgaaaatgctcccccaaaaaaaaaaaaaaaaaaaaaaaaaaaaaaaaaaaaaaaaaanggn

SEQ ID NO: 1725 - DNA, 591 bp, Homo sapiens
  misc_feature (166)..(166): n equals a,t,g, or c
aaagtagggtccggaattcccgggtcgacccacgcgtccgcttgctagtgtcccctgatgcatgaaggatccccccatgtcataggtcccacctgcctgctgtgcatcccgggtggccagactcggcttctccaggtgcacttgtcccaggtggcccggtccgtangctgraagggcagctgcaggtgcactgcctcgcggacaggttaggatatggccacgcagccatccatcttctacagcacgcacaccccactctctcccccagtcaatatgtctctctccgatgggaaagttaataaattttgctctagattaaaagtattgatyatttcatttgtaaacgataaataaaaagggggaacttttcattgcgccaggggtggcacctggcgtgtgttgcgggggtgattgcgctggctgccggggggtgggcttctcatatgcattctggccggccagctgcattgatttcctattagtctcccagcaccacccagtaacacatcatttcagtacctgctattaatggtcttttgataaataatcacttgtaagtcaataaatttttattaaacagtraaaaaaaaa

SEQ ID NO: 1726 - DNA, 1974 bp, Homo sapiens
tacttttatctttcaaaacaaattcactaaaaataacacctattgattttgaagtcacttttctcaaaccttgaaaatgagctctaggatctctataaacatttctaacacttttcctgtagtttatatagacagacatctgttgttagacctgtgtgtttttaaagaatcatatgttaacaaatacccatgcaaagagcttcaaaaagtgaaaccgtgttaaaggaacacaatttttctcactcagacatatttgtttattgaattgcaaagttttattttaaatcagcatttccccaaagaatatatcatatgacgctagttccaaggggcttgactgagtggtgttttgctggggggagacaggggtttgttaatacactttactaaatactgagctgaaaaatgttaaatagatttcacgattgcctccttgaagattttaaagttcattgtggttcttcaaggcgaaatccggtgaaccattcctcacacttacctacaggactcttttctaatggagcatcttgtgaagctagtgggtttttttgttgttgttatttgttttttttttttaatgctttagaaaacacagctttaggatattgactttttgtttatttctattttcaaatgctgaaaagtcaagtcccagtttgaataccatagaaaagctttgatgcatttgtaaattatattgcactctttcactatatattttcaaaatcactggaatgttgttatacaagagaattataattgtgtattgtaaataacatattaaaatacatatattaatgccaatagttaaattcaacaatatgtaatctaaggtgctcggttctacatgaagtatgagttaactgctcataattaagttgccaagattctattatatatttatagacaaattaaaatgatcataattacaaatatgrtttctttatcacttaagctttgggctgattaatatctgtgtgggggtcaatggaaactacattctctacatttataaacattaatttaattatttatattttaggaaaatatatttgaataaaattaatgcattttctagagtaaattaaaatgttattagcaagaaatagaaaatttgactaagataattgtgtatatgaatcatttttcccccaagttaaaatgtatcataatagagaggctctaatgaatcaatttccaatactcatttctttcttattttgaattcaagttacaatgactttacactgtagattttaatcttgtctgatgtgtgctggtgtgtatgacacaaactcataagtctggatcatgcttgggtacagtcaatgaatcaaccgagtcactttgaggaatttgtttttgtccaatttgctctgtgctcaatcccatgaattattaaatttacaatgtttgtccccaaatgaaaaccaatataaatgaatgatgttttaatctgtactttatgggaagttgcctatttgtcagtagatgtggttaagtgagtcctctggtgcagtgacatccttttaagccatctcatagggatttaaagaaggccaataggaatatagatattggtttttctttctctgacttgaactaagtaggagaaaccaaaccataaacctattacaaactacccaggcagaggcatttacttaattcatcaactagtgcaattaaaaccctgaaaacacatgatccttgttgactctgcttggttgaagcaggaaagaatggtcttgatggtcagaaagttttaaaattaatggkcagggcctttctggaccctgttttccaaacacgttagatattccgtcttgaggggattggagtaggctacagtgagggggtaatttttggatgtatctggacttttaaaaaatgtgcctatatttatagcaccatgaatattatgtaaaatttatatatgaattaaataaatattcmcctctgaaaaaaaaaaaaaaa

SEQ ID NO: 1727 - DNA, 559 bp, Homo sapiens
  misc_feature (4)..(4): n equals a,t,g, or c
  misc_feature (7)..(7): n equals a,t,g, or c
  misc_feature (23)..(23): n equals a,t,g, or c
cganacntcctcactaaagggancaaagctggagctccaccgcggtggcggccgctctagaactagtggatcccccgggctgcaggaattcggcacgagcttctttctcccgcgcttccttgtactgtgcattcctcatcaacgatggcttctcggactccacgaaactgcgctgtactgaagggcgaagtggatctgaccgcactggccaaagagcttcgagcagtggaagatgtacggccacctcacaaagtaacggactactcctcatccagtgaggagtcggggacgacggatgaggaggacgacgatgtggagcaggaaggggctgacgagtccacctcaggaccagaggacaccagagcagcgtcatctctgaatttgagcaatggtgaaacggaatctgtgaaaaccatgattgtccatgatgatgtagaaagtgagccggcatgaccccatycaaaggagggcactyttaatcgkccgscagaccccagattactacagatttctccatctagcgggaacaacagtgacatctgtgggggggattttcctg

SEQ ID NO: 1728 - DNA, 834 bp, Homo sapiens
  misc_feature (4)..(5): n equals a,t,g, or c
  misc_feature (57)..(57): n equals a,t,g, or c
gttnntttttttttttttttttttttttttttttttttttttttttttttttttttnttttttttttttttttttttttttttttcgatttttttccatctttattgaggtatatttgacaaataaaaattatatatatttagggtgtactacatgttttgatatacatatacattccaaaatgattaccacaatccagctaattaacatatccatcacctcacgtagttatcttttttctttttttgtagtgagaacatttaagaacatttaacaattctttgcattttcaaattaaamaaaaaaaaatcagtagtaaagatgctataggaccagatggagttgcccctttataacagagaatattttagctttcataaagttaagcaaaatctaatgatagtcaaatccttcctggtttgaactacacaaatactaattaaaacaacagaaactgcctttagaaattttgcttcccatattgatcctttatattcctaaatttattacaattttaactatgagatcatgaaggtaaattgtttcataaaactaaaaccaatgtatacacataataacttgagtatttcctggtttgtagcgaccatcgatagcagggtatctcaaaatgagcactgatgacatttggactcaataattctttgttgtagaaagttataagatatatatattttaaactatgctactcctcatttatttaggaaacctcatatgcatagagagtgcaaagttaaactgcagccacactggaatttccataattgcccaagaaatcgagtttaatgcagaggctcacacagaacatattacaca

SEQ ID NO: 1729 - DNA, 806 bp, Homo sapiens
gaaaaaagaaaaattgaagaacataacttttctacttatgaaatagataattttttaaaattgtttaaactcctggaaattaagtgttattttttattactgcagttgagagataccttttcagaggaaaacaagaggctaaattccatgttaagagctaagtagtatttttttcttaacaattttgccaaaatttcttctactggaccaaaaggaaataaatctacaataaatctactttctaaatattatttaagatgggaaatgtcttttataggtatattctgtataatacccttaattagatgaattatcccttatcattccaaaaatgaaatgctgtgttaaatatctccagggcaaagtggtatgttgactgggacaaacgttagaaattgtattgttcattgcacttgttgccctgttccccaagcttgtcaatgtttagagatactattcgggttgctaaagccattattcatagaaaatttctgcccctacagaagtgtgtgcatgggccttggaaaatctacatgtgtatatctgagtagcgaagcacagattcactctaattgaaagcagcagtttggttttgtaaatgtaattgcaattgacactttcttttccctttcagttattattttttttaaaggacgttatgagaaggcactatgaaaagcctaattggaatagcattatgaaccatgtaatgcatgcccatgcacactgtgatttgcaaacatatgtccgctcttcaataaatgttacggctttccaaaaaaaaaaaaaaaaaaaaaaaaaaaaaa

SEQ ID NO: 1730 - DNA, 505 bp, Homo sapiens
  misc_feature (387)..(387): n equals a,t,g, or c
  misc_feature (428)..(428): n equals a,t,g, or c
  misc_feature (430)..(430): n equals a,t,g, or c
  misc_feature (489)..(489): n equals a,t,g, or c
  misc_feature (503)..(503): n equals a,t,g, or c
gccagatctatttgcacatcgagaggttcctctgtccctgcatgggctcagtgaccttatcccacctcactcccaattccaggtagttgagcaggatgaggctgctcccagcccactgccacatccagattcagctgctgagtttatcccacaggaaagaggtagcactgacagcgtgcacgcctgtgggtgacgcatgatcctcaggagcagttcaccatgcgctgagcagggccagtaggaggcagctgtggaaggccaggtacagcagcttcatggtcaccaaataagcctgacactcaagcagacagcagccacccccatgcagcctcagctgcagggccccagggttgctggctacggcaggagcagcttcagtcatacgtnttgcacaggcacccatctgcctgaaccctgatccctgtgtnangcaaaaaatgttattttagaaaaaaagggaaggtttttttaatactgacctaacttttngttttattaaactnaa

SEQ ID NO: 1731 - DNA, 679 bp, Homo sapiens
  misc_feature (4)..(4): n equals a,t,g, or c
  misc_feature (18)..(18): n equals a,t,g, or c
  misc_feature (510)..(510): n equals a,t,g, or c
  misc_feature (637)..(637): n equals a,t,g, or c
  misc_feature (649)..(649): n equals a,t,g, or c
  misc_feature (655)..(655): n equals a,t,g, or c
gagntcagcctcactaanggaacaaaagctggagctccaccgcggtggcggccgctctagaactagtggatcccccgggctgcaggaattcggcacgaggtccggcgggccgcgcctcccgcaggcccagaagacggccgccttgccccggacccgcggcgccggcctcttggagtcggagcttcgcgacggcagcggcaagaaggtagcagtagctgatgtgcagtttggccccatgagatttcatcaagatcaacttcaggtacttttagtgtttaccaaagaagataaccaatgtaatggattctgcagggcatgtgaaaaagcagggtttaagtgtacagttaccaaggaggctcaggctgtccttgcctgkttcctggacaaacatcatgacattatcatcatagaccacagaaatcctcgacagctggatgcagaggcactgtgcaggtctatcagatcatcaaaactctcagaaaacacagttattgttggtgtagtacgcanggtggatagagaagagttgtccgtaatgcctttcatttctgctggatttacaaggaggtatgtagaaaaccccaacatcatggcctgctacaatgaactgctccagctggagtttggagagggtgcnatcacaactganactcanggcttgttacttaagtattcactg

SEQ ID NO: 1732 - DNA, 619 bp, Homo sapiens
  misc_feature (530)..(530): n equals a,t,g, or c
  misc_feature (562)..(562): n equals a,t,g, or c
  misc_feature (595)..(595): n equals a,t,g, or c
  misc_feature (613)..(613): n equals a,t,g, or c
gcggackcgtgggaccgagcttggtaagcagaatagaaaacatccagaatgacatcagtctggtaagctttgaaggaaacaaccaaagatggtcaacacaactgcttgttcttttatttaccatttcacacctggtgcagtcaggaagctacatttaaaaaacaattttctctttaaaaagaaaaacaacccgtagtcaaaaaagcactcatttgccataaagctggaaggattcattcattggagctgattgttcacatttgtagaatttagaattttgtggttggaaggggccttagagttgaataaggtcttcaaaaggaaacaaaaggctcttgctttctgtatgaacagagtttattcacaagtcagttttccgtgatctatgaggagtgatttcagacaattagctaattggttgaggcaggtgacctatcagctctgkarargggatgkttgctcttagggatctacmtaaagaacatatcttacactttycatgacagtcaaaagcagccccattaatcctnctatgkaatggccagtcataaccacagatgangagtgcatttcatgaaaacccttaacagctgtnaacagttgatcactggcnccatta

SEQ ID NO: 1733 - DNA, 852 bp, Homo sapiens
ggttactttcctgcgattataattcttccttgactttgttcactttagatgttttactagtgagttttgatgactcccaccccttatgtgagaatgtgcatactttggaaacttgaatttatccaaacaagctacctatgacttagagtttgggcataagttttaaattcaatgctcaagtcgaactggatctggtccaggcccactccaagggtggtttcaggggtgttttttcagkacttgtcccagaccacacaggtagscttgkttctgarggcagctttatgggraggtgtagaaggtggtgggcagcaaatgcactgcagagtcattttcttgggtatggtgtttaagaagcctgagattttcacaagaaccagcaaaaccaggagtggagagttggggagatagagaagtaggcctaaaactccctcttcttgagtcttttttgacttaatacaccattgggtctgtcctggtgctatggcctatcacaaaggactgttttaagagagaagcaagccacagccttgccagataagtctccaacaccagcagaaaagcacggaccctgatctgtgggaggcaagggtctcccattatttctggaggcaaatggtgccttctagtgaaatggtgccaccatttgctgatgggggtgcctgttctcaggatgtgtggaaactcaggcctgagggtttctacatggtttattcaatctaactgcatacctagcttggcagaatggaggtggacaaaagtgctgaaaggatgagggtaggcttttagggcaaatcaagtcacaaagcagatgattgagggaggttacaaagcttaggcagagttaaagtt

SEQ ID NO: 1734 - DNA, 697 bp, Homo sapiens
catcagaccgaccagcccaagaaacatctcaccaatttcaaatctggcacccactggaaatcagactgcccagctcgcccgacagccactcctggagcccctaaagctctagcccaaggctctctgactccttcccagatctattcggcttagcgactgaagattgacgctgcccgatcgcctcggaagtcccctggaccatcacagaagccgagcttcgggtaactctcacagtggagggtaagtccatcccctgtttaatcgatacgggggctacccactccacgttgccttcttttcaagggcctgtttcccttgcccccataactgttgtgggtattgacggccaagcttcaaaacccctgaaaactcccccactctggtgccaacttggacaacactcttttatgcactcttttttagttatccccacctgcccacttcccttattaggccgaaatattttaaccaaattatctgcttccctgactattcctggagtacagctacatctcattgctgcccttcttcccaatccaaagcctcctttgtgtcctctaacatccccacaatatcaccccttaccacaagacctcccttcagcttaatctctcccactctaggttcccacgccgcccctaatcccacttgaagcagccctgagaaacatcgtccattctctctccataccaccccc

SEQ ID NO: 1735 - DNA, 468 bp, Homo sapiens
  misc_feature (433)..(433): n equals a,t,g, or c
  misc_feature (451)..(451): n equals a,t,g, or c
ctgtgaggtgaggcaggtgtctagattccctactcagcttacattaagtccaaaatgtggggacgctctttattactgcctggtggggatggaagtccattgacactgctgggagaaggaggttcatgctggccagttgggatgaaagtcttagctccccacttggtcttccctgacaccactgcagtggggtgttggggtgcccctttacagccttttgagtgtgggattctaggatccccacttgaccttccctggtgtgggcagaggttttttctttggtgtctgttgggagtagagcagctgtcatctaaaagttttctgtcttgctgggacgtcctgttctggtcctttagctagagagagcattcttttgttagtactttttwtgctgtgtctgttggcatttycatgttgctggctttttcaactncaactctgggatatatgntgtaaaaagaaaaccca

SEQ ID NO: 1736 - DNA, 482 bp, Homo sapiens
gattgaggccaaagttataaagatgggctctcgatctactaatattagtaaaatgggtttgggacttactaacatttgtgcttagaagagacagacctggcaaagagcttggagaagtgagttccaaagagagaggtgtgggaaccaggatggaagagtcaggcctccagatagcgtttacttctcctttcttccttgaatcactgtctcasagataattaggttcagaagaggaggaaaaaaaagatgaccgtcaacatggagcagagtttttcttagaccttagcctagcaaggaaagagaaatgcctggtctcagtgctgggaagctgttycagccagagccccgtggctgtgaagagagctctcctgyctggagccaaacagaaagctcataggtcttgaggccagaaaagttagtaggtggcggctctggtcggtgctggaaatggaggccaggatgaactaagaagcaaactaaag

SEQ ID NO: 1737 - DNA, 1897 bp, Homo sapiens
  misc_feature (1202)..(1202): n equals a,t,g, or c
gctgctgcagcagcagctgctctgcagagtggtggccggggccagggccggggtgccctccctcccaccttctcccgccatgagccagggaagtccgggggactgggcccccctagatcccacccccggacccccagcatcccccaaccccttcgtgcatgagttacatctctctcgcctccagagggttaagttctgcctcctgggggcattgctggcccccatccgagtgcttctggcctttatcgtcctctttctcctctggccctttgcctggcttcaagtggccggtcttagtgaggagcagcttcaggagccaattacaggatggaggaagactgtgtgccacaacggggtgctaggcctgagccgcctgctgtttttcctgctgggcttcctccggattcgcgttcgtggccagcgagcctctcgccttcaagcccctgtccttgttgctgccccacactccactttctttgaccccattgttctgctgccctgtgacctgcccaaagttgtgtcccgagctgagaacctttccgttcctgtcattggagcccttcttcgattcaaccaagccatcctggtatcccggcatgacccggcttctcgacgcagagtggtggaggaggtccgaagcgggccacctcaggaggcaagtggccgcagtgctattctttcctgagggcacctgttccaacaagaaggctttgcttaagttcaaaccaggagccttcatcgcaggggtgcctgtgcagcctgtcctcatccgctaccccaacagtctggacaccaccagctgggcatggaggggtcctggagtactcaaagtcctctggctcacagcctctcagccctgcagcattgtggatgtggagttccttcctgtgtatcaccccagccctgaggagagcagggaccccaccctctatgccaacaatgttcagagggtcatggcacaggctctgggcattccagccaccgaatgtgagtttgtagggagcttacctgtgattgtggtgggccggctgaaggtggcgttggaaccacagctctgggaactgggaaaagtgcttcggaaggctgggctgtccgctggctatgtggacgctggggcagagccaggccggagtcgaatgatcagccaggaagagtttgccaggcagctacagctctctgatcctcagacggtggctggtgcntttggctacttccagcaggataccaagggtttggtggacttccgagatgtggcccttgcactagcagytctggatgggggcaggagcctggaagagctaactcgtctggcctttgagctctttgctgaagagcaagcagagggtcccaaccgcctgctgtacaaagacggcttcagcaccatcctgcacctgctgctgggttcaccccaccctgctgccacagctttgcatgctgagctgtgccaggcaggatccagccaaggcctctccctctgtcagttccagaacttctccctccatgacccactctatgggaaactcttcagcacctacctgcgccccccacacacctctcgaggcacctcccagacaccaaatgcctcatccccaggcaaccccactgctctggccaatgggactgtgcaagcacccaagcagaagggagactgagtgcctcagcctctcaccccctcctcctcagggcagcgctaggggcctcccctatgcctcagccccatctctgctcctgtttgaattttgttattgttgtttggttgttgtttttttaagttgattttaattttttgtttggttgatttttttgtaaaaaactattttatatataaatataaatctatatctatatctattaaaaaaaatgaagtccaaaaaaaaaaaaaaaaaaaaaaaaaaaa

SEQ ID NO: 1738 - DNA, 523 bp, Homo sapiens
  misc_feature (468)..(468): n equals a,t,g, or c
  misc_feature (485)..(485): n equals a,t,g, or c
  misc_feature (504)..(504): n equals a,t,g, or c
  misc_feature (509)..(509): n equals a,t,g, or c
  misc_feature (521)..(521): n equals a,t,g, or c
gcagatatttttcataagataaatacccacagtgtatagtaatgaacctggataataaatatcttccagcaaatattttacttagaagacgattatattttttaaattttgagattaattgaatatatacaaacagaaaattaggtacaaatttattatgtttatggctcttatacaactatcaaggtaaaggaaatttaccaattaaatacaaagtagtaaaattcaaaatcacaataattaataatgttctgctgctacaaaatgagatgttgggtttaataatagaaggaagtagcactgttgaaatagaattaaatgggtcttgaattcatttgtgattggaatcagaagtcgcgagttctgaaagggtaaggtttactgcaacattgctaataaataatttcaagatgaaatatacaaagatgagatccaagctctaacatttacttgcaacatgaatatggnactgggttcttctccgnccccatctcattccccctnctctnctgctgctggtngg

SEQ ID NO: 1739 - DNA, 218 bp, Homo sapiens
  misc_feature (45)..(45): n equals a,t,g, or c
  misc_feature (51)..(51): n equals a,t,g, or c
ccggtccggaattcccgggtcgacccacgcgtccggtaaaattgntttttntataccaatatatgcatgttttgtgcatgagtagtacttgtgttgatactcctgttgatgttaaattactatataatataaacagtatgtgtttttatatatcattgtgtaaatttaatataacatatgcagtaataaaccatttgttttactgctgttaaaaaaaa

SEQ ID NO: 1740 - DNA, 580 bp, Homo sapiens
  misc_feature (414)..(414): n equals a,t,g, or c
  misc_feature (555)..(555): n equals a,t,g, or c
gcaaaagtgtgcacagactgtgatttattcattgtggtctgtgactttaacccatcattgatgctctcacttaggtaaaccctaaagaccaaactagcaacactagtcaagggagtgactggagttatttctggtagcagtagccactggcatcctagaaacacatggacatttgtagcatgaattgacctattggtagtgcaatagctatacatgatttttattcttggcaaaagaaaatgcttcaaaaaaaaagtgatcaaacctgcacattgatcctgtaatagcaaatggaaggctatttctctgtactagcatttcagctttatgtgggaaagttacccgttctcctgcaagtacaatcaacccttgatgacttaagtattaattattctgggtgtaactcacccaagntttcttcctacatcttttggctaattccaccacacctcagcatacagtcagatgggaaaaggggcaggtggattctcatgtcatgccytcttgkaccttattttcaagttttgtggtggargaggttwaatatctgccaanaatctggatttttagcccggtgcgg

SEQ ID NO: 1741 - DNA, 637 bp, Homo sapiens
  misc_feature (327)..(327): n equals a,t,g, or c
  misc_feature (586)..(586): n equals a,t,g, or c
  misc_feature (593)..(593): n equals a,t,g, or c
  misc_feature (616)..(616): n equals a,t,g, or c
  misc_feature (619)..(619): n equals a,t,g, or c
ggagatttagaagcttcactcaaatattaagctttatttaaaaagatgatttccagtatttcattttatattcacattaatcaagtctacatgtttcgtttagagtaacaggaagatggtaatacgcccagggaactatctggaagtgtagaaattgggatgaacaccgtggttatacttgttttgatctgcctgtggtgctatgatgacttattttctctcattattgcatagaaactcaattcagtgatgttattcagatgttattcataagttattgccatgattcatcacttttatgtcatcagagttgggatggctacccanaataggggatcctggagatttccctgtagacgctttgcatttataaataatcctttatcaagggcagagggatttctgtaggacttctcccttagaagaactcagcctgggtagaaatacgaggattaacatcagcacatattcatctccaaaaaattttcctccccattactcacacttgccaataaataacttgctttgggtaaatattcagcactcagtcttagtccaaagcatttgctcagcaatcactgtgtanagtacanagtaagggggataccacaaatanaantttgctctattttcttaa

SEQ ID NO: 1742 - DNA, 423 bp, Homo sapiens
cacattttcttgcttctttgcatgtttcttaattttttttattgaatgccaggcattgtatgtaaaggaatagtagacaataaagtaatattaatgaccagaaraaaatcatttctccttagtcttattaggccactagtgggctggggggtggggagaagggtggtgctgactgaatcatttaagtgattttaatttgtaatatatttgcatgtattagctgcttctactaatcacttatttgtccataagccttgcatctagaaatatggcaatataggaatattactgctttctgaagtttcatatgcttctcaccttttattttatgtttgatgattttaatatttttcctgcatcagagtagtaggaatatctttgcaacattaagaaatacttggtatgggttacttacttacaccg

SEQ ID NO: 1743 - DNA, 1281 bp, Homo sapiens
  misc_feature (426)..(426): n equals a,t,g, or c
  misc_feature (1273)..(1273): n equals a,t,g, or c
  misc_feature (1277)..(1278): n equals a,t,g, or c
agtttgctggtcttccaataccgaagaaagggtggttgtgacaatacctcttgcttctaaagaatgtattataaaacaccgcagatttttttttttccttaaaaaacactacctgatgctttccttgttcgtggggattgtggtcacatgaagctctttctgcatcagtattaaggtgtatatttgaatgtcctcccctcccctttcccctccaggctgtgtagctttgaggggctgggcgtttgctcacgaccttgctgtctcgctcagaacatgctccgcaaagttctccgcacacacttcttccccatcaagcccatttccttccccaaccacaaaggtgtttgtgattcctcaccccgggaaaccaaggagctgcaaagkggagtctggttcagccccgtgcagactcacccagagcttaancgttgtctttcaaacaccctgagccttcctaaacagccagtgcagacgttctctctgggccacgaagcccctcgggtcctccccgtcccctgstccgatgcatacctcagtgcagaaccacagaatctctgcagcggaaacgccgtgcatctcttgtctgttggcagcgagcacatcgtgctgsgagacacgagtttctaagcagctggcacgagggctgctgacggcatgggtcgtgcttcagggtggcaatacctcttaggaacttagggcaggaagcaatacttcagcattgaatgtgtgtaaatagttgctttgagttgcaattgctattttcttctcagtcccagctcagatcgaattatatatccatatatatatatatatatatatatggtaaacaagcacacacaattttatccaatgcaaacaaatgtagagcatcagttacaaaaccctcgaatagcttgagagccccacaggctctgccacacccgtgacttcatccacactgacgtcacccgcgggggctccccctgcacatttgcacacgatccggagagccgaaggccgcgtgcttcctgtcacatgggctgtaatcatttgtagtttccaaagacacgtctgcatttgaatttctagattttcgaggtaaggagttttttttaattggttgtttggaaaatcacatcatgcctagaatctgaaattgaattagcaagaaccgactgtttgcattttccatatatccttttatctgctctttttaaattgttaattctaataatttcaaaatgcattcactgaagaaatggacattaaaatattctaaaatttaaaaaaaaanaaannaaa

SEQ ID NO: 1744 - DNA, 275 bp, Homo sapiens
  misc_feature (39)..(39): n equals a,t,g, or c
gttttaagaatgcagcatgggtctggctttggaattganttcaatgctacagatgcgttaagatgtgtaaacaactaccaaggaatgcttaaagtggcctgtgctgaagagtggcaagaaagcaggacggagggtgaacactccaaagaggttattaaaccatatgattggacctatrcarcagattataagggamccttacttggagaatctcttaagttaaaggttgwatctatatgatctgttgtaggtacagaaaaattgaaagccagaga

SEQ ID NO: 1745 - DNA, 1031 bp, Homo sapiens
  misc_feature (796)..(796): n equals a,t,g, or c
  misc_feature (821)..(821): n equals a,t,g, or c
  misc_feature (976)..(976): n equals a,t,g, or c
gagccaatcttgatggtgggtgtggcattatgtgctcactttattgagcctatgttaatttctttagcatgctccccctaaattgaaatagtgatgtagtaaatattcagaagcgattttcttttgcatttttacctaaccaaggaaacgggccacacaccttggtttagggatgttgtgatagcttaccttccagtttttaagaaatgcttcctrcaactgctgtcaaccactgtattgtctttaatgaacactgttgtatcccatcctaattcttgtactgaaatyatttctcatgaaagtttctctaatatttctaatgaaagtttctctaatttgggggcataatgtactaaraatcagtttgctgtatattagaataaatagtaacagtaagtcagcaggattatccaaacaaaagactaggttttatgagataagcttgatttaagaaaaaaacaattaaagtatgratatcmgaaatactgtgkgtttactctcagattttagttggttggatttaatatcaagataactagctgctaagcgtttcataattctcacagtgatattagatttcaaaatgacactgagagaactgaaaaactacatcagtcaaattcatgtatgtatatcatatagcctttaactttttacattaatcagattcttagtaaaatgcagmctgtatacctaaatattaaaatatttacttttataatcttaccttttatttcaatataaataaaattcttcttaggttaaaaaattaatttcagttgtgtttatgccaganggcattgccttagttggtgcaagcnctcaatatgtttcattcttttttatagtctttcacatttataaggaaaagccttatctccaactgaaacaccagtcttactactacggttttaaaagttgttaatgatccattatctattataaggcctttatttacatagcaaattacttaacntttattttgaatataacagatttttaaaacgggacctttaaaggagccctagggg

SEQ ID NO: 1746 - DNA, 338 bp, Homo sapiens
  misc_feature (282)..(282): n equals a,t,g, or c
  misc_feature (295)..(295): n equals a,t,g, or c
  misc_feature (320)..(320): n equals a,t,g, or c
ccaactgcccgttcaaggccatgggttgtttggggcccaggaagtgctgaaccatgtcctaagggacattgagctgttcatgggaaagctggagaaggcccaggcaaagaccagcwggaagaagaaatttgggaaaaaaaacaaggaccagggaggtctcacccaggcacagtacattgactgcttccagaagatcaagcacagcttcaacctcctgggaaggctggccacctggctgaaggagacaagtgcccctgagctcgtacacatcctcttcaagtncctgaacttcatnctggccaggtgccctgaggctggcntagcagcccaagtgatct

SEQ ID NO: 1747 - DNA, 426 bp, Homo sapiens
  misc_feature (419)..(419): n equals a,t,g, or c
  misc_feature (422)..(422): n equals a,t,g, or c
gacacacattataatctaatgagttaaggaaaaatgctttgattcctatacaatttttctataattgcttttacacatctcattttcagaagcactccttgttttttgtttgttattgttgctgttggctttcttgttagctagaagaagacataagcaaaaaaatggacaaagatgaagaggctttgaaggcagctcaagcagaactcarggaggcccgacgccagtggcaccacctgcaagtggaaattgaatctctccatgctgtggaaaggggscttgaaaactccctacatgccrgcgagcagcattaccagatgcagctgcaagacctagagactgtgrttgamggwctagagaaagagctacaggamgttaarrcgckgcawcswaaagcagctttcaagwgcacgwgatgnttnttca

SEQ ID NO: 1748 - DNA, 792 bp, Homo sapiens
  misc_feature (233)..(233): n equals a,t,g, or c
ctgcgggcgcacacagtacgacacgaggagaaagtgccatgtcacgtgtgtggcaagatgctgagcccggctgacccttttaatttttaagartgttcaatccgagatgaatcatttgaagtatttttatatgtatatctatttaaaactaatatattattaaagcttaattgccatgccgtttatcttctctgaaagaacttcaaatcttacctgccaacatattcaccatnawttattttttaatacctttcatacaataacttttttaaaamaacctcagattgaaaaagcaacctaaattactttcgctctctaatcagcatttcaatgtatttatttttaaatgttctcaaaaagtaactaaaaaattgtgtcggaccctacttttgagaaatctacgtttcccaagttttatgggaactggctattccttgtcccggcacaccttctcattccttcctttcagagcctaaaacctcatttgataagcactcctagtctctggcctgtggatccagtgctattctgtcaccaacctaagaatcccaattgcaccttctgtttctgacagtcacaggtgacagctgtgattctataatacagactggtgtcttagaggtaggaataatacatgattatgaagcatcaccctgctaatacataataatgtctttttatattataagtgattgagtttagttcatttyaatacattgtacatgaaaaaatgaaaagtagaactttgtaatactttaatcaataaaattaattaccaaaaaaaaaaaaaaa

SEQ ID NO: 1749 - DNA, 468 bp, Homo sapiens
ctacccccttgagactctggctttctattttatagaactattttaatgatagtttaaacatgtatacctgttactggttattttctgttccccttatcttgggagttcagcataatgctgtgcggatcaggataacaaggtcccactgaggtgaaggagggaggctgggaatgctacagcctggagtggaggtgtgatttcagtaggtggaaggttgtcttcctgaaaggaattggcagaagtagattcttactgattcagatacattttccaccaactgaaggaaggaattattaaagccaatggtgaacaaagcatttcaagcattttataggaagtgactagatgaggagatttttttcattccttttttaatcagcaaaaaagaaattagtattattgaattagcagattcttcctattctatattaagaaagatttaatttttgtaccaaggaaggttaggtg

SEQ ID NO: 1750 - DNA, 107 bp, Homo sapiens
  misc_feature (101)..(101): n equals a,t,g, or c
gcaactagccacgagttgtgtttcatctgaaccttcatccccctcctcctggggactattttgaaataaatctaagacatcagggccaggctcagtgatgncttaga

SEQ ID NO: 1751 - DNA, 485 bp, Homo sapiens
  misc_feature (461)..(461): n equals a,t,g, or c
  misc_feature (465)..(465): n equals a,t,g, or c
  misc_feature (468)..(468): n equals a,t,g, or c
ggtttagctcattgttgaaactgtttgctttaattcaagtagtctagtggaagaaagaaaggtggcatagtagcagttgcagaatgaaacctggaagagagaaagctatgtctaacaagggcagcagctctgagttgccagctagttagtagcagttaggatgagaagtgctgaccaacttttctgtattctgaaatcttagggtcaaaatatatttcatctgtgttttaactgtgcagtaggactgtaaagttttcacaatactttggcttttccatatttgtatggtttgtatttagttaatcttaataaaaatttagacttcaagaaaaattgggagaggaggtgwgtaattttgcttgctttctcctcgttggatgttgggtctcataactctaatattgagggtaaattttgcttttgtaaaattggactgaagctaagatcattccatgagaggntcanaanaacttgcacaagtgcta

SEQ ID NO: 1752 - DNA, 412 bp, Homo sapiens
  misc_feature (374)..(374): n equals a,t,g, or c
  misc_feature (398)..(398): n equals a,t,g, or c
  misc_feature (401)..(401): n equals a,t,g, or c
  misc_feature (404)..(404): n equals a,t,g, or c
gctggaattcattggatagcaaccaactctccaaggcattgttctcagtacagacctggcctgagtatcctccaaatctgaacttttagagatgaatccaaatcaatagagagcagagtcatagagagttactgtcagagagcatccagttaaagggtgaatgccagagcccatgtgtatcaatcaatagagtgccacatgcctatttgaagtattataccaaagtgtgacacgtgcattctgcgtttgtgctatcctatgcctatcatttaaagttgctcccaaagtaagtcatttggctttccaacaaggacattttctttcattttacaacatgcaatatatttgtaacgacctggcatttttctgaattnaagttcaccaccctttgcaggacnganaangactgccg

SEQ ID NO: 1753 - DNA, 394 bp, Homo sapiens
  misc_feature (58)..(58): n equals a,t,g, or c
aagctggtacgcctgcaggtaccggtccggaattcccgggtcgacccacgcgtccgtncatgcgtccgcccacgcgtccggatctactgagtaaagacccctgcctttcctcccggtcaggggtcctccagtgcgtgatttcttggttctctcaggacatcaatgatcatcctttggataggtagcgaagtcacattttgctgttaagtggttgtttttctattctttgcccctttccgcagcagcaggtggggcctcgtctatgcactgcgctcaggtgcagatggtatcgagataattgcttgaattcttgtgcagacttttgtaattctgcagtagagacaaaagtcttggaatccgtgctatcaatgtaagaatgttggaatgctgttaa

SEQ ID NO: 1754 - DNA, 953 bp, Homo sapiens
gtccggaggcagcagtgtccacctttcagacccagttgcaccatcttctgcaggactgtattttgagcctgaaccaatttcttccacgcccaattatttgcaacggggagaattttmmagttgtgtttcatgtgaagaaaactcaagctgcctcgaccagatctttgattcctaccttcagacagagatgcacccggagcctttgctcaattccacacaaagtgctccacaccatttcccagacagcttccaggccacccctttctgctttaaccagagcctgatcccaggatcaccttcaaattcctccattctctctggctccttagactacagttactcgccagtgcagctgccttcatatgctccagagaattacaattcccctgcttctctggacaccagaacctgtggctaccccccagaagaccattcctaccaacacttgtcctcacacgcccagtacagctgcttctcctcggccaccacctccatctgctactgcgcatcgtgtgaggcagaggacttggatgctctccaggcggcagagtacttctacccgagcacagactgtgtggactttgccccctcagcagccgccaccagtgatttctataagagggaaacaaactgtgacatctgctatagttaatagaaattacagtaattcagaacatggcatgggtatatctatttttctaccacgtctagatgacactgcaaaatatgcaacttggtaacacaatatcccaagcacagtttacatgtcactatttccaattttctgatgctaagcattcatatgaagtcctcagacccggtcacagcgccactcctactttgtatgctcatagtttaaatttttgtaggaaactttcaattgttttactttttgtataacgaacaaatgctgtctccttttttactaataaataattttgtattactaaaaa

SEQ ID NO: 1755 - DNA, 392 bp, Homo sapiens
  misc_feature (93)..(93): n equals a,t,g, or c
  misc_feature (227)..(227): n equals a,t,g, or c
  misc_feature (238)..(238): n equals a,t,g, or c
  misc_feature (390)..(390): n equals a,t,g, or c
agttgatcaaaacggagggacaaaaaacggggtggggtgggaagcaggaaacagtctcttaacttctcaaggactcagctctcactaaggagnaatttcctactgtctctctgggatgctattgtgatatttaattaattggaattcttttctcttatgaataatttctctgagcaacagggtacaattttgcatataaggcaatagaactatagggaggaacaagntcaaatgcttncctttcaagaaggtgccgtatacgtcttatataaaaatatacattccattaatcttatatcctctccctaaccactaaaatgcaaatgaaaatatttatataagacgtatacggcaccttcttcaaatgcttccttttcaagaaggtgccgnat

SEQ ID NO: 1756 - DNA, 533 bp, Homo sapiens
  misc_feature (12)..(12): n equals a,t,g, or c
  misc_feature (25)..(25): n equals a,t,g, or c
  misc_feature (486)..(486): n equals a,t,g, or c
  misc_feature (501)..(501): n equals a,t,g, or c
  misc_feature (515)..(515): n equals a,t,g, or c
cctccctgcagnttgagatgtgtcnaagagacaggctctaatacgactcactatagggaaagctggtacgcctgcaggtaccggtccggaattcccgggtcgacccacgcgtccgagatcagttggccttatttcctcagtggaaatctactcactatgatgtggtagttggcgtgttgtcagctcgcaataaccatgaacttcgaaacgtgataagaagcacctggatgagacatttgctacagcatcccacattaagtcaacggtaggttttctgagttgttgccttgcctggtttattgaaataagagttctgaaaaacctagccaggcgtagtggtgtgtgcccgtcgtcccagctaccggggaggctgaggtggaaggattgcttgagcttggaaaattgaggctgcaktgagccatgattgcaccactgcattctagcctgcatgatgggaatgagtccctgcctaatttaaaaaaaaanaaaaagggccggccnccttttcgggcggnccccgtttcccaggacaa

SEQ ID NO: 1757 - DNA, 251 bp, Homo sapiens
  misc_feature (174)..(174): n equals a,t,g, or c
agatgctataaaagtaaaagaatataataatttgctcaatgctcttcagatggattcggatgaaatgaaaaaaatmcttgcagaaaatagtaggaaaattrctgttttgcaagtgaatgaaaaatcacktataaggcaatatwcarccttagtagaattggagcgacaacttanaaaagaaaatgagaagcaaaagaatgaattgttgtccatggaagctgaagtttgtgaaaaaattgggtgtttgcaaa

SEQ ID NO: 1758 - DNA, 355 bp, Homo sapiens
  misc_feature (8)..(8): n equals a,t,g, or c
  misc_feature (353)..(353): n equals a,t,g, or c
  misc_feature (355)..(355): n equals a,t,g, or c
gcatgtgngagacgtgattctggaagtgaacgggtatcctgttgggggacagaatgacctggagaggcttcagcagctgcctgaggctgagccacccctctgcctgaagctggcagccaggtctctgcggggcttggaagcctggwttccccctggggctgcagaggactgggctctggcctcggatctactgtagagcacccctgcttggtacagacatactcaggggctaccgtgtcttcactctccagcctgaggtggtgaaggcaggatgctctctctaaagccagaccagagggactcagacaccaccgatcacaggctggcccaggtgctccctcccttcctgcccncn

SEQ ID NO: 1759 - DNA, 832 bp, Homo sapiens
  misc_feature (777)..(777): n equals a,t,g, or c
  misc_feature (791)..(791): n equals a,t,g, or c
  misc_feature (799)..(799): n equals a,t,g, or c
gaaaaaaaggataaaggaaggacttaagcaaaatcttccttgtaagtagaaggatgttttgacaagaaaagttgcaatggaaaaatggttctcatgtacacgagtatgtagaataagcatcgtgtgtggattggattcagatcaaaacattgcttttatgtttgtgtctttatacggtgggagtataccctggtgccccaggatgaagacttgacctgacccatgtatttttagattactcacagataacaaaaagtattttcatcatgattagttgcgaaaacagttttatttcaataggtaaaacgtgcagtcctatgtaatcgtcagaaggtaatcttaattatagcttgggtgtgctttaaactgcaagctggcagtggagggcacgattcctctgatttcagctttctccttatacttttctggagctgtgagctgcaagttaactcagtgggattaaagtgtagactggaggtacaaaaggtgaggagtgaggagatagggtagttcttccttggctggctggcttcatratccctgggccccgcagataattaaatcgactttttctgtctcaggcatttgtatgacctctttggaggttccctgctgggtagttatccttgtatctgatgggacccatctcaatttaaaatacttctgccagggttcgggaggtttcatggcttgttcatccccagcacttttggggaggcttcagaggtgccatttggctttgagccccaagaattttgagacccagccgggggcaanccgggggttgaaancctctttnttcccatttaaaaattaccaaaaaattaggccc

SEQ ID NO: 1760 - DNA, 484 bp, Homo sapiens
  misc_feature (434)..(434): n equals a,t,g, or c
  misc_feature (446)..(446): n equals a,t,g, or c
  misc_feature (454)..(454): n equals a,t,g, or c
ggagagatgagaatactatgaaaaatatattttcaaaaaagaggaaattagaagttgcatgttcagattgtgaagttgaagttctcccattaggattggaaacacatcctagaactgctaaaactgagaaatgtccaccaaagttcagtaataatcccaaggagcttactatggaaacgaaatatgataatatttcaagaattcagtatcattcagttattagagatcctgaatccaagacagccatttttcaacacaatgggaaaaaaatggaatttgtttcctcggagtctgtcactycagaagataatgatggatttaaaccacccygagagcatctgaactctaaaaccaagggagcacaaaaggactcaagttcaaaccatgttgatgagtttgaagataatctgctgattggaatccagatgtggatnagatattaactnaaattatnaggagaaggaaacttccaccaagggagcag

SEQ ID NO: 1761 - DNA, 772 bp, Homo sapiens
  misc_feature (214)..(214): n equals a,t,g, or c
  misc_feature (766)..(766): n equals a,t,g, or c
  misc_feature (772)..(772): n equals a,t,g, or c
gcgcaagtacgagttcgaaaaggacctcagtaagcagctgggcttcttctccttccccatcacccacgtgctcagggacctttccctgggcttaaagaaggtaaaaggctcccgcatccacctgtcctcggagacccaccggagctgcctgctgcgtaaactggaggagtccaaaagggcccggcaggcctcccggctcagcacctcccactgnagcacagagacaccctctgtgcagcaggaaccagccacccacactgcccaggaccaggccacagagccctgccgctccctctacaccaacttgccagccagccggcagctcagccctttggagcccaagctctacatgtctgcctgcaccggcatgggttccagtccccccaagtccaaggacatggacaatgagggccgtgataaagccgagattgaagatgaagatgaggatgagttcaaggatgaagaccaggatgaggacaaggatgaggatggagtctagagcctcccagagcctggagaggaggcctcggtcagccactccgtggacgtgggccacggtgacccaccatgaagtccccactagccactcgattccctgctctgtcagagttgctgcacatcacaccagcccctgccaagagcaggagtcaccacaggctgaatgcccacgaggagctctgctgagactctcaagggagccagtgaaagaaatagaaataaagcctgtgytgctgggacacaggtttgctgtcctgaaaaaaaaaanaaatan

SEQ ID NO: 1762 - DNA, 384 bp, Homo sapiens
  misc_feature (370)..(370): n equals a,t,g, or c
  misc_feature (375)..(375): n equals a,t,g, or c
tcgacccacgcgtccgaccagcatgaggtaaagaaaagakgcataatgtttgcctttgttttgtttttattttaaagcccaaggtctttgtttttgaagtaacagcttaatttttacccttcataatcaggagagttacttagatgctctcttcatgatttgttgaggttggaatgatttggcagtccctgaaatttattttggggaggaggtggcagaagagtggagtgtaccaggttatgagatttctcttaacccaccaacctaacttctgttctttctgcacctcagagatgaagaagagatgatgatttctcttcctcaagtccttcttattcttgctgtcctgttttttcaggccaagattggncttgnttgtttgca

SEQ ID NO: 1763 - DNA, 222 bp, Homo sapiens
  misc_feature (20)..(20): n equals a,t,g, or c
atgacacagaggctgatgtnttggggcttgtggcttcagggacccctgatgtggccagggccatgactcacaccctactcaggcatctggcagcaaggccccctacccaggcccagcaccagcatcagtgtcccycatgcctgctgccccttccaggggttctaacaggatgggggtgggtctggcagaaggcagagttatctgaagcatgggggcaggagc

SEQ ID NO: 1764 - DNA, 650 bp, Homo sapiens
  misc_feature (184)..(184): n equals a,t,g, or c
  misc_feature (646)..(646): n equals a,t,g, or c
aaataatttttacattttgtattttccaaccaaacagaatcgggaccagtattcacatctgctaagtgatcattttctgccataccaaggtcataattccttccgtgagaaatattttagtggggtaacaaaaagaattgccaaggaagaaaaatccacccaggaatgaaaattaagattttgncaatgaagaaagaataagaatttgatttaaaaagacatctggatgtgaactttcatgtatgatccagaaaataggtacggttttaaaatattttatatagaaaagctacaaagtaaattgagcaatgcttttaaagttatctttgttttatagacttttttgttgtatgtattacagtctttataatcttatttaatgtatatttgtactttcaagtactgatggagatagactcaaaacagttatttttttacaattaatctacaaagggaattaatattgttgacttttaaaacatctgctggatatattatatgcaattaatagtagttaagaatttattcatttggtagatatgtttatttggtttttggttgtcatcgatttacattgccactaataaaccatattgagaatttctaaaaaaaaaaaaaaaaaaaaaaaaaaaaaaaaaaaaaaaanaaaa

SEQ ID NO: 1765 - DNA, 560 bp, Homo sapiens
  misc_feature (21)..(21): n equals a,t,g, or c
  misc_feature (494)..(494): n equals a,t,g, or c
  misc_feature (504)..(504): n equals a,t,g, or c
  misc_feature (526)..(526): n equals a,t,g, or c
  misc_feature (541)..(541): n equals a,t,g, or c
  misc_feature (548)..(548): n equals a,t,g, or c
agtgttccgggagcaccgggnctccgtcatctgtctggagctggtgaaccgactcgtgtactytggcagcrcggacaggaccgtcaagtgctggctggcagacacaggggagtgtgtgcrcacgttcacggcccacagacgcaacgtgagcgccctcaagtaccacgcgggcaccttgttcacgggcagcggggacgcttgcgcccgggccttcgacgcgcagtctggagagctgcggagggtgttccggggccacacattcatcatcaactgcatccaggtgcacggccaggtgctctacaccgcctcgcacgacggcgccctgcgcctctgggacgtgcgcgggctccgaggtgccccgcggtcccctccgcccatgcgcagcctctcgcggctcttcagcaacaaggtgggctgcgccgtcgcgcccctgcagccggcctgatcccgcggggcccctgcagacgccagcccagacacccagcggctcccanagcgccccgncctgctacccgcggtggtggcncccgatggcccggcnaggggcnaggagcgaggaa

SEQ ID NO: 1766 - DNA, 289 bp, Homo sapiens
  misc_feature (282)..(282): n equals a,t,g, or c
ggcaacagagcgagactccatctcaagaaaagaaaaaaaaattgtaattcttatacccttgctctgcttctttatcattgtgtaattttaaaaacaactgrcatatattatacaggtacttgtttattgtctatttctaccactaaaatggaagctccaactgctattagattaatttccctcccaggtccaattttgattatgttactctgaccaagctgatcttttctcttcaatctagaccttttaactaccttcaaaaatacaataaatatgattatnctagact

SEQ ID NO: 1767 - DNA, 490 bp, Homo sapiens
gggagcacttggagcggatgctggggcaggctggggagcgccgggctgatgtgtacgtgggcgtggatgtgtttgctcgagggaacgtggtcggaggccgattcgacacagacaagtcgttggagctgatccgaaagcatggcttctccgtggctttgtttgcccccggctgggtgtatgagtgtctggagaagaaggatttcttccagaaccaggacaagttctggggccgactggagcgttatctgcccacacatagcatctgctccttgcctttcgtcacgtccttctgcctgggcatgggtgcacggagggtctgctatggccaggaagaggcggtagggccctggtaccacctgagcgcccaggagatccagcccttgtttggagaacacaggctgggargggatggccggggctgggtgaggacgcactgctgcctggaggatgcctggcacggaggcagctccctgctcgtccggggtgtgac

SEQ ID NO: 1768 - DNA, 855 bp, Homo sapiens
  misc_feature (322)..(322): n equals a,t,g, or c
  misc_feature (357)..(357): n equals a,t,g, or c
  misc_feature (449)..(449): n equals a,t,g, or c
  misc_feature (837)..(837): n equals a,t,g, or c
  misc_feature (849)..(849): n equals a,t,g, or c
agaattgaaggagagatgttgtatcactgttagaaggctgctttgggacattctgcagcagggaggagggactgtcaacccctacaccatgaccaccaagttsctcaccttsgctgagtccctaaaactctctgaacctcaggttcctccaagcataatgcagacttcacagagctgttgtaaagattaggtgaggtcaattgatactgcttaaaaggcccggtccgtagaagatgcccaataaacattactgctttccccstcaccmtactgcctgaaaatattacacctgtgagactgacttkgagaaccagtgtgggtnsggagttgtgcatataaactatttartgagtaccnaacacaaaagtcaagcttgtaaaatatcaggccttgccccagaaagacaaataccacatgatctcactgatatgtwgartcttaaaaagtcnaactcagagcagagagtagaatgatggttatcaagggctgggggagggagggactggggagatgttggtcaaatgatacaaaggtttagttaggtggaataagttcagaaaatcaattgtacaatgtatcaattatagttaatagcaatataacatatacttgaaaattgctgagagtagtgtgagtgttctaccacaaaaaaatatgtgcagtaatagatgttaattaccttaatttagtcatttcacaatatgtacatatataaaaatatgttgtatgccatgagtatatataattattatttgtgaatttaaaaaataaaaataatttccaaaaaaaaaaaaaaaaaaaaaaaaaaaaaaaaaaaaaaaaaaaaaaaaaaaaaanaaaaaaaaaaanaaaaaa

SEQ ID NO: 1769 - DNA, 693 bp, Homo sapiens
  misc_feature (16)..(16): n equals a,t,g, or c
  misc_feature (77)..(77): n equals a,t,g, or c
tgacactatattaggnacgcctgccggtaccggtccggaattcccgggtcgacccacgcgtccgggatcttctgcantttacctctccgtatctcattttccttagattttatatggttttaatttaaaagatctaaaagtacactgtaaatgcacagtatatggaggttatagtataatagttacaggtcagcaacaaatgtttgttctattttcctttctccttgcagcctctcttgtctttccaggcaggtgagtagtttcatctgtgatcatttatgctctgtaccacctcctcatggcagtatgttacagcagcttttctaccagagcataaggagtcttgcatttttgtggtaaaagtcctttctggagaagcagtacaggaaggtttctgggttgctataaccaggatttttcaacaacaacactattggtatttggggctagggtaattctttgttgktggggtggccagtttattgtaggatgtttcacagcatccatacctttatcatattcgctycaaggtaagacaaccaaaaatgtccccagacactgscaaatatcccctggagggcaaagttttatttgagcactatttgctaaaatawtgktgtggatgctatttacataactgkgkgttcagttatgaaaatgcagagttgtacatatatgatatatgtagttttc

SEQ ID NO: 1770 - DNA, 2726 bp, Homo sapiens
gaggcgctagaggcgggggcgccgggaggcgcgggcttgctcctggggtctcggccttggccggctggacctgaccctagggcggcttgcgcagctgtcgggacgtgactgcgttcagccgcgtcgggcgtgcttcccagacttgcccaagttcgggtgccctagctgcccctttgcagccgctggcctacccggcccgcgggtgagaaggttgcgacgggaggtgggtggaactcgccagcgccgggaccgcggattggctgcctcggctttctcttttccccgtgggctccggcgtgaggcgctgaagcggccggcagccggcgaccggccctcaccgtccgccgggttgcgctctgcttttgcggtgaggcgttgaccacgcccatatgaattggagctctccgccagtaggagtttccggaaggagtttgaatttttgtgatttttatgcttgkttggtcggtggaatatgttgggatttatgtttgcctctgaacaagtgtcttgctcacatcgtaaatgactttctctccgaaacgctaaatattctttcccgcaggagctcatatccttattttccatgacagatcttaacgacaatatatgcaaaagatatataaagatgataactaatatagttatactgagcctgatcatttgcatttcgttagctttctggattatatcaatgactgcaagcacctattatggtaacttacgacctatttctccgtggcgttggctgttttctgttgttgttcctgttctgatcgtctctaatggccttaaaaagaaaagtctagatcacagtggggctctaggagggctagtcgttggatttatcctaaccattgcaaatttcagcttttttacctctttgctgatgtttttcttgtcttcttcgaaactcactaaatggaagggagaagtgaagaagcgtctagattcagaatataaggaaggtgggcaaaggaattgggttcaggtgttctgtaatggagctgtacccacagaactggccctgctgtacatgatagaaaatggccccggggaaatccagtcgatttttccaagcagtactccgcttcctggatgtgtttgtctctcttggctgcactggcctgctctgctggagacacatgggcttcagaagttggcccagttctgagtaaaagttctccaagactgataacaacctgggagaaagttccagttggtaccaatggaggagttacagtggtgggccttgtctccagtctccttggtggtacctttgtgggcattgcatacttcctcacacagctgatttttgtgaatgatttagacatttctgccccgcagtggccaattattgcatttggtggtttarctggattactargatcaattgtggactcatacttaggggctacaatgcagtatactgggttggatgaaagcactggcatggtggtcaacagcccaacaaataakgcaaggcacatagcagggaaacccattcttgataacaacgcagtgaatctgttttcttctgttcttattgccctcttgctcccaactgctgcttggggtttttggcccagggggtgaactttatttcatttccacaggttgaaactggtgagtccagctaaatttgcaattccaactttcatcctaagaataataactgtaatggcaaagcggaaatgccagttcctcctgtattccattgagatgggatttcacattttcctctcatcaactcccctgtaatagctagcgtctttctagygaaagagaagaattcctagaacttatgcatttttttcctgctgaatggaagtcttgagcaatgaagctatattgtccctacatattactatatattgaactgaaagttcttacataatcaatgtcaagttttgtcttattttgttttgtttgtttaaaccagtgtaggaaataaaagtgatgatatttaaaatagttctcagttgaagcagagaaatgccactgtgctagttgcccaaatgttgtatctattttaaatagtttaagctgatgtgtatgggagcctaaacaagtgtagtatcctgaacttctcccattaattgctattcacaattgggaaaagtgtggagattggttcctagtgagttttgtggcctactccacatttgttcttccttcctcagggttagtgatgaaaaaaagtaaatatctttttcatatgtccattagaatgtatgaaaaaaatcattttaactaaaagcaaaagaattttatcttatatctaaaaaatatataacttactatatgtttcagttgctctctgaacaaaaattatcttcaatttaatatgtggaatgtgttttctagctttctttgaattatgtatggcaacctggtttagcactggcatcctgaacagttaagagtcactgggaaattattgtatttctttataaatttactgtcatatcaattgctggaaaatgctatgatttttctattattaccttctaagttgtattctctcttacactgtagcctcaactaaggcaattctgctatgtttgttcttcactatgatttactgtgtgccaaaggagttttgacagggtacagagtattttactaaaagtatttttaaatgtttctcatgtgatttctgtaccttcttcctcctgccccttttgcttttttaaagaaactggggaaggatttatgaatacaccacc

SEQ ID NO: 1771 - DNA, 1033 bp, Homo sapiens
aaaagagtttatatacttctaaaagctcctaacttatatccaaagaattgctttctgattcgtgtagtctctcccacagattcataaacttttatgacttatattgtttccaggtgggcatggtttatttcccagtttaacagttcagaataggggcatttattttatcatattttagggtgggttaggagtatcctttctggagactgagaaaggggtgtatttaattccatcaggtccagtacagtactaggagtcataatactttataatcaattaaataaatagaaccactgagacaataatgtatttttttaaagtggcaaatgtggttttcttttttcagcctttgcgctttttcagtattttgaccatagggagataatttttttataatacaaaagtaaccacttggaattttaaagataatgttatgtgtgtatgtgaaatatatatacatatatatatatatttcctaaaagaagaaaagatacctttctgttcaacttgtatcaactcctcttttctaattgctgtgaaatggcaactgttgataaattattgtgattgttttaaaatctaatgggaagtaaaatatattttgattttacccagcttaatctgtaaagtagcacttaaatatatctgatagcaacacttaagatattgcatggggattactttcctatcatccatatgcatttgtgcaacttcaaacatattgggtgcttctgaattcctgatgattggatttaagctattgaaaattggataatttaaacttaatgatttttataattttctgatcttaaaatttggttaatgcctataatctgttgctttttctcaatatgtgtcctattggaaattcctcaaatcgttggtgccatcagtgatttacaaacaatattttgatattgcagatgacttgcttactgtatttgcattgttagaaaacagtttgtagacaatgattcttttttaataaaatcaaataattctaaaaaaaaaaaaaaaaaaaaaaaaaaaaaaa

SEQ ID NO: 1772 - DNA, 621 bp, Homo sapiens
  misc_feature (21)..(21): n equals a,t,g, or c
  misc_feature (52)..(52): n equals a,t,g, or c
  misc_feature (108)..(108): n equals a,t,g, or c
cctctcggccgtaggttaggnagattcgggtgggaatgcatgaagctccacngaagtatcggtatgtagggtattctgcccaagccctgttcgcataccaaaccaggngttaaataacatcaggctctgggggaatagaaagcmggctttagacaatctgtccatttctacagtaaaattggagtgagtgtgtatatctacttaaaacttaatagaagtgacttctactttttgggctattccagaagtattttaaaattattatttaaaattttgaagccccatttcaaatcttgccgaccttagttcaaagccccctgagagatcacttttagaattgaggatttgttaaaatggcaagtcatttcatttgtgttaaaaagaaaatacccaaaaggaaggagggagccctgtttgccttgagataaacggccttggcattttctggcattaatgtagaaataatgttcctatgatgacatattttcaaagaaacactttcttatttactgtgtggtgtaaaatgttgctaaatgtgttgttacattatgtcactgctgaaagtaatttgcactataataaaggaattttctacaaaaaaaaaaaaaaaaaaaaaaaaaa

SEQ ID NO: 1773 - DNA, 736 bp, Homo sapiens
gactttctgtgtttacttgtatgaggaaaaacagyacataraggcatccacagtatttaatttgtttggataacagttacagataaacaggtacaccccatatacaattacyaatactttttatacagttcatatttcagtacatcaacactattttatttacactctatttatryacattaacatctttytaaattgggattattgtccatatgctttatattttttattccagtgatttcccttttaggaatttatctgaggggagaatactctgtaattactccataatttgcaggcaaatatcatcatagcattttttaggagagtaaaaagttattaacaacttatatttgtctcacattagaggaatggttaaataaagcatggtgtattcattggataaactataatgcagttgttgaaaatgattaccaggagtttttgctaacatttatgggaacatgcttatgatatgtgaacatttttttaaaaacaagacataaagttgcatatactggaaataataccttcaatattgaaaaaaatactatttaggaaaraggacagaagaaaatctgccaatattttgacagtggttgcctttgtattaagaatataattaagaatataaaaggattccctgccttttaacatttttctctgctttccaacatgaatattatacctagtaatcagaaaaaaaacagaggcaatcactcttatcctttacatt

SEQ ID NO: 1774 - DNA, 1371 bp, Homo sapiens
cagttaaataactcctggtgacacttcaggtggtagaattgaaacacaaacctgacttctgaccacatgggtcaaaggcaaaaggcaaatggcttcaaagcccttagtgtgcttatccagttcaggcagtgaggagataacctctgctttcctccctgaggagtttggagtatttaaggggggatggggggggtgtcactttgaaaatatgttgctttttctcctgattgtattgaggctgatatggaagggttatttctttctggccaatactttttggtatttctaaatattgcaatcttgatttttactattaaatttgttaattgtcagttctggcttttttgcataaagagttggtccattaacttgccaatttgaagcttctaactagatattccctactgaaagttttggatttgtttttagtttgtggagcagtcttagctggggacaggtaattgacaacggcagagatactttcttttcctaggattctaagtctgtaatccacatcctcaatgtattcacaggactttaaaattctctccaaatgaggaaggaaatatcctgttgctttctaatgtttactaaaagttgtgtttagaacaacagattttaataggcatcttcctttgttatgtgtcattagccctttgcccgtttaccttagggctctttgaaggagaaatggatgggagaaaacctgtcacttggcgaaagtaaaagggataattaactggctcagagcttatgtgcagagttccaagccccaaagttaatctagaaccactcgataacaccaataaaaatatttatttcacatctgttatatatctggaaaatgttctaagcatcttacacatatttctcattaaatccacaggtgaccattgtgaggtagatattttgttctaattttccagatgaggaagctgagaccctaaaaggctgaccggttccctgatgtgttacctgcttctgctactgatccaaactgcagaacttctcattcatccccaaggcctccaggcagtatccaatggggaatcagctctaaaaggaaccagaccaacgttttccagccccttcattctgtagcttccctctgtgtgaggaaaggatagaaatgttcaggacatcatcatacaggctcctcatctacaaagttccagtagcagtgacgcctacacggaagacttggaactgcaaacaggctggggtcacctcagtgacatctgacgctgtccaaccagaagttcgatttttgttctgggggtgaaggaggaaacagactgtactaaaggactaaaataatttgtctatamwaaaaaaaaaaaaaaaaaaaaaaaaaaaaaaaaaaaattcccc

SEQ ID NO: 1775 - DNA, 766 bp, Homo sapiens
  misc_feature (510)..(510): n equals a,t,g, or c
  misc_feature (716)..(716): n equals a,t,g, or c
  misc_feature (733)..(733): n equals a,t,g, or c
  misc_feature (738)..(738): n equals a,t,g, or c
  misc_feature (757)..(757): n equals a,t,g, or c
tacgcttctgggcataatactgaaacacaaaactgcttttgctctctctgtggttggccgaaaataggattctttttcgtgcaggtgtcgttgtttagtcggctttactaacatattgaaatggctctacccaaagacgccatcccctcgctgtccgagtgccagtgcgggatctgcatggaaatcctcgtggagcccgtcaccctcccgtgtaaccacacgctgtgtaaaccgtgcttccagtcgaccgtcgaaaaggcgagtttatgctgtcccttctgtcgycgccgggtatcgtcgtggactcggtaccatacccgaagaaattctctcgtcaacgtggaactgtggacgataattcaaaaacactatcccagggagtgcaagcttagagcgtctggccaagaatcagaggaagtggctgatgactatcagccagttcgtctgctcagtaaacctggggaactgagaagagaatatgaagaggaaataagcaaggtggcggcagancgacgggccagcgaggaagaagaaaacaaagccagtgaagaatacatacagaggttgttggcagaggaggaagaagaggaaaaaagacaggcagaaaaaaggcgaagagcgatggaagaacaactgaaaagtgatgaggaactggcaagaaagctaagcattgatattaacaatttctgtgagggaagtatctcggcttctccctntgaattccagaaaaatntggtnccagttacacccaagtctngaaaaagga

SEQ ID NO: 1776 - DNA, 736 bp, Homo sapiens
ggcagaggtggagggcacggaaggggttttmccattcatgttgtataagtgaaccagaccaccctgatggcatccacagtgatgtcaaggttggggctggccaggggtgggtggactagaagcatttgggagtagtggccagggscctggacgctagccacggagctgctgcacagagcctggtgtccacaagcttccaggttggggttggagcctgggatgagccccggcagcgccttggcccttctgtggtccctgccagcctctgacctgggccggtcagtcattgctggactctggccacacactggcgttctcatccacttggaaacaagccagtcttttctgcaaggtcagttgaccaagagcatatttcccctctgttgtacatcgttgttttgtgtttgtgttgtaacagtgggtggagggagggtggggtctacatttgttgcatgagtcgatgggtcagaactttagtatacgcatgcgtcctctgagtgacagggcattttgtcgaaaataagcaccttggtaactaaacccctctaatagctataaaggctttagttctgtattgattaagttactgtaaaagcttgggtttatttttgtaggacttaatggctaagaattagaacatagcaagggggctcctctgttggagtaatgtaaattgtaattataaataaacatgcaaacctttaaaaaaaaaaaaaaaaaaaaaaaaaaaaaaaaa

SEQ ID NO: 1777 - DNA, 521 bp, Homo sapiens
  misc_feature (1)..(1): n equals a,t,g, or c
  misc_feature (5)..(5): n equals a,t,g, or c
  misc_feature (8)..(8): n equals a,t,g, or c
naacnggnaagctgttcccctgcaggtaccggtccggaattcccgggtcgacccacgcgtccgagcctactctggttaagatgttcttttcctcaaaggtgccctagtgccatgatttaaatatttttattaccattttgaaatggagaagccattctgcatatgcctttgaattcctgcccctctttaccacctcttcctccccctcaaaggaaaaacatttcatccaagtaagttaacggcattttctgtaggattttcttatgcactgcacactctggacctcacctgcagatacagttccccccttgccaggagcatctgcatgtggtacttctcttttccctcagttgatatttcttatatgatattctagatactatagaactcaatttgtcagattcagtataacctcagattttgttacctgtcttttaaaaatgcagattttgtcaaatcaaataaagatcaatggatgttgggtataaaaaaaaaaaaaaaaaaaaaaaaaaaaaaaaaaa

SEQ ID NO: 1778 - DNA, 453 bp, Homo sapiens
aaaagaaaaaaatgacattaaattttgtcaagatagcatattgaaaatataatagaaaaatatttgtttatctgctataatatattatgtcataggtgttatcttcaggaaggcacactggacctgctaaattaacaaatggaaagaaagcgtaagtacttgaagacgtttacaacttcagatttcaaggaatttttcaggtctttgggctggatgacatgtcgtctaccccagaaaattaggtaggcctctaccatcacaagctctgaggaacaatttttcatgtctacccatgttaatcattttagtatttaacagtctttctgatcttcagaatgtgtttataaattcatcttgtacatggttggacaagctttcttgtctttgctggraagraaatgactacttactaatatattttgggrraaatattkgtaagaatattaataagct

SEQ ID NO: 1779 - DNA, 636 bp, Homo sapiens
  misc_feature (516)..(516): n equals a,t,g, or c
  misc_feature (540)..(540): n equals a,t,g, or c
  misc_feature (553)..(553): n equals a,t,g, or c
  misc_feature (571)..(571): n equals a,t,g, or c
  misc_feature (623)..(623): n equals a,t,g, or c
ccctatagggaaagctggtacgcctgcaggtaccggtccggaattcccgggtcgacccacgcgtccgggcgactggcaggacgcggtgcagagagcggacttccgcgacgcggaacgtcctacagtgtaggggaagcaatggaagaacttctacctgatggacaaatatgggctaatatggatccagaagaacgaatgttggcagctgctacagcttttacccacatctgtgcagggcagggtgaaggagatgtcaggagagaagcccaatctatccaatatgatccctacagtaaagcttcaktagccccagggaagcgacctgctcttcctgtgcaactacagtacccacatgtagaaagtaatgtcccttcagaaacagtctctgaggcctcccaaagactccgaaagccagtgatgaagagaaaggtgctgcgcagaaagccagatggggaagtattagtaacagatgagtcgattatcaagtgaatcagaattggtacagaaaatgatcangatctcttgggacttaagacaaangctggatgaatgncagttccaggaagacaangaatcttcatttgatggttcacaaaaaattaacctaccacatgaatacccangaatttctcaaga

SEQ ID NO: 1780 - DNA, 643 bp, Homo sapiens
  misc_feature (632)..(632): n equals a,t,g, or c
tcctcactaagggaacaaagctggtgctccaccgcggtggcggccgctctagaactagtggatcccccgggctgcaggaattcggcacgagcacgagtgtgcacatgtgcgcgcacacacacacacacacacacacacacagaacttaacagcagtgatgtgtgttgtaatatgcaactttgtaagttacatatcactccccaataccaccttctcagtcacggagtagagatcttacttcacaagaagtgagactcagagaggtgaagtgacctgtgcaaggtcacctattacagtgccagagttggaactaaaggaacttcagtctgtgaacttcagtgtctttccagtagcatatttgcagcagaagagtcaagaatgttgtgagctgcaactctcactagaaccaaatgaccttattgggagatgttagtccagccttaaaaacaagctcttcacctccatgaatggcaagtgtctgccctcttcaggccaaatcgagaatgacatctataactgaggcaaatccttcagraacccaagtcagaccttgggattatttgctttttcagtaagttctkggtcccgggctgtgtcttcttaactcttgctgttgggggacccttcagggnaagcttaccca

SEQ ID NO: 1781 - DNA, 734 bp, Homo sapiens
  misc_feature (721)..(721): n equals a,t,g, or c
  misc_feature (730)..(730): n equals a,t,g, or c
catatttaaaaaaatatgttttctgtgtgttgccaaagaatagaaatgcaattgattttttaatattaaacttatatctagccatggtattgaattcttctaatttctaataatttgtctgtcaatcattttattctttctaggtaaatatgatactataataaattttgcttctttctgtttctttccttttcctattatttacttttcttgcattactaggctactttggacctttaataaaatgtgaaaaagcacatttatctttatattgattttaaacagaacactctaaataccttattatcggtaagactaatgrctgctgaagaattttactgggttgagaaaactgttatttatattgtgttaaatgttttcattataaatgggtgttcaattatatcaattttattttctgcatctaatgggatgatcataagacatttttctcttttaatctcttagtatgataatttacatttttggattttccagaaacatctttggattcctagaataagccagatttatcacaagtggattatctttatcagatatatggctgctcttgagttactaatcttttacacttttgtgtgtaaggaatgtttttaatctaggtgaaattttgaatctatgctcatgagtaagaatatcctttctcatactatccttatctggccttagtactgagctttagattatcttggagggttcnatttccctncctt

SEQ ID NO: 1782 - DNA, 396 bp, Homo sapiens
gcggacgcgtgggaaaaaaaagaattacttgagatgcttgttgaatatgcatattcctaagcccagccctaaatctactgaatcagaattctatttttaatgtacactccagatggttctgatacttgaacaacgctatatttagcattggttaagtacagatattttgtttttagcctattgcagaattagctcaataattcataaaatgggtaattattcataccaatgctaaactcagtatttattacatcaaaatttttaatgtattggctaattttggtaaagctaagaccaccagtgtgaataaggatggatttttggttatttgccactgarattttttagcatagatccccagaattatttttaggaaaaggatatgctgtgcttagc

SEQ ID NO: 1783 - DNA, 786 bp, Homo sapiens
gagctttagctcgcctgccgctcaccttgtgctgtgcagcccggttcctaacagaccacagaccccacaccaggtctatctcatttggtctcagagctgtgaatcagccagcaatattttagttgcaaatcactgaaaacccaactcaaagtgacttaagtcagaaagaaattttatgaattcaggtaattaaaaagtccagaagtatctgcctttaggcacagctggatccaagggcacaaatgatgtcatcaggctccagttattctccatctcccagctcagctttttctgtctgtaagcctgattttcaggaaggctctttcctagtgatggagatgaccaccatcagctccaggcttctatcctgctaacccagtaacccagtgggaagagatttacttattccaataattccaagtggagagtgtcattgacccgtttggggtctcatctctacttctaggggaatgaaacactctgagtggccaggcctgtgtcatgtgctaattcctagagccagggaaataaggtctgaggattcaggatggggtgaaaggtggttgcttaaaggaaaatgaaatacaattagcagaataaggggaaacgagtggtctgctctgctcgggcaaaacaagagatgcccattactgtgagggacccttgaagtctggactcttaaatgggtttttgctgatttcctgggtgcatgctaggatgatggggcttgatgcagtagggaagagacgatgtaaaaataataaacaatatataccttcaaaaaaa

SEQ ID NO: 1784 - DNA, 676 bp, Homo sapiens
ggcacgagactgaatattgaaataatgtaaaagacctatttcccgctagctttaaccgatttgtcataaacacctttcttgtatatgatttttaaatgtttgctaaatattaaaaagaattcaatgtgtttggttttgtaaaattacatatcgaatgtgtataattttttactaccatgttcatcacacttaatctatatccatatattgtactccaccaatatttatcagtggacaataaagaagttttgaatgcatgaatgcaacttaagaggcaccacacttggttattttgcaatgccagaataacggtgggtattcacaaattgaatagataatccagattatgwttcctcccaatttaagtttttctgggtttttttttcccccttcctagaatcaattttatcattttacctatgtacaataatatacttcctggaaaatgcctagaattttcaccatgtaacagaatttgagcatgacagtawtgtaaaaatattcagaagtctcgaactataggtttgagttttcaaagtaaatcaaaatmcagctgttttcattttactagattgtggaaacctatggatgttattgtaaaatgcatatgcattacactgactttcttaaaatgttttgaattaataaagaattcaacaatgtaaaaaaaaaaaaa

SEQ ID NO: 1785 - DNA, 423 bp, Homo sapiens
  misc_feature (338)..(338): n equals a,t,g, or c
  misc_feature (359)..(359): n equals a,t,g, or c
  misc_feature (378)..(378): n equals a,t,g, or c
ttactatctaagtatgcaattcttagggaaaagtgcctggaatcttgcaattccaagatatccattgtaattactctggatttaaatagaactggtctcgtagcacaagaattcctgatagcaagatacttttcataagataccttcaacccggttaattttttttctgtatctgataaggtaaagtttagttcaagagtacagaacacatttatttacttttttgtctttctgaaagtacaaaggaccacccttatcaatctgtctttcccagctacttggaactctacgtgacttttctctttgtgttttatagaaatacgtttgtttttatgatncatttttgaaattgtgatttngtagggtatgcagaggagnaaattcgggaaaatttttaaggtattctgaagaagacactttaac

SEQ ID NO: 1786 - DNA, 671 bp, Homo sapiens
  misc_feature (52)..(52): n equals a,t,g, or c
acgttgttgaaaactgctttcccctttgaatggtcttggcccccttgtgganagtcactgcagcataagagttagccttcatctctgggctctcctctcctgtgactcccgtaatgttttactcatccacttcatggtggaccaccctctggctctgtccactctgccacttttttcctctgctcctcacaggatcatttccattgtaagtgtctccagcttgctgattctttattctgcctgctcagatctgccggtgaaccctctagtgaatttgtaagtgtcagttattattttcagctcttctagtyccatttgatcaccttcataattcctatctkttgataycctcattgtgttcctctgtgattttcctgacttcctgtagttctgtgtccatggcttccttcagttcttcgagcacatttaagacagtcggtttaaagcctttgtttactaagtccaatgtctaggcttccttgggcatgtttttgtcagttaaatattttcctttgaatgagtcataccttcctgttttatttgctttagattttaggtcactaaatttttctttgtgtctaaactgctgttaaacctatccattcagtttttaatttgggttattgtgtttttcagttgaatttttttttaaccktatctcctgtatcttt

SEQ ID NO: 1787 - DNA, 1779 bp, Homo sapiens
gctcgtgccgctcgtgccgctcgtgccgttcattcagaaggtggagataagtaatacctactcctaaatttttatcctgatagtgagaaaatatataagcattttggaactacagaacaccatacaaaattagcattattagtactgcattatcttgtgctcttacaatgttttgtgtatatgtatactgattttctacttagaatgtaactgttgttttgtcaagtgcttttttccccccagcctttcctaggctaggatatatgctaacaagtactattaggagctggcttgtgatcataatgccaactatagataaggcaagtagtagcctagtagttaactgaagtttcaagttagtcatgtatagtcagtttttattatcatgtgaataaaataaaattgttttccttttcttttcattcaggaaaagttctaggaactattttggtgcacaaccacattatagattatscttgggwgatatgccatttgtagctgggaaggtragttggtcaaactccggattctttttatacaacattgatccctgaattaagtccctgcatctscaagtatgtctacaaatggaaggaacattttyctgtgcctttaccagtgtgtggatcatgcctttaccagtgtgtggatcacagtgaatgtgaaaatgagatgtagggaggtttttggggattagggaagcaaggaagagatggggaggataccttaaagtagataaagtatatgtggaaaggaagtgataaaacagagaccctaagttgaagaaggtgttgtttcagataggggtcaaggaaataagaaatagtatgtttgtagcattggatttttagtatcmatcctgttgagttacatttagatataggtagatattcgaataagcacgtagcacattctgcttgtcctcacatccagatcatttctaggactaattctccaagaagcagtcatacgtacacttgaatcttcagtttcttcagcacttgaatgtaaagctgtattgtcatatatcaagtactgagtgaagtrcctaaaactgtgctagttgacactactttataagctgtttgtgttgctggtggttttatatttagattccaactagattgttattctggcatcttgggaagtaaatgttcttctgaattttgtatttgtttatatttatttattttaaacccctagtaaattcgcagtgaaatcatggggaatataataaattagtggtgacaagcatttgaaaaaggtacagttgacccttgaacaacatgagtccgaactctgtgtgggtctmcttacaggcagattttttttttcaataagtatcttggaaaattttttggagatttttggcaatttgaaaaaacttgcaaactatagcttagaaatatcagaagttaagaaaaagttggtatgtcatagatgcataaaattgactatgtcaatactagtgcattttatcatttaytaccataaaatatacacaagttttttttaattataatttatcaaaacaatttgcacacagactacgtgacgccattcacagtccagagaaatgtaaacagataaagatgcagtatgaaatcataactgtataaaattaactgtagtacatactgtacgactgataattttgtagccaccttctgttgccattgtgatgagctcaagggttgggagtattcacttaaaatgccacgtgacgctaatcatcttcaaatgagcagttcatctctccagtcaattgtgtatcacagt

SEQ ID NO: 1788 - DNA, 559 bp, Homo sapiens
  misc_feature (526)..(526): n equals a,t,g, or c
  misc_feature (542)..(542): n equals a,t,g, or c
aaagaagacacattcacaaccagtggtagagaaactgtggtttatatgcccctcttagaataactcttcaggctctgtttatagccctgggttcatgcatgataaagtagacagcaacaccaccatacagtgcagaggagtggcaagagaktaaacggaaaaggagatgaaaatagaccaaktggagaaaggcctggtcmaaaaaggargaaaaggaagatcactatggaatawtaragakttgaaaaatgaagtgacacccaataacaggacgggacaatcagagatgacttggttgtagtgtggaaaccagtagggaccttgggaagctgccaaaccctttctagctctgggctcagctgtaagaactgctgattcctacaggaacacttggacaatccaatacctaaatgttaaccatcaattaacccagtaaacctgcaagatggaaacgaagatttgttctcacgagtttcacgtgattatttaaaacacttctgggggccagtagccaactggggtcttncccattgctgccatcnatggtatgaaaagtctc

SEQ ID NO: 1789 - DNA, 786 bp, Homo sapiens
  misc_feature (749)..(749): n equals a,t,g, or c
  misc_feature (758)..(758): n equals a,t,g, or c
  misc_feature (770)..(770): n equals a,t,g, or c
gcaagtcctccattyttccaccattgatttttcctgccacagatattgaccgcattctccgtgctggctttactttgcaggaagctcttggagctttgcatcgagttggtgggaatgcagaccttgcacttcttgttttgctcgcaaaaaacatcgtagttcctacatgactgtgggaaagtgggctagaccgttctccattccctttaaacaaaagaaagctctctctatatacacgcacacatacacactcmccacatatacagtatatatagaaacctgcaagcagaatgttgagccagattttttttaaagatttttttcggccaaagtaatttatgatcttttgtctgatgaatttgtctatcctacttgttaaaatttaggcctttttaaatgtattggcagtatgtgcatacagaagctttttattctcattaagatgtatcctggaataaaatggatggttttgtgtgtarcatactgttttagaatgagagtaaatgctttgaaaagcagaagccatgagaaatcccmctacccatccagctaaaaacagatgaactctccacactgtgactgtgtgtctgtgctgatggcaaggtatggtttgctggctcarttgtcaatttagaaacttttgaccacataatttggtgtttggaattctacccagtgctctgtgtatcatgatkcattaattataacaggaaattggagaataattgaatatcttatccgtagaatgntatgttttnatttgtgtgctnaagatttgacttttaa

SEQ ID NO: 1790 - DNA, 688 bp, Homo sapiens
  misc_feature (634)..(634): n equals a,t,g, or c
  misc_feature (652)..(652): n equals a,t,g, or c
  misc_feature (657)..(657): n equals a,t,g, or c
caacatggtgaaatcccgtctctactaaaaatacaaaaaattagccgggcatggtggcgggtgcctgtaatcccagctacttgggaggctgaggcaggagaatcatttgaacccaggaggcagaggttgcagtgagccgagatcacaccattgcactccagcctgggcaacaagagcaaaactccatctaaaaaaaacccacattttcatgaatatcagccatcaacaatgcagaaagtaatagactagtcttctgaattattaaccctagcaattgtcaccaagtgaaaacctyggtcactaaaacttcttggaatagcattcaaggtcttgctttaacacaaaaccccaaaacttggcggtacaaaacaaccattttctgatggatcgggaatccatgtctgaagtctcagctaagaagactccaaggctgggttccaggctggaactgcctggggcatctccccacacacacactggtacttggctggaccaccagcaggttctactccccgtgtttcttcrcagtttgtcagttgggctgatttgggtttgctcacagagtattcagccaagatcccaagatcaagtatccaccgcggcccgggccccaatcatcttgttttttaaacantcgttttttgaggcaggntaggntatttcatttccagattttttcgtgttaccc

SEQ ID NO: 1791 - DNA, 548 bp, Homo sapiens
  misc_feature (501)..(501): n equals a,t,g, or c
aagtctattggcatcctcgacatctttggatttgaaaactttgaggttaatcactttgaacagttcaatataaactatgcaaacgagaaacttcaggagtacttcaacaagcatattttttctttagaacaactagaatatagccgggaaggattagtgtgggaagatattgactggatagacaatggagaatgcctggacttgattgagaagaaacttggctcctagcccttatcaatgaagaaagccattttcctcaagccacagacagcaccttattggagaagctacacagtcagcatgcgaataaccacttttatgtgaagcccagagttgcagttaacaattttggagtgaagcactatgctggagaggtgcaatatgatgtccgaggtatcttggagaagaacagagatacatttcgagatgaccttctcaatttgctaagagaaagccgatttgactttatctacgatctttttgaacatgtttccaagccgnaacaaccaggataccttgaaatgtgggagccaacatcggcggcctac

SEQ ID NO: 1792 - DNA, 567 bp, Homo sapiens
  misc_feature (487)..(487): n equals a,t,g, or c
  misc_feature (500)..(500): n equals a,t,g, or c
  misc_feature (508)..(508): n equals a,t,g, or c
  misc_feature (546)..(546): n equals a,t,g, or c
  misc_feature (556)..(556): n equals a,t,g, or c
aaaaaaaaaaatctatattttatrgaaataataaaaaactaaccttagcttactgtaaattttctagtttagaaacttatttaaaaacaatttttggactcttctagtaataacgtagcttaaaacacacattgcatagctgtacaaaaatattttccttatatccttattatataagcttttatctatttaaattttgaatttttaaactttttggtcaaaaaccaagacaaacacactagcctaggcctatgcagggtcaggatcaagacatccctagcaggtgacaggaatttttcaactccattataatctgtggggccaccatcatatatatattgtacattgaccgaaacatggttacatgactatataatttgcgtcaatactgctcagtgtgccatatttaaatttacatgactatattgtgatattcttttcaaaataaagtttatttgggagataaaaaaaaaaaaaaaaaaagtgngccgcagcttatnccctaggnggggtaattagctggcctgcggcggtttaacgcggctnggaacccggngtccacttacc

SEQ ID NO: 1793 - DNA, 537 bp, Homo sapiens
gcacctatgacatagtaaacttgaagaataaaaactaccctcagaaatatttttaaaagaagtagcaaattatcttcagtataatccatggkratgtatgcagtaattcaaattgatctctctctcaataggtttcttaacaatctaaacttgaaacatcaatgttaatttttggaactattgggatttgtgacgcttgttgcagtttaccaaaacaagtatttgaaaatatatagtatcaactgaaatgtttccattccgttgttgtagttaacatcatgaatggacttcttaagctgattaccccactgtgggaaccaaattggattcctactttgttggactctctttcctgattttaacaatttaccatcccattctctgccctgtgattttttttaaaagcttattcaatgttctgcagcattgtgattgtatgctggctacactgcttttagaatgctctttctcatgaagcaaggaaataaatttgtttgaaatgacattttctctcataaaaaaaaaaaaaaaaaaaaa

SEQ ID NO: 1794 - DNA, 614 bp, Homo sapiens
  misc_feature (574)..(574): n equals a,t,g, or c
tgggtcaatctcaggttccagtctcagaaactgcaggttgttgtcacctttctgtcagcatggatcaagcccctaaaatgtggtaagtgttgtcagagcagggcaatatctctactctcaagtatgaggggaatagaaacaaagcagcagttttagccagggttcaatgatagagtggaggtaaattaagagcctccaggctgtgattcaccatttgagacattatacataatttgtttttgttataagccatttgaatttttaaaaaatttcatacatgcaatggaatatagatatgtatatacacatataatatatatgctaaagtataaagagtaataataatgacaataaacaaacccctgtgtgcctaccacccaccttattgcctttcctttgaggtaccgtgtgcggtttcctgaacctatctctatccctgtctgatagagggaacccctgtactgaactttgtgttgaccatagccttcttgtctttcatcactttatctccatgtatgtatccttaaagaataataaatggaattaaactgaaaaaaaaaaaaaaagggcggcngtctagaaggatccaagctacgtacgcgtgcatgcgacgt

SEQ ID NO: 1795 - DNA, 495 bp, Homo sapiens
  misc_feature (50)..(50): n equals a,t,g, or c
  misc_feature (413)..(413): n equals a,t,g, or c
  misc_feature (460)..(460): n equals a,t,g, or c
aaaattaaccctcactaaagggaacaaaagctggagctccaccgcggtgncgaccgctctagaactagtggatcccccgggctgcaggaattcggcacgaggcggtgtctcctctttgaaattaagaactatctttcytgtagcaaagctgcacmtgatgatgctgcctctcctctctgtgttgtctgggcccttgtttacaagcacgcgttacccttcctgaggggagccatgctctagcccctggagggcctgttgcaggggcagggcgggcccgttgcctttggcagctcctggagagctgtggacatgcagtccccctcagttcgtgctgcaataaaggccatcttctcttatttctgccctcctttctctttggaccctggagccacaggctcagcctggcctgtcgncccggcttgtcactgaaaagccccggataccaagaagtcacccacanaaagtgggagaagaaataagatggcctttatatcg

SEQ ID NO: 1796 - DNA, 584 bp, Homo sapiens
ctgctgagagttggtaaagaggatggtcgagtgagatggtgttgacctccctggatcttatgtcactacatcctggacctcaagagggtcatccaagctttttgaaagctgaactccttgactggagaaacctagacaagaggcggggccaggtgcttgatatctaggaggcattcttcctcttcccttgccaccatggagctgggcacagtaagccatattgtttcctgaagcaggagtcccaggccttggctagagagggaacagatgtctaacaaaaagagaagcaattcgaggaattgatgaagcacaattaaaatcctctctggctagtagctctctggcttctgttcatttgaagaataaatcttggctgacagtgggaagcaccaggtttgaaatcagatggctttattttyctttttttggcatttaaatcagtgaaataaaattattactggagagcacagttcgatttaagagaattcctcagccctgttctcaagtcttcttttgaaattccatgacatggtggwtaatgggtaaaatgattaatgcctcctttgggtcttmtactgatcaga

SEQ ID NO: 1797 - DNA, 1333 bp, Homo sapiens
  misc_feature (1238)..(1238): n equals a,t,g, or c
  misc_feature (1264)..(1264): n equals a,t,g, or c
  misc_feature (1271)..(1271): n equals a,t,g, or c
  misc_feature (1298)..(1298): n equals a,t,g, or c
  misc_feature (1313)..(1313): n equals a,t,g, or c
tttttagatctgccttcttgggatgtattcmaggatgctagccgtgtttgagactgtaaatatgtctagtgaatagggcttcaggctgtgtgtgtttgccttgttttgcacagaattcggcacagccccaagcacagatgggtgcttcataaatattgttgaaggatgatgacacaaaggattatttaatacctctgacctcaggccacaaacatactttcaatgtgttttacttctgaaatcatttgaaccaraatgtttcagcaacacagattcatctgcaaccacaaatcagacacatttagaatgacaaagccccaaaagaatgccattttcaaggctgaaactgtattattctgggctaaatggaatccttgttttagtgacactgtaagagtagaaattaaagacactgaaaatcttcccttggggaaccacaattatctgtgaacaatgaaagtttgtctgaataattcatcagcctcaagggtacaggcctccccttattctggaatcccaggagtttaggcaagtgtgtcatttaatgggtctcaactgtgtcctcagttgttattattccagggcctggcatttatgggcacattcctataattttactaattaaaaaaaaataagctatatgggaaaccactgtcaaggtcaaaattttgaagctgcattgattttacctaggaagaaagaagcttataaagtgtccatcatgagaatccacctgggacctacacaacagatcaaatacccagaacaaatcaccacgtcagagccccacagaattctgattcccaaccaacaagcatgagtaatccttttaaatggtcacttacatatcagaacaggtcctttgtgaaatttctaagcaaggcctctggtttctgactgaaacagagatttattgagaaggaggggtaaagtgaaatcaagaactgctgggaaatttccacaagaaacaaggacaaatggtttttgttgtcagagtaaaaccagcctcccctagccatggtttggaaagttatttgctagcccacaggggacaatattctcaactggtttatcagggacccttttgatccaattatagttattgggcagatacagtccgtaccctattatcagragacctagtttcaawtcctgagtcaaccttytaaattcactgtgtgaccctggtacaagtcacttaagctctctgattcattgggtcaacatctttaatatgnggagagtaatgcctatccccataccncataaanttttgcaaggttcaagtgggttgaaangttcaaatttttccnaattttaagatcccggaaag

SEQ ID NO: 1798 - DNA, 550 bp, Homo sapiens
  misc_feature (32)..(32): n equals a,t,g, or c
taatattaagaaattcaatataactacatttntataccggttaatgttccacagtgtgtgttaaaatgtagttataactawttttaattccaaggtgttgtttgcttttwcttttaaatatttyctaatattttgtcagattaactagatgaataaataaatctagtattaaccgcattatgaattaaataattttgatttaatgaaagggataatatgatttccagtgtttactgtagtgtatcttgtacagataacatgtatttttaaaggaaaaaaaacggaattgaagctattttttcttgcatttctaattgacctgagggacattccgtttgaaatgtactgaagttacagtttctggttttttctccttatttttcttataatgcttgaaatgtctaactattaaaaaagacaattggaaaatgttatgcatggggtttttaagaaaacaaagtgttctttttatttgactgacaattcattttacactctatataataaaatctccacaaggcatcttgtgggcaaagtcaaaaaaaaaaaa

SEQ ID NO: 1799 - DNA, 485 bp, Homo sapiens
  misc_feature (31)..(31): n equals a,t,g, or c
  misc_feature (38)..(38): n equals a,t,g, or c
  misc_feature (367)..(367): n equals a,t,g, or c
  misc_feature (445)..(445): n equals a,t,g, or c
tcgtgggcttcccagcatacctgagaatagnaatctgncagaatattttgtggctgtggatgttaacaacatgttgcatctgtacgccagtatgctgtacgaacgccggatactcatcatttgcagcaaactcagcactctgactgcctgcatccacgggtctgcggcgatgctctaccccatgtactggcagcacgtgtacatccccgtgctgccgccgcatctgmtggactactgctgtgctcccatgccctacctcataggaatccatttaagtttaatggagaaagtcagaaacatggccctggatgatgtcgtgatcctgaatgtggacaccaacaccctggaaacccccttcgatgacctncagagcctcccaaacgacgtggaagagagcatcgtgatccagtgagccttgcccctaagcgtgtgtgtatgatttgcnaccgatcgaggatttatgggagtttatgggactttattta

SEQ ID NO: 1800 - DNA, 565 bp, Homo sapiens
  misc_feature (446)..(446): n equals a,t,g, or c
  misc_feature (496)..(496): n equals a,t,g, or c
  misc_feature (520)..(520): n equals a,t,g, or c
  misc_feature (537)..(537): n equals a,t,g, or c
  misc_feature (542)..(542): n equals a,t,g, or c
gcctacgcgtccgcccacgcgtccggtggaacagtttctgccagataatcctgtttgggggttaggaaggctgatggcatgtgttttctggactaacattttgcagcctatggaaatgtatgtgtgctatttattcttatgaattgtgcaatgactcacaagcctaagcagtgtcagttacagctcaaccttggtagaaacccgtggtgttttgyttttttttttgatgcgggggaaagactgcattttgtgacgaatttattacctaacagaaagatctattttctcagtgataggcatcacacaaggtgtctcctgtgacaaccctcagattaggagaaaaaaagcacatgtctgctagaagacaagctatgtgtgtgtgttgtttaaaattctattctgcaagggtagatctgctgctggaagttggggttggcttccaaganggaatattaaaaatttggaccaaatgctccttgcaaaactaggcatattnttacttggaacaatttattttggnaaacattttccccaatnttggnttttaaaaccagcccaacctttt

SEQ ID NO: 1801 - DNA, 914 bp, Homo sapiens
agaagttgtacatattcagagttttccattggcagtgccagtttctagccaatagacttgtctgatcataacattgtaagcctgtagcttgcccagctgctgcctgggcccccattctgctccctcgaggttgctgggacaagctgctgcactgtctcagttctgcttgaatacctccatcgatggggaactcacttcctttggaaaaattcttatgtcaagctgaaattctctaattatttctcatcacttccccaggagcagccagaagacaggcagtagttttaatttcaggaacaggtgatccactctgtaaaacagcaggtaaatttcactcaaccccatgtgggaattgatctatatctctacttccagggaccatttgcccttcccaaatccctccaggccagaactgactggagcaggcatggcccaccaggcttcaggagtaggggaagcctggagccccactccagccctgggacaacttgagaattccccctgaggccagttctgtcatggatgctgtcctgagaataacttgctgtcccggtgtcacctgcttccatctcccagcccaccagccctctgcccacctcacatgcctccccatggattggggcctcccaggccccccaccttatgtcaacctgcacttcttgttcaaaaatcaggaaaagaaaagatttgaagaccccaagtcttgtcaataacttgctgtgtggaagcagcgggggaagacctagaaccctttccccagcacttggttttccaacatgatatttatgagtaatttattttgatatgtacatctcttattttcttacattatttatgcccccaaattatatttatgtatgtaagtgaggtttgttttgtatattaaaatggagtttgtttgtaaaaaaaaaaaa

SEQ ID NO: 1802 - DNA, 310 bp, Homo sapiens
  misc_feature (165)..(165): n equals a,t,g, or c
  misc_feature (243)..(243): n equals a,t,g, or c
ttggagctggggtgtaactggaggggcgggcccttctccaagttagagttggggttctgagcgagtcgtgcgttttaggtttagtgtcttttccttgtccctgctcggggagcgtgaggcagatcggccggctttgctccaggcctcaggagtgtcastcgcctnggcttgcacagtacattggaacgtgcgggttctattttgtattcgacgtgccggatcgaaatagagctcgcggcactntgaagaccacagtaggaagttaaggacgggggtgcaggttcgcagccctatcaaccagctccgagcc

SEQ ID NO: 1803 - DNA, 1054 bp, Homo sapiens
aaatttttgtatagacattcctttggttggaagaatatttataggcaatacagtcaaagtttcaaaatagcatcacacaaaacatgtttataaatgaacaggatgtaatgtacatagatgacattaagaaaatttgtatgaaataatttagtcatcatgaaatatttagttgtcatataaaaacccactgtttgagaatgatgctactctgatctaatgaatgtgaacrtgtagatgttttgtgtgtatttttttaaatgaaaactcaaaataagacaagtaatttgttgataaatatttttaaagataactcagcatgtttgtaaagcaggatacattttactaaaaggttcattggttccaatcacagctcataggtagagcaaagaaagggtggatggattgaaaagattagcctctgtctcggtggcaggttcccacctcgcaagcaattggaaacaaaacttttggggagttttattttgcattagggtgtgttttatgttaagcaaaacatactttagaagcaaatgaaaaaggcaattgaaaatcccagctatttcacctagatggaatagccaccctgagcagaactttgtgatgcttcattctgtggaattttgtgcttrctactgtatagtgcatgtggtgtaggttactctaactggttttgtcgacgtaaacatttaaagtgttatattttttataaaaatgtttatttttaatgatatgagaaaaattttgttaggccacaaaaacactgcactgtgaacattttagaaaaggtatgtcagactgggattaatgacagcatgattttcaatgactgtaaattgcgataaggaaatgtactgattgccaatacaccccaccctcattacatcatcaggacttgaagccaagggttaacccagcaagctacaaagagggtgtgtcacactgaaactcaatagttgagtttggctgttgttgcaggaaaatgattataactaaaagctctctgatagtgcagagacttaccagaagacacaaggaattggtactgaagagctat

SEQ ID NO: 1804 - DNA, 797 bp, Homo sapiens
  misc_feature (45)..(45): n equals a,t,g, or c
ctggaaactagtgggtcccccgggcctgacaggaattcggacagnagggaaaaattttgttaggccacaaaaacactgcactgtgaacattttagaaaaggtatgtcagactgggattaatgacagcatgattttcaatgactgtaaattgcgataaggaaatgtactgattgccaatacaccccaccctcattacatcatcaggacttgaagccaagggttaacccagcaagctacaaagagggtgtgtcacactgaaactcaatagttgagtttggctgttgttgcaggaaaatgattataactaaaagctctctgatagtgcagagacttaccagaagacacaaggaattgtactgaagagctattacaatccaaatattgccgtttcataaatgtaataagtaatactaattcacagagtattgtaaatggtggatgacaaaagaaaatctgctctgtggaaagaaagaactgtctctaccagggtcaagagcatgaacgcatcaatagaaagaactcggggaaacatcccatcaacaggactacacacttgtatatacattcttgagaacactgcaatgtgaaaatcacgtttgctatttataaacttgtccttagattaatgtgtctggacagattgtgggagtaagtgattcttctaagaattagatacttgtcactgcctatacctgcagctgaactgaatggtacttcgtatgttaatagttgttctgataaatcatgcaattaaartaaagtgatgcaacatcttgtaaaaaaaaaaaaaaaaaaaa

SEQ ID NO: 1805 - DNA, 364 bp, Homo sapiens
  misc_feature (203)..(204): n equals a,t,g, or c
  misc_feature (218)..(218): n equals a,t,g, or c
acctttaccttctgtagtgccctaatctagggtctgtgactagaaacccaggtcaattgatgaaaatccatgggagaagaaaatgtaaaaatgctttcagacattaggtgtatgaaatcacacaatataaaagctatatcatattttrttagagggatttttttgctacctttgctagtacttgacagattttataaaatgtnnaataaaatttgggnctgagaaattgtttcccccccttttttttccctgataaatgtctctccaacaagcattgttgctttaaatttagcactgtcttcagctttttattgctgattcagtttctgtggaaaggcctttggaaaggtaagttctgggcagg

SEQ ID NO: 1806 - DNA, 1267 bp, Homo sapiens
  misc_feature (1226)..(1226): n equals a,t,g, or c
gacgcgtgggatttcaaagctggggagatttcatttatttccaaaatttttcaaaaaacttttactcagttctgctgwtatttattaacttaagagtgctcccatccccatattttagctataggaaaattgtgctacccctgattcatatggaattaaaaaaaaaatacatccctttattttgagttttaagttgttattttgctatacatttattactggagtatctggtggtctgaaatagtcaaaagtagagttggtattaaatgttccaatgacatttatttttaatacttaaaaaatcatgtactttgaaatatgtcaaagcaacttctgataatatacctgaatttgtagttgtctcttgagcatcatttacttcatcttagatatagtgaagatctaggaaagctctatatgctgttcttttctacagttgtatttttgcagcatctcctggtttcattcactcttgttttgggattttgtttttagatctgcatatttcttgtacatatgcatgcaaatgaaagaagggagtttgtactggtgccmtttctcccttcagttgctggttaakggggatttgctagaaaaaattctcccgttgaagggtgaaaacagacccttatgtgtatayctgtacagagatgtgtatatgggatgtggtggcactttgctgaatgtgaacttgccttgtcaatggaaagattgaaaagtattatgtttatttatacatttgtataaatctatatatacacgtatgtatatgtgtgtgtatagataaagctatatacatatatttcccttaaaaatgtgtgtgtataataggtaaacagcctttgttaagcaagattaatgtctatggaaagttctggattattctgtaagccagaggaggtgacagtctagagtacatcatcagaacatactaaaatggaagtcctttggattatagttttgtttatggatattacacaatgaatgcttgtctgaacagttcttacttgccagttccactattcttcatcttcaccaccttctactggtcagtctttcatcacttaaaaaaaaaaaatcacacatcattgtggtttttttcccccttaattctgtctcttctagccagaagcatctggcttaagcatatttcatcaacttctctgttatttcttttaaaggatctttatctctgaaattttcccagaaggatacaagttttgggnaatattatcaataggaattttgaggacttggggcattcatc

SEQ ID NO: 1807 - DNA, 463 bp, Homo sapiens
  misc_feature (461)..(461): n equals a,t,g, or c
ggtcttagattcagataggagattcttcttaagatgctccgtgttttttgttttttgtttttctgtagaagcaagagcagtctgtgatagaattatggcagcaagttcttaaccctttccagattaccaaactctgagaatctgacatagcctgagagtcttttctctcccttgaaaatagccattaattcagtgactgtttggagctgtgaggaaaaaaaaaaaaaagaaaatagccattagctcatgtgtacacaattcaaggtacaatatccagagcttagagggcccattttgggctctagattaaggacttctactacagaatattggaaataaatgtcaatggactgcttaaataaattatagtacatccataacaatgggagtattgtgtgataattaaaagggagggagacctattatcccctactttggaccaacctccaagatattattangg

SEQ ID NO: 1808 - DNA, 891 bp, Homo sapiens
cacttcttggctaaattattatatcaaatatattcaaatcatattcttaaactcatcgagccatttgaacaaaaattatttttgtttagcttcatgagtatctttggaaaataatttgttgaatatatatgattatgagatattttctgataaacactgaattttgaaacctgaactcactatataattgcagtgttttgaaggcctgcatccattagcattgcattatattcacactgccttttttagtgaaccaagacccatcttctggacgacagatttatcttaagatgaaaggttgtataacatgcccacaaggcataaaaatgttaatgatgcaagtaagttctaagagtttaatgaccaagcaaaactctaccaccagatgctgactgcttgttttgcagtgttcaggaaacaccattttcctggctcttaacgcttttgtattggtatggaaaagggctggcagctatagaacaggagatccatagcattttgaacagaagtatctggaatctcactgactcgtgtgttatcaaagctatatcaggcctgggtgactgaattcttgcagaaagcagtgtagtggccaccatccaaatcaccaaaatggttctatgggagaaaggaatgtcaaacttagtattcacatatgaacactaactactggaacagaaatgatagggccaagagatgctttttaaattgtcccttattctaaattaaaaggaagtgataattttgttgttaaatcatgcatatagcctgactgctatattgcttctcatttcattgtaactacttatatgttgtgcccattgactatcatctgtgaataaagaaagacaatatttagcaaaaaaaaaaaaaaaaaaaaaaaaaaaaaaa

SEQ ID NO: 1809 - DNA, 434 bp, Homo sapiens
  misc_feature (361)..(361): n equals a,t,g, or c
  misc_feature (380)..(380): n equals a,t,g, or c
  misc_feature (398)..(398): n equals a,t,g, or c
  misc_feature (425)..(425): n equals a,t,g, or c
accctatcagacgtgggctgtccccatcaaaatatctgtacttcttgcttctgccctacattggaagcagcagaaaagaagggtaagcagggttctagaaatttgtgttatgttttctccccactgtatttatttctttggwtagtggtgcaagaaattctgttttcctgtagcaaattaataaagcgttcaaacataaggaattacgacaacagcttgtagatgccagacttcaacaaacagcacagctgataaaagaagctgatgaaagacatcagagagagagagagtttgkaagttctacttcttggaaaaaaaaaaaaaaagggcggccgctctagaggatccaagcttacgtacnccgtgcatgccgacgtcanaagctcttctataggggnacctaaaatcaattcactgggccgcgntttacaacg

SEQ ID NO: 1810 - DNA, 449 bp, Homo sapiens
  misc_feature (353)..(353): n equals a,t,g, or c
  misc_feature (390)..(390): n equals a,t,g, or c
ctgttctgatatgctatccctatttcatagttaaatttaaaaccaaggaaataaagtcctgtattagtttttttcttccttgaatatcatgattatagaaatctttgctgatgtggacctaaataagcttgttgttgagacttccaragttctgtcctgggtagtttaaaagtctcaattggccaaaactttaatgaggttttagtaaatcttaatacagaggaagggaaatttcaaaagtatttacttcttcactgaaaggtgttgggtcaaattcttcatctccatgctattttggagtttctcattactctttaactcatcaaaaaattcattcttttaaatgccttttngtcctcagctaagtaacaagcatactgcagaaatttngttgaataaattaatgtgtgatttcttttaggatggaagagtgtagaaagtggtcccaa

SEQ ID NO: 1811 - DNA, 695 bp, Homo sapiens
  misc_feature (3)..(3): n equals a,t,g, or c
  misc_feature (619)..(619): n equals a,t,g, or c
  misc_feature (655)..(655): n equals a,t,g, or c
  misc_feature (658)..(658): n equals a,t,g, or c
  misc_feature (668)..(668): n equals a,t,g, or c
ggnaaatataattacattactatttaacacctagcaaagctattgtagggtgtttccttttccactcaaatatacacagctaggctaaaaaaagagattccatttttggctggcaagatgtttgggcatcagtaatattcccatatcatacattgttataatgtccctgatagtatttaaagaaaggaattgatattagctagtgattactaaacagcacaattctgtaactaaaggraaaagaaactcactaccatttagtagtctacaaccttagcagccttgtcaaaaatcaattctattatttttgcagtatagtggtatctattcaattttgagaaactataactgcttcacaaacacttacatcaagctaatcagtatttgagccatccataaacagactatgtagaaaagccaaacatctcattagctactttggagttctccccttatttttaataaatgtctgtcattaatgacgtcactactgaagaccatgaaaaaagtatatagttgacccttgaacaacatgggtttgaactgcacaggtctacttatacacagattttttttttaaccaaatgcagatcaaaaatacagtactgacaagatgcangaaccygkggtttatgtgaaatctctgtataccaanaangggcccgacntttatttcttattattaattgggggtt

SEQ ID NO: 1812 - DNA, 910 bp, Homo sapiens
  misc_feature (29)..(29): n equals a,t,g, or c
  misc_feature (40)..(40): n equals a,t,g, or c
gctttctccagctctgaggacaataagcntggaaagcgtntccgcacaaattccagaagcactcccactacccctcaagggaaaccagagactacttttttggaccaaggctgctcttctccagtgttaatcgactgtccccacccaaactgcaacaaaaagtacaagcacattaacggcctgaggtaccaccaggctcatgcacacttagacccagaaaacaagctggagttcgagcctgacagtgaggacaagatctcggactgtgaggaaggattgagtaatgtggcacttgaatgcagtgagccaagcacaagtgtatctgcttatgaccagttgaaggcaccggcatyccctggtgctggaaacccacctgggaccccaaagggaaagagagagctgatgagcaatggcccaggttccattattggtgctaaasstgggaagaattctggcaaaaagaagggccttaacaatgaactgaacaaccttccagtaatctccaacatgacggctgcgttagacagttgctcggcagcagacggcagtttggctgctgagatgcctaaactggaagcagaaggattaattgacaagaaaaatttaggagataaagaaaagggcaaaaaagctaacaactgcaaaacggacaaaaacctctctaaactgaaaagtgcccggcccattgcccctgccccagcccccactcccccgcagctaatcgctatacccactgcaacctttacaacgaccaccactgggacaatacccggactgccctccctcacaacaactgttgttcaggctacaccaaagagtcctccgttaaaacccattcaaccaaagcccacaattatgggagagcccatcaccgtgaacccagctctggtgtcactcaaagacaaaaaga

SEQ ID NO: 1813 - DNA, 540 bp, Homo sapiens
catttactctgtgtgagctcagcagaattgaattccaacttggatataggtgtccatggtgttctacttaccctgggttccgccttcttccttgcctggtggcctttcatgacatcataattttgatcttcctttgttggatactctgatcttgttcacagagaaacataagcctaaatatatggtggttattttttgtgttgtggcagactctaaatactgagtctactcagcgttattttgcaactagagtggaggaatcctaaagtgttaaaagggctttgaagattgagtcagcatccttatcatacagtgcagaagtctgaattacagagattatgcagtgtatcgtggtcaaccagtaaatttgttgtccgtaaagtacggtgcagaaatctgagattacagagattatgcagtgtatcatggkcaaccagtacattttttgtcgttaacatccagagccactgacagggagggtgaaaggcacagagtgaatttttttgttccttgggcttttatcaagttttgaagggatag

SEQ ID NO: 1814 - DNA, 231 bp, Homo sapiens
cccaacccggcactcacagccccgcagcgcatcccggtcgccgcccagcctcccgcacccccatcgccggagctgcgccgagagccccagggaggtgccatgcggacgggtgtgtggtggtccacgtatggatcctggccggcctctggtgcggtggccgggcgccccctcgccttctcggacgcggggccccacgtgcactacggctggggcgaccccatccgcctgcgc

SEQ ID NO: 1815 - DNA, 388 bp, Homo sapiens
  misc_feature (103)..(103): n equals a,t,g, or c
  misc_feature (382)..(382): n equals a,t,g, or c
cggacggtgggtgagagatctggtggggagctgatgttccagtttgagggccctgcagctggagacccgtggggatctgatgttccagtttgagggtggtgcnatggtgacccaggcgggagctgrtgttctagttktagggccctacagctggagacccggggargagctgacgttcccwttcgagggctgtgcaggtggagacctggggaggarctgatgttgttctaatttragtgtggtgcagctggagatccagggatgagatggccctgcrgttcaaatatgagggtcccggagctggactctacgtgaggaaccaatgctgcctctgatgtcttaggttgtggagctggaaactcgcggaggaactggtattggngttcta

SEQ ID NO: 1816 - DNA, 284 bp, Homo sapiens
  misc_feature (31)..(31): n equals a,t,g, or c
aggcagaaggccacgagagagagaggagcgnggagagtggtgaggaggattcgtctctractgatgaacctcgccgtgcctgtctgtcacatccaagtctgtgccagctgctgggaggtcagastcctgccctgagaaacagcccagtccttggagaatgaaaccctgagggtcagtgagtggaggccttccctcggggccagccattcccgggargcctgagttgtgacctggaagctctrtgggtcmccaaractggcattttccttgttatttttgttgca

SEQ ID NO: 1817 - DNA, 334 bp, Homo sapiens
gtgagccactgtgtccagcagaaatgtactttctagaaagaaaataattggtacttcactactttcccagggaattccttcaggtgaatgtccacccttttgatctagaagcagactcacaattttgtttgtttggcaaatcagcctctgagctcaacttccttgtctgtaaaatggggctaaggaaatgtgggttgctttttcaaaggttactgttaggatggaatgagatcatgtgtgtaacaaaggctttggaaactttctggaatttgaaggctatataaataaaagatggaccactctttccttaaatttggcacctttcctgttcttt

SEQ ID NO: 1818 - DNA, 921 bp, Homo sapiens
  misc_feature (486)..(486): n equals a,t,g, or c
  misc_feature (812)..(812): n equals a,t,g, or c
  misc_feature (845)..(845): n equals a,t,g, or c
  misc_feature (876)..(876): n equals a,t,g, or c
  misc_feature (888)..(888): n equals a,t,g, or c
gttgtgctgaagaatggcagagtacctgatttatttagtctcaaacaatttcactgcctgctatgttcaagacccggtaggtttaatgctctgtagtagctataatgtaaatgtaccatgaagaaatgctattttcttctacttattcttcatttcaaactattgtcttatactagtgctaagcattatctgtttgtgatttgctgaaaaacaaattctttgtcaaagaaaatacttcccttaaaaatgagaaagcaatcttaagtctcataaatctaatccaggatccttctatcataaacttaactgtcttgawttttactgagattagccmaaatcagagccaaaaaattcccccttgcactaatttgttacccttacattgacattaaaggtttggcatttaattctccatcttgatcttgaactaaatttcctgaagaactgtaattgttacaagccttgccactcaggcatgtcatgaanactcacttctgccaaaatagttatagctattaaattcctctgtgataacttttttgttttcctaactctaaattaagatttggcacacagtaagacaacacaatctaacaaaaaagaatctggatgttagatttaaatagatttgaatttaaattcaggctgtgctggttaccaactaggttactttaggcaaattatgcaatctgtgtgatcctcagtttcctcttctgtaaagtgaggatgttacctacttcatggcattatgtgaagatttaaagggatgactttaaaagcgcctattaattgtctggcacataaaatattcnataagtggtattattcttaaaaaatattatgancctattgcctttgtctgtcttatactctgantgatactaattnaactaccttatggctgaagggctgcttaatgcc

SEQ ID NO: 1819 - DNA, 856 bp, Homo sapiens
  misc_feature (628)..(628): n equals a,t,g, or c
  misc_feature (764)..(764): n equals a,t,g, or c
  misc_feature (805)..(805): n equals a,t,g, or c
  misc_feature (817)..(817): n equals a,t,g, or c
  misc_feature (837)..(837): n equals a,t,g, or c
aaggaagtgggatactggctggcattgtcagtgttctaagtttcaggcatttttatttttcctggctaaacgttggtgaaagttataacctcctgcctgggagaaaatatacatcacctaaaatgaacttatggcaggtctaatcaaaaggctaaatacaatttcagaaaaggttctgatactcttgtttttgataaagcattttttcaactaaccatgaattaagatgagtccatttgcctcttctgccttcactgagggtttgggttatacacctctactgaattgtgttaataactgtttggcagtgtgtactttgtttttgtgagtcatgtctcatgaaatttattggaatgtttaatcatatttgctaagaaatgtttctgctgtagttggatttgcccatatttatgtaggtggttttaattttttaaatggtgattagtgttaaaaatcaatttaaatcatgactaatatggtaaaaagataaagcatcaaagcagtatttctcattcctgcctcctcaatatctaatactgggaagatacttcaaagaatattgagattgtctgaagttttagttaagattttcacacattaatatcaaaaaagtaagtttagtatttgnttctccatgggttatttgtaaagctgtaaactgagatatcggtgactccgtattatgactccattagtgagctgtggtatgggtaggattttctacttcttctgtacttttacctggagactatttttactaaggngctttataatggggtttaaagcattgcatttaccaaacaanggaaaatgctgnaaatattgcatattttatgnatttggaccaaaagggtac

SEQ ID NO: 1820 - DNA, 662 bp, Homo sapiens
  misc_feature (584)..(584): n equals a,t,g, or c
  misc_feature (615)..(615): n equals a,t,g, or c
  misc_feature (629)..(629): n equals a,t,g, or c
  misc_feature (662)..(662): n equals a,t,g, or c
tttaaactatgaaatgaggaatgtaatcccttctataagatgtatactctttgttatttgttgttaaattttggtcttgttattccaactgatgcaaaattctttttacaaagcactgaaataatacagatttttcttcattgtcagcaggatgagattgtctgaaacgaagaataggtatgatagttttcttagattttgcacatcataggtggcaaagacactatcaaaacataagtttttaaatgtactaggaagtactttgtaaaaccaaacggtctgaagaaagtgacaggtaatttgtgagaataaaactaaattattggggtagtgtcttacctctttgtatatttaaatgttctgttttttaacatgtaaaggttatttttatttgttgtagattgtgttagcatgctataaatgttagaaagttcacttacaatctactttaacttgaagaaagagagaaatcgggtccaaattgtatagcattgattgcaacctagtgtagcctagtagaatttctgagttttaaaattttttaaataatcaaaatgtattttattgaattcatatcctggaantatatatgtatcttattaaatctttaaaatnattaaatgggcaantgattaatctttaagtccaattgaaattggtgn

SEQ ID NO: 1821 - DNA, 691 bp, Homo sapiens
tggaaaaagtattttaaaaccttcatcaatggaaaagtggtttggggttcctggtttgaccacgtgaaaggatggtgggagatgaaagacagacaccagattctcttcctcttctatgaggacataaagagggacccaaagcatgaaattcggaaggtgatgcagttcatgggaaagaaggtggatgaaacagtgctagataaaattgtccaggagacgtcatttgagaaaatgaaagaaaatcccatgacaaatcgttctacagtttccaaatctatcttggaccagtcaatttcctccttcatgagaaaaggaactgtgggggattggaaaaaccacttcactgttgcccagaatgagaggtttgatgaaatctatagaagaaagatggaaggaacctccataaacttctgcatggaactctgagcaagatgtaaataaaattaaaaggtggatggcaagagtgcaaatactatcttcaatccttcagtcccagccagaagaatctctgaaagcatattgtgaatgtatacaatgtagtacaaacaatctctgtgatgattaacagtatgtcaccacttcattttttaaaaaggatcacgtctaatgcccattttcccaactattctttccaaagtaagatataaggtagcttaataaactaagtaaaacgtaaaaaaaaaaaaaaaaa

SEQ ID NO: 1822 - DNA, 615 bp, Homo sapiens
  misc_feature (7)..(7): n equals a,t,g, or c
  misc_feature (87)..(88): n equals a,t,g, or c
  misc_feature (578)..(578): n equals a,t,g, or c
  misc_feature (583)..(583): n equals a,t,g, or c
tgggaanaatctcactcactattttggcaaagctggtacgcctgcaggtaccggtccggaattcccgggtcgacccattcgtccgcnncagcctctctaagtaggaggccccagtgggagagatgggctttgactctggggtcaaatgtagataattggactatggacagtggctggctggtcaccaacaatggtgtttgaaacaaacatttagaggccatatttgggcttataaaaatagttctgggccgtgcatggtggctcacacctgcaatcccagcactttgggaggctgaggacagcggatttcttgagctcaggagttgggagaccagcctgggcaacatggtgatacctgtctgtctctttaaaataaaaaaaatcaatgaagttatgtgatgggctcatggctacaggtggagaaaggcagtgcatatgcagcctcctccatccttgactaaggctgacagagggctgggcccaccaytgctcaccctgaggcctcgtcttctgactcccctcctttcatttctaggtggcattggtgargctgtgtccaagagcagtaagtggccaancctgncattactgttacccacctggcagttaacccgg

SEQ ID NO: 1823 - DNA, 1205 bp, Homo sapiens
atttatttggctcttgggagctcctactgaaagtgctgaaatgtcgtactgacacttcagacttatagctacctagactccaagtaagatttatctctgactggagggtttctcctattaaaaaccaaagagtgtagggtgccttcacctgctaggtaatcttctatgccctaatgggaagaatgggagcagcagacaagtaagtgcaggaaggagaaccaaagctgtgtccatgcccttgaggaaagagaaattggaccagacaagttcagtggaaactttctaatggatccatcaacttcatcttgtctaagcagagtcatagctagaatgtgactgaaataggagaaccacgtccaggggtcaggggggattcctctgaaatcgcagctggaacatttcgtaatagttctggtactgcacccatagatactgtcacctctactctttcttccaatcaccattagcagatgccacaggattcctacttctgaaagtttttgggccccgcagtggcaagaccggagaagccaataaagtttaaggctacatgtttattccatccacaaatttggtgaaggaggaaatgtttacaattctgccatgccatgaataggagttttccaccgggtgtacactgctgttaacaaggtgtaaatacttgtccagtaaagagaccgtacgtactgctgatgggacgtcccaacacaatgccagatgcaaaaacttctttggtgattgcttttgataacactgagtggctaaaggtcttctttcacatctttgcccacctywaatcctgaaggcaaggtctctggaatttgagctgtgccctcacatgcctccaaggcaccaacaaagcaaaatgaagagtctgcactgcttatcagttgacccaacactcagtccacattggaggggaaggggtggtgggctgaggatgtcttcttcctgtccaggatgcaatatggtcaaggatgaaaggaaagagatgctgggagcaagtctgcattgaagatgtatttctgttgctttactaccaaccctggttataaatgatgaaactataatgggtctgtaatagctactttcccatatagctcttgtctgtacatacataaaattaaaaawaatagaayacttccattactaacatgtggtgacaagcattcttcatttaccatttttattccaaaaacatgatt

SEQ ID NO: 1824 - DNA, 600 bp, Homo sapiens
  misc_feature (552)..(552): n equals a,t,g, or c
  misc_feature (566)..(566): n equals a,t,g, or c
  misc_feature (579)..(579): n equals a,t,g, or c
  misc_feature (586)..(586): n equals a,t,g, or c
  misc_feature (599)..(599): n equals a,t,g, or c
gcggacgcgtgggcggctgcgtggctttagacaagtcttttaaccttgctgtgcttctgatttctcagctgaaaaatggagatgatgataatggtttctgtaaggccttatggtgaagcacctagctcagggcctggaaggcaggtgtaaccagtggttcagttgttataaacgaacactaaccctcgcctttgcacctcatgaatccagatatgtagatggagsccacaaagctagcaggagccaagctcacgtgtgtcctgctttaaagccccatacccctttctccgggtgacaaacacctgtgctcgttctcttcccttcccctcttccccttgcatttggctaataacaggccagctgcctgcctccctgcagtttggtagatgggtgggtaatgaccaccactccccacgttcgcctgatgggcttgttttccgtgcccttcacaggcatctgcaacaggccccagccaggcctgaagtcatcctcagaagggatggatcctgaggtcgccatgcccagctgggcaaacatgagtctggattcttncccggagtcggctnccttggctgtgangctgganggagatgaactgnt

SEQ ID NO: 1825 - DNA, 565 bp, Homo sapiens
  misc_feature (526)..(526): n equals a,t,g, or c
aaaatgatatactactattgcttgtatattgtggtatacggtgtcaggtttcagggttttttttcaacgttaaatattctagaaactttctgaaataatttctgtttaaaaatattgaatatttgcttcatttcaaatactcccttttgacaaaaaaacttaggtataactgttgatgaaaaaccagaaaaaagtccagaactctttggtgactccaactatggatagcttattttgaaaaaggagaattgcaaattttaccaaaagatggagaaaagcacattaaaaagataccaacattcagaaattcatttcagcagttattattggaaatatttaaactaatttagataactataagatacttattgtccatttatacccgtaaagccgttttagaagtaatattttaggtaatccaaaagtactaaataaatcattttagttatgagaaatcttgcttatagacaaagaaaagaataacaagttgtcaatgaaaagatgacatkgaamcatttgtatgkcnctcttaamctacctattgactatattaagcctttaatac

SEQ ID NO: 1826 - DNA, 286 bp, Homo sapiens
  misc_feature (283)..(283): n equals a,t,g, or c
ggtctggggagggacctgaaactatagatttctgacaagtttccaggaaatgctgattttactgttcagggaccacactttggaaaccacacaaataggaatctcatgcaaacccaaggcacctatcaaaaaattttcaaccaagtgattctgcatgacaagggccagcagtgctagggaagaaacaacattctgttctttggcccgtcagcaatgaccattgccagagccaaactgagaaragtgggctgtctgttcaaggaactgaaatatataatcttancaa

SEQ ID NO: 1827 - DNA, 1320 bp, Homo sapiens
  misc_feature (1304)..(1304): n equals a,t,g, or c
gacggggtttcaccatgttagccaggctagtctcgaactcctgacctcaggtgatccacccgcctccgcctcccaaagtgctgggattacaggtatcagccaccgtgcctggcctaataattggaacattttcatcatgaaaatgtcatcagctttgccaaaagaaacaaccaattgacttgtktggcgtttgttttccattttcatgtcaattttatgtatacagttagaatacccaaggagaccactaaaatcagttaaacaagtagggtatatacaaagaaagatgaaacccgaaagtacataaaaaggatttaaatccgattttagatgtacctagtgtgtatttcttatctctagacaagttcatgtttattgtttaatttatgcccaagtgaagttgtaaacttatggttcaactctgacacagaatttgtcacttgtctgaggtcagtggcaggtttctctgctgtcaacactctgtgtcacccaccagattagtataactattaattcagactgtactcctatgtttaagataatttttacaagagctggctgaagcagcacattagtaacctgacaagatttctttttyyyttttcagggggaaagggtcaccttaaaaataaattattttcagggactttgggaatctaatgataaatattacacataatctatgaatagcttaatcctttatatattccttaaaataggaattcctcgacatcactcctggccacactttccttgcctgtgttgttgctatgtgtatttgaaagtaatatctgcattccttttaagatgttctgtaagtcatatttgtcagttatacagagtagtcttccttttccccacgttcagtgtaatctcactgaacagtaataatagcaatagctaacaacatctgcacagcaccttacagtttgcaaagaacgttcacacattctcatttgagttttgcatagtgaacctgttacgagatgtctcttgacgtcgatgctaaaagtgttagaatctttacatcactagagtcattgaatatgctgtagtattgaatagtgccctgactagggggaggatttggatgtgctgcatttcaagccgtgtataatcatcaaaatggggggcttgagttctttagctacttgaatccgatttacttctgttaagtgatgcttttctaaccgttttctggatggattttgtattcactatattgtagcttgtaatttgtataaatgtaccatctgatgtcattaaaaaaagtgtttgtagtgctaaaaaaaaaaaaaaaaaanaaaaaaaaaaaaaaaa

SEQ ID NO: 1828 - DNA, 821 bp, Homo sapiens
  misc_feature (816)..(816): n equals a,t,g, or c
acaagtcaaaatacagagatgatgtaagcattgcatttcgtatgtagagatggtaaaagatgactatgaggacgattcccatgttttccggaaacccgccaatgacatcacatcccagctggagattaattttggtaacctccctcgtcctgggcgtggagccagaggaggcacccggggaggccggggaaggatcaggagggcagagaactatggacccagagcagaagtggtgatgcaagatgttgcccccaacccagatgacccggaagatttccctgcgctgtcttgaaagagccctgtttcccagcaccgcggagctgcactgcacacctgtggggagacttttccagctgggccaagggagtcagactctaagaacaatagatgttgcttttcccgtgtcatgtaaatttgttgcacttttttgggctgagctgttagaggggcttctccagaggctcgagagcaggccatttcccaagaagatgaagaatggtgactgtgtttttattgaaggaatttcaaatgaagaataatgtttaaaatgtgtatatagagatagtatagactcctccgcggaagcatggagggaaaggaggttgtaaaatagactccatggagactcttaggaagcagtagattcccgggggctgtgcctttagcgttagaggaaacacatagagctggaactgttaatggaaagcagtcacagctgagttttcggagaccaagaaattaaaatacaattgcacttacaaaaaaaaaaaaaaaaaaaaaaactckagggggggcccgtacccaatcgccttgtgntgcat

SEQ ID NO: 1829 - DNA, 370 bp, Homo sapiens
  misc_feature (9)..(9): n equals a,t,g, or c
  misc_feature (42)..(42): n equals a,t,g, or c
tatatttgnaagtttccacagtgcaatacgtataaagcctgnttggacataatctcgtcaggtgcagtttaacgactaaattttaccttgaattcaggtttatatcaaatcttacaattctgaaaagttactctgccagcaacaggtactacaatgaaaaattaacaaagcctgtaacactacaaaatgctctgctaacattttcaatttttaagactccttttcagtaacaattcgaggaggaagaatctacagccaattccaaggccagatttcattcaatttggtcttccttcggcagtaaccctaaactcaagtttcacatttctccttcgataacattaaggccgctcgcgatctagaractagc

SEQ ID NO: 1830 - DNA, 402 bp, Homo sapiens
  misc_feature (311)..(311): n equals a,t,g, or c
  misc_feature (367)..(367): n equals a,t,g, or c
  misc_feature (378)..(378): n equals a,t,g, or c
  misc_feature (389)..(389): n equals a,t,g, or c
ggaggagcccagcagagtccctgggcagtctgacccctttaattgtggactaacttctcccagaacccatgataaggagtttctctcctgattgaggataccaagtgtgtgactgttaggcagagcattgcagccccattttggtgttgatatggaaattcctaggtcactatgcagacaagaaaaccaggaccccaggagccagaaaaacttgctgcaagtctctagtttgctcctatgaatgcccctccaccctggaagaagccctagacagtcctgtcccttctttcctgggtgcacgtgtcccctgntgctaggcctggggcaatcctggggtggtttggctggcccttgggggctgggcttnctccctgccancctgccacagntgcactattctct

SEQ ID NO: 1831 - DNA, 348 bp, Homo sapiens
  misc_feature (101)..(101): n equals a,t,g, or c
  misc_feature (294)..(294): n equals a,t,g, or c
  misc_feature (306)..(306): n equals a,t,g, or c
gattttattgttacagtgaagagagccaactcacagatttagatgattttaaagatgcagttcaaatgagggaaggatgtaaatactgtttttcaattagngaattaacagttgcaaaagtgggttactccatagagagcttgtgatttcatgaaagccatcaaagagtaaacctcttgtatagacagattccttaattgggtgtgcgtgctcacacgtgtgtgtgcacatctgggtgtgtaatatatgtatgtgtacctcagtcctagggctgtggtaacaaagtaccacaanctggcttaaaanagaaatgtattctcacaagtcgggaatcaaggtgttgacggg

SEQ ID NO: 1832 - DNA, 512 bp, Homo sapiens
  misc_feature (154)..(154): n equals a,t,g, or c
  misc_feature (447)..(447): n equals a,t,g, or c
  misc_feature (460)..(460): n equals a,t,g, or c
aattcggcacgaggaaacttccattgctcttcaggacaattatgagatcagatatacagctatctctgttataaagaatcttttgataaaacatgcatttgacacaagataccagcacaagaaccaacaagccaaaatagcacaattgtacctnccctttgttggactacttttggaaaatatacagcgattagcaggtcgagataccttgtattcttgtgcagccatgcctaattctgcatccagagatgagtttccatgtggctttacttcacctgccaatagagggagtctgagcactgacaaagacaccgcttatgggtcttttcaaaatggacatggaattaagagagaagattcaagaggttccctcttcccagaaggagcaacaggatttccagatcagggcaacactggtgaaaatacccgacagaattctacaaggantattgtatcccantataaccgcctggatcagtatgaaatcacaacctcctgatgttgctacctgt

SEQ ID NO: 1833 - DNA, 940 bp, Homo sapiens
  misc_feature (84)..(84): n equals a,t,g, or c
tcttgattgtgataagcccccctggaggatatgattcactttatgtgattcatcttattcacaggtctgtgagggactgcgaanttactcaggaaatgaaaacaaatgatggtcatgttgcagttttttccttgaaggacaaccgaaccatagcctctaaagttcaagtgcactgaggtgtcggaacgctgaaagcatgaggaaacgaggacgtagggtgtgactgaatggtggctagattagtgggagcagttcacctggatgaagattgagagcatcgtctttgagaagtgaaagactagcaagaataaaataaattaagtccagtgtttgagccaaggttgccacctgtctcttaacatctcactgaacataagtcctgaggtattaggacgaccatactgcctctgagctgaaaacattcaaaagttcacatccctgtttgggggataccattcaccgccttcagcccagatgatactttcctttaaatctgtgtctctgtgtgtataacaaagaggaagatggaaacaatgttcatggaaactgctgttgagccccttgtcccaccactcccgccatctgctgcaggcaggaaggcatgtgagtgtacgttttcttccaggagacatcaggtcccccyggattcaaattaagtgcaatattttgcaaacagctcttcttagggaaatctcctgaaggaaaaaaatgtgacagaatgttccatagtctgagagaatggaatcgttgagcatttagtacaagtccagtgtgtgtgagcgggacttaggcagctcaagcttgcttttttttttaagcgtacaattgagtggttttagtaaattcacaaacttgttcaaccatcaccactatctaattccagactcacgcttttttaaacaataaatgtcatttcatgaaaaaaaaaaaaaaaaaaaat

SEQ ID NO: 1834 - DNA, 502 bp, Homo sapiens
  misc_feature (19)..(19): n equals a,t,g, or c
  misc_feature (73)..(73): n equals a,t,g, or c
  misc_feature (163)..(163): n equals a,t,g, or c
  misc_feature (309)..(309): n equals a,t,g, or c
gtgctccaccgcggtgcgnccgctctagaactagtggatcccccgggcttcaggaattcggcacgagcacctncgcagccatacccaggagaaagtggtagcctgccccacctgtgggggcatgtttgccaacaataccaagttcttagatcacatccgtcgncagacctcattggatcagcagcacttccagtgttctcactgttccaagagatttgccacagagcggctattgcgggaccacatgcgcaaccatgtgaatcactataagtgccctctgtgtgacatgacctgcccgctgccttcctncctccgcaaccacatgcgctttcgtcacagtgaggaccggccctttaaatgtgastgttgtgactacagctgcaagaatcttatygacctccagaagcacctggatacccacagcgaggagccagcctacaggtgtgattttgagaactgcacttcagtgcscgatcccttgctctatcaagtcccattaccg

SEQ ID NO: 1835 - DNA, 641 bp, Homo sapiens
  misc_feature (38)..(38): n equals a,t,g, or c
gagtgtgttcctgtgggtgcctcagctcttctactttnaatttaacccttaaatatacagtagtgtggatggaagctggggaatgaactcttgccaacagaagatttatagtcttatgaatgagtaaattctagatctttggaggttgatttagaaagaacggtactgttaaattctgagtgtttttgtttcagtggggtggagttagtaatagcttttccttgtccaataggaagtgggtaaattgccaaaccactgagatcactattgttgactcagattcaggaataagattagcgtaggaaagctgtcgagtaaccctggaattggggctggttgtgattctgtttgctcttggctggtgaggaggctatgagttggtatagccagtggtcccaggatcctgaatgtgttgctaaaccatatactgctttccatgggctgtttttaggggccagggttggaggagatatggtgttgggtagcaacttgccctgtaatagatggagagctgttttctccatggctcctgcagtgtgagaggtgaggtgccagcttagagaaaattccagatcctcgttcatgattcttaagcagatccagattcttaagcagatccagattcttaagcagatatagca

SEQ ID NO: 1836 - DNA, 447 bp, Homo sapiens
  misc_feature (20)..(20): n equals a,t,g, or c
  misc_feature (31)..(31): n equals a,t,g, or c
  misc_feature (94)..(94): n equals a,t,g, or c
  misc_feature (148)..(148): n equals a,t,g, or c
tcctccaggtgactctctcntcctggccagnaatagcccccagactttttttaccccactggggtcaaagtttcccatggaccaaggaaagaancttgcagcctttctttaaaagcttaggccctggaccttggcaccagcatcactnctcgctgtattctattcatcaaaagcacttgaaaccaacccagatatgttcaatggggagcatccatgtatagccccaatttgagacaagctactatcctttaaaagacaggacttgcaagtgatgggaaagaataaaaacccttccacagccatgtctatacatattaattattattttcatctctccccgatatgtatatgttagtttaatrtgttgaataatataaaaccatttatttttttcaaaattgtagaattgaaagaaagggtaataggaggccatgctgaaaaaaaaaa

SEQ ID NO: 1837 - DNA, 590 bp, Homo sapiens
tttttgaatcttccttaagtttataaatatttattttttaaaagaagatgctgtgcctgtgagaccatacttttttttttttttttttttttttttttttttttggtgactgcaaaggacagagaacctttccactttggccatactgggttgctaagccggagccatttcagctcctggctcctcaagataacggcgagtccagtgccatcttggagaagctccaggggcagggctgacttttctcctacaggaggaacaatgtggggatctgagggatgggagggagacttccccctagagtggtggtcctgctgggggctcatatccagggacccaaaaggggggctgtgtaggaggttccacattggaggggctctctctctcgcagctgtcagagttggtcctggctgtggcgtccaaacagcttgagggaaaaagatcctgtctaaccacctcatctactactcaagttctttctgaaggagggatttcttcagttaaccatggacagtgaggtttctcaccacagtaacttgagtccaggttgagggggagacagatctgtggtaaatctctgacttgggcag

SEQ ID NO: 1838 - DNA, 425 bp, Homo sapiens
  misc_feature (3)..(3): n equals a,t,g, or c
ggnaattcccgggtcgacccacgcgtccgcagaaatgttacaagagtaagaggttcttacttgtacataggctttcctgctgaaaacaggcccctgctgtacagattttgggtacataatttagctcttttagtcaatccaagagatttaagtgacccccccccccccgtgttttttttgtttttgtttttgttttgaatgccatgtaaaggctttttggttaagacctcacttttaaaactgccttaagtataaatagtacctttggaatayatttagttcatcatttgagctgccttcatactggtttcctcagccttccttcagcctgtaatattttcagcccactgtttaccttgtctcaataaaaggtttctaatgccaaataaaaaaaaaaaaaaaaaaaaaaaaaaaaaaaaaaaaaa

SEQ ID NO: 1839 - DNA, 382 bp, Homo sapiens
gtattacaaatcttattgtacgcattttgtactagagaaaaacactgaagcagttgctcaaactttgttcaacatcagggaatttatattggagaaaaatcctgcaaatgtaatgaatttggaaaaacattttttttcaaaaactacggcgtagaaaacatgaatttatattgaaatgtgtttttgcagatgcagtaagtatgaaaaatatttaatccaaaattgagtctatgtaaatattaaataatttacagtagaaataactaaggcactgacactttagacattacactaaaacagagtgttgagtataaaaaaatctataagttgttagattatttgtaaataactttaaaaggagtagaagattcctttgggagag

SEQ ID NO: 1840 - DNA, 832 bp, Homo sapiens
cagggctggtgcacaaatatggccaattcaaggagaaacagggcagataatcccacagagccggtgacacgcccatcctattcctgagtagacagagccatttccatcactctcaggcctctgtgggtaattggagctgacaaggtcccatgcatagcagatgagattagtcccagctggacgtttcccagaaatggtcctggggtttccagtaacctctcaratraratcacttgtctagagatcactctggaatatgtctcatataaggcaaggagtcatggaaactgaatcatgttgagagaggatgttgtaggaatagaagcttctggacaaagaatgaggaagactctggagatctagagagtggggatttgtgagtggtttcaggttttgtttttgtttttcttctcttggcacccccaagcactaggcttatttgctggacagaaatagatcttaagtggagactgcaagttcttccgacgtgatgcactggaggagatgcatgcctggaaaagctctgccacttgctggctgggtggcctgggaacctctgggtctcaggctcctcatccataaaatggggataataactaattctcattaaataagaaacacaagattgatttgtggtaagcttaataagtaacaactactcgagaaaatagccttttaaagaactgacaaccattgctaagtgtctaccctaaaaaaagaaataccagagatataagaaaaggtatacgtgcaaaaaaaagttcattgtktaatggaaaatattagaaatatattcaacaaagggaatgttcagtaccccctccccaccaaa

SEQ ID NO: 1841 - DNA, 590 bp, Homo sapiens
  misc_feature (1)..(1): n equals a,t,g, or c
nttcggcacaggcgaaatcagccatggctttacttagttcccaagtacacatcttcttatccacaaggatgaaactctgtagggctcaccctgagggctcatgtgtggcattgagagggtagcagtgaccagaacaccacaaggcccacaagatgttttgaatgagggaacatttaatgtcatttgttaggagatagaaaccaaataataaaggacaaggaccacgctcattccgtggagaagaggtgaactccctctgctgactatttggaatggactgaatgaggaggtctctccagccagaaggagtattgaggtcatcaggcctcagaaaacaatgtacacataatctcgggctgtgaacaagagaaaggagggggggaaacatgaaagtcaatcttaacaatttttgcaatacctcttatttgcagaccattggatttatgttattgcactctcggtgtgatttatcgtatgtatctgataggttttatgaattgttttgagttgtaaactcctataccctttattaaaatggacctaattaagtgaaaaaaaaaaaaaaaaaaaaaaaaaaaaagtcgtatcga

SEQ ID NO: 1842 - DNA, 3266 bp, Homo sapiens
ggaccagctaagggaggcaagaagaagaaggatcctaatgctcccaaaaggccaccgtctggattcttcctgttctgttcagaattccgccccaagatcaaatccacaaaccccggcatctctattggagacgtggcaaaaaagctgggtgagatgtggaataatttaaatgacagtgaaaagcagccttacatcactaaggcggcaaagctgaaggagaagtatgagaaggatgttgctgactataagtcgaaaggaaagtttgatggtgcaaagggtcctgctaaagttgcccggaaaaaggtggaagaggaagatgaagaagaggaggaggaagaagaggaggaggaggaggaggaggatgaataaagaaactgtttatctgtctccttgtgaatacttagagtaggggagcgccgtaattgacacatctcttatttgagaagtgtctgttgccctcattaggtttaattacaaaatttgatcacgatcatattgtagtctctcaaagtgctctagaaattgtcagtggtttacatgaagtggccatgggtgtctggagcaccctgaaactgtatcaaagttgtacatatttccaaacatttttaaaatgaaaaggcactctcgtgttctcctcactctgtgcactttgctgttggtgtgacaaggcatttaaagatgtttctggcattttctttttatttgtaaggtggtggtaactatggttattggctagaaatcctgagttttcaactgtatatatctatagtttgtaaaaagaacaaaacaaccgagacaaacccttgatgctccttgctcggcgttgaggctgtggggaagatgccttttgggagaggctgtagctcagggcgtgcactgtgaggctggacctgttgactctgcagggggcatccatttagcttcaggttgtcttgtttctgtatatagtgacatagcattctgctgccatcttagctgtggacaaaggggggtcagctggcatgagaatatttttttttttaagtgcggtagtttttaaactgtttgtttttaaacaaactatagaactcttcattgtcagcaaagcaaagagtcactgcatcaatgaaagttcaagaacctcctgtacttaaacacgattcgcaacgttctgttattttttttgtatgtttagaatgctgaaatgtttttgaagttaaataaacagtattacatttttaaaactcttctctattataacagtcaatttctgactcacagcagtgaacaaacccccactccattgtatttggagactggcctccctataaatgtggtagcttcttttattactcagtggccagctcacttagggctgagatgaaggagagggctacttgaagctactgtgtgattttgtttgtgtctgagtggcattcagatgaagtctggaggagttaggagaacgacataggcaaggttcagcagccttccaaggtataggaaggtgggtgattaggactgaggctatctaggtttaacttttgtcccacctccaccccctattttgtggggccaaatgcattgctaaacagcaatttcagagtgtatggtgtgtcaaaaattaaggccttattgkttttctctttcacccctaccccccgtgctcctggcacatatcacattatttgtggtgcccaacatttggggtcttgagcctgctgctggtctcctggatgccagtgagggtatgtgggatggggtggtggggtaggggacggtatcctttttttgctcctacttggaaacaccaaacaccccaaggaagatgataggctccatcttgggccacctgagctatagggcaggctaatggaatcaaccatttctgagcactaaatgtatcatgaaaagttgaatggcctgctcataagtttagctcattcactggaaatgtagattgatgttcaatgttaaactggaaggagcttggtttgtgtgtcagtggttatattagtgggtagtgtaacattttatccaggttggggtgaggggagatggccacagtagcaagtggtgacactaaataccattttgaaggctgatgtgtatatacatcattactgtccgtagcaatgaaggatacagtactgtgttgtgggtgagtgttgctattgcccagcattaatatttgggtgtgtatgtttgaggctatgaaacacgcaggagtgtttttgtgctattaattttaagagaaagcagctttttcttaaaattcactgttgagaaacttgcatgtctggaggcggtgtcctctccgccctgtcgggtcctggatgagtacgagttatggtcacggtcacagcctgatctcttatgtgttcatagccattcgctctcccatcagaactgtttgtcctgaatgtgttcctctagttctagaaaatgaccactaatttaaaaaactcggttgtgaggtttgcccagaggcacttgttccagaatttcccctcctgcttcagccatgtccttgtcacttggcattctaagctaaagctttagcttcccaattcgtgatgtgctaggccaagattcgggagctgttgccagcctcgtcaaatatggaagagaaacaacctgcggtcaaaagggagtgatttgttaagtggtgcgcgtctatctcataactagatgtaccaaccagggaagggccaaggatggaaaggggtaacttttgtgcttccaaagtagctaagcagaagtgggggagcagtttagccagatgatctttgattaggcaaacattgagttttaaagaggctgtcaagttgaggccacttggtccattagctggggcagcaagatcactactcaacgttttcacactgtggcaagattgctcttctagtggaataatgccctagtttctctgagatgatgtaagtggcatgatgttacctaaggcttaggcttagcttgatttctgggcccactgtctgtgttcttaagatgccaacctgttgcttttttttttttttcccccatttaaaaggatagtacctactccctctaaccacctcaccccattcttgaatgacattttatcttcggaaagaacaaggctgtgatgtagtgactattgtctgtgtctcctgtgtgtgtctgttcttgtcacaaatgtatttggggacgttggatgcattcattttctgtaataaagtttcttaatcactcttcccaaaaarwaaaaaaaaaaaaaaaaaaaaaaaaaaaaaaaaaaaaaaaaa

SEQ ID NO: 1843 - DNA, 858 bp, Homo sapiens
  misc_feature (848)..(848): n equals a,t,g, or c
agattcatttttccatttaaatttcagtttcttggatcactgaatatgggaagggagagcttcactaattagacgcagcttcttaagaacttatattctctttgacatacatctcaacaaaaaaaaaatctaactgaagaactaagttgattttttatttgccataaaccaagcaaaagtaaatgcaataatttcgagatttatggtaaacaaatttgaggtatggataaatctttcacatattttttattgctctttagtaaagaaaggcacaagaaagaaaatatccagctctcttgtgttatctcagtgtggcgactgcagaaaattgacaatgcctgcctgtgtaaatgtatggcttactgtcaaagcttcattcttggctgcatgttgaaaatgtgattaaagttaatagaggagatgaaawaagtatttgagatttttttcaataacactgaacttctgccaactttctctatccgctactgtaggcttgacaggctcatcaatcatttgctggtacctggactaaaaagcgcacttgctgacaccaaggcatgttggaattttcttaattcagtggatggaaaaagaaatacttccaaaaatatcccacacatgaaaagggaggggagccttaaatgaaaattccctttgtaccgtagacactttttggaatgcgattaattgccaacacatcattgaacgaatgctgtaaccaagaaattaagattgtgtgtgtgaagggaatatattcttaactgtggctacccaacttgtatagcaaagatttctgatagtttgtgttcatctcatgtgaataataaatactttaccctaaaaaaaanaaaaaaaaag

SEQ ID NO: 1844 - DNA, 297 bp, Homo sapiens
  misc_feature (149)..(149): n equals a,t,g, or c
  misc_feature (297)..(297): n equals a,t,g, or c
ataaagacatgtgaccttcttgggtggtatactggcaatttttaaaatatctgatttattgtcagctcaccacatgatgtgatatttgttcatgttgaagtagtgtgaaagtaggcacattagtatgaaagtatttctattaaagctgnaattgctataataacactaaatcctgtgttggcatggaataactagatggttttaagaaagtactttctttggaagattgggagaaagtactttaatttaaacattaaaaagattggtaactgctattttcaacagcagtccccttan

SEQ ID NO: 1845 - DNA, 1258 bp, Homo sapiens
  misc_feature (1237)..(1237): n equals a,t,g, or c
acaagatggccaaaggtgctaaagagattgatatcgcagcgaccctggagcacttgagttcgcgctgacagccagtggctgaggaggtgaacgccatcctcaaggcccttccccagtgagcggcagctcaggggcctcaggggagcccccaccccacggatgttgtcagcccaagcagagtgattcaggggctccccgggggcagacacctgtgyaccccatgagtagtgcccacttgaggctggcactcccctgacctcacctttgcaaagttacagatgcaccccaacattgagatgtgtttttaatgttaaaatattgatttctacgttatgaaaacagatgcccccgtgaatgcttacctgtgagataaccacaaccaggaagaacaaatctgggcattgagcaagctatgagggtccccgggagcacacgaaccctgccaggcccccgctggctcctccaggcacgtcccggacctgtggggccccagagaggggacatttccctcctgggagagaaggagatcagggcaactcggagagggctgcgagcatttccctcccgggagagatcagggcgacctgcacgcactgcgtagagcctggaagggaagtgagaaaccagccgaccggccctgcccctcttcccgggatcacttaatgaaccacgtgttttgacatcatgtaaacctaagcacgtagagatgattcggatttgacaaaataacatttgagtatccgattcgccatcaccccctaccccagaaataggacaattcacttcattgaccaggatgatcacatggaaggcggcgcagaggcagctgtgtgggctgcagatttcctgtgtggggttcagcgtagaaaacgcacctccatcccgcccttcccacagcattcctccatcttagatagatggtactctccaaaggccctaccagagggaacacggcctactgagcggacagaatgatgccaaaatattgcttatgtctctacatggtattgtaatgaatatctgctttaatatagctatcatttcttttccaaaattacttctctctatctggaatttaattaatcgaaatgaatttatctgaatataggaagcatatgcctacttgtaatttctaactccttatgtttgaagagaaactccggtgtgagatatacaaatatatttaattgtgtcatattaaacttctgatttcacaaaaaaaaaaaaaaaaaaaaancccgggggggcccggaccatt

SEQ ID NO: 1846 - DNA, 761 bp, Homo sapiens
cagaatttacccctgacgcggcggcggccgacgggaagctgtgtgtgcttaggtcgtggtggccccggtggtggtgggctccgggcgggctcgcgtcatcctgcccccgctgcgatgcatccgcggcgcccggacggatttgatggcttgggctaccggggtggtgcccgggacgagcagggctttggcggcgccttccctgcaaggtccttcagcaccgggtcggacctgggccactgggtgacgactcccccagatatccccggcagccgcaacctgcactggggcgagaagagcccgccctacggcgtgcccaccacctccaccccgtacgaaggccccacggaggaacccttttccagtggcggcggcggcagtgtgcargggcagagcagtgaacagctgaatagatttgctggatttggtattggacttgcaagtctctttacagaaaatgtattggcacatccttgcattgttctacgccgccaatgtcaggttaattaccatgctcagcattaccatctcactccatttacagtcatcaatattatgtacagtttcaacaaaactcagggacctagagccctgtggaaaggaatgggaagtacatttattgtccagggagtcacacttggagcagaaggcataattagtgaatttacacctttgccaagggaggttttacataaatggagtcctaaacaaataggagaacaccttctactgaaatccctaaacttacgtggtggcaatgcctt

SEQ ID NO: 1847 - DNA, 925 bp, Homo sapiens
  misc_feature (113)..(114): n equals a,t,g, or c
  misc_feature (352)..(352): n equals a,t,g, or c
aagacattggaccagagtggagacgcgcccttgtccccgggagggggcggggcagcctcgggctgcggctcgaggccacgcccccgtgcccagggcggggttcggggaccggnntgccggcctcccttcccctatggactcctcgacccccctcctacccctcccctcgcgcgctcgcggacctcgctggagccggtgccttacacagcgaacgcggggaggggcagggccccctgacactgcagcactgagacacgagccccctcccccagcccgtcacccggggccggggcgaggggcccatttcttgtatctggctggactagatcctattctgtcccgcggcggcctncaaagcctcccaccccaccccacgcacattcctggtccggtcgggtctggcttggggtccccctttctctgtttccctcgtttgtctctatcccgccctcttgtcgtctctctgtagtgcctgtctttccctatttgcctctcctttctctctgtcctgtcgtctcttgtccctcggccctccctggttttgtctagtctccctgtctctcctgatttcttctctttactcattctcccgggcaggtcccactggaaggaccagactctcccaaataaatccccacacgaacaaaatccaaaaccaaatccccctcyctaccggagccgggaccctccgccgcagcagaattaaacttttttctgtgtctgaggccctgctgacctgtgtgtgtgtgtgtgtgtgtgtgttgggggagggtgacctagattgcagcataaggactctaagtgagactgaaggaagatgggaagatgactaactggggccggaggagactggcagacaggcttttatcctctgagagacttagaggtggggaataatcacaaaaataaaatgatcataatagct

SEQ ID NO: 1848 - DNA, 542 bp, Homo sapiens
  misc_feature (421)..(421): n equals a,t,g, or c
  misc_feature (473)..(473): n equals a,t,g, or c
  misc_feature (509)..(509): n equals a,t,g, or c
ggcacgaggttgaaaataacacattaggaagtccagctgcctcagagcttttagagcatctcaaacctacttattggttttctgcccaccttcatgtgaagtttgccgccttgatgcagcatcaggcaaaggataaaggacagacagccagagcaaccaaatttttagccttggacaaatgcttaccacatagagattttcttcagatattagagatagaacatgaccccagtgctcctgattacttggaatatgatattgaatggctcactattctcagggctacggatgatcttattaatgtgactgggcgcctgtggaatatgccagaaaataatggcctgcatgcaaggtgggattatagtgcaacagaagaaggtatgaaagaagtattggaaaaattgaatcatgatctcaaggntccatgtaactttagtgtaacagctgcttgttatgatcctagcaagccacanacacaaatgcagctgattcataggatcaatcctcanacaactgaattttgtgcccaacttggcatcata

SEQ ID NO: 1849 - DNA, 442 bp, Homo sapiens
tgcctataaaattacactgcctcgaattatgaaattcagggatcttgtacataattctaagtttgggacagaaatttacaagcgatttctcatatatacatacatttatatatgtacatgttacatatatttagatgtattctcatatacatatgaaaatatttatgatgaatagaattataagatatgtatgtatcttgcactgaatcataatttgaaatatttcatgaattcatttacttctattgactcccaaaattctaackgcaagctagcttcagaacctgtgagaaccccaccccacccaagcagctgcctagatttgtctactgctatcattttgtgtaaagcagttgttctaacttgaatgagtctagaattcatcattaagattgtgatatttatagagcatccaatgtggagatcatgatactttaaatat

SEQ ID NO: 1850 - DNA, 515 bp, Homo sapiens
  misc_feature (18)..(19): n equals a,t,g, or c
  misc_feature (30)..(30): n equals a,t,g, or c
ttaccctcactaaagggnncaaaagctggngctccaccgcggtgacgaccgctctagaactagtggatcccccgggctgcaggaattcggcacgagcccagctcacccgctgtcagctggggtcctgctctggtgggaggaagaggctcagacgcttccctgccctctcgcctcaaccamctcgargcagcggctcccaggatgtgcamtttgacgactaaagctgagccggcgccgcacgaccttgggcgggtggtcggcctctgccctgagcaggaagtagaaagtctcagcagacccttcctgagggccgagcaacagtgtagtggcgtattccacatagcaaacagttttctgaagctcagagggacaccttgtattgctggatgataaaaacaggagcaaagtgatgaagtgctgacaaggcaacaatagaacatgagagattcactgctgtgtaggaagagatcttcggtgaccatgtagcctgaagctctcattttgtcaatcgaggg

SEQ ID NO: 1851 - DNA, 1027 bp, Homo sapiens
  misc_feature (1022)..(1022): n equals a,t,g, or c
ccacgcgtccgagccttcgccggcgtcccgacccgaggccggacccgaggccagtcccgccgctgcgcagccgaagccagtgcggggcctgagagggacgcgcgccccggggcccccgccgcgggcaccatgggcgctgcccactccgcgtctgaggaggtgcgggagctcgagggcaagaccggcttctcatcggatcagatcgagcagctccatcggagatttaagcagctgagtggagatcagcctaccattcgcaaggagaacttcaacaatgtcccggacctggagctcaaccccatccgatccaaaattgttcgtgccttcttcgacaacaggaacctgcgcaagggacccagtggcctggctgatgagatcaatttcgaggacttcctgaccatcatgtcctacttccggcccatcgacaccaccatggacgaggaacaggtggagctgtcccggaaggagaagctgagatttctgttccacatgtacgactcggacagcgacggccgcatcactctggaagaatatcgaaatgtggtcgaggagctgctgtcgggaaaccctcacatcgagaaggagtccgctcgctccatcgccgacggggccatgatggaggcggccagcgtgtgcatggggcagatggagcctgatcaggtgtacgaggggatcaccttcgaggacttcctgaagatctggcaggggatcgacattgagaccaagatgcacgtccgcttccttaacatggaaaccatggccctctgccactgacccaccgccacctccgcggagaaactgcactttgcaatggggccgcctccccgcgtagctggagcagcccaggcccggcggacagcctcttcctgcagcgccggtacatagccaaggctcgtctgcgcaccttgtgtcttgtagggtatggtatgtgggacttcgctgtttttatctccaataaaaaaaaaaaaaaggtttgttaawwaaaaaaaaaaaaaaaaaaaaaaaaaaaaaaaaaaaaaaanggggg

SEQ ID NO: 1852 - DNA, 444 bp, Homo sapiens
  misc_feature (339)..(339): n equals a,t,g, or c
atcttgtggrakgctttacagacaagttagccaagacacagataagttaggttacgggccaaagtaatacagtgattgagcagtggagctgaaggagatccaggcagcttgactggcagagcctttttcttcaccacgacatgggcagaggttagagagttttgccacactggcggtcgagtgacacatcaaggagggatgtggttgcagcaggctaaaggccataggaagggaggagctggagactccagggtcgcagccaccttggtgggctggggtggggcaggaggccgcagcaacagagacggggtgggattgaagaagtctttttttttttcnttttttaaacaaaagaaatagaacttgtctatatgctggggtktgggaaaggagcaagtagatggagagaggctgaagatacttgcttctggggaggagctggag

SEQ ID NO: 1853 - DNA, 550 bp, Homo sapiens
  misc_feature (516)..(516): n equals a,t,g, or c
  misc_feature (523)..(523): n equals a,t,g, or c
gcctatttgaatggaatcctgctctttggacatatgctgaagatatttcttgaaaatggcgaaaatacttaccacccccaaatttgctcatgctttcaggaatctcacttttgaagggtatgacggtccagtgaccttggatgactggggggatgttgacagtaccatggtgcttctgtatacctctgtggacaccaagaaatacaaggttcttttgacctatgatacccacgtaaataagacctatcctgtggatatgagccccacattcacttggaagaactctaaacttcctaatgatattacaggccggggccctcagatcctgatgattgcagtcttcaccctcactggagctgtggtgctgtcctgtcgtcgctctcctgatgctcagaaaatatagaaaagattatgaacttcgtcagaaaaaatggtcccacattcctcctgaaaatatctttcctctggagaccaatgagaccaatcatgtttagcctccagatcgatgatgacaanagacganattccatccagaagactacaacagtgc

SEQ ID NO: 1854 - DNA, 326 bp, Homo sapiens
caattgcaggtgtccatgcctcccacacatggggacctagtgggttttgacagcgtggtgtccagtcctagccccctcagtgcttgctgttcacacttaagcaagtraaggcctgaaggtgcccagctgtgccctcaggggaaacttaagtcacccgccctgtcagcacttggcccttgtcgggcagtgagagtggagctgcccccgcagaccctcaggagccatgcagttcacagcagtagctggatytccctgaggacatttgtccttgcatatcttaatgatttgtccacagaaacaccgggttgtcttcctctgcccctcct

SEQ ID NO: 1855 - DNA, 577 bp, Homo sapiens
  misc_feature (453)..(453): n equals a,t,g, or c
  misc_feature (532)..(532): n equals a,t,g, or c
  misc_feature (561)..(561): n equals a,t,g, or c
  misc_feature (570)..(570): n equals a,t,g, or c
cgaaattagaaaaggtgatgaatttggaggaaggggaattggctgcacctgtttctgatatgttcagaagcttaatgaatataatattctaatttaaataaactgtttgattgagaaaagaggtagccacattattgtttagaaatgatagactgttattgacttttggtgtagctgggaagctggagaagaggtagtatgtagtttgcttttgatttcaaaatgccacctcttctgattccagatacaattatcttttggcacatttcctaattagcattaggttcttataaatgaaattttattttacacacagtttttaatggaacttacttttgaacatcacgaaagttatctctagcccttttcatgccttargtgctgatragcattccgtttatcataagctatgtcattagtctcagcttcctagtgggaagtaaaactcatagncaattctctcagtcatccatggatatatagctaggtgggggccagatgatttgaaaattaacatattgttatttagggngccttggttttcattttaaggtggtttcnggcatcctngtttgaa

SEQ ID NO: 1856 - DNA, 732 bp, Homo sapiens
  misc_feature (190)..(190): n equals a,t,g, or c
  misc_feature (194)..(194): n equals a,t,g, or c
cagcgatttctgaactgaacgcaggcaagggacgcgagagacaaattttacaggaaaccattcacaactttcactcttcctttgagagcagtgccagcaacaccagggcccctggcaacagcccctgtgcgtgatcctccttcccgcagccaccarcccatggttgggtgggtgaggccagaagaaactncctncggcaagaggtagcagccgctcaggtggytctsctggcatcggagcccacagaagtraggagtggccgatggacctgccctccaaatgtgcctgactctgggtcttgctgtcactggatttcctggcatggcagacagaaagaaagatagtttgaccaagtcgtagaagctgatccagcgggtaaaaagggggcagggaactcgtcccttttattcttgcctcagagctgcctgaagacatgggccaggccggaggctggacaactttggataacgctgacctgtacttccaagtaaatgcctcctgaagagcccgggacccttcctgggagaattctgcagccagaatgaaggtgccatcagcaggaggcactgtgaagcaccatcctgtcgctgtccttgtccattcctagcaagttaatcgtgtcttgttaaccagcagttcctgttcaacgtgtaaagagacctgatgttttccctaataaagctgataacagattttgcaggaaaaaaaaaaaaaaaaaaaaaaaaaaaagtc

SEQ ID NO: 1857 - DNA, 316 bp, Homo sapiens
  misc_feature (293)..(293): n equals a,t,g, or c
  misc_feature (315)..(315): n equals a,t,g, or c
gcgggctctgagtgctcttkcccgtccggccccagccgcggcccgggaatctacgtcacccgaaaagcgactataaacgccggcgcctccgtccccagccgcggctcgggaatccacccgaagagtggctataaacgtccgcgcctccattgcgctctcctcttcacttaggacactggtcctcccacgcctgacaccgacgtcgccaggaccgcggggttgggggaacttggctgtcccacgtctttcaaataaagctgttttgtctaactcaaaaaaaaaaaaaaaaaaancgagtttttttttttttttttna

SEQ ID NO: 1858 - DNA, 717 bp, Homo sapiens
  misc_feature (13)..(13): n equals a,t,g, or c
  misc_feature (18)..(18): n equals a,t,g, or c
  misc_feature (25)..(25): n equals a,t,g, or c
  misc_feature (572)..(572): n equals a,t,g, or c
cgagcagtagcgngaagncagacgnacgtatagggaaagctggtacgcctgcaggtaccggtccggaattcccgggtcgacccacgcgtccgggagaagtgctcttttctacttgtggggtctcccattggaaacataatcctatagtcccagaaggattcagtccccagtggctttcccatccaaagagaaagagtttgagtttcttaactctgctgttctgccacttactcccactagacaaccagggacaaggtgcaacatggaagtgtttgacttaagtaggagcagaggagctgcatctaatctcatcatacctggaacttgacacacttaagcaaatgccttcccatccctacctgccagatgcccccaactcaatgaagttggatgtctcaccagcttgataccctttgaattttcagtcagacattctggagttctagcatcctgtacctaggaccttcctctgtgtcactcttggcctcctaaactctaagaaaataactatattctggagcttgggcagtgtgttttgcataatccagcaatctcctcatgacatgcatgtnttgatagtcctgaaacattcattgagagggtaaatgcagttgacctagaatgaccaataccaaacagaattttaagaacaggtggccaactcctatggagcttactcacatattactattcttttaagaacggaaaagtaaaatt

SEQ ID NO: 1859 - DNA, 363 bp, Homo sapiens
  misc_feature (348)..(348): n equals a,t,g, or c
gggacgaggaagccaaggacgaaaaggcagagcccaacagggacaaatcagttgggcctctcccccaggcggacccggaggtttcagacattgaatccaggattgcagccctgagggccgcagggctcacggtgaagccctcgggaaagccccggaggaagtcaaacctcccggctctttatgaggggactctgagcctctgctctgaggatctgaaacacacacaccctgacagtgtaaaatccaaaaggagccgcctgaatcatgttgcctcatgtggaaatcttagtccgccgccacgtgaagatggatgtgactagaacggagggcgccggaagctyacatyanargarctgctcacgt

SEQ ID NO: 1860 - DNA, 536 bp, Homo sapiens
  misc_feature (507)..(507): n equals a,t,g, or c
gtaaaaatgagacgaccacctctcggattaaaaaaaaaaagtgccagagttctagggttctaagtgatgtccaggaaggaggaggaataatatttatggagcatatattatggaacacagtgagtatagtacctgcctttaaatgaatactgttggttttttaggacagttgcttttttttcttttttcttcagctgtgtgcagttgattaacttgtacagagcctatcacacaatagatgtttaagaaatattaagtgaatgaatgaggcagcattgctaatttttgtatagtgagacagtatctcacagtccaggctggagttcagtggcattaacataactcactgcagccttgaacacctgagctcaaacgatcctttcaccttatcctccagagtagctgggactacagtcgcgtgtcaacatgcctggctaattttagttttctaatttttttagagttgggatctcactatgttgcttagactggtcttgaactcctggnctcatgccatcctcttgcctcagctggta

SEQ ID NO: 1861 - DNA, 536 bp, Homo sapiens
  misc_feature (457)..(457): n equals a,t,g, or c
  misc_feature (466)..(466): n equals a,t,g, or c
  misc_feature (514)..(514): n equals a,t,g, or c
gcttgacctgcggcagtgcagcccttgggacttccctcgccttccacctcctgctcgtctgcttcacaagctatcgctatggtgttcgtgcgcaggccgtggcccgccttgaccacagtgcttctggccctgctcgtctgcctaggggcgctggtcgacgcctaccccatcaaacccgaggctcccggcgaagacgcctcgccggaggagctgaaccgctactacgcctccctgcgccactacctcaacctggtcacccggcagcggtatgggaaaagagacggcccggacacgcttctttccaaaacgttcttccccgacggcgaggaccgccccgtcagtcgcggtaaaagcgcccgttaccacacatcctgcatccgagagcgcggcctggccctaccctggcaacatcatttaacgacgtctcccaggctcgcctccccagatccaattcttnccttcgttncgcagtcggagggccaaactgtggtgaggaccctgaggctctgggagnctgccaacagccagtcatttga

SEQ ID NO: 1862 - DNA, 2005 bp, Homo sapiens
  misc_feature (60)..(60): n equals a,t,g, or c
  misc_feature (903)..(903): n equals a,t,g, or c
ctatcagacgatgaattgaaacacctcattctcagggcagcagatggatttttgtttgtngtaggatgtgaccgagggaagatactctttgtctcagagtctgtcttcaagatcctcaactacagccagaatgatctgattggtcagagtttgtttgactacctgcatcctaaagatattgccaaagtcaaggagcagctctcctcctctgacaccgcaccccgggagcggctcatagatgcaaaaagatgaagtgtaacaggccttcagtaaargttgaagacaaggacttccccyctwcctgctcaaagaaaaaagatcgaaaaagcttctgcmcawtccacagcacaggctatttgaaaagctggccmcccacaaagtggggctggatgaagacmacgaaccagacaatgaggggtgtaacctcagctgcctcgtcgcaattggacgactgcattctcatgtagttccacaaccagtgaacggggaaatcagggtgaaatctatggaatatgtttctcggcacgcgatagatggaaagtttgtttttgtagaccagagggcaacagctattttggcatatttaccacaagaacttctaggcacatcgtgttatgaatattttcaccaagatgacataggacatcttgcagaatgtcataggcaagttttacagacgagagaaaaaattacaactaattgctataaatttaaaatcaaagatggttcttttatcacactacggagtcgatggttcagtttcatgaacccttggaccaaggaagtagaatatattgtctcaactaacactgttgttttgtccagagtggacaccggacaccttggccaagttgaaaggtgcacagttctgaggcaggcctgacttcacgtttccttattgcntgggatgttcacagagccaacgtcctggaaggcggggacccaaccttcccacagctcacagcatccccccacagcatggacagcatgctgccctctggagaaggtggcccaaagaggacccaccccactgttccagggattccagggggaacccgggctggggcaggaaaaataggccgaatgattgctgaggaaatcatggaaatccacaggataagagggtcatcgccttctagctgtggctccagcccattgaacatcacgagtacgcctccccctgatgcctcttctccaggaggcaagaagattttaaatggagggactccagacattccttccagtggcctactatcaggccaggctcaggagaacccaggttatccatattctgatagttcttctattcttggtgagaacccccacataggtatagacatgattgacaacgaccaaggatcaagtagtcccagtaatgatgaggcagcaatggctgtcatcatgagcctcttggaagcagatgctggactgggtggccctgttgactttagtgacttgccatggccgctgtaaacactacatgttgctttggcaacagctatagtatcaaagtgcattactggtggagttttacagtctgtgaagcttactggataaggagagaatagcttttatgtactgacttcataaaagccatctcagagccattgatacaagtcaatcttactatatgtaacttcagacaaagtggaactaagcctgctccagtgtttcctcatcattgattattgggctagctgtggatagcttgcattaattgtatattttggattctgtttgtgttgaattttttaatcattgtgcacagaagcatcattggtagcttttatatgcaaatggtcatttcagatgtatggtgtttttacactacaaagaagtcccccatgtggatatttcttatactaattgtatcataaagccgtttattcttccttgtaagaatcctttactataaatatgggttaaagtataatgtactagacagttaaatatttttaataaatgtttcccttgttctataaaaaaaaaaaaaaaaaaaaaaaaa

SEQ ID NO: 1863 - DNA, 566 bp, Homo sapiens
gtggacgcgtgggcggacgcgtgggacaggatgggagctttgatggtggaggcggaaagaaagatcccaggcaggagagacaattgaagcaaaggccttgagttgagaattggccgtgccctcatcctttcctgtttcctttttgtttgggcaatgaaaagagcatggactttggggttggatgtgcctgcattcaggtcttgacactgctgtattaccgctcccaatttcttcatgaaacaagattaacagtatcacttgtatcagttagggtttgttggttatgagcaacctaaacccactctggctaacttaaacataaaaggaatctattgggatctattgacctgccaagcctcagaaaggacaggaatcagggaagcttcagagacctaagaggcagcagctgatagtatcttcagagtgctgctgtcagaataaacctacaagggckgttttctctccttgtcccaaccagatcaaggttcagattcctgagaaagaacctccgtggttaggaagaacacaagcacattgattgacagcactaggggaggtgttgttcc

SEQ ID NO: 1864 - DNA, 250 bp, Homo sapiens
  misc_feature (3)..(3): n equals a,t,g, or c
  misc_feature (246)..(246): n equals a,t,g, or c
gantaccgtttctcgagtccgggcattgtacaagcgcgtcttgcagctgcaccgtgttctgcccccggacctcaaatccctgggcgaccagtacgtgaaagacgaatttaggagacataagaccgttggttctgacgaggcacagcgtttcttgcaagaatgggagggttttaagtgcctaaagtcagggagagaaaaggagacagtatttaaggaatttaagatcttgaagtggaaaaggcctanaaga

SEQ ID NO: 1865 - DNA, 1159 bp, Homo sapiens
  misc_feature (1143)..(1143): n equals a,t,g, or c
ggctaaataagctatcgggcccataccccgaaaatgttggttatacccttcccgtactaattaatcccctggcccaacccgtcatctactctaccatctttgcaggcacactcatcacagcgctaagctcgcactgattttttacctgagtaggcctagaaataaacatgctagcttttattccagttctaaccaaaaaaataaaccctcgttccacagaagctgccatcaagtatttcctcacgcaagcaaccgcatccataatccttctaatagctatcctcttcaacaatatactctccggacaatgaaccataaccaatactaccaatcaatactcatcattaataatcataatggctatagcaataaaactaggaatagccccctttcacttctgagtcccagaggttacccaaggcacccctctgacatccggcctgcttcttctcacatgacaaaaactagcccccatctcaatcatataccaaatctctccctcactaaacgtaagccttctcctcactctctcaatcttatccatcatagcaggcagttgaggtggattaaaccaaacccagctacgcaaaatcttagcatactcctcaattacccacataggatgaataatagcagttctaccgtacaaccctaacataaccattcttaatttaactatttatattatcctaactactaccgcattcctactactcaacttaaactccagcaccacgaccctactactatctcgcacctgaaacaagctaacatgactaacacccttaattccatccaccctcctctccctaggaggcctgcccccgctaaccggctttttgcccaaatgggccattatcgaagaattcacaaaaaacaatagcctcatcatccccaccatcatagccaccatcaccctccttaacctctacttctacctacgcctaatctactccacctcaatcacactactccccatatctaacaacgtaaaaataaaatgacagtttgaacatacaaaacccaccccattcctccccacactcatcgcccttaccacgctactcctacctatctccccttttatactaataatcttataaaaaaaaaaaaaaaaaactcsagggggggcccggtacccanttcgccctatagtgag

SEQ ID NO: 1866 - DNA, 936 bp, Homo sapiens
ggcacaagaccaaaactccaaatgcatcggcactgacctcaacaggaattttaatgcttcatggaactccattcctaacaccaatgacccatgtgcagataactatcggggctctgcaccagagtccgagaragagacgaaakctgtcactaatttcattagaagccacctgaatgaaatcaaggtttacatcaccttccattcctactcccagatgctattgtttccctatggatatacatcaaaactgccacctaaccatgaggacttggccaaagttgcaaagattggcactgatgttctatcaactcgatatgaaacccgctacatctatggcccaatagaatcaacaatttacccgatatcaggttcttctttagactgggcttatgacctgggcatcaaacacacatttgcctttgagctccgagataaaggcaaatttggttttctccttccagaatcccggataaagccaacgtgcagagagaccatgctagctgtcaaatttattgccaagtatatcctcaagcatacttcctaaagaactgccctctgtttggaataagccaattaatccttttttgtgcctttcatcagaaagtcaatcttcagttatccccaaatgcagcttctatttcacctgaatccttctcttgctcatttaagtcccatgttactgctgtttgcttttacttactttcagtagcaccataacgaagtagctttaagtgaaaccttttaactacctttctttgctccaagtgaagtttggacccagcagaaagcattattttgaaaggtgatatacagtggggcacagaaaacaaatgaaaaccytcagtttctcacagattttcaccatgtggcttcatcaatttatgtgctaatacaataaaataaaatgcacttaatgctttaaaaaaaaaaaaaaaa

SEQ ID NO: 1867 - DNA, 534 bp, Homo sapiens
gcagtgctagatattgttwtaaattatttycattttaaacaagatgccttctaagctattgagcttattaaaaataattttacatgtttacttagttggagcaaaaataagtctattttaacaaatagctttgtttttgcatgctaatgtcagaaaggcatacgatgcacattatgctgttttaaaggttttaccacccttgtaaaaactataatcttaaatggttttatttgctgttacacaaacaacactacataaaacattttttcctaaatggtacaaatttataaactatcatttttcacttacggtatttgtaaatactacactacaaaaatcagctttctgagaaagaaataatcatttatttatgatattgaaaatttctacagtaaacactcaaaaccaagcaaaaaacatttgtaagatacacggtatctatttggagcaacggtttttgtaactaatgtgtttcattttttaaataaagacaactaaaaataaaaaaaaaaaaaaaaaaaaaaaaaaaaaaaa

SEQ ID NO: 1868 - DNA, 1730 bp, Homo sapiens
gttctacctcggtagcagcaccgcttctgatttccttgcagtggagatgcggcgagggagagtggccttcctgtgggacctgggctccgggtccacacgcttggagtttccagactttcccattgatgacaacagatggcacagtatccatgtagccagatttggaaacattggttcactgagtgtaaaggaaatgagctcaaatcaaaagtcaccaacaaaaacaagtaaatcccctgggacagctaatgttctggatgtaaacaattcaacactcatgtttgttggaggtcttggaggacaaatcaagaaatctcctgctgtgaaggttactcattttaaaggctgcttgggggaggccttcctgaatggaaaatccataggcctatggaactatattgaaagggaaggcaagtgccgtgggtgcttcggaagctcccagaatgaagacccttccttccattttgacgggagtgggtactctgtcgtggagaagtcacttccggctaccgtgacccagataatcatgctttttaataccttttcacctaatggacttctttctctacctgggttcatacggcacaaaagactttttatccatcgagctgtttcgtggcagagtgaaggttatgactgacctgggttcaggacccattacccttttgacagacagacgttataacaatggaacctggtacaaaattgccttccagcgaaaccggaagcaaggagtgctagcagttatcgatgcctataacaccagtaataaagaaaccaagcagggcgagactccgggagcatcttctgacctcaaccgcctagacaaggacccgatttatgtgggtggattaccaaggtcaagagttgtaaggagaggtgtcaccaccaaaagctttgtgggctgcatcaagaacctggaaatatccagatcaacctttgacttactcagaaattcctatggagtgagaaaaggctgtttactggagcccatccggagtgttagcttcctgaaaggcggctacattgaattgccacccaaatctttgtcaccagaatcagaatggctggtaacatttgccaccacgaacagcagtggcatcatcctggctgccctcggcgggggatgtggagaagcggggtgatcgtgaggaagcacacgtgcccttsttttccgtcatgctgatcggaggcaacattgaggtacatgtcaatcctgrggrtgggacaggcytgagaawagctctcctgcacgctcccacgggtacctgcagtgatggacaagcgcattccatctccttggtcaggaatcggaggtacttgcacgcggccaggcagtgtgtaatgaaggtgtggtgagctcagagggaatgtgggaggaaccttgcggtggtgccctggrcggctagatgactggggtcatcggcatccagacgattctagaaccttgctaggattctttcctgggaaccagtttcatctgctttgtaataagatacttgtagaatttttataattaaacaactttagctctgccctttactggggcccagcataaattgtctttacattggattgattctgtggcaaatagtagtacactattagtaaatagtattatatcaatagtaaatagcattatatcaacattcctgtatatttccctccaaaatatagactgaatgctttaaaagcacactgggcattttcatcataggtaaagaggttaa

SEQ ID NO: 1869 - DNA, 890 bp, Homo sapiens
  misc_feature (495)..(495): n equals a,t,g, or c
  misc_feature (514)..(514): n equals a,t,g, or c
  misc_feature (883)..(883): n equals a,t,g, or c
ctcagagtagctggatttttctaaagcaattgcagaacacctgctttttctttgtttcctctagaaaggaccaaccacrccgagctcagttatggcacacacagtgggacctagacaaagggagagggtgaccgacatcccaactaggtaaacacagaggaggttccacatggacttatctgggtggctgttttgaaaacgagaaacagtcaagagtccctggccccacagacccacctccccaactcagcactgtctgtctgtgcagcaggtgcaaggacgtgttgaactagctctctgcagcctccttggaggatgtgatcctatgggaggggtaggagtattcagtccttgacatytcccaaatgtgtgattccgggatgccaaaggcctttggccaggtaatgcagtgtytacaggytgaggttgacatgcatccccaccctctgagaaaaagatcctcagacaatccatgtgcttctcttgtccttcatnccaccggagtctgtctcanacccaacyagatttcagtggagtgaagttcaggaggcatggagctgacaaccatgaggcctcggcagccaccgccaccaccgccgccgccaccaccgtagcagcagcagcagcagcagcagcagcaagagtaactctgacttaggaatagagacagccagagagaaatgtgatcaatgaaggagacatctggagtgtgcgtgcttcttcagagggacgggtgatgggcagattggaaaaagcaccgcagatgggaaccttaatctttcttttctaaaattgatgctatgaaaatttgcgttttctgtaacttgtaaaaactaaaagttgcttgtctactgaaaaaaaaaaaaaaaaaaaaaaaaaaaanaaaaaaa

SEQ ID NO: 1870 - DNA, 558 bp, Homo sapiens
  misc_feature (22)..(23): n equals a,t,g, or c
  misc_feature (53)..(53): n equals a,t,g, or c
  misc_feature (72)..(72): n equals a,t,g, or c
aaattaaccctcactaaagggnncaaaagctgggagctccaccgcggtgacgnccgctctagaactagtggntcccccgggctgcaggaattcggcacgagaacaactgaaggtgaagaaatcactgagtcaagtagcactgaagaaatggaggtcagaagtgtggtggctgatactgaccaaaaggctttaggaagtgaagttcaggatgcttctaaagtcactactcagatagataaagagaaaaaagaaattccagtgtcaattaaaaaagagcctgaagttactgtagtttcacagcccactgaacctcagcctgttytaatacccagtattaatatcaactctgacagtggagaaaataaagaagaaataggttctttatcaaaaactgaaactattctgccaccagaatctgagaatccaaaggaaaatgataatgattcaggcactggttccactgctgatactagcagtattgacttgaatttatccatctctagctttctaagtaaaactaaagacagtggatcgatatctttacaagaaacaaaaaaa

SEQ ID NO: 1871 - DNA, 843 bp, Homo sapiens
  misc_feature (3)..(3): n equals a,t,g, or c
  misc_feature (7)..(7): n equals a,t,g, or c
  misc_feature (28)..(28): n equals a,t,g, or c
  misc_feature (49)..(49): n equals a,t,g, or c
  misc_feature (682)..(682): n equals a,t,g, or c
  misc_feature (688)..(688): n equals a,t,g, or c
  misc_feature (788)..(788): n equals a,t,g, or c
  misc_feature (807)..(807): n equals a,t,g, or c
acnaacncttactaaagggaacaaaagntggaagctccaccgcggtgtngaccgctctagaactagtggatcccccgggctgcaggaattcggcacgagcagggtcagggccagagccagaatccgaatcagaatcagagtcagaacccaaatccgaatgccaatcagaacctgactcagaatctgatgcagaatctgactcagagtttgagccagaaggagaaccgggaaagcccgaagcagaactcaggcaaggagcagaatgataacaccagcaatggcaccaacgactacataggcagtgtagagaaatggcgttaaatggctcaaaaaggcctgtacatacttctcccaaagcgccactgaaaagatggcatagcttaaaagatgaaagtgtccaaacacatcctgcttccttcattggggaagttttaaaaaaagtttagatgttgcctttacagttgcctttcaattcagtgttatactgtgtgtaggtaaaacaaatctcaatatggaattaaattgtctttttggggttggactaaatatgaaatccgaaagccaaaccagactcaccagaaattgctgtttagatattttaagaagttcttaaattagttatggagacaaagtgaaaacataaaatgtgaccatttaacttatggctaagaaatggactttnaaattnattccatggatacactgttaaaacccaatcttggaatcaaatattttttcccagggggtggaggaataagtattaaacattaagggcaacttaaaatggnaacataaaaccttttattntccttctggattttaaacaagggatctattttaaat

SEQ ID NO: 1872 - DNA, 264 bp, Homo sapiens
  misc_feature (121)..(121): n equals a,t,g, or c
  misc_feature (240)..(240): n equals a,t,g, or c
gggtgaagggcatttgggcaagccagggyggctgcggaggcgatctccctgacccagggccggagttgcccggagcctgccaccgctctcagccagcccgcatccttctctgttcttcccntcccccgtctgccacggcgcgggtatccgcagccacagcccggcgccggtgaggcggcraagggggaggggaggaatcaagggatgagcgccggaagggcgtmgggggccctgagccgnactaggacggcccttggggccgga

SEQ ID NO: 1873 - DNA, 1882 bp, Homo sapiens
  misc_feature (1)..(1): n equals a,t,g, or c
ngcggcagatcttccagtccctgccgcccttcatggacatcctcctgctgctgctgttcttcatgatcatctttgccatcctcggtttctacttgttctcccctaacccttcagacccctacttcagcaccctggagaacagcatcgtcagtctgtttgtccttctgaccacagccaatttcccagatgtgatgatgccctcctactcccggaacccctggtcctgcgtcttcttcatcgtgtacctctccatcgagctgtatttcatcatgaacctgcttctggctgtggtgttcgacaccttcaatgacattgagaaacgcaagttcaagtctttgctactgcacaagcgaaccgctatccagcatgcctaccgcctgctcatcagccagaggaggcctgccggcatctcctacaggcagtttgaaggcctcatgcgcttctacaagccccggatgagtgccagggagcgctatcttaccttcaaggccctgaatcagaacaacacacccctgctcagcctaaaggacttttacgatatctacgaagttgctgctttgaagtggaaggccaagaaaaacagagagcactggtttgatgagcttcccaggacggcgctcctcatcttcaaaggtattaatatccttgtgaagtccaaggccttccagtatttcatgtacttggtggtggcagtcaacggggtctggatcctcgtggagacatttatgctgaaaggtgggaacttcttctccaagcacgtgccctggagttacctcgtctttctaactatctatggggtggagctgttcctgaaggttgccggcctgggccctgtggagtacttgtcttccggatggaacttgtttgacttctccgtgacagtgttcgccttcctgggactgctggcgctggccctcaacatggagcccttctatttcatcgtggtcctgcgccccctccagctgctgaggttgtttaagttgaaggagcgctaccgcaacgtgctggacaccatgttcgagctgctgccccggatggccagcctgggcctcaccctgctcatcttttactactccttcgccatcgtgggcatggagttcttctgcgggatcgtcttccccaactgctgcaacacgagtacagtggcagatgcctaccgctggcgcaaccacaccgtgggcaacaggaccgtggtggaggaaggctactattatctcaataattttgacaacatcctcaacagctttgtgaccctgtttgagctcacagttgtcaacaactggtacatcatcatggaaggcgtcacctctcagacctcccactggagccgcctctacttcatgaccttttacattgtgaccatggtggtgatgacgatcattgtcgcctttatcctcgaggccttcgtcttccgaatgaactacagccgcaagaaccaggactcggaagttgatggtggcatcacccttgagaaggaaatctccaaagaagagctggttgccgtcctggagctctaccgggaggcacggggggcctcctcggatgtcaccaggctgctggagaccctctcccagatggagagataccagcaacattccatggtgtttctgggacggcgatcaaggaccaagagcgacctgagcctgaagatgtaccaggaggagatccaggagtggtatgaggagcatgccagggagcaagagcagcagcgacaactcagcagcagtgcagcccccgccgcccagcagcccccaggcagccgccagcgctcccagaccgttacctagcccagcgcccgaaagccgtctcttctatgcaataacacaatagtattactctaaaaaaaaaaaaaaaaaaaaaaaaaaaaaaaaaaagggggggg

SEQ ID NO: 1874 - DNA, 1926 bp, Homo sapiens
gcttggcagaggcaaccaagaaagaaattacattctttcaaacacatccatatttcagagttctcctggaggaggggtcagccacggttccccgactggcagaaagacttaccactgaactcatcatgcatatccaaaaatcgctcccgttgttagaaggacaaataagggagagccaccagaaggcgaccgaggagctgcggcgttgcggggctgacatccccagccaggaggccgacaagatgttctttctaattgagaaaatcaagatgtttaatcaggacatcgaaaagttagtagaaggagaagaagttgtaagggagaatgagacccgtttatacaacaaaatcagagaggattttaaaaactgggtaggcatacttgcaactaatacccaaaaagttaaaaatattatccacgaagaagttgaaaaatatgaaaagcagtatcgaggcaaggagcttctgggatttgtcaactacaagacatttgagatcatcgtgcatcagtacatycagcagctggtggagcccgcccttagcatgctccagaaagccatggaaattatccagcaagctttcattaacgtggccaaaaaacattttggcgaatttttcaaccttaaccaaactgttcagagcacgattgaagacataaaagtgaaacacacagcaaaggcagaaaacatgatccaacttcagttcagaatggagcagatggttttttgtcaagatcagatttacagtgttgttctgaagaaagtccgagaagagatttttaaccctctggggacgccttcacagaatatgaagttgaactctcattttcccagtaatgagtcttcggtttcctcctttactgaaataggcatccacctgaatgcctacttcttggaaaccagcaaacgtctcgccaaccagatcccatttataattcagtattttatgctccgagagaatggtgactccttgcagaaagccatgatgcagatactacaggaaaaaaatcgctattcctggctgcttcaagagcagagtgagaccgctaccaagagaagaatccttaaggagagaatttaccggctcactcaggcgcgacacgcactctgtcaattctccagcaaagagatccactgaagggcggcgatgcctgtggttgttttcttgtgcgtactcattcattctaaggggagtcggtgcaggatgccgcttctgctttggggccaaactcttctgtcactatcagtgtccatctctactgtactccctcagcatcagagcatgcatcaggggtccacacaggctcagctctctccaccacccagctcttccctgaccttcacgaagggatggctctccagtccttgggtcccgtagcacacagttacagtgtcctaagatactgctatcattcttcgctaatttgtatttgtattcccttccccctacaagattatgagaccccagagggggaaggtctgggtcaaattcttcttttgtatgtccagtctcctgcacagcacctgcagcattgtaactgcttaataaatgacatctcactgaacgaatgagtgctgtgtaagtgatggagatacctgaggctattgctcaagcccaggccttggacatttagtgactgttagccggtccctttcagatccagtggccatgccccctgcttcccatggttcactgtcattgtgtttcccagcctctccactcccccgccagaaaggagcctgagtgattctcttttcttcttgtttccctgattatgatgagcttccattgttctgttaagtcttgaagaggaatttaataaagcaaagaaactttttaaaaaaaaagagtacttctagagcggccgggggcccatcggattttccaaccgggtgggggtaccaggttaagtggtaacccaaattcg

SEQ ID NO: 1875 - DNA, 558 bp, Homo sapiens
  misc_feature (10)..(11): n equals a,t,g, or c
ctcgtgcaannttgagcagtgttaggatttagaggagtctgcatagcagataaagggagaggtgttagcaaagagtatctgtgaggatgatactcttggaattgcaggtcataagactgggaaagtaggtaaatgctccctgaatggggcttatactttatcctataggcagtgggaagccttaggtaagaatacagtgatacgaaagttttgcattcactttagtaatggtgaaaaactggggaacagtctattaggtggcagtctttgggctggaatatcccaactgatttctggttttattttctaaaattgttgccttggacccttcctatttttataaccagacacagaaaatcaataaaagtttgagcccagtttatagactattgccagcagtagttcaggttttaaaaaaatgatgagggattaatctaggggcatgaaggagaaaggatagattttttatttatgtctatatataaatagacatttatatttacaaaggttgacttagcaggccttagtgattgcttagcaagattagggaacagaaca

SEQ ID NO: 1876 - DNA, 349 bp, Homo sapiens
  misc_feature (53)..(53): n equals a,t,g, or c
  misc_feature (294)..(294): n equals a,t,g, or c
aattcggcacaggcttgatcttcttctgggggttagggagaaatctgtctccntattgctggttctcttaccaaaatgcttttataaagaaatgaccggtgacatttattcaccaaaggaattaatatactgagtcaaagattaacaatgctatactatagagtaataggtcatrtatagcctcrattgagttttttatgacaatattttaacatacctctctctctacatatgaaataccatgaaagtgaractcaaaatgacacagagggaaagttagagggaaaatggaantaatttcggtacatctttatgggttttaaaggagtaggaaaataaggtggaaata

SEQ ID NO: 1877 - DNA, 536 bp, Homo sapiens
  misc_feature (492)..(492): n equals a,t,g, or c
gaattcggcagagggacatttatttcctttggagtcttattcttttaagtacttcttaaaacataaccatcaccatcaccagaattttttaaacatgagaataagacagacagaacttttctttggtagtgttaacacaaaaggtgtctgatcttcatacaagcaatctttgctcacatacatcaaaatggaatgacacaaggaaagaaccattttgcaaaaggaaacaagacaagctgccgtcagctagatacgtttcgattgttcaggaaagtctgtacaggaactttgattggcatcctgcttgtctaccttctttcctactttaaagtggtagctctgatcattgttgtcagtgttttctgacccctcagatctggtctttgcctatcatgtctgatgtaggcacttggaccaattcacctgcaaatcaaggtaatcgaaccaagtgcctacatcagacatgataggcaaagacgtcgagcggcccgnaaatttagtagtagtagtagtcggaccccggggaaattccggga

SEQ ID NO: 1878 - DNA, 853 bp, Homo sapiens
  misc_feature (816)..(816): n equals a,t,g, or c
  misc_feature (839)..(839): n equals a,t,g, or c
cgccaggccaggcacctaggccaggggagcggagacctcgtgggagcgggcagggggacctttcccctctcccgggcttccacccaggcgcctccccgctgtgaaacgccgccgcccaggaaaaactgcatagaaaatctaatggatgaagatgagaaagacagagccaagagagcttctcgaaacaagtctgagaaagaagcgtcgggaccagttcaatgttctcatcaaagagctcagttccatgctccctggcaacacgcggaaaatggacaaaaccaccgtgttggaaaaggtcatcggatttttgcagaaacacaatgaagtctcagcgcaaacggaaatctgtgacattcagcaagactggragccttcattcctcagtaatgaagaattcacccagctgatgttggagagccatttcagagactgtgaagaatccaggtgccatgtcttagtggccaggatgttccctttctaaaatgaggacagagcccaggagataacccatcatgtccctagggaactgctaatgccctccagatgtgactcccgtcttcttccctcttctctctaagaggcacaaaaccagactccaggaggactcacatagctktgaagtttgaaaaaacaaaattgacctggctgaaaaaacaaaattgacctgggctgcagacmagccaagctggtaaaagtatcarctgggcaaagacttgkggytaccagcattgggagcagttgcmcttcaaaaggagccaaatgcctgkggcctgcggaawaggacttggggattttgaattwatycaaaagcatttntttctttttaggcccagaggttnttcccagggacaca

SEQ ID NO: 1879 - DNA, 1246 bp, Homo sapiens
agtttcacgcctgcaaacacaagcattctgttgatcaacggaaatattttgatgtgccatttcttgtctaaacaagtttcatatacagcaccgagggggccacgagaggcagaggcccagacagaaggtgaacatagccttgcagggagacatatgccaggcaggatgaccattgggattgcatcaagtattaatcagttacttaagggcttcctgtcagacagttgaagttcacattccttttacttttcttaattagtccactaggatggtatgcctgttttcaacttaacacatgcatacttgtaaatattttagtatgctacagtaatttgtcatatctttaatatttattgtttgtaaagcagtaaacatttctgtattttagaagtcatggagtaaaatcaaatatttatgataaataattggaagtatgttttagtttgaagattgtcctttttcctatcttgctgcaaggaaaaatggacttctgattaggttttacaattgtgaacttttatgtaaatgttaagtgctttcgaggagaccaaactattattaatatataaaatggccttgcccttaaggagcaaattaaatctcatggagattagactcaaaaggcaataaataatcgagggtttatgcaatgaaatagaatttcagaagagtttggatctcaaagattgtccttcactctcagaaacaggcaagtttcttaaaagcccttatagtcgtgtttttattttaaaaatcgtagcactttatttttgaagtttaaaaagcccataaacttaatgagtctttataatcagacacatggaaatatagaaaaccaaagactgatcttagaatatagagtagagagacatgtttgttattctccactagtgactttagtattttgttatgtgatgttttttaggtgcaccttttctcatgactccttttactttatctaatgtcttcctctttaaagtgtgacccagagaccagtagcatcagcatcacctgagacctgtgaacactgaagctccagctcagacatgttggggaccattttaataagatacctagctgattttttgcacagcaaactttgaaaacccctggtctaaggggtagtatttgtatcacttatggaatataatctcagggaaattaaatctgctcaattgacatttgtggtgtttcattttttaaattctcttgagtaacttctgtagccctttccagtgtgtcaggt

SEQ ID NO: 1880 - DNA, 133 bp, Homo sapiens
ctactctgtgtgtgggttcttggcaagctgccatgtctttggggatcatagaaattattgatgacacagaacactcatatgcccttagcctgtacagctgattcaacatgggaacagaaacactgtctagggg

SEQ ID NO: 1881 - DNA, 422 bp, Homo sapiens
  misc_feature (24)..(24): n equals a,t,g, or c
  misc_feature (416)..(416): n equals a,t,g, or c
gcaggacaggaaaggtgacagagnaagactctatctcaaaaaaaawkagactatcttgttcttaatcctcttcaattcttcctttttattcttttctccctggctcctttgtagtttaatagttatttaaaatcaggtggagcatttttatgtttcagtataacaccaaaatgatctcagctaagttgcttttgttgcttcttttcatatgaagttttttccctatcctgtgaatcagcctttaatccaaaaatgacataaagagaagagcaaggactgagccttaagtatgcctagaatgttgaggaggctgaggacagtgaagaagagatgaaataaccacaaccagtagcttgggaaccaggataatgtcataagactcaaatggagggaattaatatcaagggaagattaanaaaaaa

SEQ ID NO: 1882 - DNA, 629 bp, Homo sapiens
  misc_feature (621)..(621): n equals a,t,g, or c
  misc_feature (626)..(626): n equals a,t,g, or c
gattttttttttaagaggacttttaagatcatgatatctaattttaattgtatttacagaggcttcaaagagtctttgatttcttgcactttgttaaggctttcttattccttctcacatcctagaaccgggttacccctccgtgaggcagatcccctgcaggtggccatcactgtggtggccagcagtgcttccagactcctgcagtcacgggttcccttctgaaatggatgtgtatttccaaattcggatggaagaggctggattaaagatagaagagaatgtcctaagtagaagagaaatatgttcttaaatttaaaatctctgaattttctccttacactggggaaggtgtaggaatcatgtaattgccgcctactccggcatttgcagtagtggggagaagtctctagaaccatattagacttaatagataggacactcatgtttttgtttggttgggggtagcattttaaaagattattatcatagtctttattattaattattttggaggacaggaaagcatttaccttctatctactttgcaaactccatctgtgccataaatcattatggatgttgggktgctatactctgstttttaaataatttgggcangaccngga

SEQ ID NO: 1883 - DNA, 1407 bp, Homo sapiens
ctcaccctgtatgacatgtgcaaggctgtcagcagggacatcgtgttggaggagatcaagctcattagcaagactggtggtcagcggggggacttccatcgggcttagcacctgcccttctcacccatggcccacccaggcctggagctgggatgcaatgtaggctgagggaaagacgtcaggttcctttaatcacagtcactgtttgtttaccttgagcagtaaacccgaagtcagcctgctctactactaacaaacaggcctgctgctagatgatctctaatgaccaatggggcttcctttctatagggaggataccagcaggcccttaagccttccaggacactaaggtcgtgggagcgggactgcaacaagcaatgccagataactgagaaatcatgttctttgtggactatttcagacaaccaggttccgacagtccagcccagaacttttccttctcattttgggttttctcttctcctgctttcctggggagagattaagcgctcattaagcagaggagcccactttgaggagagcaaagcacaagcttgcctgaagaatggatcccaacttctccccggcagctctgcctccctaagtctgtgaagccgcagccctgccctgtcctgtcctgtcctgacttcatctctccttctgcccaagtctgtgtcccatcagacttgcagcctttcagcttaacagttgcccggtcctgctggccccttttcctctggcccccctcttctgaaacaggatgtgcacacatggccatagccctaaggactcctgccagaccacacagcccacacctggccctgttcacggctgttccacccacccctctttattctggagcatatcagggaaagaaaagttgatgatagattgccttcaccctcacagcgcacaaataaagctacgatgccaactttgcagatgcaagaatgaagacactgtgtgggtagggcactgagctgctgcagtttcacagggaaggctgcacctatcaatcaatcaatcaatcctatcccaagacacagttccctgagggaagaagaggagggacctggaaaggcctaagggtgtactctctgtatagccccgctatgggaaaataaagtggagtagggggcatagaaatgcwccatctaagggaaatcttttgtcaggtggtggccaggggtgttcaaagctcattgcttgcattaccagctattagagagatcagagagggcaattaattagaggctcctggttctcacatcccaaacacacacagttctggcctgctgggctctctaacttggatgtctttgagtcctcagtggtgccccctgcctgcctcccctctgccctatgccaaggtgtgctggcaaatattaaacaaccagctctctggaa

SEQ ID NO: 1884 - DNA, 707 bp, Homo sapiens
  misc_feature (658)..(658): n equals a,t,g, or c
  misc_feature (676)..(676): n equals a,t,g, or c
  misc_feature (684)..(684): n equals a,t,g, or c
  misc_feature (706)..(706): n equals a,t,g, or c
ccgtctcaaaaaataaataaataaataaaaaataaaacaaataaataaaagctaaagcattctaggaattacatgtctgggagctactttgctgaatctcttggaagttgttaaggaaaggcatctgagatataccagatcagaccttcatcttctgagcttcccacttgtaaactgaaattttaaattacctggaataggcctcccttctcttaactcccaatttgaaggctgcgattttaaattagatgagaatttacttaactctatttgatacatatccttatgaatgaacatttgttgactgtctactgaatgtgacaggtattgttctaagcactttatttgtaatgacttacttttacaaaacacccctatgagtaatgttctattgtccccttatttacagttgaggaaactgggtacagagrgattaagtaactagtctgatgtcacaggtagtattcagctgagccygcactcataaatatgatactgtcctgcttctcccttgctaatataggcaataaagagctttctgaaggggaagaaatattattattaaactgatttaatgaattactataattgcagtttcaataattagttttgtaaaatgcaactgggtatagcagttttttgaagttttctaattttntccttctgtcactttggntctggtangtttgccttttcaccattgctna

SEQ ID NO: 1885 - DNA, 265 bp, Homo sapiens
  misc_feature (261)..(261): n equals a,t,g, or c
gcaaaaataaaggggctacagaaacactcatttttatgctgttccctcttgggcttcatgcaaagacaattctgtgtaaatgtacagttgactctgatttggaaatatgaaaatcagtccatccttgttataaaaaatttttttacaattgtaattatattgatgttcatattgtgtaaaataactcatttaataaaatagtactttgatttacgacawmaaaaaaaaaaaaaaaaaaaaaaaaaaaaaaaaaaaaaaaanaaaa

SEQ ID NO: 1886 - DNA, 513 bp, Homo sapiens
cgggtatgcttgatcattgagggccaggaggttaactgtctcctggacactggcgcagctgtctcartcttactctcctgtcctggacaactgtcctccagatctgtcactatctgaggggtcctaggacaggyagtcactawatacttctcccagccactaakttgtgactggcgaactttactcttttcacatgtctttctaattatgcctgaaagccccactcctttgttagggagagacatcctaggaaaagcaggggccgttatacactagaattaggagaaggaaaaagggtaaatatatataaagactctaagtatgcttacctaactctccatgcccatgcaacaatatggagagaaagggaattcctaacttccgagggaatacctatcaaacatcaggaagacattaggagattatttttggctctacagaaacctaaagaggtggcagttttacactgccagggtcaccagaaagaaaagaaaagaagtagaagggaaccgc

SEQ ID NO: 1887 - DNA, 650 bp, Homo sapiens
  misc_feature (621)..(621): n equals a,t,g, or c
ctttggaggagagactcctaggatggcccacaacctgctgctgcctgtagcagagctagaagggaaggagtctgccagctcttccacagcatccccaccatcctcctccactgccatctttcagccctctgaaaccgtgctccttggaacgcaaagggccgaggagcatctggttttcatggcaaagctctactccagagctcctttaacatctgctaattaagtgcaataaatttttctagaaaatggcaaagatgacttccaggtggatattgctctcttacggtgttggggatgccagaacaccacttggttttatttttctaagtgcatgtgatgtgatagagtgtgtggggctctgtgtccttccctgggagctggcattccagcgggcccctctctttacctttgttgggggaaggaggcaagagagaaattccttcttcccagccagagagggcagaagcagaccgtagcccattggccttatgtgcgtgtgtgcgtgcgagtgtgtcactgctggtgggccggagtgatgtggtgggagggaagccgggaatgtatccttttcagacaaaattaaatattttgaaatgagaaaaaaaaaaaaaaaaaactcgngggggggcccggtaacccaattcgcccta

SEQ ID NO: 1888 - DNA, 721 bp, Homo sapiens
  misc_feature (6)..(6): n equals a,t,g, or c
  misc_feature (30)..(30): n equals a,t,g, or c
  misc_feature (157)..(157): n equals a,t,g, or c
ctcagngcccgccccatacttgctgagccngaggaaaccaggatgctgcaggagccagagtctgcactatcaagagctgcaggagggcttctctgagttggaagaggttcctggtttggagaatggtcccacggtggccagcacaggagcaaatganagggtgggacagcgggaacagacacgtgctgctctccttccaccctgagagaatgctctccagacattcctgcatcccaccccaccaaactcagaagcttgctgggatccttcgagtccaataggaagtccgggagkgccttcagttttcactcaaagcaggcccttttttcgttccttccctgttaggggaagatacacctggacgagaatatatcctcacctcaccaccctgaaaagctgctttctcccttscatccatatcctctcttcctgtcacctccccatacagcttcacatttgcctcatcgcacttttcttttctgtccacctttcataatcccatccactccaaatcccggaccctgcacacgccaactccctgaatccaattcaggagtgccccagttcccctttcgatccatctcctttctactgtagcggagactacaagtcccaggatgccccgctagcccgtgaccggctaggaaataaagagccttctctccgcggtaaaaaaaaaaaaaaaaaaaaaaaactcgagggggggcccggtacccaattc

SEQ ID NO: 1889 - DNA, 564 bp, Homo sapiens
  misc_feature (22)..(22): n equals a,t,g, or c
  misc_feature (474)..(474): n equals a,t,g, or c
  misc_feature (524)..(524): n equals a,t,g, or c
  misc_feature (536)..(536): n equals a,t,g, or c
  misc_feature (549)..(549): n equals a,t,g, or c
ctcgcctgcactgctctccctncgctgtggggaagcgacaacgtcccgataacttgcagactgtggcgcaactggtcttggtagcggaggcayycgaatgctgcccgggtgagaaacctggcaaagaaaacggtctcgacaatgagtaggccacccatcactactaactacagatgacttgccatttcatttacaaagatgtcttctgctgctgaaaatggagaggcagcacctggaaaacaaaatgaagaaaaaacctataaaaagactgcatcatctgctattaaaggtgctattcagctgggwataggatacacagtgggtaatctcacttccaagccagaaccgagatgttcttatgcaagacttttatgtggtggaaagtgtgttcctacccagcgaagggaagcaatcctgaccccagcacatcactacccaagactttagatttaaggacatacgctccattagcantccggtatttcagagaactttttgggtatcaagcctgatggattacttgnattccatcctgnagtgaaacctctnatagaactggtctaa

SEQ ID NO: 1890 - DNA, 277 bp, Homo sapiens
ttttttttttttttttttttttttttttttttttttttttttttctaaggcccaaaaatctatraaaccttgattatttgttagttttgcaattcaaaacagctaatgtckggytatttctcaaagtaagtattttaaacagcctgtaagatactgtatatgcgctgctgtagataccggaatgaattttctgtacatgtttggttaattttttttgtacatgatttttgtatgtttccttttcaataaaatcagattggaacagtgaaaaaaaaaa

SEQ ID NO: 1891 - DNA, 2522 bp, Homo sapiens
  misc_feature (2420)..(2420): n equals a,t,g, or c
  misc_feature (2510)..(2510): n equals a,t,g, or c
  misc_feature (2517)..(2517): n equals a,t,g, or c
gccggcccagcgcccgccaccggccmgcggtgcctccagaggacctggtcagacaagatgtgaaatggagaagtatctgacacctcagcttcctccagttcctataattccagagcataaaaagtatagacgagacagtgcctcagtcgtagaccagttcttcactgacactgaagggttaccttacagtatcaacatgaacgtcttcctccctgacatcactcacctgagaactggcctctacaaatcccagagaccgtgcgtaacacacatcaagacagaacctgttgccattttcagccaccagagtgaaacgactgcccctcctccggccccgacccaggccctccctgagttcaccagtatattcagctcacaccagaccgcagctccagaggtgaacaatattttcatcaaacaagaacttcctacaccagatcttcatctttctgtccctacccagcagggccacctgtaccagctactgaatacaccggatctagatatgcccagttctacaaatcagacagcagcaatggacactcttaatgtttctatgtcagctgccatggcaggccttaacacacacacctctgctgttccgcagactgcagtgaaacaattccagggcatgcccccttgcacatacacaatgccaagtcagtttcttccacaacaggccacttactttcccccgtcaccaccaagctcagagcctggaagtccagatagacaagcagagatgctccagaatttaaccccacctccatcctatgctgctacaattgcttctaaactggcaattcacaatccaaatttacccaccaccctgccagttaactcacaaaacatccaacctgtcagatacaatagaaggagtaaccccgatttggagaaacgacgcatccactactgcgattaccctggttgcacaaaagtttataccaagtcttctcatttaaaagctcacctgaggactcacactggtgaaaagccatacaagtgtacctgggaaggctgcgactggaggttcgcgcgatcggatgagctgacccgccactaccggaagcacacaggcgccaagcccttccagtgcggggtgtgcaaccgcagcttctcgcgctctgaccacctggccctgcatatgaagaggcaccagaactgagcactgcccgtgtgacccgttccaggtcccctgggctccctcaaatgacagacctaactattcctgtgtaaaaacaacaaaaacaaaaaaaaacaagaaaaccacaactaaaactggaaatgtatattttgtatatttgagaaaacagggaatacattgtattaataccaaagtgtttggtcattttaagaatctggaatgcttgctgtaatgtatatggctttactcaagcaratctcatctcatgacaggcagccacgtctcaacatgggtaaggggkgggggtggaggggartgtgtgcagcgtttttacctaggcaccatcatttaatgtgacagtgttcagtaaacaaatcagttggcaggcaccagaagaagaatggattgtatgtcaagattttacttggcattgagtagtttttttcaatagtaggtaattccttagagatacagtatacctggcaattcacaaatagccattgaacaaatgtgtgggtttttaaaaattatatacatatatgagttgcctatatttgctattcaaaattttgtaaatatgcaaatcagctttataggtttattacaagttttttaggattcttttggggaagagtcataattcttttgaaaataaccatgaatacacttacagttaggatttgtggtaaggtacctctcaacattaccaaaatcatttctttagagggaaggaataatcattcaaatgaactttaaaaaagcaaatttcatgcactgattaaaataggattattttaartacaaaaggcattttatatgaattataaactgaagagcttaaagatagttacaaaatacaaaagttcaacctcttacaataagctaaacgcaatgtcatttttaaaaagaaggacttagggtgtcgttttcacatatgacaatgttgcatttatgatgcagtttcaagtaccaaaacgttgaattgatgatgcagttttcatatatcgagatgttcgctcgtgcagtactgttggttaaatgacaatttatgtggattttgcatgtaatacacagtgagacacagtaattttatctaaattacagtgcagtttagttaatctattaatactgactcagtgtctgcctttaaatataaatgakatgttgaaaacttaaggaagcaaatgctacatatatgcaatataaaatagtaatgtgatgctgatgctgttaaccrragggcagaataaataagcaaaatgccaaaaggggtctnaattgaartgaaaatgtaattttgtttttaaaatattgtttatcttttatttagggggggtgggtaattattagttaagttttttttaanaaaaaanaaatt

SEQ ID NO: 1892 - DNA, 455 bp, Homo sapiens
  misc_feature (1)..(2): n equals a,t,g, or c
  misc_feature (52)..(52): n equals a,t,g, or c
nnatcaaccctcactaaagggaacaaaagctggagctccaccgcggtggcgnccgctctagaactagtggatcccccgggctgcaggaattcggcacgagcccacctccatcctatgctgctacaattgyttctaaactggcaattcacaatccaawtttacccaccacctgccagttaactcmcaaaacwtccaacctgtcagatacaatagaaggagtaaccccgatttggagaaacgacgcatccactactgcgattaccctggttgcacaaaagtttataccaagtcttctcatttaaaagctcacctgaggactcacactggtgaagttatcagtaccagactattttgcttcaatctgcaaaaggaaggtgtgtgaaggtgaaaagccatacaagtgtacctgggaaggctgcgactggaggttcgcgcgatcggatgagctgacccgc

SEQ ID NO: 1893 - DNA, 858 bp, Homo sapiens
  misc_feature (856)..(856): n equals a,t,g, or c
ggttctgcccccactgcttataatgctggtgatctacattaagatcttcctggtggcctgcaggcagcttcagcgcactgagctgatggaccactcgaggaccaccctccagcgggagatccatgcagccaagtcactggccatgattgtggggatttttgccctgtgctggttacctgtgcatgctgttaactgtgtcactcttttccagccagctcagggtaaaaataagcccaagtgggcaatgaatatggccattcttctgtcacatgccaattcagttgtcaatcccattgtctatgcttaccggaaccgagacttccgctacacttttcacaaaattatctccaggtatcttctctgccaagcagatgtcaagagtgggaatggtcaggctggggtacagcctgctctcggtgtgggcctatgatctaggctctcgcctcttccaggagaagatacaaatccacaagaaacaaagaggacacggctggttttcattgtgaaagatagctacacctcacaaggaaatggactgcctctcttgagcacttccctggagctaccacgtatctagctaatatgtatgtgtcagtagtaggctccaaggattgacaaatatatttatgatctattcagctgcttttactgtgtggattatgccaacagcttgaatggattctaacagactcttttgtttttaaaagtctgccttgtttatggtggaaaattactgaaactattttactgtgaaacagtgtgaactattataatgcaaatactttttaacttagaggcaatggaaaaataaaagttgactgtactaaaaatgtaaaaaaaaaaaaaaaaaaaattnct

SEQ ID NO: 1894 - DNA, 1419 bp, Homo sapiens
gtttccagtagcttggaaagtagagatgactaatgttttagccttttcttggagaaaaggaagaactcttcttgaatattttcacagatgattgtgattgctttaaatgacctctgtggcaatttaaattagatggatttaatctcagtaatgtgctggtcgcataaatgtcatgttttaataggaaaagttacttgtaaatctttagacctttgttgtcacttaggctggggagtcactaccctatttggcatcttactagttggggggaccttttccgtgtacagtgatgggacttttgtgacctttactctcactatgcaatagagggtttcatgtagttaatctgacatgtcaaaattgggaagactgtaaccttttttttttttttttaagatttctcttttttgtgtccctcaatacttagcagatgttcatttggtggaaattcttattacttacatgaatgagtttgaatttagtggcaaggaagaaaaaaaaaactcaaattattgttttaaaagaagaaaacttgcaaagtacataagtattttttaaaaatcaatcgaacagaaaggaatgcatgctgtttttcaatggcttagacatgctttttattcactgactagtattcacttttttacaacttgtatcaaaacaaatgatctttgtttttgtcacaggcaaaaacaggttgacactggtgggttggctttattaattaattttttttctattaggttttctttaataatgttaaatttctaaattatagcatatgttttagttaattctgaaatcagttacttcatttgttaatttatccctcatatcatgaatattgttttttaaatgttctatacaaatttgcatcacttcttttcttacagcttttgcagttaatatattctaaacttgaaaatgtggtatcaatcaataatagaagtatcactggaggatttatttagctttgtatttcttaattttagtcctagctactaaagtatgtaagccttaaagtttaaaatgtttttcttaaattagctttatacacaaacattttcatttactttatgaaatgggaggagatagtccactgtgcttatgtttttttgtttaatttctatattctgaagcagtgcagatatagggtatgctaatcaagtgagcaaggtggaacatgtacaatataaggagaagctgtaaaaatcacagtataaaattatgaagtttggtaactgtaaaatgtactgtatttatatgtaactctcattctaaaagttgccacaaaagctgaattggaagcttcatgtctgcatgaaatttcctatatttttaatgtgtatgatgaaattaatttttcttgaatattaaagtctgccaattgctatgaaaaaaaaaaaaaaaaaaaaaactcga

SEQ ID NO: 1895 - DNA, 2013 bp, Homo sapiens
attcggcacgacgggcaaaagtctctaccacacctactcaactctgtcacgctagcacaaaacagccacacacaaatacattaaaaaatgggtataactgtgttccaataaaactctattagcaacaggcagtgggccagatstggcactgactgcagtttactaactatcccctgatcaagaatgtccaacaatagctgaaagttacttgagaaagtcagcactgtaggaggaagaaactaacaccaaaacacaagccggtagttctggggaaatgctggcagaccaagggcgggacctcttgcccagaataatctctctctcctactaaggaacctataggttcactgaagtaatccattactttgaatcactctctcctttgccccacctttaaacacaaatccccatccctaatagttactggtgaacagatggactcatccctttcttatccgagaagccccatcacatgctatgtcctatcacatgctataccagaagctagggctgcagaggtggatgacgcccccagatccctgccccctaggggcttaagagtctagcaggggcacctgacccaagtaagtacaatgcagggtaaggctggctaaagagcacgtgaaaaggagctgggaacacagctggtcagcagagcttcagggagggctgaaggacaggctgcacacgaggcactcagaaaacagcagtgaaacagaaggcaggcagcaacggcagtggtactggacctggggaacaccaagttcaagctctatatacaacgaggacaaaaatgaaccaggctccctgaaagcagggaatctaacctgtgctacggcgccttcccagtccacgagggcgtgagagtacatacacatgcaagtgcactccagcgctcacccaagcaacacccttggagaaacacggactccaggcccaaatccagcctgagaccctcaaagggcagatccgctaacctcaagttttcagaagatctgaacccactgggggctcctgctcctctgcctgccccatgccagactaggattccagtgacataagcgccctctacagactcagaaggacagagaaggttctgctggaagtgggctcctcagcaaaccagcagataggggttcctttgatatttataccccaggttttttcactctcacgtgacatctatgtggggccaatgaagccaattcttcttttgtacatatgcagtcctgtaagaatgcattcaaacgggatccgctaattaggaattttctcctggaattctcaacagtctatggggccagaagctttccacaaaccagtgaaggtggcagcaaagaaagcctcttagacgaggagctggcagcagctgctatctagatagacagcaaaaaccaaccactaattcagcaaacacaacctcatacctaaccgcttccctttaaatggccttcggtgtgtgcgcacatgggcacgtgcggggagaaccatacttattcccctgttcccggcctaccacctctgctcccccttctcttctctaccatttaactgtctcctctgctttgtttcttatcactgctgctggtgtctagagccagccagcagtacctggcagacatcgcgaccctgcgggcagcgcttaggactgcacatttacatttcccaaatgatctgggtagatggggacaggtgaagacttggggaaacggaaatatacgaatgacatgagacatgcatatctagtgtcaatccattcgactgggcacaggacagcagactgctgacagtgctatgtaagattatgagtgatcctccctctattttgcaaacagtctgtaagtaactgataaaactttaaaatatgcaaattttaaaattatatagtttgatttactcatcaaattatcatgtatgctgttatttaagtatgaataaaggcttttttaaattgggaaaaaaaaaaaaaaaaaaaaaaaaaaaaaaaaaaaaaaaaaaaaaaagggggggggg

SEQ ID NO: 1896 - DNA, 1893 bp, Homo sapiens
gcccacgcgtccgcggacgcgtgggtcgacccacgcgtccgaaaaaacatggtttctcctctctctcctgtcttcttactctctatcccatttgatgtagtgatttttaaatgcttttgtaagttaattcttaacacaaaagagacattgtaatgaggcacaccactaaagtgagcatgcccaattaaaaccagtgtaatataggataagaaaatctgatttttcaaaaaagatactctacataaagaatccttcatataaaaagttctttcttgtagtacatttaaagttttaattcactcatgtataactgagagttcctttgagccctttttaggcagggaggcatgtctgtcatctagcgtgtggcccagtaagtgattattacattggaatcagtttttcagtcttttaaaataaattctatgccataagaataaaagataaagagcaaaattaatgttaactatttttagcttattataactatgtcaacaagtgtttattaatacctattatgggaaagtcactgtggttggcattgaaaattacatcatctttaaagcagtatttgtccccagatggactcatcactagcaaagactaggttcattggaaggcatagggtgagagaatgggaagatgragtggaggcgggttgttaaagtgctgtcagtgagtgattttgtctacttgaataatggtccatgtttgggggcatattgtgtttcataagaagtgaaaggtatttgcaaagtaagctacaaatgacccataaatctgttaacaacagtccttaatatgcaaagatgaaaaacaagcattactgctacccaaagggaactggtgcttggtgatgtgcagatggggctgttggttaagagagctattacaggttttctctcttaggtttcataggaggtagttactgagatgagattgttttatctttttgaatacagatctcttgtcttgagttagttctgaggatgggagtaataaaggagttttttgtttttttgtttgtttgtttgttttggctccttagtaatactcctctgacatttatttctattattcttcaaagaaaggaaaccaactgaaatgtttgctttaacaaacattttaataagttctctgggtttttttttccccttttaaaaaaattagcatataccatagcaataaaagaactaatgttaactattgtatgctacaacttaagtgatttttctaaagaagcacaatgtcattgaaagtattattgaaaaggatcatagtcacattgaatttgtgaaggccaaagaaattgaagggagtgatattttcattttatgatattcacatatttagtaaattttgtgtacaagaataccaggcagagtgttttacccatggaaacaggtttcagattactttgtttttactgttagagtctcaagtttagaaatgctaacacttaaatcagtttttttctcactatacttgaagattgttaatattttgatatcttcctagcttgatgaatttaaacatatcttcagatctgtgacagtgacagccaataggactgataatattagcttcaaaccaataatatccagggttaaaataaaaatcatagtgaaagtacgattgtaaaattatgctatattaacttttaagtctgtaataacttgacatcaaaatgttatgtaattaccataaataatggctagcgagaacatctttggaaattctcaaattacctttcttactacactgtttgcagaatgaatgtagaaatgatcctgttagctttctgaatgttctgtggttgaatgtgtttttgcttaaataaagcttttggtatttgtttaaattamaaaaaaaaaaaaaaaaaaaaaaactcga

SEQ ID NO: 1897 - DNA, 433 bp, Homo sapiens
aattcggcacgagggcgcaggccccagccagctcaggctacactatcccaggatcagcatggccgtccgccagtgggtaatcgccctggccttggctgccctccttgttgtggacagggaagtgccagtggcagcaggaaagctccctttctcaagaatgcccatctgtgaacacatggtagagtctccaacctgttcccagatgtccaacctggtctgcggcactgatgggctcacatatacgaatgaatgccagctctgcttggcccggataaaaaccaaacaggacatccagatcatgaaagatggcaaatgctgatcccacaggagcacctcaagccatgaagtgtcagctggagaacagtggtgggcatggagaggatatgacatgaaataaaagatccagcccaaaaaaaaaaaaaaaaaaaaaaaa

SEQ ID NO: 1898 - DNA, 413 bp, Homo sapiens
  misc_feature (400)..(400): n equals a,t,g, or c
gagggaagtcaagaagggaggttgaggactgcacttttgatttacttctgacttcacgagtcactttctgccaaagaaatctctccttttgcttctagcaccgactagatttccttcagctgatgattgactcccagaattcgaaagaaactgagtcccacaaagctctgtctgatctggagctcgcagcccagtcaataatcttcatttttgctggctatgaaaccaccagcagtgttctttccttcactttatatgaactggccactcaccctgatgtccagcagaaactgcaaaagggagattgatgcagttttgcccaataaggcaccacctacctatgrtgccgtggtacagatggattaccttgacakggtggtgaatgaaacctcaaattatncccgttggtatta

SEQ ID NO: 1899 - DNA, 783 bp, Homo sapiens
  misc_feature (776)..(776): n equals a,t,g, or c
gagaaaaaggtagaagaataaaagatccagtacttcttcctgggtaagcagttatgaccagagatggaaccggcaactctttggccagaaagctgtatccaaaagacagagaagatgaatgtttttgttcactggtgactcaggtaacacgtcttcaagaagccatagggaggttgagggagggaagtcaagaagggaggttgaggactgcacttttgatttacttctgacttcacgagtcactttctgccaaagaaatctctccttttgcttctagcaccgactagatttccttcagctgatgattgactcccagaattcgaaagaaactgagtcccacaaagctctgtctgatctggagctcgcagcccagtcaataatcttcatttttgctggctatgaaaccaccagcagtgttctttccttcactttatatgaactggccactcaccctgatgtccagcagaaactgcaaaaggagattgatgcagttttgcccaataaggtgaggggatgacccctggagatgaagggaagaggtgaagccttagcaaaaatgcctcctcaccactccccaggagaatttttataaaaagcataatcactgattccttcactgacataatgtaggaagcctctgaggagaaaaacaaagggagaaacatagagaacggttgctactggcagaagcataagatctttgtacaatattgctggccctggttcacctgtttactgttatcacaataatgctaagtaaaaaaaaaaaaaaaaanggcggcc

SEQ ID NO: 1900 - DNA, 399 bp, Homo sapiens
  misc_feature (4)..(4): n equals a,t,g, or c
  misc_feature (347)..(347): n equals a,t,g, or c
  misc_feature (368)..(368): n equals a,t,g, or c
  misc_feature (398)..(398): n equals a,t,g, or c
cgcncgagcaccctagcacagcgccgggtaagatgagcacggaaggtggtggccgtcgctgccaggcacaagtktcccgccgcatctccttcagcgcgagccaccgattgtacagtaaatttctaagtgatgaagaaaacttgaaactgtttgggaaatgcaacaatccaaatggccatgggcacaattataaagttgtggtgacagtacatggagagattgaccctgctacgggaatggttatgaatctggctgatctcaaaaaatatatggaggaggcgattatgcagccccttgatcataagaatctggatatggatgtgccatactttgcagatgtggtgatnctccctggtctataacaggangccccttacccagcagcaggcagatatggnc

SEQ ID NO: 1901 - DNA, 3035 bp, Homo sapiens
  misc_feature (2911)..(2911): n equals a,t,g, or c
  misc_feature (2959)..(2959): n equals a,t,g, or c
cccggagcagcgcggcagcagcatggctcacgggcccggcgcgctgatgctcaagtgcgtggtggtcggcgacggggcggtgggcaagacgtgcctactcatgagctatgccaacgacgccttcccggagagtacgtgcccaccgtcttcgaccactacgcaggaagactatgaccgtctgaggcctttatcttacccaatgaccgatgtcttccttatatgcttctcggtggtaaatccagcctcatttcaaaatgtgaaagaggagtgggtaccggaacttaaggaatacgcaccaaatgtaccctttttattaataggaactcagattgatctccgagatgaccccaaaactttagcaagactgaatgatatgaaagaaaaacctatatgtgtggaacaaggacagaaactagcaaaagagataggagcatgctgctatgtggaatgttcagctttaacccagaagggattgaagactgtttttgatgaggctatcatagccattttaactccaaagaaacacactgtaaaaaaaagaataggatcaagatgtataaactgttgtttaattacgtgagaaacatcttcagtggccaaggaaactgtccatttctctcagaaagcaaatgaaatgctacagctatacccagaccttttataggtaatgaagcagttcaaaacttgaaagaaaacaaaacctgtcctcagaattctataaagtgtattaagaatgttccttaaaggtttaagaagcagtaagcagcatctgaagccacaatctattataaatactttatttcaactagaaggtacaatctctcaggggtttcatagtttaaaaagctacaatcacatcatgttgtaactacgtaaaaaacagagctgtaaatggaactgcttggctttgaccatacacatttctgcccagcccttacagaatctgcacaaagaaatatctccctttgctccagttaattgttcttgtatgtaagttgctttctattccagtatatccagagtggtgaaataacaaggccagccacgtagccaaaggtcgctccaagcgtacaggagatgggccatacctgaggagagaatgtatgagatcaaaaaagaacaaatgttttattattacttgagcacaagtgtaacctaaatatttctatattaaagcttaatgtgctttcttaaagaatgccaaaagtgtaataaggtcataactgcatttatcatgaacactaaaaatgtacacattttagttaatgtgcattaaactgtaacaaggcttctggcaattgtagatttagtttgacgctccccaaagtgcatgagacacatgctaaaattacaaattaaaattttgggtcagactttgccataatgatagactcaatttagctctctgaactagttggtaattttttttttttaattcccactttggctgtgtacatcaaatgaaatgagaagtgtgtatgctgaccaaaccacaagaaactttctttaagttgtgttaaagaggaaagacctagaatccaagcgtgttacatgaaaattgtaacagagcagctgcttccacctttcagatatagatgttggaaccacagcagaagttatagagcgacaacttatatacacacctagaatgtaagttaaacaaaataccggcttccagagaccccttttctccagccatattacatcaggctagaagtaattaatgttgatttatttcatctacaagcagttggtccctaagtgaaaggctctgcttgaaaaaaaaaagaaaaaaaagttggaggaaaattttcatgttcttctgtgaagcttatttggtacactggagccatttctaatctttctctggggggaacaggccacagaactgtgttagaggtgaaccatcttaattactagttctattacctaattcagcttccttgtttggtctgctgtggatctgccttattgcatatgccatgcatcagataatggatgcatcagataatggtgttagacaaagcttcattgtgaacaacctaatgcattttagagaaacaatctcatcacattttttctagcctttcctacatttaaacttgctgttgcccaaattataattttttaaatgtctttggtgggcttctgttaattcacatgacttgagcttatagctatgtctactgcacagattgggtaatggaacactaaacttttatacttgaaaatgacagccttaaatgctcatatcagtcacaaatctaggatgtactgtcttgttgtatgtgagctttgtagagatttttaaaaatataagcatcaccttcccattgaagagtggagagagtctactggatgactggccaggaactttctctctgaatcggacatttggatgtcttctttcttccaagaaatggtggttcacattaaagtatcatggccttatgtatgctcaaatggaatcttatgtaactttcttatttaattttggtctgcttatttttagataaaattgaaaggaattgtataaatcaattaacatattagctgagttgtccaacacatggtataaacgaattacaacagtaaactattacacatttccaacttgcctttggggatttatgaggattttttttggtggggggagggggctccaattcatatctctgaaacccttcacacttggtttactaattcaaagttagaagtctagaatttgccctgccctaacagaaacagattaggaatttgtctacacaaactggtgtcacctgtttcttgactgggatttggtttcctcattataaatatgggaggtagaacagagatctccaacgtctctcccatttatcacagtaattttcttattcacagtaatcattgttggrtgttactttttcancttcacattctcaagatggtaaaaatcatgtatatagattatcagaantctaagcaaagatgactgtcacatctgaagctgaggtgccttaggtacatcggccgcgaccacggtaagccgaatt

SEQ ID NO: 1902 - DNA, 376 bp, Homo sapiens
  misc_feature (374)..(374): n equals a,t,g, or c
gtgagctccgtctcaaaaaataaataaaatagaagcagccttgtaactgtatttaccatgataatatattctgcacggtaagaattccttttacagacattctttatcaagaggtcggcccttctttttcaggcacataagccaaatgcaggcctgtgtgtagctgtgtgttttttctgtggttgccgcatttattccacctccagctggaccccccactgcaaatagagaacagcggtgggggatgggggttaaaaagtagagaacctcctttctgttcaactaatttcacgtgacagtgcatgtatttattcaataaaacctttatgttagctcaaaaaaaaattccaaatgaagaaaagaaagaaactttnaa

SEQ ID NO: 1903 - DNA, 1304 bp, Homo sapiens
  misc_feature (1282)..(1282): n equals a,t,g, or c
  misc_feature (1304)..(1304): n equals a,t,g, or c
cggcggcggtcggtcctgcctgtaacggcggcggcggctgctgctccagacacctgcggcggcggcggcgaccccgcggcgggcgcggagatgtggcccctggtagcggcgctgttgctgggctcggcgtgctgcggatcagctcagctactatttaataaaacaaaatctgtagaattcacgttttgtaatgacactgtcgtcattccatgctttgttactaatatggaggcacaaaacactactgaagtatacgtaaagtggaaatttaaaggaagagatatttacacctttgatggagctctaaacaagtccactgtccccactgactttagtagtgcaaaaattgaagtctcacaattactaaaaggagatgcctctttgaagatggataagagtgatgctgtctcacacacaggaaactacacttgtgaagtaacagaattaaccagagaaggtgaaacgatcatcgagctaaaatatcgtgttgtttcatggttttctccaaatgaaaatattcttattgttattttcccaatttttgctatactcctgttctggggacagtttggtattaaaacacttaaatatagatccggtggtatggatgagaaaacaattgctttacttgttgctggactagtgatcactgtcattgtcattgttggagccattcttttcgtcccaggtgaatattcattaaagaatgctactggccttggtttaattgtgacttctacagggatattaatattacttcactactatgtgtttagtacagcgattggattaacctccttcgtcattgccatattggttattcaggtgatagcctatatcctcgctgtggttggactgagtctctgtattgcggcgtgtataccaatgcatggccctcttctgatttcaggtttgagtatcttagctctagcacaattacttggactagtttatatgaaatttgtggcttccaatcagaagactatacaacctcctaggaaagctgtagaggaaccccttaatgcattcaaagaatcaaaaggaatgatgaatgatgaataactgaagtgaagtgatggactccgatttggagagtagtaagacgtgaaaggaatacacttgtgtttaagcaccatggccttgatgattcactgttggggagaagaaacaagaaaagtaactggttgtcacctatgagacccttacgtgattgttagttaagtttttattcaaagcagctgtaatttagttaataaaataattatgatctaaaaaaaaaaangacaagaattaaatgataaacn

SEQ ID NO: 1904 - DNA, 2617 bp, Homo sapiens
ctactaaagggaacaaaagctggagctccaccgcggtggcggccgctctagaactagtggatcccccgggctgcaggaattcggcackagcggctgggcgctgaggatcagccgcttcctgcctggattccacagcttcgcgccgtgtactgtcgccccatccctgcgcgcccagcctgccaagcagcgtgccccggttgcaggcgtcatgcagcgggcgcgacccacgctctgggccgctgcgctgactctgctggtgctgctccgcgggccgccggtggcgcgggctggcgcgagctcggcgggcttgggtcccgtggtgcgctgcgagccgtgcgacgcgcgtgcactggcccagtgcgcgcctccgcccgccgtgtgcgcggagctggtgcgcgagccgggctgcggctgctgcctgacgtgcgcactgagcgagggccagccgtgcggcatctacaccgagcgctgtggctccggccttcgctgccagccgtcgcccgacgaggcgcgaccgctgcaggcgctgctggacggccgcgggctctgcgtcaacgctagtgccgtcagccgcctgcgcgcctacctgctgccagcgccgccagctccaggaaatgctagtgagtcggaggaagaccgcagcgccggcagtgtggagagcccgtccgtctccagcacgcaccgggtgtctgatcccaagttccaccccctccattcaaagataatcatcatcaagaaagggcatgctaaagacagccagcgctacaaagttgactacgagtctcagagcacagatacccagaacttctcctccgagtccaagcgggagacagaatatggtccctgccgtagagaaatggaagacacactgaatcacctgaagttcctcaatgtgctgagtcccaggggtgtacacattcccaactgtgacaagaagggattttataagaaaaagcagtgtcgcccttccaaaggcaggaagcggggcttctgctggtgtgtggataagtatgggcagcctctcccaggctacaccaccaaggggaaggaggacgtgcactgctacagcatgcagagcaagtagacgcctgccgcaagkttaatgtggagctcaaatatgccttattttgcacaaaagactgccaaggacatgaccagcagctggctacagcctcgatttatatttctgtttgtggtgaactgattttttttaaaccaaagtttagaaagaggtttttgaaatgcctatggtttctttgaatggtaaacttgagcatcttttcactttccagtagtcagcaaagagcagtttgaattttcttgtcgcttcctatcaaaatattcagagactcgagcacagcacccagacttcatgcgcccgtggaatgctcaccacatgttggtcgaagcggccgaccactgactttgtgacttaggcggctgtgttgcctatgtagagaacacgcttcacccccactccccgtacagtgcgcacaggctttatcgagaataggaaaacctttaaaccccggtcatccggacatcccaacgcatgctcctggagctcacagccttctgtggtgtcatttctgaaacaagggcgtggatccctcaaccaagaagaatgtttatgtcttcaagtgacctgtactgcttggggactattggagaaaataaggtggagtcctacttgtttaaaaaatatgtatctaagaatgttctagggcactctgggaacctataaaggcaggtatttcgggccctcctcttcaggaatcttcctgaagacatggcccagtcgaaggcccaggatggcttttgctgcggccccgtggggtaggagggacagagagacagggagagtcagcctccacattcagaggcatcacaagtaatggcacaattcttcggatgactgcagaaaatagtgttttgtagttcaacaactcaagacgaagcttatttctgaggataagctctttaaaggcaaagctttattttcatctctcatcttttgtcctccttagcacaatgtaaaaaagaatagtaatatcagaacaggaaggaggaatggcttgctggggagcccatccaggacactgggagcacatagagattcacccatgtttgttgaacttagagtcattctcatgcttttctttataattcacacatatatgcagagaagatatgttcttgttaacattgtatacaacatagccccaaatatagtaagatctatactagataatcctagatgaaatgttagagatgctatatgatacaactgtggccatgactgaggaaaggagctcacgcccagagactgggctgctctcccggaggccaaacccaagaaggtctggcaaagtcaggctcagggagactctgccctgctgcagacctcggtgtggacacacgctgcatagagctctccttgaaaacagaggggtctcaagacattctgcctacctattagcttttctttatttttttaactttttggggggaaaagtatttttgagaagtttgtcttgcaatgtatttataaatagtaaataaagtttttaccattaaaaaaaaaaaaaaaaaaaaaaaaaaaaaaaaaaaaaaaaaa

SEQ ID NO: 1905 - DNA, 550 bp, Homo sapiens
  misc_feature (497)..(497): n equals a,t,g, or c
  misc_feature (521)..(521): n equals a,t,g, or c
  misc_feature (526)..(526): n equals a,t,g, or c
  misc_feature (528)..(528): n equals a,t,g, or c
ctgagatggcggcgcccgggatcctgtgtagcggctgcagagggtgccgccgccctaggcgaagtagggccgtcctgagcgaaagaaccgcccccagcaggagcaccaccacggtttagcaaagaatcccagaccccgcccgggaaggcagccgcaccatggagtcttccagttcatctaactcttatttctccgttggcccaaccagtcccagcgctgtcgtgctcctctactcgaaggagctcaaaaagtgggatgagtttgaagatattttagaagagaggaggcatgtcagtgacttgaaatttgcaatgaaatgctacacacctcttgtctataagggaattactccatgtaaaccaattgatattaaatgtagtgttctcaattctgaggrgattcattatgtcattaaacagytttccaaggawtcccttcaatctgtgggtgtccccccgaggaagttagtaggttttaggtggaatgggtcacaaatnggttttgggcccttcggtttgtgncttancngggcaagtttttaacaaatttt

SEQ ID NO: 1906 - DNA, 857 bp, Homo sapiens
tgtcaataaaactttaggaatatctgcacatgtacatttacattcaagttgataacactggtggtttcatttcaatacaaattatgctagagaactgacatttcagacatggtcatatatatgctatttgaattcctttatcttgatacagatcttgattgtgaatctcttgatgatagatgtgcagctaatttgtcccgaaactcatgaagataattgtattgcttgatggtctgtattgccccggatcctcttaggtctcgcaggctgtctatggcttgctctggtgatattgtgtcagacaggtatagtaggagmcaagcagctacaagmcaagatctcccaagtcctccatagcagtgtattaaggtttttcggtaatttttaaggcaggttgtaagctcttccattatttcacagcagctggctatgtcaggagtccctccatctgcgattggatgatgatgggtgataattccacattgctggtagagatccagaaggtttgggactctatattttgacagttcccctctggtgcagaaaacaaatatgtcttgtataccacagctctttagttcttctgtatctttttggacatttcttctaacatctttaaatttacaacctggaagagcacataaaccgagaaactgagaacaattcactcgtgacaaagatagccatgatatatgaattggagtctgttcatcttcaataggctcttcatctgatgagtcaaactcacttgtttgtattgaactgggcggcttcatcgctggccgccccacgtcgagaccagtgccgcctccctctgcacccggcactcaccggtgccccggccgagccccgcccgc

SEQ ID NO: 1907 - DNA, 779 bp, Homo sapiens
cgccggcgctgcagagggaggcggcactggtctcgacgtggggcggccagcgatgaagccggctatctttgtcacgagtgaattgttctcagtttctcggtttatgtgctcttccaggttgtaaatttaaagatgttagaagaaatgtccaaaaagatacagaagaactaaagagctgtggtatacaagacatatttgttttctgcaccagaggggaactgtcaaaatatagagtcccaaaccttctggatctctaccagcaatgtggaattatcacccatcatcatccaatcgcagatggagggactcctgacatagccagctgctgtgaaataatggaagagcttacaacctgccttaaaaattaccgaaaaaccttaatacactgctatggaggacttgggagatcttgtcttgtagctgcttgtctcctactatacctgtctgacacaatatcaccagagcaagccatagacagcctgcgagacctaagaggatccggggcaatacagaccatcaagcaatacaattatcttcatgagtttcgggacaaattagctgcacatctatcatcaagagattcacaatcaagatctgtatcaagataaaggaattcaaatagcatatatatgaccatgtctgaaatgtcagttctctagcataatttgtattgaaatgaaaccaccagtgttatcaacttgaatgtaaatgtacatgtgcagatattcctaaagttttattgacaaaaaaaaaaaggaagaaaaaaacacaacaaaaaa

SEQ ID NO: 1908 - DNA, 3310 bp, Homo sapiens
cggaggagggctgctgtggaggagaagcggaggcagagacttgaggaggacaaagaacgccacgaagctgttgtacggcgcacaatggaaaggagccagaagccaaaacagaagcataaccgttggtcgtggggaggctctctccatgggagccctagcatccacagtgcagctcgccgcctgcagctcagcccatgggagagcagcgttgttaacagactcctgacgcccacacattcgttcctggccagaagtaaaagcacagctgccttgtctggagaagcagcatcttgcagccccatcatcatgccctacaaagctgcacactctagaaattcgatggatcgaccaaaactctttgtaacaccacctgagggctcttctcgcaggaggatcattcatggcacagcgagctataaaaaagaaagagagagagaaaatktactcttcctcacatctggcacccgaagggctgtatctccatctaatcccaaagcaagacaaccagctcgctcccgactttggcttccgtccaagtctcttcctcatttgcctggcacacccagaccgacatcctccttgccacccggctcagtcaaagctgctcctgctcaggtccggcccccatcccccggcaacatccgccctgtcaagagggaagtcaaagtggagcctgagaagaaagatcctgagaaggaacctcagaaagttgccaatgagccctcactaaagggcagagcacctttagtgaaggtagaagaagccacagttgaagagcggacacctgctgaaccagaagttggscctgctgctccagccatggccccagctccagcctcggccccagctccagcctcggccccagctccagccccggtccccaccccagccatggtctcagccccgtcatccactgtgaatgccagtgcttctgttaagacttctgcaggcaccaccgacccagaggaggccacaaggcttctagctgagaagaggcggctggcccgagagcagagagaaaaggaagaaagggagaggagggagcaggaagagcttgaaagacaaaagagagaggaattggctcaacgtgtggctgaagagaggacgactcgccgtgaggaggagtcgcgcaggctggaagccgagcaggcccgggagaaggaggagcagctgcagcggcaggcggaggagcgggcgctgcgcgagtgggaggaggcagagcgcgcccagaggcagaaagaagaagaagctcgcgttcgtgaagaagcagagagggtccggcaggaacgagagaagcatttccagagagaagagcaagagcgcctggagagaaagaagcgacttgaggagattatgaaaagaaccaggagaacagaagctacagataagaaaaccagtgatcagagaaacggtgatatagccaagggagctctcactggaggaacagaggtgtctgcacttccatgtacaacaaacgctccgggaaatggaaagccagttggcagcccacatgtggttacctcacaccagtcaaaagtgacagtggagagcactcccgatttggaaaaacaaccaaatgaaaatggtgtatctgttcagaatgaaaattttgaagaaattataaacttacccattggatctaaaccatccagattagatgtcaccaacagtgagagcccagaaattcctttgaatccaattttggcctttgatgatgaagggacacttgggcccctgcctcaggtagatggtgttcagacacagcagactgcagaagttatatgagtgtttcttctgaagaaccaaagctgaaatttaatgagaatttctacaattaatggaattcctttcctgctataaaggagcatcccctccacccgttttctagagttcttgaccatcattttgaaaagatttattaaaactagctaaagacaacagactggatagcttttctaataattttcatcaataggaaaaaagaaatacgtctcattcttcaatactttaaaatggctttttccagtgtgctccttcttagcaatcaatatttttctgcattctttaaaagacaagagaatttggttataaaagaaatgggctgactaggcatgatttttttggtcttaaaagcttaacatgtaaaattggcaaaaaaaattttttaccttttataatacttgaaaaataagtacctctttgttctacaagtagaatgaataggagaagagtttaagcctgtttttttaaaatattattgcaaagagctctatttgtagaagcaaattataggcagattaccaggttcttataaatacagcttgtacatggacattctgcaaacccagctgtcacatttttcttgcaactccttttgcaaaagcagactaaaatgttttaaaatgtgaaaaaacattattttttcaaagcaagaaaataatttactgccctcttacataatgtatttataaagtttttccagataaactaatcaaataaattagaataatgtgacaacattacaaatttaatttgttagctgcattccttctgatgttaccacgatagaatgttactgatgattcagggctatttctgaagtctgtatgttgctgctgtccccagtgatggtggacttatctttgccttacctgatcacaaattatgttggggaaaataaagatttaatatttctttaaatagaaaaagaatttggttttgctcgtttaagagcaatgagaaaatgatggaatgttgactgtgtttggcacacaggacacggaccttcatggaagtccttgctctgcgtggcatctgtcagcttttcacctttcattcttattcttcacttttgctgctgagcctagctgtacaaacttgcactttcatttgctaatataaattcagttttattttaccattttagagactactaatgattaaatgtagaaggagagggtgcacatgtttttatgtggagtgtttaaaagataaatttataccactgtaatgtgcagcttttattaaaagagaaattggttgaactgctaggttgaatgagagacttcatctattggactattttttttaatccaggcatatggtctttagtaatggcttgtaatttgtgaaaacattaatttgggggttttccctgttttcagttgtccatgtacacatagtcattatattagaaaagaaagctgttcaacaaacttgtttaatttgtttaaatcaacatagcatgaaacaccaaataaaatgtttgacatagttttaaaaaaaaaaaaaaaaaaaaaaaaaaaaaaaa

SEQ ID NO: 1909 - DNA, 1184 bp, Homo sapiens
  misc_feature (995)..(995): n equals a,t,g, or c
  misc_feature (1041)..(1041): n equals a,t,g, or c
ccgctgagcctgatcgttttacccatgtgcctgcttcaccattttctgcctgcatctgcttgaatctgctgttgccttggtgccttgaccttacgtccatcagtggcccgtgctgtagtggttggaggggagtgacaggcagcagagggcaaataaaatacctgtgaatcaaaccatggtttaggtacaaccccacctgaaaatggactctcagagcacccctgtgaaacagaacagataaatgcaaagagaaaagatacaaccagtgacaaagatgattcgctaggaagccaacaaacaaatgaacaatgtgctcaaaaggctgagccaacagagtcctgcgaacaaattgctgtccaagtgaataatggggatgctggaagggagatgccctgcccgttgccctgtgatgaagaaagcccagaggcagagctacacaaccatggaatccaaattaattcctgttctgtgcgactggtggatataaaaaaggaaaagccattttctaattcaaaagttgagtgccaagcccaagcaagaactcatcataaccaggcatctgacataatagtcatcagcagtgaggactctgaaggatccactgacgttgatgagcccttagaagtcttcatctcagcaccgagaagtgagcctgtgatcaataatgacaaccctttagaatcaaatgatgaaaaggagggccaagaagccacttgctcacgaccccagattgtaccagagcccatggatttcagaaaattatctacattcagagaaagttttaagaaaagagtgataggacaagaccacgacttttcagaatccagtgaggaggaggcgcccgcagaagcctcaagcggggcactgagaagcaagcatggtgagaaggctcctatgacttctagaagtacatctacttggagaatacccagcaggaagagacgtttcagcagtagtgacttttmagacctgagtaacaaatgtctttatttgcngcaaaagctacattcactttttattttaaaggatataacataaaangtgaatgtagcttttgcagcaaataaagacattcactttttatgttatatcctttaaaataaaaaattaatttgttgggattttagatgatttgcattttacattttcaattagatgagttgggctggtataaaacataagcc

SEQ ID NO: 1910 - DNA, 3878 bp, Homo sapiens
  misc_feature (2078)..(2079): n equals a,t,g, or c
  misc_feature (3847)..(3847): n equals a,t,g, or c
  misc_feature (3869)..(3869): n equals a,t,g, or c
tgacacgggccccacaggcatcaagtatgacctggaccggcaccagtacaactacgtggacgctgtgtgctatgagaaccgactgcactggtttgccaagtacttcccctacctggtgcttctgcacacgctcatcttcctggcctgcagcaacttctggttcaaattcccgcgcaccagctcgaagctggagcactttgtgtctatcctgctgaagtgcttcgactcgccctggaccacgagggccctgtcggagacagtggtggaggagagcgaccccaagccggccttcagcaagatgaatgggtccatggacaaaaagtcatcgaccgtcagtgaggacgtggaggccaccgtgcccatgctgcagcggaccaagtcacggatcgagcagggtatcgtggaccgctcagagacgggcgtgctggacaagaaggagggggagcaagccaaggcgctgtttgagaaggtgaagaagttccggacccatgtggaggagggggacattgtgtaccgcctctacatgcggcagaccatcatcaaggtgatcaagttcatcctcatcatctgctacaccgtctactacgtgcacaacatcaagttcgacgtggactgcaccgtggacattgagagcctgacgggctaccgcacctaccgctgtgcccaccccctggccacactcttcaagatcctggcgtccttctacatcagcctagtcatcttctacggcctcatctgcatgtatacactgtggtggatgctacggcgctccctcaagaagtactcgtttgagtcgatccgtgaggagagcagctacagcgacatccccgacgtcaagaacgacttcgccttcatgctgcacctcattgaccaatacgacccgctctactccaagcgcttcgccgtcttcctgtcggaggtgagtgagaacaagctgcggcagctgaacctcaacaacgagtggacgctggacaagctccggcagcggctcaccaagaacgcgcaggacaagctggagctgcacctgttcatgctcagtggcatccctgacactgtgtttgacctggtggagctggaggtcctcaagctggagctgatccccgacgtgaccatcccgcccagcattgcccagctcacgggcctcaaggagctgtggctctaccacacagcggccaagattgaagcgcccgcgctggccttcctgcgcgagaacctgcgggcgctgcacatcaagttcaccgacatcaaggagatcccgctgtggatctatagcctgaagacactggaggagctgcacctgacgggcaacctgagcgcggagaacaaccgctacatcgtcatcgacgggctgcgggagctcaaacgcctcaaggtgctgcggctcaagagcaacctaagcaagctgccacaggtggtcacagatgtgggcgtgcacctgcagaagctgtccatcaacaatgagggcaccaagctcatcgtcctcaacagcctcaagaagatggcgaacctgactgagctggagctgatccgctgtgacctggagcgcatcccccactccatcttcagcctccacaacctgcaggagattgacctcaaggacaacaacctcaagaccatcgaggagatcatcagcttccagcacctgcaccgcctcacctgccttaagctgtggtacaaccacatcgcctacatccccatccagatcggcaacctcaccaacctggagcgcctctacctgaaccgcaacaagatcgagaagatccccacccagctcttctactgccgcaagctgcgctacctggacctcagccacaacaacctgaccttcctccctgccgacatcggcctcctgcagaacctccagaacctagccatcacggccaaccggatcgagacgctccctccggagctcttccagtgccggaagctgcgggccctgcacctgggcaacaacgtgctgcagtcactgccctccagggtgggcgagctgaccaacctgacgcagatcgagctgcggggcaaccggctggagtgcctgcctgtggagctgggcgagtgcccactgctcaagcgcagcnncttggtggtggaggaggacctgttcaacacactgccacccgaggtgaaggagcggctgtggagggctgacaaggagcaggcctgagcgaggccggcccagcacagcaagcagcaggaccgctgcccagtcctcaggcccggagggcaggcctagcttctcccagaactcccggacagccaggacagcctcgtggctgggcaggagcctggggccgcttgtgagtcaggccagagcgagaggacagtatctgtggggctggccccttttctccctctgagactcacgtcccccagggcaagtgcttgtggaggagagcaagtctcaagagcgcagtatttggataatcagggtctcctccctggaggccagctctgccccaggggctgagctgccaccagaggtcctgggaccctcactttagttcttggtatttatttttctccatctcccacctccttcatccagataacttatacattcccaagaaagttcagcccagatggaaggtgttcagggaaaggtgggctgccttttccccttgtccttatttagcgatgccgccgggcatttaacacccacctggacttcagcagagtggtccggggcgaaccagccatgggacggtcacccagcagtgccgggctgggctctgcggtgcggtccacgggagagcaggcctccagctggaaaggccaggcctggagcttgcctcttcagtatttgtggcagttttagttttttgtttttttttttttaatcaaaaaacaatttttttaaaaaaaaaagctttgaaaatggatggtttgggtattaaaaagaaaaaaaaaacttaaaaaaaaaaagacactaacggccagtgagttggagtctcagggcagggtggcagtttcccttgagcaaagcagccagacgttgaactgtgtttcctttccctgggcgcagggtgcagggtgtcttccggatctggtgtgaccttggtccaggagttctatttgttcctggggagggaggtttttttgtttgttttttgggtttttttggtgtcttgttttctttctcctccatgtgtcttggcaggcactcatttctgtggctgtcggccagagggaatgttctggagctgccaaggagggaggagactcgggttggctaatccccggatgaacggtgctccattcgcacctcccctcctcgtgcctgccctgcctctccacgcacagtgttaaggagccaagaggagccacttcgcccagactttgtttccccaccgcctgcggcatgggtgtgtccagtgccaccgctggcctccgctgcttccatcagccytgtcgccacctggtccttcatgaagagcagacacttagaggctggtcgggaatggggaggtcgcccctgggagggcaggcgttggttccaagccggttcccgtccctggcgcctggagtgcacacagcccagtcggcacctggtggctggaagccaccctgctttagatcactcgggtccccaccttagaagggtccccgccttagatcaatcacgtggacactaaggcacgttttagagtctcttgtcttaatgattatgtccatccgtctgtccgtccatttgtgttttctgcgtcgtgtcattggatataatcctcagaaataatgcacactagcctctgacaaccatgaagcaaaaatccgttacatgtgggtctgaacttgtagactcggtcacagtatcaaataaaatctataacagaaaaaaaaaaaaaagggngccgtctaaagatcaacttctnccttgatca

SEQ ID NO: 1911 - DNA, 175 bp, Homo sapiens
  misc_feature (95)..(95): n equals a,t,g, or c
gtgagtggtgactatgggcatcctgtgtatatcgtgcaggatgggcccccccagagccctccaaacatctactacaaggtatgagggctcctctnacgtggctatcctgaatccagcccttcttggggtgctcctccagtttaaattcctggtttragggacamctstaacatct

SEQ ID NO: 1912 - DNA, 1807 bp, Homo sapiens
  misc_feature (624)..(624): n equals a,t,g, or c
  misc_feature (1779)..(1779): n equals a,t,g, or c
gacgcggccatcaggaagctgaactacacctatctcatcagcatcttgaaggacatgaagcagaacagggtcccggtgaacgaagtggtcatccgccagctggagtttgcagcccagtaccctcccacctttgaccggtaccaagggaagaacacctacctggagaagattgacggcttccgagcctattacaagcagtggctgacagtgatgcccgcagaggaaaccccgcacccctggcagaagttccggaccaagccccagggggaccaggacaccggcaaggaggctgatgacggatgtgcccttgggggcaggtgatgggagcacagctggaacaatgtgctcggcccccagtgctctgtgggagccccaggacaagtgagctggtgtcacctcctgcctgggggaagagccaggccctgaggaacagccgcagcgtgtcacaggtgttggtgaggacacacactaggcccaaggtgcctgtgctcccagcaggtccaagtgcagctccagccacctttgcgtgtcaccttcacgggacttccagctccagctacctttgtgtgtcacctcacacaccacaagggggctggggcatctggtccctggggcctgggccgncccgccggttccataggccgatgctctgaaagaagagacgtggggctcgagagatttaaagattttatttttacaaatcacagctgatagacagcgamgcttccccatagagaccgtgctccaactcgggcctggggcactgctcgctgctcccaggaagggggtggcgtgacaggcaggaacctgcgaagtccagagtccagggtggagcgcgccascctcagccagagcagccacgacagccacagtgtgtgcactcgatgatgcggcccacttccagcttgcttttgggcacgcggcagatgcagttcgtcccgaagttggtgtcccgtgtctgaatgcaccgcaggcagcacaagttctcatatccttgctttttccattttgcaatcaggtttttgtctgcatagccttctttaatacaatattcatagagttctctgctgatggctttccgcttgtaaaagaggtcgaagatgtagcgggttttctggtggtggatcctgaagatgggccacagagattccactttcctctttccctcatgcggttctgtttcagcttctctcatcttttgatctaattcatccagtgttggctcaatcaactcccagccatctgggggtgctttccggcttcttttgactttaggcattttccttccacaggataatctgcaaagatcttaggatgtgctttccaagagtatagacagcagaaagatctctcgtctctgcagttgcaggcttggattcttgttcagctctaaaaaattattctgtgactttcaggtcaccttccctctctggtcctgtttcttcggaagctcctggagcttgggtagctgcttctcgacagaaggcttccgctcttcaggcgatctctaaggcatgaggtccttgcggagccccgccctacccgcgcggagattgcgtcatcttaggtgtcctcagcaatgcctgtatagaattccagagccgctgttgccatttgccctcacttccggtgggtggcaggcagggccacgcgtcttcccgaacggagagactaggggcgttgttgcctggcagcagacgggcaagcctggacttaggcggcgcgcaggacggtccgacttcgtgcggaggcctccctgaggtccgggtccttgccacnccggccactgaagcggcggcggcggcca

SEQ ID NO: 1913 - DNA, 2810 bp, Homo sapiens
tttttttttttttttttttttttttttttggtttcatggtctgatttattggtggtgaatacacaggggcaggcccaggacaagcagcttggctactccccctctgctggctgcccgaccggcagagggggctccatgtggcaggagctaggctcccaacgcccactgttcttgccaccctctgggctcccaggctgggctccgctaggctcctgtctcccctgccagttagttaggcaagttcaggtgtggaggccgcagggatagatccaggtggctctgggctgggccctcttctcttcccagcggggaggtgctgttggcctggctgggctggcctgaatctgtttcaagttctcccttcctgcccagctcagttcaccagtgctggatccaggttcaaatgacagggacttgggtttttacaacagcgtggcaagtggtctgtctcctgggcagccatatcccagacccactgggttgaaggttctgtggggtggagggaccccaaggtgttccaagccagtggctgcactggcagcaggcctctgagagggaggcgggaagggtaggcgcggagagcaggctccattctgggtcgagtggaggactggctcccagggtgagttcacaccagtgctcccagctggcggctgctcagtctctcctgctgggcgagcgcggggggccggggctatgccatgctgctggtggagcagggggtgctctgggtgctcccgatgctgtggttggtgctgctgctctccgaggaggccggggcagccaccgccaccacgggctcccgcttgctgggggaacgcgtgtgcgagtagatgtaccagagtgcagcagtgagcagggccccgatgaggaaggcaccaaaggtgatgcccagcacggcgggcaggacgaggcctttgcttgtgcaaccagacaggtcagggctgatgatgttcaagcgcatgaagacagtcctatggacttcctggtcttgagacccggtcttgggacgcagggctaccgtgcagctgagggtgccggttttgggtatgggtactgtgtagaagtggaggaggaagctgaagcgcgggtcaccctcggggcttggggacagcaggctcacacagttgcccttggccgcccggccctggatgagttccacggtgcctccctcaggccccaagtccaggtggcagctgtctaactggagcaggaactcggagacggatggggacactctgacctgcacaaagctctgctctgccgcckgccaccgctgcccgagcccgacgctatgtccagcaaaggctccgtggttctggcctacagtggcggcctggacacctcgtgcatcctcgtgtggctgaaggaacaaggctatgacgtcattgcctatctggccaacattggccagaaggaagacttcgaggaagccaggaagaaggcactgaagcttggggccaaaaaggtgttcattgaggatgtcagcagggagtttgtggaggagttcatctggccggccatccagtccagcgcactgtatgaggaccgctacctcctgggcacctctcttgccaggccctgcatcgcccgcaaacaagtggaaatcgcccagcgggagggggccaagtatgtgtcccacggcgccacaggaaaggggaacgatcaggtccggtttgagctcagctgctactcactggccccccagataaaggtcattgctccctggaggatgcctgaattctacaaccggttcaagggccgcaatgacctgatggagtacgcaaagcaacacgggattcccatcccggtcactcccaagaacccgtggagcatggatgagaacctcatgcacatcagctacgaggctggaatcctggagaaccccaagaaccaagcgcctccaggtctctacacgaagacccaggacccagccaaagcccccaacacccctgacattctcgagatcgagttcaaaaaaggggtccctgtgaaggtgaccaacgtcaaggatggcaccacccaccagacctccttggagctcttcatgtacctgaacgaagtcgcgggcaagcatggcgtgggccgtattgacatcgtggagaaccgcttcattggaatgaagtcccgaggtatctacgagaccccagcaggcaccatcctttaccatgctcatttagacatcgaggccttcaccatggaccgggaagtgcgcaaaatcaaacaaggcctgggcttgaaatttgctgagctggtgtataccggtttctggcacagccctgagtgtgaatttgtccgccactgcatcgccaagtcccaggagcgagtggaagggaaagtgcaggtgtccgtcctcaagggccaggtgtacatcctcggccgggagtccccactgtctctctacaatgaggagctggtgagcatgaacgtgcagggtgattatgagccaactgatgccaccgggttcatcaacatcaattccctcaggctgaaggaatatcatcgtctccagagcaaggtcactgccaaatagacccgtgtacaatgaggagctggggcctcctcaatttgcagatcccccaagtacaggcgctaattgttgtgataatttgtaattgtgacttgttctccccggctggcagcgtagtggggctgccaggccccagctttgttccctggtccccctgaagcctgcaaacgttgtcatcgaagggaagggtggggggcagctgcggtggggagctataaaaatgacaattaaaagagacactagtcttttatttctaaaaaaaaaaaaaaggaaaagagat

SEQ ID NO: 1914 - DNA, 4039 bp, Homo sapiens
aattcggaacgagggtgaagcacaaggattaagttggaaaagctgtaaattgcatgtgcatatttgtctattttttctataagttttattgcaagaggtaaagaagaaaactatatatatatatcttatttagataatctcagtaccttttctggcatttttgccctgtataggttgacttggcaattcggcctttttagaggcattaactactcctcgtaagtgttgcatttacatggctgtttagaaaactgctgcccaaatttattttatatttttgtacagattctgcagtttatgatattgttttctaaaaacaaatgctgtttatacatatgagatagctattttgataggatttgctcacatagttcctgcaaacttcagatgtacaagttgcacttgtacttttatagagttgtaatgttttatatgtgtatggtgcaagagaaaattggatcaaatcaatctgcagttgatgtccccaaatgcaaacacaggcacacacatgcacacacccataaacacacacacagtgctttaagaaagggccaggtgatatcacacccaaatttcacaagcactgaccccctggcaccaacacccgccagtactgtgacttccaaagccagagccacatgtgctcatcaaacttgcattaagcagttggcgggagatggctgtggagctgggggtttaagtgatggttctcttttgctccctcttytgagggtaaagctactgtctttcttaagagtgtatttatgccaagtttgcgcttttaattgtttttattttgttttttaatgaaaacccagatctttcctttttggcataatttttatgatgacctgaaattttacatccgaacaaaattttacatccgaaaagcaaccaacttcttcatggaactcagccctgttgcaatgcttagggcccttaaagaagaaaatctccccakaaggcatccatcatgttgcttaattgtcttctgcagcttcctttccctagagctttccctgtgttgctaagagctgaaaatggcatcttcgtgatcaccacagtgagcttggctcgcctcggccggcccgggatgcactcttacaacatgtgtgactcttgaacctggagttcatcacattacgtcacagcttcccatctggttgctttcctgagtcagctacttcacacttgtcaaggctgttttaccccaaaactcagacaggactttctatgcatgttttccctcctccccccaattccccccccatcaccttatctcccaggacacacttgagaagtagctttttattcctagtggtgtacatttaattttaaaaaggttgcaatgtatcatgcttgttgccgaaactgtttatggccttcttgtttcagttttttcttttcttccaatggtactttagctgttgagtgcaggttacaacctatattgttatgcagatggcttctttaggaataacttttatatttatttaaaaatttttaaattatgggatgttttgttgttgttgttgtctttgttgttggtcatttgtcaatattcagtcaccaattctgctcacttcttgccatggataaaattgggtctttctggctaattaaaaaagacaactttataaaatggcactttaagcaagccatagttagttttatttttgtaatgcacatggcaaagcaaagacgtttgtgatgaaggaactgctcatctaagcaaaagatttgagtatgatatgataaaggctttctacattctaatttactttttccccccacttgaatgtgttttaaaggctaattatcagctcagtagagcagtgagaaactgatcaaattgcacttgttctcctacaagcaacctccacgcagacacctcgtactgctacaggtgtgtcatttcctttaataggaccagggaccatgtaactgaggtgagggttgtagtaratgcttccagtgtcagtatgcctgttaattttaagagcttccctttcttgcagagaacaagtctgcccagattccatgctttctataactggaggacctggcaaacctgccgcatgctgcacacatctacctacgtacacatatacaatagtattgatgattctgaacaataacagggtaaaacagttggtttgccattgttaaaaactgatttacagtaacttacaacaactgtacttttgttggattagcaaatcatgtgtttaaacaaatcccatatgttgggcaacagttcaaataagcacggagaagtgttgcccaaacttggttctctgactcttatgtatttgtaaggctgggcttcaaaatcaaaacaaaaaccccaaaaacagcaggcaaatgctttttaactctgacaccgttgccataaatccctgatactcaaagtctaacaagaaagacatggaaaattagcagcccattttcagaaagatcaaaatgatctagggttctaattgcttttgcatcctattcttacaaagtgatgtcccaacagggaacagtaggagctggagtgggatctccaagtcccagtttgagtgtgggatgtgcttccagcagtgccttccctttatgaaagacatcacatggcatccagggccaggcaggcagcttgaggtgcctttacgagaaaaccgagctggggctgggagaggacagttattgacactgatgtgcaatgaagtgacaagatgagagcagaatcgtaagagctttgaatttgaagtgagttttttccccccataagttatttattccttttttctgtgtaaatatatttattttactgtggagcgctaacatctggatcgtaacatgtgcagaatgtatggtaggaatgtattctcttgtaggaatgtaaatctgtattaaaagggggtccaagccaggcccccaggtcttctcattgtatgcacagtccgcattcatttttactcttctctaatatgggtctatttgaaatatgcaaaaggtatgaggaatgttttaatacctccaaatttttaagaaaagcatcaaagggttgatattttttaaagtttttttagtagcactttctctggatgacagaaggggcaaccacatgggcacccttgttcataccaaagggtgagcagtggccagagcctcctctgcacctctcgagtgtctttaccaattgagctttttatcgccatagccccttggagtgccccagctgccctgaggtcaatcaaggaaaatttcttaatgaaataagctccaaagagccaaagtatcaacttacagatcgtttttaaagcttaaatttatgaaccacctttgtggtaaacaatgaattatgaataccgcagggcagccttcttaaatgacaaatgtaaaaaaaaaaaaaaaaaaactctacttcgtgcagcaattgctactctatacgaattgtcttaatttgaaaaccttgctgttacaaattggacctttatacattttctgaaaacaatgaaaagagtatatttaaccttttctggctgtaaatggttaccttcctgtaactgccccgcacctggaggcatggagttgtgtgcatcctgcttatgtacaattgttttcagtgtttctaagaatgagtctgaatggttcttgaaaattagccaggatcaaatgctattgcagacaaagccaataaaaagttggacttcttttggggataacaagttttggaagagaaatgcaggccatatgtgcgcatgaccgagattttgaaaaaagatgtacatagtgacatgtttggtgcatggtttttgaggagggcttttgtcaaaaaggaggtataacctttcccccacagacctgagagctgtgccttttctatgcaatattacagacgttacatcggaacccagatggctgtattcacatgtaggtttgggctgtaatctaaacaattggacagattaaatgtacatggaaatgagcagtcttacttttgtagttttatattatacaataaacagttaaaagatgaaaaaaaaaaaaaaaa

SEQ ID NO: 1915 - DNA, 3989 bp, Homo sapiens
  misc_feature (627)..(627): n equals a,t,g, or c
tcagttggaagacttaaagaaagtcagtcagaattcacagcttgctaatgagaagctgtcccagttacaaaagcagctagaagaagccaatgacttacttaggacagaatcggacacagctgtaagattgaggaagagtcacacagagatgagcaagtcaattagtcagttagagtccctgaacagagagttgcaagagagaaatcgaattttagagaattctaagtcacaaacagacaaagattattaccagctgcaagctatattagaagctgaacgaagagacagaggtcatgattctgagatgattggagaccttcaagctcgaattacatctttacaagaggaggtgaagcatctcaaacataatctcgaaaaagtggaaggagaaagaaaagaggctcaagacatgcttaatcactcagaaaaggaaaagaataatttagagatagatttaaactacaaacttaaatcattacaacaacggttagaacaagaggtaaatgaacacaaagtaaccaaagctcgtttaactgacaaacatcaatctattgaagaggcaaagtctgtggcaatgtgtgagatggaaaaaaagctgaaagaagaaagagaagctcgagagaagcntgaaaatcgggttgttcagattgagaaacagtgttccmtgcyagacgttgatctgaagcaatctcagcagaaactagaacatttgactggaaataaagaaaggatggaggatgaagttaagaatctaaccctgcaactggagcaggaatcaaataagcggctgttgttacaaaatgaattgaagactcaagcatttgaggcagacaatttaaaaggtttagaaaagcagatgaaacaggaaataaatactttattggaagcaaagagattattagaatttgagttagctcagcttacgaaacagtatagaggaaatgawggacagatgcgggagctacaagatcagcttgaagctgagcaatatttctcgacactttataaaacccaggtaaaggaacttaaagaagaaattgaagaaaaaacagagaaaatttaaagaaaatacaggaactacaaaatgaaaaagaaactcttgctactcagttggatctagcagaaacaaaagctgagtctgagcagttggcgcgaggccttctggaagaacagtattttgaattgacgcaagaaagcaagaaagctgcttcaagaaatagacaagagattacagataaagatcacactgttagtcggcttgaagaagcaaacagcatgctaaccaaagatattgaaatattaagaagagagatgaagagctaacagagaaaatgaagaaggcagaggaagaatataaactggagaaggaggaggagatcagtaatcttaaggctgcctttgaaaagaatatcaacactgaacgaacccttaaaacacaggctgttaacaaattggcagaaataatgaatcgaaaagattttaaaattgatagaaagaaagctaatacacaagatttgagaaagaaagaaaaggaaaatcgaaagctgcaactggaactcaaccaagaaagagagaaattcaaccagatggtagtgaaacatcagaaggaactgaatgacatgcaagcgcaattggtagaagaatgtgcacataggaatgagcttcagatgcagttggccagcaaagagagtgatattgagcaattgcgtgctaaacttttggacctctcggattctacaagtgttgctagttttcctagtgctgatgaaactgatggtaacctcccagagtcaagaattgaaggttggctttcagtaccaaatagaggaaatatcaaacgatatggctggaagaaacagtatgttgtggtaagcagcaaaaaaattttgttctataatgacgaacaagataaggagcaatccaatccatctatggtattggacatagataaactgtttcacgttagacctgtaacccaaggagatgtgtatagagctgaaactgaagaaattcctaaaatattccagatactatatgcaaatgaaggtgaatgtagaaaagatgtagagatggaaccagtacaacaagctgaaaaaactaatttccaaaatcacaaaggccatgagtttattcctacactctaccactttcctgccaattgtgatgcctgtgccaaacctctctggcatgtttttaagccaccccctgccctagagtgtcraagaygccatgttaagtgccacagagatcacttagataagaaagaggacttaatttgtccatgtaaagtaagttatgatgtaacatcagcaagagatatgctgctgttagcatgttctcaggatgaacaaaaaaaatgggtaactcatttagtaaagaaaatccctaagaatccaccatctggttttgttcgtgcttcccctygaacgctttctacaagatccactgcaaatcagtctttccggaaagtggtcaaaaatacatctggaaaaactagttaaccatgtgactgagtgccctgtggaatcgtgtgggatgctacctgataaaccaggcttctttaaccatgcagagcagacaggctgtttctttgacacaaatatcacaggcttcagggttaagattgctgtttttctgtccttgctttggcacaacacactgagggttttttttattgcgggtttgcctacaggtagattagattaattattactatgtaatgcaagtacagttgggggaaagcttaggtagatatattttttttaaaaggtgctgcctttttggatttataagaaaatgcctgtcagtcgtgatagaacagagttttcctcatatgagtaagaggaagggactttcactttcaagtggaacagccatcactatcaagatcagctcatggaaggagtaaagaaaatatctcaaaatgagacaaactgaagttttgttttttttttaatgacttaagtttttgtgctcttgcaagactatacaaaactattttaagaaagcagtgatatcacttgaacttcagtgccctcactgtagaatttaaaagccttactgttgattgcccatgttggacttgatggagaaattaaatatctttcattatgctttacaaaatactgtatatgtttcagcaagtttggggaatgggagaggacaaaaaaaagttacatttaatctatgcatttttgccaagccatattgagttattttactactagagacattaggaaactaactgtacaaaagaaccaagtttaaaagcattttgtggggtacatcatttctataattgtataatgtatttctttgtggttttaaatgataaagacattaagttaacaaacatataagaaatgtatgcactgtttgaaatgtaaattattcttagaacactttcaatgggggttgcattgtccttttagtgccttaatttgagataattattttactgccatgagtaagtatagaaatttcaaaaaatgtattttcaaaaaattatgtgtgtcagtgagtttttcattgataattggtttaatttaaaatatttagaggtttgttggactttcataaattgagtacaatctttgcatcaaactacctgctacaataatgactttataaaactgcaaaaaatgtagaaggttgcaccaacataaaaaggaaatatggcaatacatccatgatgttttccagttaacataggaattaccagataaatactgttaaactcttgtccagtaacaagagttgattcatatggacagtatgatttattgtttatttttttaaccaaatacctcctcagtaatttataatggctttgcagtaatgtgtatcagataagaagcactggaaaaccgatcgtctctaggatgatatgcatgtttcaagtggtattgaaagccgcactgatggatatgtaataataaacatatctgttattaatataaaaaaaaaaaaaaaaaaaaaaaaaaaaaaaa

SEQ ID NO: 1916 - DNA, 2629 bp, Homo sapiens
  misc_feature (35)..(35): n equals a,t,g, or c
gacagtcacggtccgattcccgggtcgacccacgngtccggggtcctccaggcccagttggtccttcaggtaaagaaggaaaccctgggccacttgggccaattggacctccaggtgtacgaggcagtgtaggagaagcaggacctgagggccctcctggtgagcctggcccacctggccctccgggtccccctggccaccttacagctgctcttggggatatcatggggcactatgatgaaagcatgccagatccacttcctgagtttactgaagatcaggcggctcctgatgacaaaaacaaaacggacccaggggttcatgctaccctgaagtcactcagtagtcagattgaaaccatgcgcagccccgatggctcgaaaaagcacccagcccgcacgtgtgatgacctaaagctttgccattccgcaaagcagagtggtgaatactggattgatcctaaccaaggatctgttgaagatgcaatcaaagtttactgcaacatggaaacaggagaaacatgtatttcagcaaacccatccagtgtaccacgtaaaacctggtgggccagtaaatctcctgacaataaacctgtttggtatggtcttgatatgaacagagggtctcagttcgcttatggagaccaccaatcacctaatacagccattactcagatgacttttttgcgccttttatcaaaagaagcctcccagaacatcacttacatctgtaaaaacagtgtaggatacatggacgatcaagctaagaacctcaaaaaagctgtggttctcaaaggggcaaatgacttagatatcaaagcagagggaaatattagattccggtatatcgttcttcaagacacttgctctaagcggaatggaaatgtgggcaagactgtctttgaatatagaacacagaatgtggcacgcttgcccatcatagatcttgctcctgtggatgttggcggcacagaccaggaattcggcgttgaaattgggccagtttgttttgtgtaaagtaagccaagacacatcgacaatgagcaccaccatcaatgaccaccgccattcacaagaactttgactgtttgaagttgatcctgagactcttgaagtaatggctgatcctgcatcagcattgtatatatggtcttaagtgcctggcctccttatccttcagaatatttattttacttacaatcctcaagttttaattgattttaaatatttttcaatacaacagtttaggtttaagatgaccaatgacaatgaccacctttgcagaaagtaaactgattgaataaataaatctccgttttcttcaatttatttcagtgtaatgaaaaagttgcttagtatttatgaggaaattcttcttcctggcaggtagcttaaagagtggggtatatagagccacaacacatgtttattttgcttggctgcagttgaaaaatagaaattagtgcccttttgtgacctctcattccaagattgtcaattaaaaatgagtttaaaatgtttaacttgtgatcgagacctacatgcatgtcttgatattgtgtaactataatagagactctttaaggagaatcttaaaaaaaaaaaaacgtttctcactgtcttaaatagaatttttaaatagtatatattcagtggcattttggagaacaaagtgaatttacttcgacttcttaaatttttgtaaaagactataagtttagacatctttctcattcaaatttaaagatatctttctcctcttgatcaatctatcaatattgatagaagtcacactagtatataccatttaatacatttacactttcttatttaagaagatattgaatgcaaaataattgacatatagaactttacaaacatatgtccaaggactctaaattgagactcttccacatgtacaatctcatcatcctgaagcctataatgaagaaaaagatctagaaactgagttgtggagctgactctaatcaaatgtgatgattggaattagaccatttggcctttgaactttcataggaaaaatgacccaacatttcttagcatgagctacctcatctctagaagctgggatggacttactattcttgtttatattttagatactgaaaggtgctatgcttctgttattattccaagactggagataggcagggctaaaaaggtattattatttttcctttaatgatggtgctaaaattcttcctataaaattccttaaaaataaagatggtttaatcactaccattgtgaaaacataactgttagacttcccgtttctgaaagaaagagcatcgttccaatgcttgttcactgttcctctgtcatactgtatctggaatgctttgtaatacttgcatgcttcttagaccagaacatgtaggtccccttgtgtctcaatactttttttttcttaattgcatttgttggctctattttaatttttttcttttaaaataaacagctgggaccatcccaaaagacaagccatgcatacaactttggtcatgtatctctgcaaagcatcaaattaaatgcacgcttttgtcatgtcaaaaaaaaaaaaaaaaaaaaaaaaaaaaaaaaaaaaaaaaaaaaaaaaaaaaaaaaac

SEQ ID NO: 1917 - DNA, 1551 bp, Homo sapiens
  misc_feature (676)..(676): n equals a,t,g, or c
gctccactgcttctactctgggttgggattcaggaagacaggcacagtcctctctgttcatagaaacacctgccagtgtcaaggattccagtcaggtgtctatcccaactggtcagggagagaagggcagacccattctcaaagaccaccatgtccaaggtctgacagctccccactggctgcccccacaggggctttaggctggtctgggtcatggggaagcgtccctcttatcgctggtctgtgttctcctggatttggkatctatgttggtacgactcctggccttttatctaaaggactttggcttttgtaaatcacaagccaataatagacttttttctccccctctgttttttgctgtgtcatctctgccttgagactgccttgagacagtgcttgccttgagagagtgagccaattaacagctgcctgaattgtcattttccattttggtttgttagaggtgggaggggtgggttttgagaaggtcaaaagcaataccagaagtaaagggaaatatcagacaatattttattattttttcatagatgttctgccacacaaagaacttggggtgtaaggataaggcaaaagctccaatcccatttttcagttctcctaggatgcacccctcagggagcctggccagagttccgaggcccgtgagcgtcantgtttgctttattttccatcaaagccctctgagaagtgagacctcagcaattccgggagccacatagagacagacttggcaagggaccccctggttctgagccagtagctgccatctggaaattcctcttttagcctctccttagaggtgaatgtgaatgaagcctcccaggcacccgctgaatttctgaggccttgcttaaagctcagaagtggtttaggcatttggaaaatctggttcacatcataaagaacttgatttgaaatgttttctatagaaacaagtgctaagtgtaccgtattatacttgatgttggtcatttctcagtcctatttctcagttctattattttagaacctagtcagttctttaagattataactggtcctacattaaaataatgcttctcgatgtcagattttacctgtttgctgctgagaacatctctgcctaatttaccaaagccagaccttcagttcaacatgcttccttagcttttcatagttgtctgacatttccatgaaaacaaaggaaccaactttgttttaaccaaactttgtttggttacagttttcaggggagcgtttcttccatgacacacagcaacatcccaaagaaataaacaagtgtgacaaaaaaaaaaacaaacctaaatgctactgttccaaagagcaacttgatggttttttttaatactgagtgcaaaaggtcacccaaattcctatgatgaaattttaaattaatgggcacctttcaacatcatttgcttccttatctacagttgattcagaaatctgcattttttattcttttatatgacttttaagtaaaagatttatatggawttaaaaaaaaaaaaaaaaaaaaataacgtt

SEQ ID NO: 1918 - DNA, 468 bp, Homo sapiens
ggcaaaactgggggagattgttttgctggaggccctgggtctgggagaaggggggctgattcctctgaaattgctagaagagacacaggtgaggcctaacttgggctttccgctaccgtcctgcaggcattattgtcatggcactgctgggcatgttcaatgtgcaccgtcatggggccattaactcagcagccatcttgttgtatgccctgacctgctgcatctctggctacgtgtccagccacttctaccggcagattggaggcgagcgttgggtgtgggaacatcattctcaccaccagtctcttctctggtgaggactttcctttccctggtgggcctttctggattaggaatgaagaacacattgtgggctgggtcacagtgggttcacamctgtkaatcctagcacttggggagaccgaggsccgaggwttcaatttgaggcccaaaagttttgaggacaag

SEQ ID NO: 1919 - DNA, 1799 bp, Homo sapiens
ggcacgaggattacacgtctgagccaccatgcccagcccagaaaaaaatttctatcatcttttgctaccatttttgctggcactactaaaagcattaaaatgtgacagcagttccattgcctccacatctatgtacaatttctaataccatttttgctctggtgctgatggtttcctgatatcaggtagggtggagtacagggatgcttctaccaggagtgtgattatacagccactgcctttatttctggctttgcctttgtgatatggtctatcagatgattgataaaatctatctagagtaaggatataagacaaaataaagatactgtaattaaggggaaagggaggctagaggacatggctcagtatccccaagtcttttatttaggatatgggttcagctacttctgacttgacttaaacagtgacaaaataacaatggcttaaacaagatagtttatttctcttcatgtaaaaatttgaatgacaatttagtgaaggtgacaagggcccacgcttctgctaaggtccaggcattcctagagtggtatatgatagatcatatggtataagctagatcacttccatagccacagagtatccagttattaatacaaacaaatgagaagaggaaggggagagcaagtctttctttgtttttagagcacaatccagaagttgaattcctatcttagtcacattaaattggctagagtatcgttacgtagtcagacctagagttgcaaaggagactgaaaaaatgcagtttaatctgaacagccatgtgtccaggtaaaaattctgttattagggaagaaagagagaatgaatattgggaaacactttcaagactcccacaccaaagtactacctaaatattttattcttcctatgtttgtgtgaggtattgaggttttayaaatgtgcacataattttgcaattgtatttttatttatattacacagtaagaaaaacagaatgttctatatttatagtcttcctgttacaaatatgcgattagagcttaaagagtcatagtatcagaattagaatgttaatattcccactcaatatactgaggtctcattttcattatggtgggtttactaactgccccatatacttcgcagggctgctttgaagctaaaatgagatcattcatatgggatcacattaagctgctagaaattagaaaatgtacatgagatagtataaattttacagtcactaatttaagtttcttttcattagacgctgttggaagctctgactgtggcagttgttgttactttctatgatgtatatattattctgcaagctttcatactgactactacagtattttttggtttgactgtgtatactctacaatctaagaaggatttcagcaaatttggagcagggctgtttgctcttttgtggatattgtgcctgtcaggattcttgaagttttttttttatagtgagataatggagttggtcttagccgctgcaggagcccttcttttctgtggattcatcatctatgacacacactcactgatgcataaactgtcacctgaagagtacgtattagctgccatcagcctctacttggatatcatcaatctattcctgcacctgttacggtttctggaagcagttaataaaaagtaattaaaagtatctcagctcaactgaagaacaacaaaaaaaatttaatgagaaaaaaggattaaagtaattggaagcagtatatagaaactgtttcattaagtaataaagtttgaaacaatggaaaaaaaaaaaaaaaaaa

SEQ ID NO: 1920 - DNA, 1267 bp, Homo sapiens
  misc_feature (11)..(11): n equals a,t,g, or c
  misc_feature (17)..(17): n equals a,t,g, or c
  misc_feature (26)..(26): n equals a,t,g, or c
  misc_feature (1244)..(1244): n equals a,t,g, or c
  misc_feature (1252)..(1252): n equals a,t,g, or c
  misc_feature (1264)..(1264): n equals a,t,g, or c
cggattatgcngamacnccccagggnttrtgctatgacgtcgcatgcacgcgtaagcttgggcccctcgagggatcctctagagcggccgccgcggcattcggggaatctgcagggcagatgagtaacgaaagaggctttgaaaatgtagaactgggagtcataggaaaaaagaagaaagtcccaaggagagtcatccactttgttagtggtgaaacaatggaagaatatagcacagatgaagacgaagttgatggcctggagaagaaagatgttttgcctactgttgatccgacaaaacttacctggggtccctacttatggttttacatgcttcgggctgctacatcaactctctcagtgtgtgacttccttggagagaagattgcatctgttttgggtatcagcaccccaaagtaccaatatgccattgatgaatattatcggatgaagaaggaggaagaagaagaagaagaagaaaacaggatgtctgaagaagcagaaaaacaatatcaacagaataaattgcagactgattccattgttcagacagatcaaccagagacagtgatatccagctcatttgtgaatgtcaattttgaaatggagggagacagtgaagtaattatggaaagcaagcaaaatccagtctctgtcccaccataaaatgaaatgactatcaagcttcaaactcttaagttttttttttttaatacaaaaactttcacattctttattcagtgggacttaatacaattatttatattttaaattattaaagtatctggaaagggaaaatgttttcttcatttttaggatctatctagcaaaagccagatctgaaattcagatatttgtactgtttttactgtgtatagaaattagtgctttggttttaaaatgatcttttaaaaaagttaaggacatcctagagccttaatagttaagaagagttaaattatcaagcctatttgtgcatttgctttttttgaaaaaggtaagttgctgattaagtctaattggaattgataattccatagtcttagattaaaatgaggatattttctcctagattttctcatgttatgccatgcatttatatatctaaccattaatttcacactaaggatgcttcaccatataataaaaggagcaagatggaaaaaaaaaaaaaaaaaaaaaaaaaaaaaaaaaaaaaaaaaaaaggggcggacgcgtgggtccgacccgggaattcccggatcngtcactgncgggctgacttntct

SEQ ID NO: 1921 - DNA, 554 bp, Homo sapiens
  misc_feature (438)..(438): n equals a,t,g, or c
  misc_feature (543)..(543): n equals a,t,g, or c
  misc_feature (547)..(547): n equals a,t,g, or c
  misc_feature (551)..(551): n equals a,t,g, or c
tggcggggagcgcaagcggcggcggccactgccacgtattcccggcagtggtggcggcggcggcggcggcgcccgcgggcaggaataactcaagtcacctgtactggaaatcagtttgctgaaattaatcaacgattcttgaagttgaagaaaagttgttctctctacaggaggttccagccttgsaagaggagtgtggcccttcctggaatccctctggacacaccctcctagcatcctctaggaaagatgcggcakcsaaagggaagcccaagaaggagacctccaaggacaagaaggagcggaagcaagccatgcaggaggcccggcagcagatcactacagtggtrctgcccacrctggccgtggtcgtgctcttgatcgtggtgtttgtgtacgtggccacgcgccccaccatcaccgagtgagccccgcatncggtcgcggaccccatcggcagggagaggaatgctcgggagggggacgcaaacaaaaaatggcttttatattcagagatgttcatgttgctgaactgttaagcangaancacnctg

SEQ ID NO: 1922 - DNA, 1718 bp, Homo sapiens
  misc_feature (1688)..(1688): n equals a,t,g, or c
  misc_feature (1708)..(1708): n equals a,t,g, or c
  misc_feature (1714)..(1714): n equals a,t,g, or c
taaagcttgccccttggaggatcttttagagcgcccccctttttttttttttttttggctttsttccaataaagctttatttacaaacacaggctgtgggctggatttggcctgcaggtgtagtttgtgatccttgattcagasagtttagcaaggctgaaaagaacaccsacacccccttgttacccacagatgggtgggacttggccagagsccaagaggaggtkttcgcaggggaayatacagcacgttagaggccgggagtgttccagggcaccaagtgtgggaaagtgggacatacggggaagtttccagaaagcrtgatgtcaagttggaggcggagcgctgctggggcgtgaagagtctcgagtccaagtgagrgagttaggaacttgggagggtttgttgttgggtcggggacctggggtcagccaggtggtgacctgggatggggtggggacaggmaatgagktaagctctgctctttatttttttgcagatgcttttctcaaactttcctgatcctgcgggcaagctaaaccagttccggaagaacctgcgggartcgcagcagctccgatgggatgagagmtgggtgcagastgtgctccmtttggttatggacacataactcctgggccagaggctaaaaccccaggacccctgctgtccttcccgcagcttcttcttggagtctcagggcaaaccctttcgagcagcacctcccagtggccagaagctgaaatgacagcagtggtactgcctggtaaaagaattggttctgtgacccgggaagctttggttggccttgatttcttctctggaggcttggaaacgcttcctctcttcttctgttcttcacgccccatgcccctgctagcgtattactgttctgtgacttccctgtgacctctgcagaactcctcatcctgcgtttggtctccaggtgtcccctttctgccgtgttcctaacattttgattcctgtcttgaaaaaagcacctgctgcaccgtaagcccagggatgtggcagctgcagtgggcttggctttgtgaggaactgagtgtgtccacgttgggggaacatcatacttgatacacacgtttttatttgcacaaagaaaatgctrtttttggagccagaattttcatgtctgatttatggtgattttcttaagaaccagaactgctggcagaaagggggcacccacacgcttagatagccgatgtcttattagagggcagtttgtggttcctgatttggaawttaacattctccaaacattccagtccaatgaaagttttatccgctttcccatataaaaattcttcccatgagagtgacttgattctcacaatcccgttggagtcgtgtgtgagtcctacagtgtgaggttcagcattgccatctccaagtgctctccrtagggaaacagtttctggtcatgatgagcttccgcttcccatctgatcccagcccrgcctagctcggtggtgaacasctggcacgtctctgggttgcggacrgtaaaggccaygtagacctcaggagcccgctggtgctcccagcaggcagccagcctccgcaggacsccgaccagsgacaygatggcttctgggcaatacagcacgtctacggtgaaagcttcaggttactgctgtaatgacaacatctggctggaaggccanaactgatggaccgcactacntcccantcca

SEQ ID NO: 1923 - DNA, 1975 bp, Homo sapiens
  misc_feature (8)..(8): n equals a,t,g, or c
actctctncaggttgaaaagcctctttatccatttaatcctctctggccctccttcccctmcwgcgtggatgcaactagagagacaaatcgcctaggaagactgatcaatcacagcaaatgtgggaactgccaaaccaaactgcacgacatcgacggcgtacctcacctcatcctcatcgcctcccgagacatcgcggctggggaggagctcctgtatgactatggggaccgcagcaaggcttccattgaagcccacccgtggctgaagcattaaccggtgggccccgtgccctccccgccccactttcccttcttcaaaggacaaagtgccctcaaagggaattgaattttttttttacacacttaatcttagcggattacttcagatgtttttaaaaagtatattaagatgccttttcactgtagtatttaaatatctgttacaggtttccaaggtggacttgaacagatggccttatattaccaaaacttttatattctagttgtttttgtactttttttgcatacaagccgaacgtttgtgcttcccgtgcatgcagtcaaagactcagcacaggttttagaggaaatagtcaaacatgaactaggaagccaggtgagtctcctttctccagtggaagagccgggaccttccccctgcacccccgacatccagggacggggtgtgaggaagacgctgcctcccaatggcctggacgggatgtttccaagctcttgttcccctaacgtctcaacaggcgctcactgaagtgtatgaatattttttaaaaaggtttttgcagtaagctagtcttcccctctgctttctcgaaagcttactgagccctgggccccaagcacgggccgggcatagatttcctcttccacaagctgccgcttttctgggcaccttgaagcatcagggcgtgaaatcaaactagatgtgggcagggagagtgttgcttacctgccctgctggggcagggtttcctgaaactgggttaattctttatagaaatgtgaacactgaatttattttaaaaaataataataaaaatttaaaaaaattaaaaataaaaaaaaccacagaaaacaactttacatgtatataggtcttgaagtgagtgaagtggctgctttttttttttttttttttttgcttttttttgctttttgtagaagagattgagaatggtactctaatcaaaaataaagttttgtagtgggaccagaaattacttacctgacatccacccccattccccctcatcctgctggggttgaaagttccagacctgctgtcgaggccttgtgtttgtcagacacccagtgtcctcctgcaaggacgcaactgtgagctgaggtgtgagcctaggagcccaggacccctgaccccggccgctgctgccagcctcagaaaggcacccaggtgtgcaggggagcacacagggcccggcagcccccaggaatcaaggatagggctaaggttttcaccttaactgtgaaggcaggaggaataggtgactgcttcctcccgcccttcacagaactgattctcacacactgtcccttcagtccagggggccggggctcaggagccatgacctggtgtctcctgcccaccctggtcccaggtaaatgtgaatggagacaggtatgagaggctgtcctcgtctttgattcccccccaaccccacctcgggcctcacgacggtgctacctaagaaagtcttccctcccaccccccgctagcctggtcagtggtcagcaaattggaagaggatccgatgggagtgtaaatgtgagacacaatgtcttgattatacctgtttgtggtttagctttgtatttaaayaaggaaataaacttgaaaattatttgtcatcataaaaatgaaacaaattaaaatatttattgccaggcaaaaaaaaaaaaaaaaaagttttggcccatagtgagtcctttacaagtcga

SEQ ID NO: 1924 - DNA, 508 bp, Homo sapiens
  misc_feature (463)..(463): n equals a,t,g, or c
gtacaagatgacggagccgggcgcctctcccgaggacccttgggtcaaggtggagtatgcctacagcgacaacagcctggaccccgggctttttgtagaaagcacccgcaaggggagtgtagtgtccagagctaatagcatcggttccaccagtgcctcttctgtccccaacacagatgatgaggacagtgattaccaccaggaggcctacaaggagtcctacaaagaccggcggcggcgcgcacacactcaggctgagcagaagaggagggacgccatcaagagaggctatgatgaccttcagaccatcgtccccacttgccagcagcaggacttctccattggctcccaaaagctcagcaaagccatcgttctacaaaagaccattgactacattcagtttttgcacaaggagaagaaaaagcaggaggaggaggtgtcacgttacgcaaggatgtaccgncctaaagatcatgaaagtgaactatgarcagattgtgaaggcaca

SEQ ID NO: 1925 - DNA, 2885 bp, Homo sapiens
gggcacgagcggctgctggctcctcctcgtccttgtcctcgtcctacttgtgagcccccgcggctgccgagcgcggcggggcctccgcggtctgctcatggcgcacagccagcggctgctcttccgaatcgggtacagcctgtacacccgcacctggctcgggtacctcttctaccgacagcagctgcgcagggctcggaatcgctaccctaaaggccactcgaaaacccagccccgcctcttcaatggagtgaaggtgcttcccatccctgtcctctcggacaactacagctacctcatcatcgacacccaggcccagctggctgtggctgtggacccttcagaccctcgggctgtgcargcttccattgaaaagraaggggtcaccttggtcgccatyctgtktactcacaarcactgggamcacartggarggaaccgtgamctcarccgggggcaccgggactgtcgggtgtacgggagccctcaggacggcatcccctacctcacccatcccctgtgtcatcaagatgtggtcagcgtgggacggcttcagatccgggccctggctacacctggccacacacaaggccatctggtctacctactggatggggagccctacaagggtccctcctgcctcttctcaggggacctgctcttcctctctggctgtgggcggacctttgagggcaatgcagagaccatgctgagctcactggacactgtgctggggctaggggatgacacccttctgtggcctggtcatgagtatgcagaggagaacctgggctttgcaggtgtggtggagcccgagaacctggcccgggagaggaagatgcagtgggtgcagcggcagcggctggagcgcaagggcacgtgcccatctaccctgggagaggagcgctcctacaacccgttcctgagaacccactgcctggcgctacaggaggctctggggccggggccgggccccactggggatgatgactactcccgggcccagctcctggaagagctccgccggctgaaggatatgcacaagagcaagtratgcccccagcgcccccagcccagcccactccccgcatgggaggccgccaccaccaacacctcatcatccttctcatcgctaacaccaccamctccatcggcacccaagcgggcatcatccccccacactgctcaggggaggggagggatcaggcgatgagactgtgaaggccaaaagaagggggcctgttggaggctgggaaccccgcagcgcgaggctgcctcatcaacggcaagaggaaaggaggggtctcgggacatctccagaccctaccaactgggagggtcccctcctccttccctactcctgggacggcagcaaggacatgggggctgctgttagcttctccgtcagrggcctcatctcactgtagccctggaacccagggtccatcttgcccttcccccatccatggttgggaaagaagctcagcccctcacagtggcctcaagtgtgatgccttacaaaagcaccactcagatgggcagctggactctggtgtcctgagactctgccctcttcccacagcctccctgccccacccatccctgcaaagccatttttcagacagagccattcctaagaacactgaagggctggaatgctggctggccactctctgcctcagtggcctccctacagcctggaagaaggagggtcctgattgccaaggaaacctcctcattgggctaaggagacactggagtctggagtgtggagccccacagtcttgcaggtcacatgctctccttgcacatctggcctggttgtacccactggcctctgcctctgccctgggccaaaagggcccctccttgccaggggagagacagccacggtcctctttggccgatgctgtattctcattttggcccttgttcttaggcccgtctgcccgccytcctccatctaacctttcctgttttatccgcagcccttttcttctttgagttagtaaagatttattctgtaacctgacactcatctggccctttgcagtttgccagccatattcccatgtgatttcccactggatccaggcccccatccggctggcaggagggggctctgacgtrcaggttggaaatcagaagtctgtgagagcgcgggagtgcatggcagctctgggtcccagacctggcccgacccctctgcttcacctccagctctgctgctcctctactcttgggtcgagatccctttggagccacagcgaggaaccctgtggtcctcaggcaggtgtaccttgagtcagccaggagccctcttttcctgtgtcaaagcctgccctcgggctctgctcamctctggtgaccctccaagatgcccctgccctcagtttcccctcatgatctggcctctgcccccttctctagccacagcctctagtacactttagcaataccaccagactagttagagttccccactcaccaagcaagacatgcagtttcatgcctctgtgccttcgctcatgctgtttcttccgactggaatgccttcccctgctcctcctgccttgtctgcctggcaagttcatctctcacgatcccctcaaaggccccctcctccaggaaggcaacccctgtgcccctcccctccaggctacctctgcactttgtcaatgcttctcttgtggcacttatcacactgtattttacttgtttacatgtttgtctccccttctagactgtgaatccttaagggcatggactgtatcttatgcatctctgtatttctgcgcctagcacggtgcctagcacacagtaggcgctcaataaatgttgaatgaatgaatgatttaatcaagacttgatcacccaaaaaaaaa

SEQ ID NO: 1926 - DNA, 3008 bp, Homo sapiens
  misc_feature (774)..(774): n equals a,t,g, or c
ggcacgagcggcacgagagagagagaactagtctcgagttttttttttttttttttttytgaaacatttctctaaaactttatttcaaagttattcacctcaccgttaataaggtgtatgattaatgctctgtgccagtatttgcaggcctgcccattgccggcaatggactttgagaaaacccatttcctggcacccaaaagttaaattactcttttcaaaacataccgatctccccaacacttgcaaaagtattacatgcaccattttsccaccattctttaaatcagaacttacattattaatctacatcagtgaatgttaaatgaagtcattttaacaaattatgactgtacaaatcaaaatactactagttaatattagacaagagtatcttacaaacactactattacatattaccttgcaatctgaaacattatatttcatatttgtgtatatttattttagataactgaaacttcacagaatttaacagcaaataaagtttaaaaaatttagttctgtacattagttccaactatccctattttacaatctataaggctcatgtcatagttcagcaccaaaaagatctacacaaaactgtttaaccaatcttcttatctatcctgtgtgatagttttgtttgttgttgttttttaaggtaaaagtcctacttcagaccttgaagtggaatacttctagtcagactaggtaaaaacttgggtcataccttattttcattgaacagataccaaaaaaaaaaaaaaaanggaaaaggaaaagagctgtgttacaccatgaatttaggttgtcagcctctatgttgaatttataacactgaagcatcagaaatagcctaataatgccctgcccctattcttcccttccattttaaatttttaaaaaagtaaccagaaaaatgtttcatttattctttaaaataaggtgcaaagaaggactgcaacaacaaactccctcatccacacctccaataacatctcactgttgttcagcataatctaccatgaactgattcaggagcacacctagagctatattcacagctcctgaatgtaccatgttttctataccagaagcctcttcaatggcagtgtttctctgttcagaggtcattacaataacttttgtcactgctggcctggacttaacattccagattccagagccagtgttttattgtcccagctcttttcttcctctttaggatttatcaattttagaaaaagggcatgtttgttwtgctattttcaaagggtttgtgcgtatcacattttaccacattttaccccaattttaccacactggggaatgttgtcacattccccaagctagaaatgttttccaaaaaccacaggtactttctgtaatcttgttgttcaaagtacaaaattcttacatgttaaaaaattttttaattggagattagtacctctgctttcttctgacagaagtacacaattcattataccatgtttaaaaaccaaacatcatgcatacaaatggccaaagaggtatgaagttttacagagcccttaacatcattcgagtacatttggcattggccagaccacaacaggaagcatgtcagcaaatagagcaaagagactttcccaagtacacgatagtcatccaggctccatgtcagtcacataaaaatttacataacatgtaatcctttaaaattatccccagatatcccattcctccaactgttcccatascsccaccccatgcscacccmaccctgaagtcttgcacctcacagagtatcttaatgttccccattactaatgacagctgcttcaggttctgctgctgtggcagggagtcttggtactttcttggcagggcttggaatatgctcagttgctatgtttgaatgcacaagtcctactccttcatccaaagtgtcaycatttggagtgggacgccgagcgtaagttcttctgtgcttttcatccaccctaactaagtaccacgttccttcaaagagtgaatctattgaaccctggggaatatagttgaccmaatgatgggtgtcctctctggagcttcatgttttcagcgaagacatctggtgccacaccagttcttggaatcaagccttggatttaagatcacataaacttgctgttattttatcaagagcagaccccggtgtagcatcttgtgtgactttaagagagtacagagtggcagccaaaccagaaccataagaaaacactccaattctcttccctgctaattgctgaggtgagtactgtgctagaacagatgcaagggaaccatatactgaagatgtgtacatatttccattttgatttgatacaagtaaagatgcctttgttttctgactgaagagttcagagctagccttcataaatgccttctccacatctctatcaaagtaggtgtcttctaatttaacatccccaaaggcttccaggccactatagatactatttttatctctattctggtcattaaggaagtcattcagcaacatccgagctagagatttctgaaccagtttacaatatggtgagtgaaagatcatgaasccaaaatcattcaaggtaaaatctttatcattccctctttctgccactgggcatggatctttttgcagtagacagaatagcagcgktctaatscactgaggtagcactgtatggagagttttccatctactataggatattcagatagcatatcaggcttgtaaaaatcataggcatgttgcatatgtgtcccacgaagccctattagaaccaaaaaggaagatgtctatatatttctgcttcttgatgtctgtatgttaataagtatactgcattatctaaggaccttccttaactatctgatcaattctcaccacttacagtagagaaatcgcaagctgaagccaatataagtgaaatgatacataacagtatccatggacagtccctaagactcctttggtatacaactttccatgtca

SEQ ID NO: 1927 - DNA, 558 bp, Homo sapiens
  misc_feature (514)..(514): n equals a,t,g, or c
gttcccaatctgaagysggagctggcgagaagtaggggagggcggtgctccgccgcggtggcggttgctatcgcttcgcagaacctactcaggcagccagctgagaagagttgagggaaagtgctgctgctgggtctgcagacgcgatggataacgtgcagccgaaaataaaacatcgccccttctgcttcagtgtgaaaggccacgtgaagatgctgcggctggatattatcaactcactggtaacaacagtattcatgctcatcgtatctgtgttggcactgataccagaaaccacaacattgacagttggtggaggggtgtttgcacttgtgacagcagtatgctgtcttgccgacggggcccttatttaccggaagcttctgttcaatcccagcggtccttaccagaaaaagcctgtgcatgaaaaaaaagaagttttgtaattttatattactttttagtttgatactaagtattaaacatatttctgtattcttccaaaaaaaaaaanaaactggaggggggcccgtacccaatcgccgtatatgatcgtaa

SEQ ID NO: 1928 - DNA, 1819 bp, Homo sapiens
  misc_feature (1763)..(1763): n equals a,t,g, or c
  misc_feature (1778)..(1778): n equals a,t,g, or c
  misc_feature (1797)..(1797): n equals a,t,g, or c
gtctattagcttttacctcaaaattttaagccagaactatcatctttgtttttttattttctatctttaaacatttatctgtgaagtgacaaatggcctacagctgtgagagcaaatggacatctcctcctgaactctgagaagatgtcaaaatccacaggcaacttcctcactttgacccaagctattgacaaattttcagcagatggaatgcgtttggctctggctgatgctggtgacactgtagaagatgccaactttgtggaagccatggcagatgcaggtattctccgtctgtacacctgggtagagtgggtgaaagaaatggttgccaactgggacagcctaagaagtggtcctgccagcactttcaatgatagagtttttgccagtgaattgaatgcaggaattataaaaacagatcaaaactatgaaaagatgatgtttaaagaagctttgaaaacagggttttttgagtttcaggccgcaaaagataagtaccgtgaattggctgtggaagggatgcacagagaacttgtgttccggtttattgaagttcagacacttctcctcgctccattctgtccacatttgtgtgagcacatctggacactcctgggaaagcctgactcaattatgaatgcttcatggcctgtggcaggtcctgttratgaagttttaatacactcctcacagtatcttatggaagtaacacatgaccttagactacgactcaagaactatatgatgccagctaaagggaagaagactgacaaacaacccctgcagaagccctcacattgcaccatctatgtggcaaagaactatccaccttggcaacataccaccctgtctgttctacgtaaacactttgaggccaataacggaaaactgcctgacaacaaagtcattgctagtgaactaggcagtatgccagaactgaagaaatacatgaagaaagtcatgccatttgttgccatgattaaggaaaatctggagaagatggggcctcgtattctggatttgcaattagaatttgatgaaaaggctgtgcttatggagaatatagtctatctgactaattcgcttgagctagaacacatagaagtcaagtttgcctccgaagcagaagataaaatcagggaagactgctgtcctgggaaaccacttaatgtttttagaatagaacctggtgtgtccgtttctctggtgaatccccagccatccaatggccacttctcaaccaaaattgaaatcargcaaggagataactgtgattccataatcaggcgtttaatgaaaatgaatcgaggaattaaagacctttccaaagtgaaactgatgagatttgatgatccactgttggggcctcgacgagttcctgtcctgggaaaggagtacaccgagaagacccccatttctgagcatgctgttttcaatgtggacctcatgagcaagaaaattcatctgactgagaatgggataagggtggatattggcgatacaataatctatctggttcattaaactcatgcacattggagatttatcctggtttcttaggaatactactactctgattgtgtctactgattggctatcagaaccttaggctggacctaaatagattgatttcatttctaaccatccaattctgcatgtattcataattctatcaagtcatctttgattcctggacctaataaattttttttccctttcaaaaaaaaaaaaaaaaaaaaaaaaaaaaaaaaaaaaaaaanttcctgcggccgcanggctttttccctttggtgnggggttaattttgggcttgggc

SEQ ID NO: 1929 - DNA, 577 bp, Homo sapiens
  misc_feature (526)..(526): n equals a,t,g, or c
  misc_feature (554)..(554): n equals a,t,g, or c
ggcaaaaccacttgcgcccggactcaatgaacttgtcatactccacggacatcttgcagcagagggcctgacgagtgcgcaccgccgagcagttggtgttgatgacacggtcgccgccctggagctcgagctcagggtcgtccccgtcggtgaagataaacgtctgctggcgggcccgggagatccaggtgcgcagcagcagccgcaggcgcggcccgtggttcttccgggtggtcttgacggcgatgaagacgtcgtcaggccgcaggctgggggcagcgggccgggccaggttcggaattcttgcaaaacttattgtccttgtcttcatttagcaacagtggtaagtagttggaaaccaagtatttatgtaagacacacatcacatggtgatactcacatttatgtagaagtttattgtttgaagttgctttgtggccatactttattgtagtttkgggatacagctaatgagtatttggsttttattctgattttatagtctgattatttgggtcaaatcggnttagtaggttaaatgagatgatttagtnggttaactcacttaggtttttaa

SEQ ID NO: 1930 - DNA, 2115 bp, Homo sapiens
  misc_feature (101)..(101): n equals a,t,g, or c
  misc_feature (240)..(240): n equals a,t,g, or c
  misc_feature (1342)..(1342): n equals a,t,g, or c
cagcaacggaataaacgtgcaacatacgagcggtgatccacagatgggtgcccatctcttctttgatttgccctttattgcctaaccagccaaaaccagtnggcactacggaatttttaccaaaatcaaagatgcggtcggtttcctgttccagccaacggttgtggcttagggtgttaaaccatttcattccttttatcctcatcttagcggcgtttagccatcatttcgtcgacccangcgtccgattaacactaagatactctgatttttagccraactaaacaaagtgcttctactgagaggcctttataccaccatgtacagtaactctaagtgaatacggaagaccttggttttgaaattctgccaccttgtttctccctgctcatgaggtcgcaccttttgctcttgctgctaattgcccattcgtagtgggtgtaatgccaggtggaatggtttcaacaagtcaggtgaaaaccatcctttattgttgctggcacaacttgatatatagtctgactcagaactgaagctcacatctcaaattcatttcatgccagtaaatgtggcaaagagaagaaaggcccaagagcgagacaagaagaatggagaagggggcagccaagaagaacttctgggttcagggtactgtttatttgctccttctcttcatgcctgtggctggatgtcccacaacactataagaaatataagtcaagccctttgtgttaagcaagaactacagactccatcttttcacccaaatcatgaatgaccaataaaaagcaagttattccagaggaagaagcagcccttgaaatgttaaggcttaggcttgaaaggtgaagagcaggaattctctctttcaaatcctagagcataaacccatgtgtggccaagtgagatcagccctcaagggcacatgccaagggcagagcagcccatgtagacagcttcggagggcatgggggtgtagggagttcggggtagctcctcattaactatttgttgggtgagtaaaggggtgaggctcagtggcaggtacctctgcaatgacaagctgcctcccctctatgtgtttagcatatgttattagaacatgtccgacacccctaccgctgccatttgggccctttaataaagccaagtagagaaatctggcaataaaaggcaaatgtaagcatgctttctttaagacgcatcataaatggttttctttaagtgaatggaagagtttgacagagatacacctttgtaagaaaacattaagaatgctggctggctgtggtggctcacacctgtattcccagcactttgggaggcctasgcwggaggattncttgrgcctgggmcttcgagaccagactgggaaacatggcaaaatcccatctytacaacaaaaatacaaaaattagccaagtgcggtggtgtgcctgtagtcctagttacttgggaggctgaggtgggagaatcacctgagcccaggaggtggagkctgcagtgagccatgccaatgcactccagtytgggcaacagagtgagaccctgtctcaaaaataaataaataaataaatgaataaagagaatgctaatcatttctgggttcactgcgactcactgtagtgctggggatcccccttgtaacactggaactgaaagacagtgatgaaagctatgtcaagcattcattattctgaagaggaggagaaatgccacatacctttcccatgggacctgtggtggaatgaatccatacttctgcctcacttcgagcagacttttgttctcggcgctcctcacgatggagtttcatgcttcattttcacatctctctgcacaattagattgggagctccttgagggcagagtacgtgccttaatctttatctttgtaatgccacaatgaacagagtgcctcctggtacactgtaggagcttaagaaatactcactgaatgcatgaatgaatgaatgaacaaatgaaggaatgactaaggatgtttgtagtgctataatatagaatgggatttactctgctttaccagttagtttcataataaacaaatagtctgtaaaaaaaaaaaaaaaaaaaaaaaaaaaaaaaagggcggcc

SEQ ID NO: 1931 - DNA, 3953 bp, Homo sapiens
  misc_feature (618)..(618): n equals a,t,g, or c
  misc_feature (626)..(626): n equals a,t,g, or c
cgcaggcggcgggaggcccaggagaagcggtactactacgacctcgatgactcttacgacgagagcgatgaggaggaggtcagggcccacctccgttgcgtggccgagcagccgcccctcaaactggacacgtcctctgagaagctagagtttttgcaactttttggcttgaccacccaacagcagaaggaggaattggtggcccagaagcggaggaagcggcggaggatgctgcgagagagaagcccgtcgcccccaacaattcagagcaagcggcagacgccttcaccgagactggcgctgtctacccgctacagccctgatgagatgaacaacagtcccaacttcgaagaaaagaagaagttcctgaccatcttcaacctgacccacatcagcgctgagaagaggaaagacaaagagagacttgttgaaatgctccgtgccatgaagcagaaggcactgtcagcagcagtggccgactccttgacaaactctccgagggacagtcctgccgtctccctgagtgaaccagccacgcagcaagcctctctggatgtggagaagccggttggtgttgctgcttccttgtctgacatcccaaaggccgcggacctgggnaagctggnaacaggtccggccccaggagctgtcgagagtccaggagctagctcctgccagcggggagaaaggccaggctgagcgaggcccctggaggcaaaaagagtctgagcatgcttcactatatccggggcgctgcacccaaggacattcctgtgccgctgtcccacagcaccaatgggaagagcaagccgtgggagccctttgtggcagaagagtttgcacatyagttccacgagtcagtgctgcagtccacccagaaggccctgcagaagcataaagggagcgtggctgtgctgtctgcagagcagaaccacaaggttgacacgtccgtccactacaacattcctgagctgcagtcctccagccgcgcccctccaccccagcacaatgggcagcaggagccccccactgcaaggaagggccccccaacccaggagttggaccgggactcggaggaggaggaagaggaggatgatgaagatggagaagatgaggaggaagtccccaagcgcaagtggcaagggatcgaggccgtttttgaagcttaccaggaacacatagaagagcaaaatctggagcggcaggtgttacagacacaatgtagacgactggaggcccggcactacagcctcagcctgacggcagagcagctctcccacagcgtggcggagttgaggagccagaaacagaagatggtctcagaacgggagcggctccaggcagaactggaccacttacgaaagtgccttgccttgcctgcaatgcactggcctaggggctacctgaagggatatcccaggtgacggtttcccttgcactaggccgaacctatagtatagaaatattatctattttattaccttgaatatttaatatttttcactgggaggtttgaagcttacaaaatgagaatgtgccatgcatgaagcaaaggattccaggctccagaaaaaatgaatgaactcaccttgacgtcaatgcaattgaatcaccgttgtcattcagcgagcaaccaatgtaggattgcccacagtttttctttttaaaggtggttttcgcccttcctctcccacattatttcttaatctgaacatgaaggctccattagcaacactaaaacttgatcattaacagccccctgtgcatatgagtggatcaaaccggttctgttctttcttgtgttgccatgttactatgcctcaagcccagtttgcttttgccrcagcgatggggccagtctcattcctccccaggagtgaaacttgcttcagctgaaaaggttgggtgcatygtcagtaaaaagggcttatttgtttcattttactttcctgcaaaattttcttcaaagcaacaagtcctaggagcacacaaagcaacccaaaggcttttccctggaaaagctctttcttacctaaagataaaaccaattcacaaactgaaggtagctttttattactccgtggggagcatgtacagagctctgtgtatacacagcttcacacccaccagattgttactacagtgggttgggttttcatacagacgtaaattttgagagaaaagtcaaaggtgcttcagccttgtactgtgtatatatattaaaaaaaaaacaaagttttgtatgtttttattactttaactattgttataaaaagcctgccatttttaatatgtggtttgggggatttttgtttgtttttcctgtttgggggttttgtttgttgttttggttttttttgggcaaaaaaaaaaaaaaaaccttgcttttagtgtttgtactgctgctggtcaggacattaaaatattgaagtgtttttaaaaattaaagaagaagaaaagtaaaagagcttaccactggcgcctatgcgatcacttcatttttagtttgagttgcaccagaagctgccgtagaaagccatgcgctactgcttacctcctccactccccctgcctgcccccagcatctggacaagctaatagcaaatattacccattgctatcaagggaggagggggtagtctgtagaacccatgtgtgacagtcatgtgcacacatgggcgggggcttttaaaaacctttcaggaagtcaatgatttctgtgattgatataattctaaggtgtctgagagcaggtacagaataggaacttcagaggctttgtttaaacgcaaagctttgtaaaagccacaaggtctgagctgaacccctcctttttgaacttactgtgacaagcacaggaacggtcagaaactgggctcatcacaccaaggcaaagcaacgggcgagtcttcctccttgtcctagttactgcctatggaggcagtgtttagatcaagaaggcctctcttgctcccaagggccctcaccagaggccagggctgccagtcactggtctggggggtggaggcctgagctgagggcagggtgcctgacctgtgtgccggctgctcactgctgtgaccagcagccgagcccttggccctagcccttgctgcgcakaacagcttgctggcagctggcatcgtgtcgctttatctgcccccgcacagtttgctttgtacgtctgccaagaatcttccagttattagcaaactcagacgaatgtaccgccagtattatcagcagtcaacaagcaccttcctctccacagaagcagctggaagagaactcgaggggctgtgctgmaggcctyccctcgaaagacactgggaggtcagcatgttccacaggtgttcagagggagtctgctacaaactatcagggcaaaatctcactggawttctccactgaaaacctacttgaggtttctggtctgaaggcttaagagtcacatcttagcacttccgctctcaggcctcctcctccatcacagatgtctggatgcttttggaaatggccttggctaaagtaaaagggaaaagtagatccgataacttaaaaacgtagctcatcccttaccatccaaggggcactcccttggttggattttctatgacagcacaggggacaggtggcacaccatgagaggtctgcccagggtgggagcagtgtcactgtgctagcaatagttggcttctcccctgtcagtggaaaccccacttctgcccggcccttgagcttcttgcccactgtctccccatccttccacctacttgtggcgatctgagtactctactcttgctcaagaagtaatacgmcaatcagaatacaaaccagtaaggcaacacgaataaactaaaaaaaaaaaaaaaaaaaaaaaaaaaaccttgcttttagtgtttgtactgctgctggtcaggacattaaaatattgaagtgtttttaaaaattaa

SEQ ID NO: 1932 - DNA, 1992 bp, Homo sapiens
  misc_feature (1955)..(1955): n equals a,t,g, or c
  misc_feature (1989)..(1989): n equals a,t,g, or c
ggagcgggtttcggttggaggactcgttggggaggtggcctgcgcttgtagagactgcatccccgagacgatggcggagggagataatcgcagcaccaacctgctggctgcagagactgcaagtctggaagaaaaacctaagatgtacttcatgaccatgatcgtttcccttgctgcggttgcttgggtgggacaacaagtccacaacctgcttctcacctacctgatagtgacttccttactattgcttcctggactaaaccaacatggaatcattttgaagtacattggaatggccaagagggagataaacaaacttctcaaacaaaaagaaaagaaaaacgaatgattcatctgctttaatcagtgtgattaatgcagcacccattgccccgggaaccgtttctgctgtactatctggatactaaaatgttacggaagtagctctttgttctccctcactctgcccttagttaatagaaattcagactcgccaagtaaggcttcgtgcatagtgtcttcatgtcgcgtatagttgagcgcgttcttagcagttggcttcatggacaactcattagtgttttgacttttcttacccagcgttaattgaattcttgcttttagacaacttcctttttgtagtggtgaaccttgccctttagtacagttcaagtgaatctggataattgttcatctttgctttagcttagataccatgtagtggtctgtggctacaggaagctggttctgtctgcttccacagtctgcttaaaaaactgtctgacttcgtgaatatagagaccaagtttaccacttctgatgaagagaccaattaagattcattcctcattctgtttctttccagtgggagaagagtccccatgaaataagatgaaactgattccatgcactagtacatgtaggcttctcccttgtgcaaagcttagcaatttgtaggaaactttgatctttttgtccaagaaaaggaatgtctgacaggcttaagctttcgtccccttgcacttagactcgaagttagtaaatccttaaaggctttttaatagcagacttccaaaagattgcatttaggatttctagcatgcttttaatttcagattttcagctgacattagctatagtatacagtaggttaagactcatgtctatgactttcactctaagactggcaaaaggacagcagtcttctatgtttagtcaatattcatttcagtagaagataatcttatctaatttttgagaccagaataagccttttaaggtaaacctcaaaattatcattttatggtaatactgaccattttagtcccctaggtttgacatgggagatagtgactacactggtgtctgacttttttcctagagatttctccctgaaaaatacaagggctgttggtgagagcagacttgaggtgatgatagttggcctctggtctacaaagatttcataactccttggaaagcttcttataatcattcttaacttcttggtagctagaaatttagagtagttgaaatctttaggaatgaacttctgagggccaaaaaatgtgactgacgggaacaattcttaaactgattaactagctgtaatatagttttgtgaatttattgcactgatgttgtaccttgtggtatatctgtccctattaaataagtgttgttttctcctctttaatattgctgtgaacagtggtgcccattgtagcatatgtttgatttttttttattatttcataagaaaactacgttaattttaccttactttcattgtaaataagcctgtcttcctatctggattttttgtgtgcatacatattctactgattaactacttttgcagttttaatcctgtattatttcttctactttgttttgtgtaaaaggggaaaaaataaaaaaagctggaatcttaaaaaaaaaaaaaaaaaaaaacncragggggggcccggtmcccattcgccccatagngag

SEQ ID NO: 1933 - DNA, 725 bp, Homo sapiens
ctgtgccgatcgaatctataaaacaaacacaggaagaaattaaaagaaatattatggctcttcgaaatcatttagtttcaagcacaccggccacgrattattttctgcaacaaaaagactacttcatcattttcctcctgattttgcttcaagtcataataaacttcatgttcaagtagaagttctctaccattgaatcagtgaactagaaagatctgatttggcctgggaccagtgttcaagttggtttggtctttattaaaaatcacaatattccgaaaacaaaaaaacctaggagataaatgtagaggtattgacttttcgtatcttttatcttcacactgaaacaagagctatcctatttgattattaaagtgagctatgtgttaagtgccaggacatttctagcttttgtgagaatgtgtctacatatgagtataataaacccacatgtatacacaattgtctcttatgtactcctacctgacagtagtctttgtattctatagtatgttctgagatataatgttaacattgttcataacaaaaaatgctatcaatcttataaatatatgtaatctattttcttcataaaacaggcacaaaagttttatcagtaaggrattacagrttgagaaatgrtggaataataggcatrattgattcaatacactactgttaaaatcmtttgcaagcactcagctcattatcttcttaggagaagg

SEQ ID NO: 1934 - DNA, 2227 bp, Homo sapiens
  misc_feature (289)..(289): n equals a,t,g, or c
cggacgcgtgggtcgacccacgcgtccgggaaaaarggaaaaratgccgtgtaaaatctcgttctgtgtctgaattgccgtaggctcagatcttcatttgaggttctgtgtctgaattgccgtaggctcagatcttcatttgaggttatgttctataagttaacgttgatcttgtgtgagctttcggtagctggagtaacacaggcggcctcacagcgacctctccagcgccttccaaggcacatctgcagccagcgtaatcctcctgggagatgcctcctcaaggccntgctccagaccacgtggggarggcctgacarccaattcccaggctgtccccacccttgragagtgaccctaaacgctagacagatggggaatgggaaagaaaagaaagctgcagacctcaagttaaaattccctcaaaaacgtttttatttatctgctttttctgaaaggataaaggctttttgaaaattattttctaacaaataacatgaacacttctagaaaccctagaaaaacacaaagtattcaaaatagaaagaaaaattacccattactctttaagccagcattatccattgcggtgcttttggagttgggtgaggccgtagcctctgccaagtcaaggagcccggtggtggctgtggcattcctgcagggttgtttttttttctttgagatggagtctcactcttgtcaccccagctggaatgtggtggtgtaaacagctcactgcagccttgaccctgaggctcaagcgatccttctgccttggcctcctgagtagctgggatcccaggcgagagtcaccacaccctgtccatgttcctgcaggtcttgatatgcgaggacgctgtgtcttccctgccacattttcttcttctttcttgagacagacccttgctccatcacccaggccagagtgtggtsgtgcgaacacggctcactgcagcctcgaccctcaggctcaagcgatcctcacgcctcggacccccaaagtgctgggatcacaggcgagagtcaccatgctggcctgaatcttcagggtattttacggttgaagtgtcacttacttarccatscctgtttcaagagtgtaggtggtcaccctgtctctgycgctgacctggcctggaccctcggctgtgagagggaggggtgggctgggctggaggaacctraagccctcgtgatgtcacaagcccatctggctgggcatcccctgctgtgtcctgagctgcacatgccccaggtggcccccacagcagaggcgagccactgragggtgragggcttccacggacggtcttcaggggragaagaagggcccaggcccccaggagactcaggagaccagagcctggggtcaggggctyagcaggggctyarccagggctggatgtccggagccagccccgmagccctgkgktctttgttcttcgcactcccaccgtccgtgtgaacagctccagccccacctgcgcctccctgtgctgggctccatcagggagcccagaagacgtgtgtgcttctgaaattgggtccctacatgcctttgtcccagtgcaccttgctccttccatttactatcgagatttaaatgcctgttttctccccagaggttgacggatatattcagacgttacgacacggatcaggacggctggattcaggtgtcgtacgaacagtacctgtccatggtcttcagtatcgtatgaccctggcctctcgtgaagagcagcacaacatggaaagagccaaaatgtcacagttcctatctgtgagggaatggagcacaggtgcagttagatgctgttcttcctttagattttgtcacgtggggacccagctgtacatatgtggataagctgattaatggttttgcaactgtaatagtagctgtatcgttctaatgcagacattggatttggtgactgtctcattgtgccatgaggtaaatgtaatgtttcaggcattctgcttgcaaaaaaatctatcatgtgcttttctagatgtctctggytctatagtgcaaatgcttttattagccaataggaattttaaaataacatggaacttacacaaaaggcttttcatgtgccttacttttttaaaaaggagtttattgtattcattggaatatgtgacgtaagcaataaagggaatgttagacgtgtaaaaaaaaaaaaaaaaaaaaaaaaaaaaaaaaaaaaaaaaaaaa

SEQ ID NO: 1935 - DNA, 3911 bp, Homo sapiens
gacctaagcgtctaccgtcaccgctgccagctcaygcgaacccggcgacctgctggagctgctgtggctgcagccgcgccggagccgcccgcgcccgccccgcactgggccgtctacgtgggcggcgggcagatcatccacctgcaccaaggcgagatccgccagacagcctgtatgaggcgggcgcggccaacgtgggccgggtggtgaatagctggtaccgctaccgcccgctggtggccgagctggtggtgcagcaacgtgcgccacctgggcctcaagagcgaggagatctgctggacgaactcggagacgttcgccgcctggtgcgctttggcaagcgggagttcaaggcgggaggggaggtgccggcaggcacgcagcccccgcagcagcagtactatctcaaggtgcacctgggagagaacaaggtccacaccgccaggtttcacagcctggaagacctcatccgcgagaagcgccgtatcgacgccagcggccgcctgcgagtgctccaggagctcgccgacctcgtggacgacaaggagtagccgcctaggggctgccggcccctctgcctcccccgcacctcgctcccttcccttccccgcacccggacttcgcagtcagcggttctcaacctctgccccgccccgccacgcgcgtccgccgccggtggcccgggcccgggctgcacccccgcatccccaagccagcggcaggaagtctcaggaactgccccagggccgaaagggcgccgctgcgagcgcctggctgacagccacagcggtggtgacggtgctgggagaccccgcgtgcgctttccccttgagatgtaaaccgggaacggggaaggggctgaggggagaaaggacatggccttccccgcgagtccatggccagtgactgtggcccgactcgaaaacaaccctcttctcaaaagggaccatcaccgccccgagcgtgcgcacacagaccggtcggaggcgagaactggtctctacagggcacagttcagctcctctgtggatgcgtccccagatcgcaggatttccaagaaatcgagcctgtcccttgtgcacttgggaataattccccaagacagcacttcgggattccgggttatcctgaggctgcccgggacttttccagctctccagccccaggtytcctgacattgtgttccaggctgcgggctaagccagacagtgtttgcctccggttctttccaccgtgggaagcgaacgccacccccacccgcctttgcctgcgagtctccctcgctggcagaagggaagccggcccggtcccgggaggaagatggcgctgcgaattcggtgaggacagccggccccgcccccgacaaggagctcgctcgttcacctggtgtctgggaacttgaatgtgtgaagggcgcttattgttctgaacccttgattgctccctccycgggctgcatttcaaaaatagtcatatttttaaaggagttggaggagagggagggggaggacatggcaccattccagaaaccagcattgttacaacaccatagccagtatatttagtttggcttttcctaacatagaaatcttcaaagctggggaagtggaaataaagttttaaaaatgagagagcagttttccaactatgtcaacaaagcctatcgtgttgatgtttttattgaccattttagcaacaggctaataaaatttcaaattgaaatttttattttcatggctttaatccatgatagtttaaatactgggggccattaagagtggatgtagctaagagcttagctaacattgccttttcactctatttttctcagatattgtaagcattctgtttttcaatattgtagttaattttttggctttcaacagcagccctagtaatggtggagttgttaattaatgtgtatattgtactgaatttctgtcagttaaggggttcactgctttggtggaaattggtggaaattgctagcaggttccacgatgtttatttttttctccatgttgtatatcattaccatttcacatacgcgtttctatttttcttcctctcctcctgatctccttaaaaatgaatctagagttggtggctttttccccctcctctttggccagttccacagttcagttcttcctgaaaacagggatgatgaacttgtaggatcaggacaaatgtgtgtttttcaaaaacttaaggctgggtgtgaaacaccttctgtggacaaggatttgtaaacttctctcctccctccagctgcggccccagcctaactgatagttacttgattcagtgtgctagacacttaaatagcatctatgtctctttcaagggaatttgtcaaataatgctgtttagctaattgttgcaagcaattgcatattaacagctgtgattttgttggacagcaagtattatggccaaagccagtttcttggcatttcaaaaataatgcaataaaaactagttgaggttagctgaggctggaaatgcctttttcatggtaaatgattcacttctatatttttctttctttttctttttttttytttggttttcatcctggattcatcccctgatcttaaatcaaaacgtcagatcaatgaactatgaactaaagtatttttcttaagcctattgagtgatttattttttaaaaaatgtttaaatgcatatgcttttctttcagcacaaacaacagcaaaaacttttgtaataactaacttacctttgcatgtatgaagaactgagtcatttatttccctaacttactcctctttcaagtaacaggtggcagatcataaaatgaattctttattgtatctacacactccacattctttactgtgtcctactactgtatcttggctccctgctgtattaaacaccatcttaagcacttgttcctgcaggactccttcttgacattttgtctcccccttcaaagtcactcaaagagtgggacttcatcaaaagaaatgaattagtctctatcacaccgaatactaagatttatttcctctgatggtacatagatttctctctcactaagagggtcactctcatagaggaatgtcttgtcagttttatacttgctgaggctagactgacaataaaaatgagctgggcagttaaattagcatttgttactatattggcctataaaggatcaggttgatgataatacctctaaaaatatgcaataataaaacaatagttatgaaagaaacttgaaaggtttgcaaggtttctcctatccctgttaaaattatcatttattatctctttgtcagtgttagtaaggtaacccatgacagaataatttgagtgatagttcatcatgcagaggatatgatcaagatattacctaatggttttatcctgaaaaaggtgtatacttttagggcactgttaacaatgcgagtgaaaccaagatggtgcaagttccctttgcagatggcgtgggcacacttgatttttattatgagtgaatgtaatctttctgtattttaccagagttacagcaattacctgaaaagtttcctaacattttaataatgttagggatttcgttttggttttagttgtcctcaagagacaacaggttcacagtaatttccatgatgttgggtgtggctaagctggggattggttctgttccccctgctcccgtgtagagaaaagctatatttatactgcattctttctcaactttcaggtaaaacaaactatgatttaaaaaaaraaaaaagaaaagacaggtacttttacttcaaagagtgctttgytacatttttatttaaaccaaaaatcaaataaaataaggaggggggctgggtatactttaaacaaaaccagtcctgaaatgctgttaytctcaaagtmcattccaaaaa

SEQ ID NO: 1936 - DNA, 1041 bp, Homo sapiens
  misc_feature (7)..(7): n equals a,t,g, or c
aaaagtnaaaaggaaacaacgggtgaccttaattcaaatattcctaccaccatagctacaaaataaaaaaaactaattcaacaaatgtacttatytaacccaatatatcccaacaattattgcagcacataatcaatataaacattatatatatgaactatttgacactatttgacatttcttcttccacatccagtgtatctgacatttagcgcacatttgatttgcactcacccactttgaggagctcaattgccgcttaagtccgtggctagtggctgccctaaagttcagcaccgccacggagctttgggtccacccggactgtaaaaaggaagcacttccgttagcatgacccggcctgaagtagcggcggaacggaagtcgcttgtgtatgaacgcagcggcggacctgtgaggggatccgacttgccggcagaacttacgctgcgggaccccgggcactgttgctgctgcgggagactgtgggctgtttagtgccatgcaccctttacagtgtgtcctccaagtgcagaggtctctggggtggggaccattggcctctgtgtcttggctgtcgctgaggatgtgcagggcacacagcagtctctctagtaccatgtgtcccagtccagagaggcaggaggatggagctcggaaggatttcagctccaggctggctgctggaccgacttttcaacattttttaaaaagtgcctcagctcctcaggagaagctgtcttcagaagtggaagacccacctccctatctcatgatggatgaacttcttggaaggcagagaaaagtctacctcgagacctatggctgccagatgaatgtgaatgacacagagatagcctggtccatcttacagaagagtggctacctgcggaccagtaacctccaagaggcagatgtgattctcctgkcacrtgctctatcagggagaargctgagcagaccatctggaaccgttacayagsttaaagcttgaaacaagcggcccgytccgggttcctygaggatggaattaggttgatg

SEQ ID NO: 1937 - DNA, 2310 bp, Homo sapiens
  misc_feature (2)..(2): n equals a,t,g, or c
  misc_feature (6)..(6): n equals a,t,g, or c
  misc_feature (14)..(14): n equals a,t,g, or c
cncccntttagggnaaattgggtccggccscccttttttttttttttttttcaggttaaagcaacatttaatatcctttacaagatggaattcgtgacaagttcaaaaggaraacttcctttgttttaatgcagctgtgctcagaagcctgtgatttcctaggaaaccatctgggtttagcccattagaaaaatgcagtttaaagcagtgtcacactggctgcctgaaggtacccttggagatactggagcgcttctgcattcaggctggtgctcaccattgatggaacccttcctggacaggcggtagacaacttgtgaagtgactgtgccaggtgaattttggggttattcaccatttgacctacaggatcatgctcttttttcccagcaaatgccaactgtgagaaggcagtctgatatcctggtgtatcttctatgtcaataaaatgttcctcatcaggaatggtatcatcttcgggtaactcaaaaagaccaatcaaagactgtaataatggagtccacagtttggtatactcagtgtccatcattgggggacattctgttagtaatttggttatgccaaccgcacagatctttttctctacatttccagataccttctgaatttcaggaataataattttttccaaaaccattccaaacatttttggttgtataccatcaaatatttcttgtagtgctagtgccccatattttatgcaatacaaattaataaagactaaaaaactcttgataaacttggttgttttggaattctgaagtctctggaatagcagaatgaagatttgtttcctatattggtcaactgattcaggaggcatgtgctctattatactgtttagaagataaaaaccttggtggtcatttgctttggatgcaatcagcttctgaaagacacctagtaacccaggaattttgtcagctgcagcacttgctattgtgtttgaaccgcgttctaagaatgcttgaagaagcctcactagagcaggaatatttcctgttctttcccaaagcactggctgaaggagatgaggaaataaggccatataggaagacgggatgtcatttttgtgtgtttccagaagcaaagacatcacttgaaagacgtatggaataaattcttgcacatcattttgtaagatttcagtaaacaccaaaaacaaagcctcctcaaaatttacaacagcagcagggttagctttgcaagttattcttatggataaacatattgcttcaaacatgtagtgattaaagtgaggtttgcttgggttcttactaacagctaatagcttctgtgtaagctgagtgatgagagtagggatgtaggggattatgggaaatttggtttcaagtgtacatgtgtgaaaacaatattgtatactaccatagtgagccatgattttctaaaaaaaaaaataaatgttttgggggtgttctgttttctccaacttggtctttcacagtggttcgtttaccaaataggattaaacacacacaaaatgctcaaggaagggacaagacaaaaccaaaactagttcaaatgatgaagaccaaagaccaagttatcatctcaccacaccacaggttctcactagatgactgtaagtagacacgagcttaatcaacagaagtatcaagccatgtgctttagcataaaagaatatttagaaaaacatcccaagaaaatcacatcactacctagagtcaactctggccaggaactctaaggtacacactttcatttagtaattaaattttagtcagattttgcccaacctaatgctctcagggaaagcctctggcaagtagctttctccttcagaggtctaatttagtagaaaggtcatccaaagaacatctgcactcctgaacacaccctgaagaaatcctgggaattgaccttgtaatcgatttgtctgtcaaggtcctaaagtactggagtgaaataaattcagccaacatgtgactaattggaagaagagcaaagggtggtgacgtgttgatgaggcagatggagatcagaggttactagggtttaggaaacgtgaaaggctgtggcatcagggtaggggagcattctgcctaacagaaattagaattgtgtgttaatgtcttcactctatacttaatctcacattcattaatatatggaattcctctactgcccagcccctcctgatttctttggcccctggactatggtgctgtatataatgctttgcagtatctgttgcttgtcttgattaacttttttggataaaaccttttttgaacagaaaaaaaaaaa

SEQ ID NO: 1938 - DNA, 421 bp, Homo sapiens
gtgctgccgcctcccgtcgcccctgcgctcagaggtcccgaaccagcccagccgctgcctcttgccgctccgcctttggagtgaggagggcgcagcccgcgtcagaacttagagggccaggcagggtcgcgcgcatggcctgggcgggctcgcggcgggtcccagctgggacgcgcgcggcagccgagcgctgctgccggctctcgctcagcccgggcgcgcaaccggcccgccccaggccctctgcaccgccgcgaccaatgaggtttctgacctcctgcarcctcctcttgcctcgggctgcccagatcttggcggstgargctggcttaccttcgasccgttccttyatgggatttgctgctcccttcaccaacaagcgaaaggcttactcggagcgtagaatcatggggtactcaat

SEQ ID NO: 1939 - DNA, 1283 bp, Homo sapiens
gcacggcgcagtgaatacaagaaaggggcactattttaacacaaccttttcccgtgatcaccaccgaaaattactgacgagtcaatcacctcagatctctcaagcagtccagcctacgcaacagtactccacctctgcgcctgtgcggggagggtaaggcggggccagcaacttcctcagctggagggagagcgcacggtggagccgccagttgagaaggactctgatccggctcagctttccaatcagctgcggaaggagccacgctttcgggggttgcaagatggcggccaccagtggaactgatgagccggtttccggggagttggtgtctgtggcacatgcgctttctctcccagcagagtcgtatggcaacgatcctgacattgagatggcttgggccatgagagcaatgcagcatgctgaagtctattacaagctgatttcatcagttgacccacagttcctgaaactcaccaaagtagatgaccaaatttactctgagttccggaaaaattttgagacccttaggatagatgtgttggacccagaagaactcaagtcagaatcagccaaagagaagtggaggccattctgcttgaagtttaatgggattgttgaagacttcaactatggtactttgctgcgactagattgttctcagggctacactgaggaaaacaccatctttgcccccaggatacaattctttgccattgaaattgctcggaaccgggaaggctataacaaagctgtttatatcagtgttcaggacaaagaaggagagaaaggagtcaacaatggaggagaaaaaagagctgacagtggagaagaagagaacaccaagaatggaggagagaaaggagctgatagtggagaagaaaaagaggaaggaatcaacagagaagacaaaactgacaaaggaggagaaaaagggaaagaagctgacaaagaaatcaacaaaagtggtgaaaaagctatgtaaggtatacagggaacagcactctagaagctatgactcaattgagactacaagtaccacggtgctacttgcacagacccctttggttaaatgtaaattcttgtacaattgaaggatacgcagaaggacatctttctagtctaacagtcaggagctgctctggtcattcccttgtatgaactggtctaaagactgttagtggggtgttagttgatttttcctggtatactgtttcttggctgacactactggtcaagtaagaaatttgtaaataaatttcttttggttcttattatctaaa

SEQ ID NO: 1940 - DNA, 762 bp, Homo sapiens
  misc_feature (512)..(512): n equals a,t,g, or c
  misc_feature (597)..(597): n equals a,t,g, or c
  misc_feature (649)..(649): n equals a,t,g, or c
  misc_feature (667)..(667): n equals a,t,g, or c
gaatgatcagtatacaagatacagtattttctagaaaaactgtctctgattctggacaaagctcagttatagttacgagaaagatatggtacagggaggaaaatactgccttttttttttttttaaagagattttcagactaaatagaaatgtcaaaatgatgtatcaatggttcttttttagaacaagttttcaaagcataaaaagaggttgagagaaataacatatttattgattcacataagtatgtttttcttcattaatcgtctggagaaacccacttgtcattaatttgttttgggctaggttttcaaacttaccaaattgctttaaaaaagcaatttggaaggtaatttgataggctttccaacttaaccaaattttttattgtaattcttggatagtatttttgtctttttcaattcatttgtctttttcagtatagtttttgttaaggcaaatgtcttcccttaatatccaaatattgctaataaacggtagaagatgctttnggaaattaaaattatctcgctgktggttagacttaacactgktaatcttyagccaaatatcacatatggatcaaattattttctnttttgttgtttacctatcctcaacaacatttttagtttaaattattgtaaanatttttttgtgggtggtnatttttatttgctccaaaataataaggtgcaaactattttatgcttaactgttgctctgtcaaaacactatgcatggattgcatttgaaaaaaaa

SEQ ID NO: 1941 - DNA, 1633 bp, Homo sapiens
  misc_feature (16)..(16): n equals a,t,g, or c
  misc_feature (28)..(29): n equals a,t,g, or c
  misc_feature (1626)..(1626): n equals a,t,g, or c
cgtaagaaaggttggntcctttgagggnngcccccttttttttttttttttctttgtcgttgttttatttaaaatgttattgtctctgattagaaaatacagtcatgagggctaaaaactgaaatgatgtgaaaaggcatccattaagcagtgttgccccaccaccctttccatcagtcttgtctcatggggatggggaaaatgaagacagaacgctttgccttgctttgcaatccctcctttgaaggccttctgtcccaggaagccaatgttcatttgatgtggaagagggacctgtgtttaaccagaagctgtcctccctcatccctttcccatggcttacacgcagaagggagaggagatgaccagaggagaaatcaggggaagaaaaggcaacaggggaggcaaagggaaaggagaggaatgcttaaaatatacagtgaaatttgagtaggattctctactcaaagacttctctgggaagtgtccagaattgaccacacaggtgctgacggtagaaagaacacagacccaaaaccctgatctagttgcattaactccattagccctgagttcctctgtaaaatgaagactgtggaggcaccaactagaggatttctgtgaccttctcaaactctaaaatttttggcactggactgttccactttgaagggtcaagaaagaaatctggaggttgcagaaatcagggtcaggcgcacatacacgcacgcacgcacacacacacacacacacacacacacacacacacacagatccagcagcatccttggaacatcctgaagtcaagaaaggcacagcactgtctgccccgatagaaggaattccagaaaacagccacgaggttgggccacagaatttccaaagagagcaatctacaaactgggggttgatttcccagttcctggatctcagcagtcaacacacgagaaggatttttttctgaagctgccacctccaattctgaaataatcccatgtttcagactggggccgggacggtggcaaacctgcagaccctggcagcaagatgagggcaaggaagggaaaggtcagctgggcacagtccagttctcagcagtaatgacagaaatgaaggaaggaagctcagaatgagtgcacgggggaaatgggttttgctgatgcatttccagggccggccgtactctttgttttggcacacttttcctkacaaacagccagtgttctcaacacataaatactagtccacgttaacaacaatagcatatgagaccgctctccgtaaagatgccagattggatgcaaatggactggaaataccttggaggtttcacaaaaataagacaaagggcaaaggaactttgccaaaggagatggagagcaattctttaaagwtagtgggagggaggaagcaaagagctcataaatacaagcctcttaaaatgggacgcatttgcctcgcgcctactgggtgtctgcagctcagcttggtgccccacacaggacaccgactttaagtggctgcctttgcaaggctgagaggccatgagggttgatgcctgaagtgtcagcgccatctagtggaaacatggggcatggccgctttggacggcctcagcctaaaatnagaggca

SEQ ID NO: 1942 - DNA, 1126 bp, Homo sapiens
ttcgtttaggtcggctggaaattatgtcctccgtcggttttccgcagtttttccaccaagcgagatatttttgggagttattccctaaataactgcattatatgctcctttcatgacgaaattgctgccgtggagaagactggaggaaactcgaggaagagggagaagccgacaagtgctcgacgggctaggaactgtcctgcttgggtgttagcgtttcccgycgggccagtaaggctgagtgasccggcgtggctactaggagaaggacgtacggtcctgctagtagaggaatatgtcgagtttctctagggcgccccagcaatgggccacttttgctagaatatggtatctcttagatgggaaaatgcagccacctggcaaacttgctgctatggcatctataagacttcagggattacataaacctgtgtaccatgcactgagtgactgtggggatcatgttgttataatgaacacaagacacattgcattttctggaaacaaatgggaacaaaaagtatactcttcgcatactggctacccaggtggatttagacaagtaacagctgctcagcttcacctgagggatccagtggcaattgtaaaactagctatttatggcatgctgccaaaaaaccttcacagaagaacaatgatggaaaggttgcatctttttccagatgagtatattccagaagatattcttaagaatttagtagaggagcttcctcaaccacgaaaaatacctaaacgtctagatgagtacacacaagaagaaatagacgccttcccaagattgtggactccacctgaagattatcggctataagagaataagaattgcagaaaataacagtgaagtgattgaaactttcttctgatgagtttctctaacctacaggatggagtaaaacaactgctacagttcagcacctgttttatgtgccgaatcactgtggggaaaggtcaggaaggtgtagtccttcaataggaaattgtaattaaaatataattttatagaaccatttttatgtaatctgatttgaatgttatagttgataataataaaatcacttacttggttgactatttagtgttgcatttaatgataaaaaacagaccc

SEQ ID NO: 1943 - DNA, 1797 bp, Homo sapiens
  misc_feature (378)..(378): n equals a,t,g, or c
attctcaaaagagtattacaggcgtgacaccactcttggcccagcctgtgggttttgatggggatgtcttggctgctgtcttggaggcacagtgtctccccatgtgtgtgtttcttggcccagagtgactcccagtattcctagtccttccccacaggatagtcacatccattatttacttttgttgtcagctgggaggggaaactgaagcctggacacgtctccccaagggctcagtgttcatgggtgtgtaagatccattgactggaccccagaaagcaccctgaggggcagtgcagagagagcccaggaagcccctccactagaggaggcccttggtctggctgaggaccacgtcaccctgggcctccagsctgncttttcacattaaaggcggggcagtctcctctcaaaggagttctcccttgagcactttgggctctggggcagagttgggctaggagatctgggtgaatcctttagtcacagctagtctcatgttcctcttctgtcaaaggggtcatggccccagtgtgtcctacctcagagttgtcagggtcaaagtaacaggcactgggacaaatatgaagcctagctttgtgcttcctttcaaattcagggcctcctttctactccattccagcctttttttcctgtcagaatccctcaggaaggacctttatcttctggagtgagtggcagttccactgggttcagtgaaagagtcgcccatggggctctgttccccaggagtcctttgtattttggtgaacaaattcttaccaaagcatgagattcggactgtagaagttcagactgcctcagttcagactgcctcatggggcagtctggaggtcagctggcttctggtgtctctcatcacaccactgcggacgctgtctgtagagcagccttggtgtgggtgactctgaagctggagtgatgggaccccagctatccttgttttttaccgccttgtctggcactgtgaccacgcttcagggctgcttctgggggtcttggtccctggatgtgccatttccttgcccttctgaccctcacacttcttccaaagtcttgagcagagttgggggccaatggtagcattgctgtcatctctgggaggagagtgagtatacaagtcagtgacagttcagccaggctcccttgggtttgggaagaggcactgcccttctgtgctgtggatcctgcttgtctgctctggagtccccccacccttgccaggagcttcacaaaccagagacgggctgtcagcaagagctcagacaggatgtggtgcaagtgcaggtgcacgagtttaaccctcagctgcaggagctagtctcaggtgttctggggatgcctcaggctaagaattttgccgactttctgggcttggttggctaatgccaaatgcccctgcttaaatatcacaaggtgctgattctccttttttctttttttcataccaatgtgctcaaactttgagctaggtcttgtgagtttgcctagcactcagacctgtttaagtaacgttctttacattgaaacaagtcaaccgaagctttgtggtgcaggagctgagggtgccccagactcagtgggagccctggttgggccccaaactctcccagcagggtcctcggtttcctcatttgtgaaataaatgagtgggccacgacgttaataagcccaagagaactgtgaaggtggtagtcccttgccctaattggtgctcaataaagttgttggcataaacgaaaaaaaaaaaaaaaaaaaaaaaaaaaaaaaaaaaaa

SEQ ID NO: 1944 - DNA, 337 bp, Homo sapiens
  misc_feature (315)..(315): n equals a,t,g, or c
  misc_feature (332)..(332): n equals a,t,g, or c
  misc_feature (335)..(335): n equals a,t,g, or c
ttcaggtgacactcatagaaggtacgcctgcaggtaccggtccgraattcccgggtcgacccacgcgtccgcacattagcaacaatgtacattaattttggattttcattttcatgttttattttgtaaatattatctgatgtttggagcttgagtatacagactgtaaatatagttcttgtatttgtactaattctgattcttttgctgtatagccttagatgtgcaatgcagacactatctaactgtgtgtggtaaccttgcgtcacggagctgttagtgaacgaggtaaaaataataaaggtacagccagtngcatcaaaaaaaaaaanaanaa

SEQ ID NO: 1945 - DNA, 1330 bp, Homo sapiens
gctgcgctcggctgagtcagtcagtctgtcggagtctgtcctcggagcaggcggagtaaagggacttgagcgagccagttgccggattattctatttcccctccctctctcccgccccgtatctcttttcacccttctcccaccctcgctcgcgtagccatggcggagcgtcggcggccactcagtcccattccatctcctcgtcgtccttcggagccgagccgtccgcgcccggcggcggcgggagcccaggagcctgccccgccctggggacgaagagctgcagctcctcctgtgcggtgcacgatctgattttctggagagatgtgaagaagactgggtttgtctttggcaccacgctgatcatgctgctttccctggcagctttcagtgtcatcagtgtggtttcttacctcatcctggctcttctctctgtcaccatcagcttcaggatctacaagtccgtcatccaagctgtacagaagtcagaagaaggccatccattcaaagcctacctggacgtagacattactctgtcctcagaagctttccataattacatgaatgctgccatggtgcacatcaacagggccctgaaactcattattcgtctctttctggtagaagatctggttgactccttgaagctggctgtcttcatgtggctgatgacctatgttggtgctgtttttaacggaatcacccttctaattcttgctgaactgctcattttcagtgtcccgattgtctatgagaagtacaagacccagattgatcactatgttggcatcgcccgagatcagaccaagtcaattgttgaaaagatccaagcaaaactccctggaatcgccaaaaaaaaggcagaataagtacatggaaaccagaaatgcaacagttactaaaacaccatttaatagttataacgtcgttacttgtactatgaaggaaaatactcagtgtcagcttgagcctgcattccaagctttttttttaatttggtgttttctcccatcctttccctttaaccctcagtatcaagcacaaaaattgatggactgataaaagaactatcttagaactcagaagaagaaagaatcawattcataggataagtcaataccttaatggtggtagagcctttacctgtagcttgaaaggggaaagattggaggtaagagagaaaatgaaagaacacctctgggtccttctgtccagttttcagcactagtcttactcagctatccattatagttttgcccttaagaagtcatgattaacttatgaaaaaattatttggggacaggagtgtgataccttccttggttttttc

SEQ ID NO: 1946 - DNA, 678 bp, Homo sapiens
ccggcaggtgacaacggcaacatggccctgaacggagctgaagtcgacgacttctcctgggagcccccgactgaggcggagacgaaggtgctgcaggcgcgacgggagcggcaagatcgcatctcccggctcatgggcgactatctgctgcgcggttaccgcatgctgggcgagacgtgtgcggactgcgggacgatcctcctccaagacaaacagcggaaaatctactgcgtggcttgtcaggaactcgactcagacgtggataaagataatcccgctctgaatgcccaggctgccctctcccaagctcgggagcaccagctggcctcagcctcagagctccccctgggctctcgacctgcgccccagcccccagtacctcgtccggagcactgtgagggagctgcagcaggactcaaggcagcccaggggccacctgctcctgctgtgcctccaaatacagatgtcatggcctgcacacagacagccctcttgcagaagctgacctgggcctctgctgaactgggctctagcacctccctggagactagcatccagctgtgtggccttatccgcgcatgtgcggaggccctgcgcagcctgcagcagctacagcactaagagaagcccctgagaaaaaccctctagaaaaacaaaaaaaaaaaaaaaaaaaaaaaa

SEQ ID NO: 1947 - DNA, 2428 bp, Homo sapiens
  misc_feature (2422)..(2422): n equals a,t,g, or c
ccgccgcccccgcctgggccgcgctccccctctcccgctccctccctccctgctccaactcctcctccttctccatgcctctgttcctcctgctcttacttgtcctgctcctgctgctcgaggacgctggagcccagcaaggtgatggatgtggacacactgtactaggccctgagagtggaacccttacatccataaactacccacagacctatcccaacagcactgtttgtgaatgggagatccgtgtaaagatgggagagagagttcgcatcaaatttggtgactttgacattgaagattctgattcttgtcactttaattacttgagaatttataatggaattggagtcagcagaactgaaataggcaaatactgtggtctggggttgcaaatgaaccattcaattgaatcaaaaggcaatgaaatcacattgctgttcatgagtggaatccatgtttctggacgcggatttttggcctcatactctgttatagataaacaagatctaattacttgtttggacactgcatccaattttttggaacctgagttcagtaagtactgcccagctggttgtctgcttccytttgctgagatatctggaacaattcctcatggatatagagattcctcgccattgtgcatggctggtgtgcatgcaggagtagtgtcaaacacgttgggcggccaaatcagtgttgtaattagtaaaggtatyccctattatgaaagttctttggctaacaacgtcacatctgtggtgggacacttatctacaagtctttttacatttaagacaagtggatgttatggaacactggggatggagtctggtgtgatcgcggatcctcaaataacagcatcatctgtgctggagtggactgaccacacagggcaagagaacagttggaaacccaaaaaagccaggctgaaaaaacctggaccsccttgggctgcttttgccactgatgaataccagtggttacaaatagatttgaataaggaaaagaaaataacaggcattataaccactggaatcaccatggtggagcacaattactatgtgtctgcctacagaatcctgtacagtgatgatgggcagaaatggactgtgtacagagagcctggtgtggagcaagataagatatttcaaggaaacaaagattatcaccaggatgtgcgtaatamctttttgccaccaattattgcacgttttattagagtgaatcctacccaatggcagcagaaaattgccatgaaaatggagctgctcggatgtcagtttattcctaaaggtcgtcctccaaaacttactcaacctccacctcctcggaacagcaatgacctcaaaaacactacagcccctccaaaaatagccaaaggtcgtgccccaaaatttacgcaaccactacaacctcgcagtagcaatgaatttcctgcacagacagaacaaacaactgccagtcctgatatcagaaatactaccgtaactccaaatgtaaccaaagatgtagcgctggctgcagttcttgtccctgtgctggtcatggtcctcactactctcattctcatattagtgtgtgcttggcactggagaaacagaaagaaaaaaactgaaggcacctatgacttaccttactgggaccgggcaggtaactcacgtggtctttgcatctcatttctatcagagggatgtcgctcccctacagggggcagtagtgaaaaaagagtcattctctggcccaggtgaactccccgacactgttagaacaatggcattactcttcagttctcaccatttttacccttctgcaaagtctcttgtaattcctaagtaatgaaatgaaaagtacaaatttcttaaaacaagctctgttctttttcttctggaaaacttgtgtagtttgtcctgtgtatctgtttctcatgaggagaccggctttctgtggcccacgtgaacactgagtaagaaacaaaagactgtggtctccaggacacagtgtgtgtttgtcctctgccatggttattcaccaagtggagtccagcagtttaggaatcgggaggtctcccatgatgagttgtcatcttctgaattgctgcaagtgacaccaaaggggcccccctaccagtttctcacttcccagtctcactactggatcagctcttaggagccaggagagttcactgctgtggctaggatagaaaagggcagctagtgccccagggtagatcttggaaaatattttttgggaaaaatgtaattaaggccacccctaaaatagatactgtatctggctgtactatactaacagtgatttgcctgcatgtgtttgatagagatttctaccatgtactgcttggtgctggatagtctatcacagcaaraaaaaaaaaaaaaaaaactcgagggggggcccngtaccc

SEQ ID NO: 1948 - DNA, 922 bp, Homo sapiens
  misc_feature (4)..(4): n equals a,t,g, or c
  misc_feature (6)..(6): n equals a,t,g, or c
  misc_feature (849)..(849): n equals a,t,g, or c
  misc_feature (893)..(893): n equals a,t,g, or c
  misc_feature (909)..(909): n equals a,t,g, or c
gtancngacagtcacggtcggattcccgggtcgacccacgcgtccggtccgcagtgactacactcatggcaggtcccctgtggcggaccgcagcatttgtgcagagacacaggacaggcctcttggtgggttcctgtgcaggcctgtttggagttccagtctcgtaccacctcttcccggatcccgtggtccaatggctctaccagtactggcctcagggccasccagctccgctccctccacagctgcagagcctcttccaagaggtgctacaggacataggtgttccttcaggccattgctacaagcccttcaccaccttcaccttccagcctgtgagtgcaggcttcccaagactccctgctggggctgtggtgggcatccctgccagtttcttgggagacctagtgatcaacactaaccatcccgtggtcatacatgggcatacagtggamtkgcggagccagcargcgcccggctgagagcttccctgaccttgtcccgtgaagcccagaagttcgccttggccagggaagtggtgtacctggaaagcagtaccactgccgtgcacgccctgctggccccagcttgcctggcagggacctgggcactgggcgtgggtgccaagtacaccctggggctccatgcaggccccatgaatttacgggctgccttcagcttggtggcagcagtggcaggctttgtggcctacgccttctcccaggattctctcactcatgccgtggagtcctggctggaccgccgcacggcytccctctctgcagcctatgcctgtggtggagtggagttctatgagaagcttctgtcgggcaacctggccctgcgcantctctttgggcaaaagaagggggagaagctgtatacacccaacngggaacatcgtccccnagacacttgttcc

SEQ ID NO: 1949 - DNA, 756 bp, Homo sapiens
  misc_feature (5)..(5): n equals a,t,g, or c
tcccnacccctcttccccctactttgccttaccccctcacccctcaagacagatgcccccttgccttttaaaaagttggattttaaccgacgtgttgtagggttcttggtctgtgtgaaggcagagaccagagagaaggaagtgagcccactgctctcctgggagcaatgtgggtgagtccaccagaggccctgctgtgtgtggccaataaattttagtcttccccagccctcgaggcagtgtgtgtggatgtatgcgtgtggatatttatatatgtaccctgcactcatgaatgtatgaactggaggaagttactacagtggaagggttcttaataacaaggtctacctagcatgaagtatttaacattctcccatcccttaaaaaatatacatttttataaaatgaaaaccataataaatgttttgaatattaaaaaaaataataacctacagaggaaaattaatggagacagctatttgccttgtactttttccacaattgttgctgctagttgtacacatctctagttcagctcttgcccacgggacactcatcaattaggttttatttttawttctttcctctacccccagaaacaagcctgttaatttttttccttctcctctggsgactgtgtgatgaayccttycttgcgtgatcaggttgcggataracttgtaagggkgtttgctgcatacagkgtwagcattgtgaccgccaataaacttcaatggtttctaaaaaaaaaaaaaa

SEQ ID NO: 1950 - DNA, 1884 bp, Homo sapiens
aggctgattatttactgtctagaatggatgttaccagctgcatctcttaccgaaattttgcaagttgtatgggagactcccgtttgttgaataaggttgatgcttatattcaggagcatttgttacaaatttctgaagaggaggagtttcttaagcttccaaggctaaagttggaggtaatgcttgaagataatgtttgcttgcccagcaatggcaaattatatacaaaggtaatcaactgggtgcagcgtakcatctgggagaatggagacagtctggwwgwgctgatggaagaggttcaaaccttgtactactcagctgatcacaagctgcttgatgggaacctactagatggacaggctgaggtgtttggcagtgatgatgaccacattcagtttgtgcagaaaaagccaccacgtgagaatggccataagcagataagtagcagttcaactggatgtctctcttctccaaatgctacagtacaaagccctaagcatgagtggaaaatcgttgcttcagaaaagacttcaaataacacttacttgtgcctggctgtgctggatggtatattctgtgtcatttttcttcatgggagaaacagcccacagagctcaccaacaagtactccaaaactaagtaagagtttaagctttgagatgcaacaagatgagctaatcgaaaagcccatgtctcctatgcagtacgcacgatctggtctgggaacagcagagatgaatggcaaactcatagctgcaggtggctataacagagaggaatgtcttcgaacagtcgaatgctataatccacatacagatcactggtcctttcttgctcccatgagaacaccaagagcccgatttcaaatggctgtactcatgggccagctctatgtggtaggtggatcaaatggccactcagatgacctgagttgtggagagatgtatgattcaaacatagatgactggattcctgttccagaattgagaactaaccgttgtaatgcaggagtgtgtgctctgaatggaaagttatacatcgttggtggctctgatccatatggtcaaaaaggactgaaaaattgtgatgtatttgatcctgtaacaaagttgtggacaagctgtgcccctcttaacattcggagacaccagtctgcagtctgtgagcttggtggttatttgtacataatcggaggtgcagaatcttggaattgtctgaacacagtagaacgatacaatcctgaaaataatacctggactttaattgcacccatgaatgtggctaggcgaggagctggagtggctgttcttaatggaaaactgtttgtatgtggtggctttgatggttctcatgccatcagttgtgtggaaatgtatgatccaactagaaatgaatggaagatgatgggaaatatgacttcaccaaggagcaatgctgggattgcaactgtagggaacaccatttatgcagtgggaggattcgatggcaatgaatttctgaatacggtggaagtctataaccttgagtcaaatgaatggagcccctatacaaagattttccagttttaacaaatttaagaccctctcaaactaacaggcttagtgatgtaattatggttagyagaggtacacttgtgaataaagagggtgggtgggtatagatgttgctaacagcaacacaaagcttttgcatattgcatactattaaacatgctgtacatactttttgggtttatttggaaaggaatgcaaagatgaaggtctgttttgtgtacttttaagactttggttattttactttttggaaaagaataaaccaagaattgattgggcacatcaaaaaaaaaaaaaaaaaaaaaaaaaaagggcggccgctcaagagtat

SEQ ID NO: 1951 - DNA, 2731 bp, Homo sapiens
  misc_feature (42)..(42): n equals a,t,g, or c
  misc_feature (50)..(50): n equals a,t,g, or c
  misc_feature (1629)..(1629): n equals a,t,g, or c
aaggcgtctggagtttaatgttacttggtgatatgagacttncattcttncaggtggaagatgagctcagctccccagtggtggtgttcagatttttccaggaattaccaggctcagatccggtgtttaaagccgtcccagtgcccaacatgacaccttcaggagtcggccgggagaggcactcgtgtgacgcgctgaatcgctggctgggagaacagctgaagcagctggtgcctgcaagcggcctcacagtcatggatctggaagctgagggcacgtgtttgcggttcagccctttgatgaccgcagcagttttaggaactcggggagaggatgtggatcagctcgtagcctgcatagaaagcaaactgccagtgctgtgctgtacgctccagttgcgtgaagagttcaagcaggaagtggaagcaacagcaggtctcctatatgttgatgaccctaactggtctggaataggggttgtcaggtatgaacatgctaatgatgataagagcagtttgaaatcagatcccgaaggggaaaacatccatgctggactcctgaagaagttaaatgaactggaatctgacctaacctttaaaataggccctgagtataagagcatgaagagctgcctttatgtcggcatggcgagcgacaacgtcgatgctgctgagctcgtggagaccattgcggccacagcccgggagatagaggagaactcgaggcttctggaaaacatgacagaagtggttcggaaaggcattcaggaagctcaagtggagctgcagaaggcaagtgaagaacggcttctggaagagggggtgttgcggcagatccctgtagtgggctccgtgctgaattggttttctccggtccaggctttacagaagggaagaacttttaacttgacagcaggctctctggagtccacagaacccatatatgtctacaaagcacaaggtgcaggagtcacgctgcctccaacgccctcgggcagtcgcaccaagcagaggcttccaggccagaagccttttaaaaggtccctgcgaggttcagatgctttgagtgagaccagctcagtcagtcacattgaagacttagaaaaggtggagcgcctatccagtgggccggagcagatcaccctcgaggccagcagcactgagggacacccaggggctcccagccctcagcacaccgaccagaccgaggccttccagaaaggggtcccacacccagaagatgaccactcacaggtagaaggaccggagagcttaagatgagactcattgtgtggtttgagactgtactgagtattgtttcagggaagatgaagttctattggaaatgtgaactgtgccacatactaatataaattactgttgtttgtgcttcactgggattttggcacaaatatgtgcctgaaaggtaggctttctaggaggggagtcagcttgtctaacttcatgtacatgtagaaccacatgtttgctgtcctactacgacttttccctaagttaccataaacacattttattcacaaaaaacacttcgaatttcaagtgtctaccagtagcacccttgctctttctaaacataagcctaagtatatgaggttgcccgtggcaactnttttggtaaaacagcttttcattagcactctccaggttctctgcaacacttcacagaggcgagactggctgtatcctttgctgtcggtctttagtacgatcaagttgcaatatacagtgggactgctagacttgaaggagagcagtgattgtgggattgtaaataagagcatcagaagccctccccagctactgctcttcgtggagacttagtaaggactgtgtctacttgagctgtggcaaggctgctgtctgggactgtcctctgccacaaggccatttctcccattatataccgtttgtaaagagaaactgtaaagtctcctcctgaccatatatttttaaatactggcaaagcttttaaaattggcacacaagtacagactgtgctcatttctgtttagtatctgaaaacctgatagatgctacccttaagagcttgctcttccgtgtgctacgtagcacccacctggttaaaatctgaaaacaagtacccctttgacctgtctcccactgaagcttctactgccctggcagctcgcctgggcccaactcagaaacaggagccagcagagcactctctcacgctgatccagccgggcaccctgcttaagtcagtagaagctcgctggcactgcccgttcctacttttccgaagtactgcgtcactttgtcgtaagtaatggcccctgtgccttcttaatccagcagtcaagcttttgggagacctgaaaatgggaaaattcacactgggtttctggactgtagtattggaagccttagttatagtatattaagcctataattatactctgatttgatgggatttttgacatttacacttgtcaaaatgcagggggttttttttggtgcagatgattaaacagtcttccctatttggtgcaatgaagtatagcagataaaatgggggaggggtaaattatcaccttcaagaaaattacatgtttttatatatatttggaattgttaaattggttttgctgaaacatttcacccttgagatattatttgaatgttggtttcaataaaggttcttgaaattgttaaaaaaaaaaaaaaaaaaaaaaaaaaaaaaaaaaaaa

SEQ ID NO: 1952 - DNA, 749 bp, Homo sapiens
  misc_feature (28)..(28): n equals a,t,g, or c
  misc_feature (239)..(239): n equals a,t,g, or c
  misc_feature (494)..(494): n equals a,t,g, or c
ctggagtaaggtgctgcggacgacgcgncctgggaggataaggatgaatttttagatgtgatctactggttccgacagatcattgctgtggtcctgggtgtcatttggggagttttgccattacgagggttcttgggaatagcagggtaagtcttgggtatcttatattttcatggtatcatttctttttaaatagaggctttttttcctgttacaggaaaggccattgctgctctggnagctgtgtgtgtgtgtratgactaaagcaaagaagcagccctacagtggcactcctgggtctggtgcaccactcctcaggagcatctcarattctgcctgatcaatgcaggagtcctgtacctctacttcagcaattacctacagattgatgaggaagawtatggtggcacgtgggagctcacgarggaagggtttatgaccycttttgccttgttcaggtcattggatcatcttttacactgccatccattagnactgatggtgtacagctcccaatgctccctatccagtccaaaggaccctcttggattacagcacaggaacttggatcgttggggaacccagccccttgggaacttggaagacccgtgtttccgggaccgcgaatcagtgtgttggggcatcagtgttttctgacaagggttgtgacctggaaactttttaaaaaccacccacctttgggggaagcatttctggaattatccatcaccaaccattcttcttgggat

SEQ ID NO: 1953 - DNA, 1222 bp, Homo sapiens
  misc_feature (1183)..(1183): n equals a,t,g, or c
  misc_feature (1186)..(1186): n equals a,t,g, or c
  misc_feature (1216)..(1217): n equals a,t,g, or c
  misc_feature (1219)..(1219): n equals a,t,g, or c
ggccccctttggctctgtagagccggcggaaccgggtagcttggccaggttgtgaggaaccgcagcgcgccgcaggaccgggccgctgagcctgcagccgccccgcgccgtgacctgcgaccctagaccccgactccctttggctcagcccgcgcgccccaggcccggcccgggcggcgcgacgggaggatgagcggcgggcggcggaaggaggagccgcctcagccgcagctggccaacggggccctcaaagtctccgtctggagtaaggtgctgcggagcgacgcggcctgggaggataaggatgaatttttagatgtgatctactggttccgacagatcattgctgtggtcctgggtgtcatttggggagttttgccattacgagggttcttgggaatagcaggattctgcctgatcaatgcaggagtcctgtacctctacttcagcaattacctacagattgatgaggaagaatatggtggcacgtgggagctcacgaaggaagggtttatgacctcttttgccttgttcatggtcatttggatcatcttttacactgccatccattatgactgatggtgtacagctcccaagtgctccctatccagtccaaaggaccctcttgattacagcacaggaacttgatcgttggggaaccccagccccttggaacttggaagacccgtgtttcctggaccgcgaatcagtgtgttgggcatcagtgttttctgcaagggttgtgacctgaaactttttaaaaaccacccacctttggggaagcatttctgaatttatccatcaccaaccatttcttcttggataccatcaagtaacagctattatttgccaagtggagctgtcatttaatttgatgcacctctggattcagatgaaacattaaattgtcttcctcgattctccatcgggtgtagagtttttaaactatcaatggcatttcaagtcttctgaaacagcatggctgtatgtgcgtggtccatagcacagtacatgcagcatctaataagagtttccattgtagaatgttttcacatacttgaataaatcaaatctttaattgagaaaaaaaaaaaaaaaarrccggccgctctagagggatcccaagcttacgtacgcgtgccatgccaacggcataagcttcttttatagggggcacctaaantcnaattcactgggccgcgtttttacaacggcnngnact

SEQ ID NO: 1954 - DNA, 2786 bp, Homo sapiens
ggtggtcggcggcggcggcggcggcggcggcggcacagagccggtggtggagccgccgaggagggtcacgcagcacaatgccagctctgcccctggaccaactccagatcacccacaaggacccgaagacaggaaagctgaggacttcaccagcgctgcaccccgagcagaaggcagaccggtattttgtgttatacaaaccgccccctaaagacaacattcccgccctagtggaggagtacctggaacgcgccaccttcgtagccaatgacctcgactggctcctggccttgcctcacgataaattctggtgccaggtgatctttgacgagactctacagaagtgcctggactcctacctgcgctatgtcccccgcaaattcgacgagggggtggcctcagcccctgaggttgttgacatgcagaagcgcctccatcgaagtgtttttctcaccttcctccgcatgtccactcacaaggaatccaaagatcacttcatttccccttctgcgtttggagaaatcctctacaataacttcctctttgacattccaaagatcctggacctctgcgtgctctttggaaaaggcaactcaccactgctccagaagatgataggaaacatctttacacagcagccaagttactacagtgacctggatgaaaccctgcctaccatccttcaggtcttcagcaatatcctccagcactgtggtttgcaaggggacggggccaataccacaccccagaagcttgaggagaggggccgattgacccccagtgacatgcctctcctggaattaaaggacattgttctctacctttgtgatacctgcaccacactttgggcctttctggatatcttccctttggcttgccagaccttccagaagcacgacttttgttacagactagcttccttctacgaagcagcaattcccgaaatggagtctgcaattaagaagaggaggcttgaagatagcaagcttcttggtgacctgtggcagaggctctcccattccaggaagaagctaatggagattttccacatcatcctgaaccagatctgcctccttcccatcctagaaagcagctgtgacaacattcagggcttcatcgaagagttccttcagatcttcagctccttgctgcaggagaagaggttcctccgggactatgatgcactcttccccgtggccgaagacatcagcttgctgcagcaggcctcatcagtcttggacgagacgcggactgcctacatcctccaggcagtcgagagtgcatgggaaggggtggacagacggaaagccacagatgctaaagacccatcggtgattgaggagcctaatggggagcctaacggggtcacggtgacagcagaggcagtcagtcaagcatcatcacatccggagaactcggaggaagaggagtgcatgggagcagccgcggctgtgggccctgccatgtgtggggtggaactggactctctcatctcccaagtgaaggacctgctgccagaccttggtgagggcttcatcctggcctgcctggagtactaccactacgacccagagcaggtgatcaacaatatcctggaggagcggctggcccccaccctcagccagctggaccgcaacctagacagagaaatgaaaccagaccctacacccctgctgacgtctcgccacaacgtcttccagaatgacgagtttgatgtgttcagcagggactcagtagacctgagccgggtgcacaagggcaagagcaccaggaaggaggaaaacacgcggagtttgctgaacgacaagcgtgcagtggcggcacagcggcagcgctacgagcagtacagcgtggtggtggaggaggtgccactgcagccaggcgagagcctgccctaccacagtgtctactacgaggatgagtacgatgacacatacgatggcaaccaggtgggcgccaatgatgcagactctgatgacgagctcatcagccgcaggccattcaccatccctcaggtgctgagaaccaaagtgcctagagaagggcaggaggaggatgacgacgatgaggaagacgatgctgacgaggaggctcccaagcccgaccattttgttcaggaccctgcagtgctgagagagaaggcagaagccaggcgcatggcctttctcgccaagaaagggtaccggcatgacagctcaacagcagtggccggcagcccccgaggccatgggcagagccgcgagacaacccaggaacgcaggaagaaggaagccaacaaggcgacaagagccaaccacaaccggagaaccatggccgaccgcaagaggagcaaaggcatgatcccatcctgagacctggtgcagggccagtggggaggcagcggcaccagactcaccaggccgcgctcccatcgcctggggcctcctcactaggggccccaagttcaactcaacccctcaacagcctcagctttgcagcccctgagaaggccgcctctcatctaccagccagccatgagcgccttcctgcagaacacacagtgccttatgccacagccgaagaatccgtggggccggcaagcaggcaccttcccccagctgcgctagcgggaaagagatggggatggagtcccaaggcaagcgccccaaacctcgggccacaagacaccacttcccctttaccctggacagcaggaaacctgtatattcaaaaacacaaaaagtcctgctaataaaatttttgaccctttcaaaaaaaaaaaaaaaaaaaaaaaaaaaaaaaaaaaa

SEQ ID NO: 1955 - DNA, 1483 bp, Homo sapiens
  misc_feature (1474)..(1474): n equals a,t,g, or c
  misc_feature (1478)..(1478): n equals a,t,g, or c
aattcggcacgagccgggctctacccagagcaagaccctgatggctgcggtgtttctggtaacgctttatgaatactcgccgcttttctacatcgcggtggtctttacctgcttcatcgtgaccaccggcctggtattgggatggtttggttgggatgttccagtaattctgagaaattcagaagagacccagttcagcacaagagttttcaaaaagcaaatgagacaagtcaagaatccttttggcttagagatcactaatccatcttcagcttcaattacaactggcataaccttgacaacagattgccttgaagatagcctccttacatgctactgggggtgcagtgttcaaaaattatatgaagctctgcagaagcatgtttattgcttcagaataagcactccccaagcattagaagatgctctgtatagtgaatatctctatcaggaacagtattttattaaaaaggatagcaaagaagaaatatattgccagttaccaagagatactaaaattgaagactttggtacagtacccagatctcgctatccattggtagcgctattgaccttagctgatgaggatgaccgggaaatttatgatattatttccatggtgtcagtgattcatattcctgataggacttataaactatcctgcagaatattgtatcaatatttactcttggctcaaggtcaatttcatgatcttaagcaacttttcatgtctgcaaataataatttcactccctccaacaattcctcttcagaagaaaaaaacacagacagaagtttgttggaaaaggtgggactctctgaaagtgaagttgagccatcggaagagaacagcaaggactgtgttgtttgccagaatgggactgtgaactgggtactcttaccatgcagacacacatgcctgtgtgatggctgtgtgaagtattttcagcagtgcccaatgtgcaggcagtttgttcaggaatcttttgcactttgcagtcaaaaagagcaagataaagacaaaccgaagactctttgaagacatcgtaacactgaaaagtacactttctactaaagatgcagaaattgatgatcttggaattcatcataacatggaatctacagtactgaccatcaatgaaaattatattttaacttcatatttgtatggtacttggatgataaaaattaattattcctttctgcttagtgaatgaatactggaatccatctgtgttgatacataaaaattcattcaactcttgaaaagaatctaagagtttggccttttattagctagatttcctctcatgttaattagaaaaatcattctgaaaggcaatccattgaaaatttgaggaggttaaattcttaagatcactaaatgttttacctttgatgttatcgggagtgcaattaagaaaaaacttaattctacttaaagtaattgtgtgttcccctaatttatacaaangganttggg

SEQ ID NO: 1956 - DNA, 1587 bp, Homo sapiens
aggaaatctcggggtgcctttactgtaacaagttatgctcggctctcttttattttacaagaggatggtgagggagagaatggaagaacagagggggcggacgtataagacatttgacactgcctatgtctgatttctctttctttctttctttctttctttctttctttctttctttctttcctttctttctttcttgcaagctgtgatcggatgcaatctttgtgggacatttaaatggaagggttcattgatgtgtattgcttgccaagccaaaatgttgcctttggggaaaagggagagaggtgttcatggagtgcagggaaaggaggttttggggcagagattttgacttaaaataaccagacttcttctggctgctgaaaagaggcaaaagttttaaattgtcaagtttaaaactatgttcagttatgatttgccacttctgaatattattttggatttcccctttcatgcttattttgttcagaatcctaatgaatagaggttgctggactcagggtaaaagcaggatgaactggagatgggacatacaaggtacttttggaattgccatagattacacctataatcagagtaaatgtcatcaacaaataatcaaaatattttttacatttgctcttctaaaatcagagcctattttaaatataaaagaaagtagatgtgataataatataaactacagtcacattaagttgatattaaattcaaaatctaacatagatttgcactgttgggtgtgtgttccgaatcagtgggttttcccactgatgttgatttcgggagccaggcttcaatgtttaattctattgtaatgtggttatttagcctgaatggttttataaggtggaaaggcaaaaaatttaattccgaagaaaactagtgttttactatgactgtggtaaacatttccaaagcccacctgtgggaaatacaaagttttaatgctgtgtgtttttttgtttttgtattttgtctcatcgacaaaactggcagaaaaaaacgctttcgtatatttttcctgctgggtggtcagaaggaaaggccgtgaagctaaaggtctcccactgagacgctgttctgcaaggagccgacctcacgtgccgccgccgccagagaagagagcacctgttcatctcggctcactgtgaggctgagctcagcgctggcaggcgaggggccgcaagcatcccccacagccaccgagagggcatccctgcagggaaatcatatccgacatgcctgtgcccacagcagacttaagactgcctctaaaatgtccatgaagccattgtccagtagagctgttagttttaacaccagtgagtattacctttggttaaaaggatgcatgtgtataggtgtatgtgtgtgcgtgtgtgtttgtgtttttggacttgtgtggagaatgaagaaagggttccatttaggcatttgcaaatattcgatggcatcatgaaaagacaaaaaaatcctataaaatatatcatattttgctatgattttgtgtgtacatgtaataaaattattaagtataaaaaaaaaaaaaaaaaaaaaaaaaaaaaa

SEQ ID NO: 1957 - DNA, 2007 bp, Homo sapiens
ggcacagctgaggaactgaaaagaaatgctgagacaggaaatctgcctcattcgtaccggctcatcagtgttgtcagtcacattggtagcacttcttcttcaggtcattacattagtgatgtatatgacattaagaagcaagcgtggtttacttacaatgacctggaggtatcaaaaatccaagaggctgccgtgcagagtgatcgagatcggagtggctacatcttcttttatatgcacaaggagatctttgatgagctgctggaaacagaaaagaactctcagtcacttagcacggaagtggggaagactacccgtcagscctcgtgaggaacaaactcctgggttggcagcatgcactgcatatttgttactgctgcccacctcacctttcctctgctgaaggagaatttggaattctacttgatgcgggagcaacaaacagctcagggccaaaccaaaagacaaaaattggagtaacgtagaatgctccatgctattttatggaaactttggtctcacatccgtagctgattatcctctttttctcctatgagtggcacttcttttgtcttaggaatacatgttgtaaatatatatctgtgtatgtgtgtatacacacacacagacacacacacacacacacgggatgaatggagccttaaagagttaggatgagccaccagaatatgcctgctcaaaattaatagcacagcagtttggagaagaaatgaaggtgtcaaagagtccattcacctgagaaatgtgtgaagacatacttatcagttggcttttagcttttatgttccttgagtagtttcactcaagtctgtaaccttttgtgtttccttattagtaaaattcactggaaagccagctcttcatgttacactaatgacagtttgttctctttgcaagagaggggcattactgtcacctgacttgaggagctgttttgttgttgttgttgtctgcaaatttcatgaatttgtgatgtctttgctgtttacatgcagtcccaagaaatggattgttggtgctttggaatatgttacagtcccacatttgatatttcttatatactttgttttctctaaggagatttcttcacacagtatgttcatcatatatcatcatcattattatggtggtaaagatagaatcttttttcttttttgtcattctgscatggagcagcattaccctaatggattgcaaccaaaactttaaacaagtagaaagataatatttctccaattgggactccccagcaggaatacttagggataaggaagaatgctagcatctctgtctctcaracatagggaggataagaagagtgktcttctggtaaagctaaaattctggaccactgaagctaaaagccctattgcaagtatgaaattaagtacttgagctataggacaaaccttgggcatttaaccatttactgtctggctttgcccttaaaatagggttgcaattaaaatgtgattggcttaggtaatcccaaaaactaacaaataacaaaggtgcataatttatttatctactttttaggtgctctgagttgaggcaaagtagagcggcaacattaagtgctatgctagtcacttagctgacgtaaccagcttggttaagcagcttatgaaaccatataaagaattcttttgaggatggaattctgtccacaaaataattttgtgagcccagatatcattaggatcacacagagttaaatatagaaaaatgaaaccatcattatattctttcgtgttttttcttttattataaacaaggggattattctttagttctcagaggtagggacaaaaccacatcaggttttcagaaggaaaaaacatttaaaaacccaccatcacatgagagaatcacttgaacccaggaggcagaggttgcagtgagctgagatcgcatcattgcactgcagtctgagtgacagagtgagactccatctcattaaaaaaaaaaaaaaaaaaactcgag

SEQ ID NO: 1958 - DNA, 1250 bp, Homo sapiens
aattcggcacgagctctcccttcggcttctctctttcggccggcgccgccagttcctggggcacacccagaggtccccttctcgccgccgcctgcaactgcgagggtagcccggggccgcttggagtcgcccggacctgagaggctgctgcactgggcctcagccagccctccggatgctggtgctgccatccccctgccctcagcctctggcattttcctccgttgagaccatggagggccctccccgtcggacttgccgctccccagaacctggaccttcctcctccatcggatctccccaggcttcatctcctccaaggcccaaccactacctgcttattgacactcagggtgtcccctacacagtgctggtggacgaggagtcacagagggagccaggggccagtggggctccaggccagaaaaagtgctacagctgccccgtgtgctcaagggtcttcgagtacatgtcctaccttcagcgacacagcatcacccactcggaggtaaagcccttcgagtgtgacatctgtgggaaggcattcaagcgcgccagccacttggcacggcaccattccattcacctggcgggtggtgggcggccccacggctgcccgctctgccctcgccgcttccgggatgcgggtgagctggcccagcacagccgggtgcactctggggaacgcccgtttcagtgtccacactgccctcgccgctttatggagcagaacacactgcagaaacacacgcggtggaagcatccatgagccgggctgccgggtgccccaggtaccacaggactttgcagggagcctggactcctgtccagacacctggtgagagcctgaggctggtgttcagggccctggacacagacacagagcagccgcatctcaaaggcagagccctgcctgaaggaggaatccgtgagtaatcttcaggtcctccgtgttctggagctgagatgggaatgagcccctacacagaatggagtcctctagcctaaagatatcagctgttccatggcagagccttgactggatggaggtggggagtgtggtgtgtaaagtctctggcctcataaaaggtggctgtgggtcgtcaggaatctgcgccatcttcctggggcttctgcgctgttgttggggaagggaccccagtcctgccttccaccccccaaccaggcctgagactgatcaaacaataaacacgtttcccactctgaaaaaaaaaaaaaaaaaaaaaaaa

SEQ ID NO: 1959 - DNA, 2154 bp, Homo sapiens
  misc_feature (635)..(635): n equals a,t,g, or c
  misc_feature (2150)..(2150): n equals a,t,g, or c
  misc_feature (2152)..(2152): n equals a,t,g, or c
gtttatttatttatttattttagaaataagagcctgggtgacaagagtgagactctgtctccaaaaaaaaaaaaaaaaaaaaaaaaaaactggattgcctggctctactccgggcacagcatgcaggcccagttctgctgctctgctgtttgttctgctttcctccacatattggcatcaccctctggtgccaagatggctgctgcattccaggcatcacatccagactcagacccagagaagctgcccatccctacctgggtgagcctttgtaggaacgagaaaccgcatccagcagcagaaacctcacccagcagcgtcttttccggtctcattcaccagcgccgcccaccgctcaaccaatccctggccaaaagaatgggaccgcctggaaggctggaccaaacaggacctgccctctggggctggggagaggcccagatgaaggctgcaggacaggatggactcctagacctctgttaccagcagtgactacctctgtctgggtggttggaacatgtttgaattttattctaagtactgtctacaagttctgcaataaaccttgactcttcttttaataatgcaaaaggaatcgaagtgattgtttgaaagggagaggaagaaagagagangggagggagggaagaatggagggaggcagggaaggagacagagagagtagaatccagccaccggaaaaatccagaatagctggctttgcttaatccatgcctggaaataactgctgggtttgcaacaacttctctcccggagacagaccaaggaaactacaaaactgcagggkattgaagggccgggcacagtggctcacgcctgtaatcccaaagtgctgaattaagcagctcaccatccacacggctgacctcatacatcaagccaataccgtgtggcccaagacccccaccataaatcacatcattagcatgaaccacccagagtggcccaagactcccagatcagctaccaggcaggatattccaagggcttagagatgaatgcccaggagctgaggataaagggcccgatctttctttgggcaaggttaagcctttactgcatagcagaccacacagaagggtgtgggccaccagagaattttggtaaaaatttggcctctggccttgagcttctaaatctctgtatccgtcagatctctgtggttacaagaaacagccactgaccctggtcaccagaggctgcaattcaggccgcaagcagctgcctggggggtgtccaaggagcagagaaaactactagatgtgaacttgaagaaggttgtcagctgcagccactttctgccagcatctgcagccactttctgccagcatctgcagccagcaagctgggactggcaggaaataacccacaaaagaagcaaatgcaatttccaacacaagggggaagggatgcagggggaggcagcgctgcagttgctcaggacacgctcctataggaccaagatggatgcgacccaagacccaggaggcccagctgctcagtgcaactgacaagttaaaaaggtctatgatcttgagggcagacagcagaattcctcttataaagaaaactgtttgggaaaatacgttgagggagagaagaccttgggccaagatgctaaatgggaatgcaaagcttgagctgctctgcaagagaaaataagcaggacagaggatttgctctggacagagatggaagagccgggaacagagaagtgtggggaagagataggaaccagcaggatggcaggggcaaagggctcaagggtgaggaggccagtgggaccccacagagttggggagataaaggaacattggttgctttggtggcacgtaagctccttgtctgtctccagcacccagaatctcattaaagcttatttattgtacctccagcggctgtgtgcaatggggtcttttgtggaaatcaaggagcagacaggtttcatgtgtactgtcaccacgtgggatggaaccagaggcatggaagcaagacgctaaatgaagagggccataagggctgggattcccaggcaccttaggaacagcttgkctttttttttttcctctccaaaaaaaatgtttaagggacggtgacaagagtgagactctgtctycaaaaaaaaaaantnaa

SEQ ID NO: 1960 - DNA, 652 bp, Homo sapiens
  misc_feature (502)..(502): n equals a,t,g, or c
  misc_feature (522)..(522): n equals a,t,g, or c
  misc_feature (525)..(525): n equals a,t,g, or c
  misc_feature (560)..(560): n equals a,t,g, or c
  misc_feature (599)..(599): n equals a,t,g, or c
  misc_feature (630)..(630): n equals a,t,g, or c
agacaggtgagcgacgaacttctgagacagcagttgtgtccctgtggctttggtgcgcctgtgtgcactttctccctccacctggagcatgggctaacaccggaggaaaggaaaagacagagtcagacagggagcctggggaggggccatggtgccaatgcacttactggggagactggagaagccgcttctcctcctgtgctgcgcctccttcctactggggctggctttgctgggcataaagacggacatcacccccgttgcttatttctttctcacattgggtggcttcttcttgtttgcctatctcctggtccggtttctggaatgggggcttcggtcccagctccaatcaatgcagactkagagcccagggycctcaggcaatgcacgggacaatgaagcctttgaagtgccagtctatgaagaggccgtggtgggactagaatcccagtgccgccccaagagttggaccaaccacccccctacagcaactggtggngatacccccagcaccctganganggaacaacctagcccattccagaaggggtccaggnagaagccaaaactgggaacagaggccgaatgggccttanaagggggtcccatgggccccaggaagggaancccctgggaagaacttccaaat

SEQ ID NO: 1961 - DNA, 469 bp, Homo sapiens
  misc_feature (448)..(448): n equals a,t,g, or c
  misc_feature (463)..(463): n equals a,t,g, or c
gaagtgggagaggtcgcagccccgccttctctacacaggaaagctcagtggcccccaagccaggatgtcccaagcttgggtccccggcctcgcgcccaccttgctgttcagcctgctggctggcccccaaaagattgcagccaaatgtggtctcatccttgcctgccccaaaggattcaaatgctgtggtgacagctgctgccaggagaacgagctcttccctggccccgtgaggatcttcgtcatcatcttcctggtcatcctgtccgtcttttgcatctgtggcctggctaagtgcttctgtcgcaactgcagagagccggagccagacascccagtggattgccgggggcccctggaactgccctccatcatccccccagagagggtgattctgaagcccagcytgggccaaytcccacagagccaacccctccctacagttcangcctgaagaatatancgggga

SEQ ID NO: 1962 - DNA, 755 bp, Homo sapiens
  misc_feature (648)..(648): n equals a,t,g, or c
cgatgtcttattgtgatgagtctcgactgtcaaatcttcttcggaggatcacccgggaaracgacmgagacygaagattggyyactgtaaagcagttgaaagaatttattcagcaaccagaaaataagctggtactagttaaacaattggatatcttggctgctgyacatgatgtgcttaatgaaagtagcaaattgcttcaggagttgagacaggagggagcttgctgtctyggccttctttgtgcttctctgagctatgaggctgagaagatcttcaagtggatttttagcaaatttagctcatctgcaaaagatgaagttaaactcctctacttatgtgccacctacaaagcactagagactgtaggagaaaagaaagccttttcatctgtaatgcagcttgtaatgaccagcctgcagtcaattcttgaaaatgtggatacaccagaattgctttgcaaatgtgttaagtgcattcttttggtggctcgatgttaccctcatattttcagcrctaattttagggatacagttgrtatattagttggatggcatagagatcatactcagaaaccttcgctcacgcagcargtatctgggtggttgcagagtttggagccattttgggtagctgatcttgcatttnctacgmctctwcttgggtcagtttctagaagacatggaagcatatgctgaggaccycagccatgtggcctctggggaatcagtggatgaagacgtccctcctccatt

SEQ ID NO: 1963 - DNA, 1022 bp, Homo sapiens
cggactgggtctccgtgggaggggcctgggtctggagagcagggcagggtctcctgggcctaggggatggggatggggctgggtctcagaggaggcagggtttacgtgcagaagagcggacttggtctccggggtcccgagtgggtgacgcggcccgccacaggtgcttcctgaaggtgagccggctggaggcacaactgctcctggagcgctaccccgagtgcgggaacctgctgctgcggcccagcggggacggcgccgacggygtgtcggtcaccacgcggcagatgcacaacgggacgcacgtggtccggcattacaaggtgaagcgggagggccccaagtacgtgatcgatgtggaacagccgttctcttgcacctccctggacgccgtggtcaactatttcgtgtcgcataccaaaaaggcgctggtgccattcctgttagacgaggactacgagaaggtgctaggctacgtggaagccgataaggagaatggcgagaatgtgtgggtggcgccctccgctccgggcccaggtcctgcaccctgcacaggtggccccaagccgctgtcacctgcgtctagccaggacaagctgcccccactgcccccactaccgaaccaggaagagaactacgtgacccccattggagatggcccagctgttgactatgagaaccaagatgtggcttcctctagttggccagtcatcctgaagccaaagaagttgccaaagcctcctgccaagcttccaaagccacccgttggacccaagccagagcccaaagtctttaatggtggcttgggcaggaagctgccagtcagttcagcccagcctctcttccccacagccgggctggcagacatgacggcagagctacagaagaagctggagaagaggcgggcactggagcactgattcggacacaccagggaccagcgggctagtcccagggcatgcccagcggccagattctttttcccaggattaaaactctgaccccaggaaaaaaaaaaaaaa

SEQ ID NO: 1964 - DNA, 1776 bp, Homo sapiens
  misc_feature (14)..(14): n equals a,t,g, or c
  misc_feature (19)..(19): n equals a,t,g, or c
  misc_feature (21)..(21): n equals a,t,g, or c
atcatataggcaanggtancngacagtacggtcggaytcccgsgtcgacccacgcggctggaaggaactggtctgctcacacttgctggcttgcgcatcaggactggctttatctcctgactcacggtgcaaaggtgcactctgcgaacgttaagtccgtccccagcgcttggaatcctacggcccccacagccggatcccctcagccttccaggtcctcaactcccgcggacgctgaacaatggcctccatggggctacaggtaatgggcatcgcgctggccgtcctgggctggctggccgtcatgctgtgctgcgcgctgcccatgtggcgcgtgacggccttcatcggcagcaacattgtcacctcgcagaccatctgggagggcctatggatgaactgcgtggtgcagagcaccggccagatgcagtgcaaggtgtacgactcgctgctggcactgccgcaggacctgcaggcggcccgcgccctcgtcatcatcagcatcatcgtggctgctctgggcgtgctgctgtccgtggtggggggcaagtgtaccaactgcctggaggatgaaagcgccaaggccaagaccatgatcgtggcgggcgtggtgttcctgttggccggccttatggtgatagtgccggtgtcctggacggcccacaacatcatccaagacttctacaatccgctggtggcctccgggcagaagcgggagatgggtgcctcgctctacgtcggctgggccgcctccggcctgctgctccttggcggggggctgctttgctgcaactgtccaccccgcacagacaagccttactccgccaagtattctgctgcccgctctgctgctgccagcaactacgtgtaaggtgccacggctccactctgttcctctctgctttgttcttccctggactgagctcagcgcaggctgtgaccccaggagggccctgccacgggccactggctgctggggactggggactgggcagagactgagccaggcaggaaggcagcagccttcagcctctctggcccactcggacaacttcccaaggccgcctcctgctagcaagaacagagtccaccctcctctggatattggggagggacggaagtgacagggtgtggtggtggagtggggagctggcttctgctggccaggatggcttaaccctgactttgggatctgcctgcatcggtgttggccactgtccccatttacattttccccactctgtctgcctgcatctcctctgttgcgggtaggccttgatatcacctctgggactgtgccttgctcaccgaaacccgcgcccaggagtatggctgaggccttgcccacccacctgcctgggaagtgcagagtggatggacgggtttagaggggaggggcgaaggtgctgtaaacaggtttgggcagtggtgggggagggggccagagaggcggctcaggttgcccagctctgtggcctcaggactctctgcctcacccgcttcagcccagggcccctggagactgatcccctctgagtcctctgccccttccaaggacactaatgagcctgggagggtggcagggaggaggggacagcttcacccttggaagtcctggggtttttcctcttccttctttgtggtttctgttttgtaatttaagaagagctattcatcactgtaattattattattttctacaataaatgggacctgtgcacaggaaaaaaaaaaaaaaaaaaaaaaaaaaaaaaaaaaaaaaaaaagggcggccgc

SEQ ID NO: 1965 - DNA, 1129 bp, Homo sapiens
ctcgagttttttttttttttttttttttactgataaatacggaaactccatctttatcggctgtataaacatctctggtctgtacatacatttcatacatcgtagggtgggaagcgagggccaaagggaggcccagcagcacaacagctcacccgctttccctacagccctacccgctctgtgcaaaccaaggccaacagctcctgctgcctcttcctccctggaaaagtcactgttacggggagggggccaggggttgaaggattagaaggagatagagggcttggtggggaggacacatgtaagtgctagaatcaaacactgaagcgaaacaggcaactggcacaagcagcaagctgaggcatgggacggggcaggaaaaggggagggaggggccacgctgcccctctgggcttgctcagctaaggctctggggtcttgccctcacgctggcagggagacaggccccagagcctcagccccaatacccgggagctagggacatgggtggcactggtaaagaaaggatggaaggggagaaaggagtgaaggccctagtgccctgtcacctcacagcccctctctcttaaacatgcaacaggcacccacccatgtgggtccaggtatggggagccagagacctagatcctctgtggtgcctgagcaggttggggtggggagccagctctcaagggaaagatggagagcctagaggagtcttcctggggcagcagccagtgaaaggacagagatgaccaaagagaggtcccctggccctgccaggggtatgacagcagcaactggttcacacaaccaggaaagaaaacaagaaagaggaattcaaggagaaataccatggtgagtaggggagggggctgtctactctaccctctacaaagcatcatgcccgaatagcagctgagatagggtgctcacgcctctccacccacacagggccggtgagggaaagggggacccagaagcccactgaccaaagcgagtgggaccacccacataccaacaccattctttgggtccattcctgtccaaccagggactcaggcccagggactgacaacagtggcagcaccaggtcagaaacgtgggcacagagaagcgtgacaggggc

SEQ ID NO: 1966 - DNA, 279 bp, Homo sapiens
gagaaaagggaccaaaagttattttagcttcctcaatagattgcatgttgcttattaggataataaattaatattaaatgcaatatatgtcttgtctttattatggcatctatttaggagttgttcaaatcactgcagtagggctctgcaaataaaataatgtaacctattatcatggatctaatgtactgtaactttatcagtgaaaggtaaaatctcaaataacaagtacaaacattgaacaattacctataaagatttgtaaaagtaaaaaaaaaa

SEQ ID NO: 1967 - DNA, 923 bp, Homo sapiens
tttatcatcttattttgaacctcgtgtagattacagtaaagcaaaccattcagtgtgttccaggaaattatattagatctgtgtttctatcagctcactggaataatctgataattgttacttttacttggtatggctgcaagaatagtggaaagaagaggacttgagagttggtcgaacccaggtttgaaatctggcttagtcatttttcagctgttatcctgggtgagttttgccaactttcttagcttcatttccctcattaatacggtgggacataacagctactcttgcattgaaaattaagttagrttacctgtctagcatacccatcatcatacacttactatggtcacattttgtatttaaaataaactaatacgaaaaatatttctttttttttacacagaattatgattctcacagggtatataaattactgattagaattatttatatgtggccaattcttaatgkcattgggaakgctgttycatttcaaycctcaaagttactgtagcacagaaaatatcacaatttcctgcagggacattatcagtaagtyckgcagggaacaaacaattgacattaaaaatcagtactctgcaattgtcactgttatyatctgctagaaactytgcataatgcattttaaaccaccaaggctggctgccacatccatgtgaaatgcttgaattttatggtgcttaaatatttaatgattcatgggaaaaatgtgaaatgtgtctaataaattgcatccctttctctaacctctggttgtaaagttaaagactttcagcatgtaacttttgcaagatgcctggtctgccattggcacttaaatatttgttgtattacgatttataatatggttcattatatataaaattctgtgatgasttccaaaaacaaaaaaaaaa

SEQ ID NO: 1968 - DNA, 1757 bp, Homo sapiens
agtttggagaccaccgcgaatraagtttgcattttcctctgttcttgagcccagcttcttctcgtctcccaccccagcttcccggcattggaagaagggaccgtcctcttccttgtcttggccacccaaatcctggtatcgaaagggttgaacggaccggaagtgtgcagcagcgacgggtccccagctaatcgacgccggaagtagcaattactagacaagcattccgccgccggcttcgctatggcggcaattcccccagattcctggcagccacccaacgtttacttggagaccagcatgggaatcattgtgctggagctgtactggaagcatgctccaaagacctgtaagaactttgctgagttggctcgtcgaggttactacaatggcacaaaattccacagaattatcaaagacttcatgatccaaggaggtgacccaacagggacaggtcgaggtggtgcatctatctatggcaaacagtttgaagatgaacttcatccagacttgaaattcacgggggctggaattctcgcaatggccaatgcggggccagataccaatggcagccagttctttgtgaccctcgcccccacccagtggcttgacggcaaacacaccatttttggccgagtgtgtcagggcataggaatggtgaatcgcgtgggaatggtagaaacaaactcccaggaccgccctgtggacgacgtgaagatcattaaggcatacccttctgggtagacttgctaccctcttgagcagctcttctgagatggccccagtgaaccagcttctagatgacatagaatgacatgtaatgctaaattcattttggctttgcaagtcatgaagcttaggaggcctggcatcttgggtgagttagagatggaagtacattttaataggatgcttcttttctcttcccccagtgcctaggttgccagagcatttgcacaaatgcccctgtttatcaataggtgactacttactacacatgaaccataatgctgcttcttgtgcatgtctgctctgatatacgtcgaacaatgtagcagccactgtcatttctcagtggttttgcctaaccaaacttcttcctaaggagatttatattctggcctacacagcagtccttgatggctgacagccacagaattccaaaccaagtagtgtctgtcagccctcttaactctgtgcacgccctatttcagtcttttacatttgttcttctagggaatgtatgcatctctatatatattttccctctcaaaaccagaacatcaacagtgctgtttctgacacttcagacatcccacgcaaagccacattgaatttttgccaaatgaaaaacacatccaacaatcaagtttctaagaaggtgtcaagtggggaataataataatgtataataatcaagaaattagtttattaaaaggaagcagaagcattgaccattttttcccagagaagaggagaaatctgtagtgagcaaaggacagaccatgaatcctccttgagaagtagtactctcagaaaggagaagcgccactcaagttcttttaacccaagactttagagaaattaggtccaagatttttatatgttcagttgtttatgtataaaaataactttctggattttgtggggaggagcaggagaggaaggaagttaatacctatgtaatacatagaaacttccacaataaaatgccattgatggttgaaaaaaaaaaaaaaaaaaaaaaaaaaaaaaaa

SEQ ID NO: 1969 - DNA, 2856 bp, Homo sapiens
agcaagtattggtgatgtgacctgttcacgcagggaaacttgaacattcgcaggtacaccagaggatcgcttcctggcagaatttgggagctgtttattgcagcactgttgtccctctgatgatgttacagtggtttatcaaaatgggttacctgtgatatctgtgaggctaccatcccggcgtgaacgctgtcagttcacactcaagcctatctytgactctgttggtgtatttttacgacaactgcaagaagaggatcggggaattgacagagttgctatctattcaccagatggtgttcgcgttgctgcttcaacaggaatagacctcctcctccttgatgactttaagctggtcattaatgacttaacataccacgtacgaccaccaaaaagagacctcttaagtcatgaaaatgcagcaacgctgaatggatgtaaagacattggtccagcaactatacaccacactgtgcattgagcagcaccagttaaacaaggaaagggagcttattgaaagactagaggatctcaaagagcagctggctcccctggaaaaggtacgaattgagattagcagaaaagctgagaagaggaccactttggtgctatggggtggccttgcctacatggccacacagtttggcattttggcccggcttacctggtgggaatattcctgggacatcatggagccagtaacatacttcatcacttatggaagtgccatggcaatgtatgcatattttgtaatgacacgccaggaatatgtttatccagaagccagagacagacaatacttactatttttccataaaggagccaaaaagtcacgttttgacctagagaaatacaatcaactcaaggatgcaattgctcaggcagaaatggaccttaagagactgagagacccattacaagtacatctgcctctccgacaaattggtgaaaaagattgatctgcaaaaagcctctgaatcctggcagaaggaacacctgtttgcctttttaattaaagcattgcaggtggaagctgggagccatgtggggggtagagcgtttttacctttaattataaaacaaaaacagaaaggatctgagggaagaagggaatgttaaaacctgaggatcaggcattgtggaatataagctcaaagggcttagtgaatattgtcttaaccaagtatctcagtttctggatgaaaatgatgcagttatatagttgagagattcataaagagaaaacaatgctgggggtgttcgtttcttgcatcttctttgcagagtcagcaaaagagtaacacaccagcaccccactcgactctatttgtttttaatttaactgtccctatttttgacataggagtaaataaatatactagaaaagcaaattctcatgatatgctwaaatatcattagcatttattttaaattggacccartctctgcagagttaccaggaatctttccttycagcatycctttactgaccacctamctgkacctcttggktacactcatttttttcatttgawaattggaaccaacttataactggttaataattgcactttagattatctcttaataccttcttaaatgtctatatatcccagtgctctggatcagtgtctaaaaatcactggcaacactgcatgaggttgttggttttgttttgttttattaattagtctttcacaggaggaataattgccctcctttatatacttatctattgataatcccctctccctccagaacacaaatcagagggaaagggggtgttcagctgtactaccaaatcaggaagatgtaaggtttacaaattggctaagaatcatggctctgtagccatttcaaccagaataattttattgctaatctgctttgtgtgacagcattccaggccagccagatgggactgccttgtctggaggctttgttcatctcgaaggacacacacttccacactgtttgtgagccctcccacctccacaacttcagttgtaaatcaagtgtgtggatctcaaagggtgcaatttatctttatataggaatacatttctagggcttccttcaagcccactctcttcaccctattttttcttatcttaaattgagagaaagagaattaatcttatactttgtcaaaacattttctaccatatttccagatgacatctgcgcttgaagagtcaaaggaatctgtgtctaatatcctgtttttaactgctgtaggggcaggatggaaaggatgatgggggctgccacaccactgattggccttttctttcacgtgattcatccttcctcattgtggcaaggagtttctttctctttttcttcctcctttgggatcattgtgtatgaaaagaaaaactttaaatgacaaacccagactccaggtgccttgcaaaggttgaaggccagccaggattgctgctgctgctgctactcctgccaacacccctttcattggcatgacggaatgaaaggatgcatgtctccacttcctgaccctccgcccacttccttctccctccaccacccccagtcgtcagctccttccctcatttatttttgttaagttgtgtgaattatttttaacccatttatcctgtttgtgcatagggtttttaagaagaaacagcacagtgcaacgagcaaatctttttggggtgtgtgggaagcaagggagggaggacatggagaaaagttctttaaacaaatagcaaactattgaacatgtgtaaaatcctgtatcatttatgaaatatgtataaaaagcaatgtaccttctggaacaataaatacttattcaatttttgaaaaaaaaaaaaaaaaaagggcggccgc

SEQ ID NO: 1970 - DNA, 1720 bp, Homo sapiens
ccacgcgtccgaaactttgtgctggaatcatgataactgcatctcacaatccaaagcaggataatggttataaggtctattgggataatggagctcagatcatttctcctcacgataaagggatttctcaagctattgaagaaaatctagaaccgtggcctcaagcttgggacgattctttaattgatagcagtccacttctccacaatccgagtgcttccatcaataatgactactttgaagaccttaaaaagtactgtttccacaggagcgtgaacagggagacaaaggtgaagtttgtgcacacctctgtccatggggtgggtcatagctttgtgcagtcagctttcaaggcttttgaccttgttcctcctgaggctgttcctgaacagaaagatccggatcctgagtttccaacagtgaaatacccgaatcccgaagaggggaaaggtgtcttgactttgtcttttgctttggctgacaaaaccaaggccagaattgttttagctaacgacccggatgctgatagacttgctgtggcagaaaagcaagacagtggtgaatggagggtgttttcaggcaatgagttgggggccctcctgggctggtggctttttacatcttggaaagagaagaaccaggatcgcagtgctctcaaagacacgtacatgttgtccagcaccgtctcctccaaaatcttgcgggccattgccttaaaggaaggttttcattttgaggaaacattaactggctttaagtggatgggaaacagagccaaacagctaatagaccaggggaaaactgttttatttgcatttgaagaagctattggatacatgtgctgcccttttgttctggacaaagatggagtcagtgccgctgtcataagtgcagagttggctagcttcctagcaaccaagaatttgtctttgtctcagcaactaaaggccatttatgtggagtatggctaccatattactaaagcttcctattttatctgccatgatcaagaaaccattaagaaattatttgaaaacctcagaaactacgatggaaaaaataattatccaaaagcttgtggcaaatttgaaatttctgccattagggaccttacaactggctatgatgatagccaacctgataaaaaagctgttcttcccactagtaaaagcagccaaatgatcaccttcacctttgctaatggaggcgtggccaccatgcgcaccagtgggacagagcccaaaatcaagtactatgcagagctgtgtgccccacctgggaacagtgatcctgagcagctgaagaaggaactgaatgaactggtcagtgctattgaagaacattttttccagccacagaagtacaatctgcagccaaaagcagactaaaatagtccagccttgggtatacttgcatttacctacaattaagctgggtttaacttgttaagcaatatttttaagggccaaatgattcaaaacatcacaggtatttatgtgttttacaaagacctacattcctcattgtttcatgtttgacctttaaggtgaaaaaagaaaatggccaaacccaacaaactaacattcctactaaaaagttgagcttggacatattttgaatttttgtaagtgaagatttttaaactgactaacttaaaaaaatagattgtaattgatgtgccttaatttgcataaatcataaatgtaaaaaaaaaaaaaaa

SEQ ID NO: 1971 - DNA, 2854 bp, Homo sapiens
ggcacgaggagaaatcacagggagatgtacagcaatggggccatttaagagttctgtgttcatcttgattcttcaccttctagaaggggccctgagtaattcactcattcagctgaacaacaatggctatgaaggcattgtcgttgcaatcgaccccaatgtgccagaagatgaaacactcattcaacaaataaaggacatggtgacccaggcatctctgtatctgtttgaagctacaggaaagcgattttatttcaaaaatgttgccattttgattcctgaaacatggaagacaaaggctgactatgtgagaccaaaacttgagacctacaaaaatgctgatgttctggttgctgagtctactcctccaggtaatgatgaaccctacactgagcagatgggcaactgtggagagaagggtgaaaggatccacctcactcctgatttcattgcaggaaaaaagttagctgaatatggaccacaaggtagggcatttgtccatgagtgggctcatctacgatggggagtatttgacgagtacaataatgatgagaaattctacttatccaatggaagaatacaagcagtaagatgttcagcaggtattactggtacaaatgtagtaaagaagtgtcagggaggcagctgttacaccaaaagatgcacattcaataaagtaacaggactctatgaaaaaggatgtgagtttgttctccaatcccgccagacggagaaggcttctataatgtttgcacaacatgttgattctatagttgaattctgtacagaacaaaaccacaacaaagaagctccaaacaagcaaaatcaaaaatgcaatctccgaagcacatgggaagtgatccgtgattctgaggactttaagaaaaccactcctatgacaacacagccaccaaatcccaccttctcattgctgcagattggacaaagaattgtgtgtttagtccttgacaaatctggaagcatggcgactggtaaccgcctcaatcgactgaatcaagcaggccagcttttcctgctgcagacagttgagctggggtcctgggttgggatggtgacatttgacagtgctgcccatgtacaaagtgaactcatacagataaacagtggcagtgacagggacacactcgccaaaagattacctgcagcagcttcaggagggacgtccatctgcagcgggcttcgatcggcatttactgtgattaggaagaaatatccaactgatggatctgaaattgtgctgctgacggatggggaagacaacactataagtgggtgctttaacgaggtcaaacaaagtggtgccatcatccacacagtcgctttggggccctctgcagctcaagaactagaggagctgtccaaaatgacaggaggtttacagacatatgcttcagatcaagttcagaacaatggcctcattgatgcttttggggccctttcatcaggaaatggagctgtctctcagcgctccatccagcttgagagtaagggattaaccctccagaacagccagtggatgaatggcacagtgatcgtggacagcaccgtgggaaaggacactttgtttcttatcacctggacaacgcagcctccccaaatccttctctgggatcccagtggacagaagcaaggtggctttgtagtggacaaaaacaccaaaatggcctacctccaaatcccaggcattgctaaggttggcacttggaaatacagtctgcaagcaagctcacaaaccttgaccctgactgtcacgtcccgtgcgtccaatgctaccctgcctccaattacagtgacttccaaaacgaacaaggacaccagcaaattccccagccctctggtagtttatgcaaatattcgccaaggagcctccccaattctcagggccagtgtcacagccctgattgaatcagtgaatggaaaaacagttaccttggaactactggataatggagcaggtgctgatgctactaaggatgacggtgtctactcaaggtatttcacaacttatgacacgaatggtagatacagtgtaaaagtgcgggctctgggaggagttaacgcagccagacggagagtgataccccagcagagtggagcactgtacatacctggctggattgagaatgatgaaatacaatggaatccaccaagacctgaaattaataaggatgatgttcaacacaagcaagtgtgtttcagcagaacatcctcgggaggctcatttgtggcttctgatgtcccaaatgctcccatacctgatctcttcccacctggccaaatcaccgacctgaaggcggaaattcacgggggcagtctcattaatctgacttggacagctcctggggatgattatgaccatggaacagctcacaagtatatcattcgaataagtacaagtattcttgatctcagagacaagttcaatgaatctcttcaagtgaatactactgctctcatcccaaaggaagccaactctgaggaagtctttttgtttaaaccagaaaacattacttttgaaaatggcacagatcttttcattgctattcaggctgttgataaggtcgatctgaaatcagaaatatccaacattgcacgagtatctttgtttattcctccacagactccgccagagacacctagtcctgatgaaacgtctgctccttgtcctaatattcatatcaacagcaccattcctggcattcacattttaaaaattatgtggaagtggataggagaactgcagctgtcaatagcctagggctgaatttttgtcagataaataaaataaatcattcatccttttttttgattataaaaaaaaaaaaaaaaaaaa

SEQ ID NO: 1972 - DNA, 4087 bp, Homo sapiens
gcgggaggatgggccgccgctaggctcgcactccggacgcgcctcgcagtgcgcagggtgggtgccccgcgcctgcagcgtccgccggggcggcgcggcgggaggtggccgacaggctccaggcctcgcagcctcagcccccggcccagcgcgctttccgacggcggcgccgcgccgagccacccgcccgcccaaggtctctcgcgggcgggagaacggaaaactcccaacttcctgagttctaaagttcctgttgcttcagacaatggatgagcaatcacaaggaatgcaagggccacctgttcctcagttccaaccacagaaggccttacgaccggatatgggctataatacattagccaactttcgaatagaaaagaaaattggtcgcggacaatttagtgaagtttatagagcagcctgtctcttggatggagtaccagtagctttaaaaaaagtgcagatatttgatttaatggatgccaaagcacgtgctgattgcatcaaagaaatagatcttcttaagcaactcaaccatccaaatgtaataaaatattatgcatcattcattgaagataatgaactaaacatagttttggaactagcagatgctggcgacctatccagaatgatcaagcattttaagaagcaaaagaggctaattcctgaaagaactgtttggaagtattttgttcagctttgcagtgcattggaacacatgcattctcgaagagtcatgcatagagatataaaaccagctaatgtgttcattacagccactggggtggtaaaacttggagatcttgggcttggccggtttttcagctcaaaaaccacagctgcacattctttagttggtacgccttattacatgtctccagagagaatacatgaaaatggatacaacttcaaatctgacatctggtctcttggctgtctactatatgagatggctgcattacaaagtcctttctatggtgacaaaatgaatttatactcactgtgtaagaagatagaacagtgtgactacccacctcttccttcagatcactattcagaagaactccgacagttagttaatatgtgcatcaacccagatccagagaagcgaccagacgtcacctatgtttatgacgtagcaaagaggatgcatgcatgcactgcaagcagctaaacatgcaagatcatgaagagtgtaaccaaagtaattgaaagtattttgtgcaagtcatacctccccatttatgtctggtgttaagattaatatttcagagctagtgtgctttgaatccttaaccagttttcatataagcttcattttgtaccagtcacctaaatcacctccttgcaacccccaaatgactttggaataactgaattgcatgttaggagagaaaatgaaacatgatggttttgaatggctaaaggtttatagaatttcttacagttttctgctgataaattgtgtttagatagactgtcagtgccaaatattgaaggtgcagcttggcacacatcagaatagactcatacctgagaaaaagtatctgaacatgtgacttgtttcttttttagtaatttatggacattgagatgaacacaattgtgaacttttgtgaagattttatttttaaacgtttgaagtactagttttagttcttagcagagtagttttcaaatatgattcttatgataaatgtagacacaaactatttgagaaacatttagaactcttagcttatacattcaaaatgtaactattaaatgtgaagatttggggacaaaatgtgagtcagacactgaagagttttttgttttgttttaatatttttgatattctctttgcattgaaatggtataaatgaatccatttaaaaagtggttaaggatttgtttagctggtgtgataataatttttaaagttgcacattgcccaaggctttttttgtgtgtttttattgttgtttgtacatttgaaaaatattctttgaataaccttgcagtactatatttcaatttctttataaatttaagtgcattttaactcataattgtacactataatataagcctaagtttttattcataagttttattgaagttctgatcggtccccttcagaaatttttttatattattcttcaagttactttcttatttatattgtatgtgcattttatccattaatgtttcatactttctgagagtataatacccttttaaaagatatttggtataccaatacttttcctggattgaaaactttttttaaactttttaaaatttgggccactctgtatgcatatgtttggtcttgttaaagaggaagaaaggatgtgtgttatactgtacctgtgaatgttgatacagttacaatttatttgacaaggttgtaattctagaatatgcttaataaaatgaaaactggccatgactacagccagaactgttatgagattaacatttctattgagaagcttttgagtaaagtactgtatttgttcatgaagatgactgagatggtaacacttcgtgtagcttaaggaaatgggcagaatttcgtaaatgctgttgtgcagatgtgttttccctgaatgctttcgtattagtggcgaccagtttctcacagaattgtgaagcctgaaggccaagaggaagtcactgttaaaggactctgtgccatcttacaaccttggatgaattatcctgccaacgtgaaaacctcatgttcaaagaacacttccctttagccgatgtaactgctggttttgtttttcatatgtgtttttcttacactcatttgaatgctttcaagcatttgtaaacttaaaaaatgtataaagggcaaaaagtctgaacccttgttttctgaaatctaatcagttatgtatggtttctgaagggtaattttattttggaataggtaaaggaaacctgttttgtttgtttttcctgagggctagatgcattttttttctcacactcttaatgacttttaacatttatactgagcatccatagatatattcctagaagtatgagaagaattattcttattgaccattaatgtcatgttcattttaatgtaatataattgagatgaaatgttctctggttggaacagatactctcttttttttcttgcaatctttaagaatacatagatctaaaattcattagcttgacccctcaaagtaacttttaagtaaagattaaagcttttcttctcagtgaatatatctgctagaaggaaatagctgggaagaatttaatgatcagggaaattcattatttctatatgtggaaactttttgcttcgaatattgtatctttttaaatctaaatgttcatatttttcctgaagaaaccactgtgtaaaaatcaaattttaattttgaatggaataatttcaaagaactatgaagatgatttgaagctctaatttatatagtcacctataaaatgttctttatatgtgttcataagtaaattttatattgattaagttaaacttttgaattgatttgaggagcagtaaaatgaaagctatatctattctaaaccttatttagacattggtaccagttacccaggtgaaaatatggagtaactttgttttgtatggtaaggtttaggaatggtggatgaagggtatctctatataaataaagtgctcaacaatgtgcaatgattgtaaatttagtaagatattacagccatttcatgaatgctttaccattcaacatagtatctattacaaaacacctttcttgtatccatatacttcaggtgttgctgttaacatttactatgatatttattttaaccaaaatgttactcacattaaatgtttattctttaaaatgaatgtattatgtttttaacccacaaatgcatacttaccctgtgcctcatatttcaatagtactgtaatatggacatcttttgtgaaatacttttattttgttatgctttaaatatacatacaaaaagatttctgttattagctttgaaaattgtataatatcctaatataaacaaaaatataaaaataaaaatgaatacagtaaaaaaaaaaaaaaaaaaa

SEQ ID NO: 1973 - DNA, 801 bp, Homo sapiens
  misc_feature (660)..(660): n equals a,t,g, or c
  misc_feature (744)..(744): n equals a,t,g, or c
  misc_feature (762)..(762): n equals a,t,g, or c
  misc_feature (773)..(773): n equals a,t,g, or c
  misc_feature (791)..(791): n equals a,t,g, or c
  misc_feature (801)..(801): n equals a,t,g, or c
cgggggtcatcttcttcctggccctgctgctgtgcattgcgcttctktcgtcctactccatccacctcctgctgacctgtgctggtattgcagggactggttcttgaagggaaacctcctcatcatcatcgtcagtgtgttaatcatcctgcccctcgccctcatgaaacacttgggctacctggggtacaccagtggtctctctctgacctgcatgctgtttttccttgtttcggtcatctacaagaagttccaacttggctgtgctataggccacaatgaaacagcaatggagagtgaagctctcgtgggactccccagccaaggactcaacagcagctgtgaggcccagatgttcacagttgactcacagatgtcctacacagtgcccattatggcttttgcttttgtctgccaccctgaggtgctgcccatctatacggagctctgccgttccacgacctctacacctcaggccctccaagcgcaggatgcaggccgtggccaacgtgtccattggggccatgttctgcatgtatgggctcacagcaacctttggatacctcaccttctacagcagtgtgaaggcggagatgctgcacatgtacagccagaaggacccgctcatcctctgtgtgcgcctggccgtgctgcttcgcnggtgacccctcactgtgccagtcgtgctggttcctatccgccgggccctggaagcaactgcttttcccaggcaagggcctttancttggccacgacattgtnggccattagcntttgaatccttgctttgntttgggtcan

SEQ ID NO: 1974 - DNA, 1626 bp, Homo sapiens
  misc_feature (1607)..(1607): n equals a,t,g, or c
cggacgcgtgggcggacgcgtgggaaaaggtgaacaaatctttccttcaggtagatgctggatagtctttggagcttgtagtagggtcccatgagcactgcccacagctgctttctgtaccatctgaggtcatctcatccttaagagaacttttaggaccagacaggaatgctcatctctctgtgcccagtagttctctgggggtggcctgaggctgacttgtctgtagtcactgagttcatttacttttattttctaggccttatgatgggaaatggagtaaaacaatggtgggatttgggcctgaggatgatcattttgtcgcagaactgacttacaattatggcgtcggagactacaagcttggcaatgactttatgggaatcacgctcgcttctagccaggctgtcagcaacgccaggaagctggagtggccactgacggaagttgcagaaggtgtttttgaaaccgaggccccgggaggatataagttctatttgcagaatcgcagtctgcctcagtcagatcctgtattaaaagtaactctagcagtgtctgatcttcaaaagtccttgaactactggtgtaatctactgggaatgaaaatttatgaaaaagatgaagaaaagcaaagggctttgctgggctatgctgataaccaggtgagcaatcttggagaagaataacctgttactttgaatttggcttgtaaacgaagcttataaatggcttataacctttataaatgaagttaacatgaaggttgttcccatagtttcttcacagtgattcaatatttatatagataaacagaagaaaataagtgataaccttaccacccagatattaccttgtttatatttggggatatatctcttcagaagtggaattgcttaatccaagagattgaatggatttaatgcaagatctttttcatcttctttttctaataacccagcgtttgagcacgatttagtccttgcactttgaccctgcaattctactcctaggaattattttacagatgtgctcaacatacatcggcacaaagaagtgtgtgcaaggktatctgctgcagcattgtctgtaatcacaatgtgtaagaatttcagtgtcctatagattagagacatatttcagtaatttacggctcattcatggaatggattactatgtcgctagcaaaaagattgaggcaaatctttatgtattgacatggtaacattaagtggagaaaaacaaggaacagaataatttgtaaattataccaccatttgtgtaaaaaaaaaaacatagatgcgtgcagtgcttctagaaggatacacaggaaactgtggactagttgtctctggggtgagagtaggrtagagactcagtttttactttattcctttagtatataatatttgaatttttctaccacatacgtgtaatgaatgtataacctgtccaaaaaataaccccctttccytttcagtgtagstggagctacagggcgtcaagggtggggtggaccatgcagcagcttttggaagaattgccttctcttgcccccagaaagaggtaacgcttgataccagatcgtttgagctttctgactagctagntcaacccagctaagaactt

SEQ ID NO: 1975 - DNA, 590 bp, Homo sapiens
  misc_feature (436)..(436): n equals a,t,g, or c
  misc_feature (471)..(471): n equals a,t,g, or c
  misc_feature (547)..(547): n equals a,t,g, or c
  misc_feature (557)..(557): n equals a,t,g, or c
  misc_feature (583)..(583): n equals a,t,g, or c
tccgcaccgggactcgggactcccgggaagtggaccggcagaagagggggctagctagctgtctctgcggaccagggagacccccgcgcccccccggtgtgaggcggcctcacagggccgggtgggctggcgagccgacgcggcggcggaggaggctgtgaggagtgtgtggaacaggacccgggacagaggaaccatggctccgcagaacctgagcaccttttgcctgttgctgctatacctcatcggggcggtgattgccggacgagatttctataagatcttgggggtgcctcgaagtgcctctataaaggatattaaaaaggcctataggaaactagccctgcagcttcatcccgaccggaaccctgatgatccacaagcccaggagaaattccaggatctgggtgctgcttatgaggttcttgtcagatantgagaaacggaaacagtacgatacttatggtgaanaaggattaaaagatggtcatcagagctccatggagacattttttacacttctttggggatttgggttatgttggangaaccctgtngaagacagaatttccagaggaatgtntattgaa

SEQ ID NO: 1976 - DNA, 1970 bp, Homo sapiens
  misc_feature (7)..(7): n equals a,t,g, or c
  misc_feature (1890)..(1890): n equals a,t,g, or c
  misc_feature (1970)..(1970): n equals a,t,g, or c
ttttttnttttttttttttttttggtaggaatatttatattttaaaaatctgcagatgttacagatcagggtttttcccccacaaagagctggtagggtggaacaccaatgcaaataagctttatatctcttttcaactcctgctgagtggtagcagttcttggagtcggtattgtgaaggattctgaggtcaagtcaggaaagcatatggggagggattagggatggtggcctgaatatgacggggagaagggcttggaagttgccatctccagccagagccagctcctctgcactcccacagcattctctgcctttacccttggcactcggcacagaccacatggtgccacttctgatgcagatctctgtgcttgtttcacttttcatcccttcagcatgcatgtcggaatcagaatttgtttctgccacttgctagcttggttgcagagagctccagagaatcctgggaggcactcacagatgccgctgatgtggtggcagggcctgctgctgtgcacgcagagggggcatggctgggcgcagccgtggccatagaacccaggggggcagattctctggcataagggtcctcggaagccaggggcacactcgcagctcccatcctctggggagcaggagcctccattctcacagctgcaggagacagagcagttggggccccagcggccaggtggacacgtgctgtcacagcggatgcctgtccatccggccaggcagcagcagtggcctgtgacggggtcacatccatcagcatggctgcagtcacagtgttcactgcagttcagcccaaatgtgccatccgggcaaggcagctcacaggtgtctcccagccagccaggagtgcaggagcaggagccgtctatggggctgcaggctgccccattggcacaggtgcagctctcgttgcagttcaggccccacgtcccactgggacatggcagggtgcagtccaggccctgccacccttccttgcaggtacaggagccatctactggggagcaggtgccaccattgttacagctacagatggacgagcagttggggccataggtccctgctgcacaggaaacggcacagacctctcccatgaagcccggagcacaagtgcagcccccagtgatgctgtggcagtcggcgccattctgacaggtgcaaggcagctggcagccatcgccatagtagccaacagggcaggattcattgcagtggtgaccagaccagcctggctggcaggtacaagctccagttactgggtggcagctgatggtgttgtcagcgtcacaggggcagggcagggtgcagcctgggccatgcaggccctccgggcacagtcgctcctggcagcgtgggcccttgtagccaggctcacactcgcaggcacccgtggtgggtgaacactgccccccattgtggcagtcacagcgctgtgagcactggaagccgaaggacccgaaggggcactcctcttggcacctgtgggagagcagagtggggctgaggctgtgggccaggatccctcacctgtgcttcaagcggacgcgtggggactagttctagatcgcgatctagaactagtcggacgcgtgggtcgacccgggaattccggaccggtacctgcaggcgtaccagctttccctatagtgagtcgtattagagcttggcgtaatcatggtcatagctgtttcctgtgtgaaattgttatccgctcacaattccacacaacatacgagccggaagcataaagtgtaaagcctggggtgcctaatgagtgagctaactcacattaattgcgttgcgctcactgcccgctttccagtcgggaaacctgtcgtgccagctgcattaatgaatcggccaacgcgcggngagaggcggtttgcgtattgggcgccagggtggtttttcttttcaccagtgagacggcaacagctgattgcccttcaccn

SEQ ID NO: 1977 - DNA, 1222 bp, Homo sapiens
  misc_feature (1198)..(1199): n equals a,t,g, or c
  misc_feature (1219)..(1219): n equals a,t,g, or c
gcctgggttcccascggcttcsccagaggtggaagaaacccgaracgttccgaagtcaacgcaagcaaaggggagtgcgggtcggggaggaatattcttttggaaacgtaatattggccttggggctctccagccctttgggacttccaatgggatcttagaagcagccgaagcagcgtgagggcggcasccagggccagccacgatttgaacgctctgccttgcagctcttctggaccgaggagcccaaagccctaccctcaccattcaccaggtcctgtgggaagagcagcgtggagrtgggctgaggttagaaggtgcagagcgtggaagaagattgtgagctgagtattggacatctgttcttgaatagtccctgggcctgccataggaaaggaagttctccagggttacagttcttatccgcgtgaatacacatggctctgttacgaaaaattaatcaggtgctgctgttccttctgatcgtgaccctctgtgtgattctgtataagaaagttcataaggggactgtgcccaagaatgacgcagatgatgaatccgagactcctgaagaactggaagaagagattcctgtggtgatttgtgctgcagcagggaggatgggtgccactatggctgccatcaatagcatctacagcaacactgacgccaacatcttgttctatgtagtgggactccggaatactctgactcgaatacgaaaatggattgaacattccaaactgagagaaataaactttaaaatcgtggaattcaacccgatggtcctcaaagggaagatcagaccagactcatcgaggcctgaattgctccagcctctgaactttgttcgattttatctccctctacttatccaccaacacgaagaaagtcatctatttggacgatgatgtaattgtacaaggtgatatccaagaactgtatgacaccaccttggccctgggccacgcggcggctttctcagatgactgcgatttgccctctgctcaggacataaacagactcgtgggacttcagaacacatatatgggctatctggactaccggaagaaggccatcaaggaccttggcatcagccccagcacctgctctttcaatcctggtgtgattgttgcaacatgacagaatggaagcaccarcgcatcaccaagcaattggagaaaggatgcaaaagaannggaggaaaacctttttgcangtt

SEQ ID NO: 1978 - DNA, 1438 bp, Homo sapiens
  misc_feature (1)..(1): n equals a,t,g, or c
  misc_feature (7)..(7): n equals a,t,g, or c
  misc_feature (11)..(11): n equals a,t,g, or c
  misc_feature (1351)..(1351): n equals a,t,g, or c
  misc_feature (1389)..(1389): n equals a,t,g, or c
  misc_feature (1422)..(1422): n equals a,t,g, or c
  misc_feature (1424)..(1424): n equals a,t,g, or c
ncccggncttnaggaattcggcacgagaaaaaagaaaagaaaagaaaagaaaaaaaaaggtgctcaacattactgatcatcagagaaatgcaaatcaaaactccagtgagatatcatctccctttagttaaaatggcttatatccaaaaggcagaaaataacaaatgcaaggatgtggaggaaagggaacccttgtatactgttggtgtacatagtggttgaaccactatggagaacaatttggaagttcctcaaaaaaacaaaaaatagagctaccatatgacccagcaatcccactgttgggtatatacccaaaaggaaggaaatcagtatattgaagagatacctacactcccatgtttgttgcagcactgttcacaatagctaagatttgaaggcaacctaagtgtccatcaacagatgaatggatacagaaaatgtggtacgtatacacaatgggtactagtcagcctgggtgacagagtgagactgtctcaaaaaaaaagaaacaaagaaagataaataaagaaaaagacattgatgaacagtaggtaatcacctgaaggtacaaaactcactcgtaatagtaagtatgcagggaaaaaaagatttttgtaacattgtaactatgtgtgtaatctactcttatcctaagtagaaatctagacttagaatctaatgctgccactgatctgacaggaggcggaactcagacagtaatgttcccttgcctgctactcacctcctgctgtgtggcccagtttctaacaggccacagactggtactggtttgcggcctgggggttggggacccctgggttatcagatagaattgcaagcctcatggtaacctcaaaccaaaaaacattcaatgaatacacaacaaataaaaagcaagaaagtaaattatatcaccagagaaaatcagcttcacttaaggaagacaggaaggaaagaaggaaggaagagaagaccacaaaacaaccagaaaacaagtaacaatatggcaggaataagtctttatttattagtaataacaatggactaaactctccaatcaaaagatggagtggctaaatagataaaaaaaaacaagacccattgattygymgcctacaagaactacatttcacctataaagacacmcatagactgaaaataaaggggtataaaagatactccatgccaacagaaaccaaaaaagagcaggagttgctatacttacatcagacaaaacagattttaagacaaaaatctataagaagagacaaagaaggtcactatataatgataaggggtcaatgcagcagaggattayaatttaatttatgaccacatgagactgatttangaatatatagagtagaaggtaagtatcatatctggatnatccatgagatgcaattcgcgaatacaagactngnttttgtgctagata

SEQ ID NO: 1979 - DNA, 523 bp, Homo sapiens
  misc_feature (362)..(362): n equals a,t,g, or c
  misc_feature (471)..(471): n equals a,t,g, or c
  misc_feature (485)..(485): n equals a,t,g, or c
  misc_feature (509)..(509): n equals a,t,g, or c
agctcgtgctaaacctcttttctttataaattacccagtgatgtggtttggctgtgtccccacccaaatctcatcttgaattcctacgtgttgtgggagggacccagtggtaggtaattgaatcatggcggcaggtctttcccttgctattctcgtgatcatgaataagtctcatgagatctgatgattttaaatactggagtttcccctgcacaagctctctctttgcctgctgccagccatgtaagacatgacttgctcctycttgccttccatcatgattgtgaggccttcccagccacgtggaactgtaagtccattaaacctctttttttttataaatggccaagtctcaaatatgnctttatcaacagcgtgaaatggactagtaccgtaaattggtaccaatagaatggggcactgcttaaaagatcccgaaaatgtgaaagcgactttggaactgggtaatangcaaaaggttgcantgaacttaaaatcattgccactgnacttcaacctgggc

SEQ ID NO: 1980 - DNA, 775 bp, Homo sapiens
  misc_feature (1)..(4): n equals a,t,g, or c
  misc_feature (17)..(17): n equals a,t,g, or c
  misc_feature (774)..(774): n equals a,t,g, or c
nnnnaytagttttgcanagctatttaggtgacactatagaaggtacgcctgcaggtaccggtccggaattcccgggtcgacccacgcgtccggaaggctccagaggctgtgggaagcagcacatcagcgacagctcctggctgctggactccgcagggagggaaggaagattggtcgcaatgtcccagcagaagtgcatcgtgatctttgccctggtgtgctgctttgccattctggttgcactgatcttttcagccgtggacatcatgggagaggatgaggatggactctcagaaaaaaattgccaaaataaatgtcgaattgccctggtggaaaatattcctgaaggccttaactattcagaaaatgcaccatttcacttatcacttttccaaggctggatgaatttactcaacatggccaaaaagtctgttgacatagtgtcttcccattgggatctcaaccacactcatccatcagcatgtcagggtcaacgtctttttgaaaagttgctccagctgacttcgcaaaatattgaaatcaagctagtgagtgatgtaacagctgattcaaaggtattagaagccttgaaattaaagggagccgaggtgacgtacatgaacatgaccgcttacaacaagggccggctgcagtcctccttctggatcgtggacaaacagcacgtgtatatcggcagtgccggtttggactggcaatccctgggacaggtacatatacttctatatagctgtaaatagatgatatggtttgtgnt

SEQ ID NO: 1981 - DNA, 1134 bp, Homo sapiens
  misc_feature (103)..(103): n equals a,t,g, or c
  misc_feature (113)..(114): n equals a,t,g, or c
gaacaagctgttactaatgtactggagtttctgtgcaaactgtctaccataaaccatgaaaggattcaaagttcatagttccttctttgttcctttgttaatnactgacttcnnactagtgggaggtgcctcccaagtttgctaatgcattctttttggataaggatgacgcacagattgtcctaataaggacttagattgagaaagaccgccccctctgagaagaggggacaagtcagagagagggcgggcagtttcttttttaactagggatgacacaagcataagtcatttccttattaattggttcaaaccagttcttacaggaactagtggtgataaatgtgggacttctgagaagtcattcattttattctttgtgccataccagagtacagtatcagctgagctgaccttactctgaggactaactcttttgctggaagcggtttctgatttacagctcttggtttctcccagacatgttggtgggagagattttggtttttaaggggttgttagatggagtaaattttctttttttttttttttttttttaactaaaaaggggtcacagaatttcagcagttctctgatttttatattttattcctcttcctatccaatccctgccttttgagtccaggtggtaagtacattttctttaacgtttttcctgcttttcttcccaaatgtgtctttttctttgggctactgtaccctgcttccagtgctgtccccggcataggtccatctctgcagaagccatttcaggagtacctggaggctcaacggcagaagcttcaccacaaaagcgaaatgggcacaccacagggagaaaactggttgtcctggatgtttgaaaagttggtcgttgtcatggtgtgttacttcatcctatctatcattaactccatggcacaaagttatgccaaacgaatccagcagcggttgaactcagaggagaaaactaaataagtagagaaagttttaaactgcagaaattggagtggatgggttctgccttaaattgggaggactccaagccgggaaggaaaattcccttttccaacctgtatcaatttttacaacttttttcctgaaagcagtttagtccatactttgcactgacat

SEQ ID NO: 1982 - DNA, 451 bp, Homo sapiens
  misc_feature (5)..(5): n equals a,t,g, or c
  misc_feature (414)..(414): n equals a,t,g, or c
  misc_feature (447)..(447): n equals a,t,g, or c
  misc_feature (450)..(451): n equals a,t,g, or c
gcggnttcgtgggctgctctgcactctcaggtattccctgctcttactccaaaaagatggacccaggtccgaaggggcactgccactgtggggggcatggccatcctccaggtcactgcgggccaccccctggccatggcccagggccctgcgggccacccccccaccatggtccagggccctgcgggccaccccctggccatggcccagggccctgcgggccacccccccaccatggtccagggccctgcgggcctccccctggccatggcccaggtcacccaccccctggtccacatcactgaggaagtagaagaaaacaggacacaagatggcaagcctgagagaattgcccagctgacctggaatgaggcctaaaccacaatcttctcttcctaataaacagcctcytanaggccacattctattctttaaaaaaaaaaaaanaann

SEQ ID NO: 1983 - DNA, 1385 bp, Homo sapiens
  misc_feature (1303)..(1303): n equals a,t,g, or c
  misc_feature (1307)..(1307): n equals a,t,g, or c
  misc_feature (1360)..(1360): n equals a,t,g, or c
  misc_feature (1382)..(1382): n equals a,t,g, or c
  misc_feature (1385)..(1385): n equals a,t,g, or c
aagagaaagatgtcactgtctctaatctccctgtcatttttatttccagcaggcgcggggcgaaggagctgctagaacaatgctgaggcgggtgaggtgaggagcagcccctcgcggcagccccgacagagtgtctggaacaggtgattggaggagccggagacccaggcacctgggcatccttcccctcgcctctgccaggccccgcgcccctaaaaggtgggaaaaccatggcgaccaatttcagtgacatcgtcaagcaaggctacgtgaagatgaagagcaggaagctcgggatctaccggaggtgctggctggtgttccggaaatcctccagcaaggggccccagcggctggagaagtatccagatgagaagtcggtgtgcctccggggctgccccaaggtgactgagatcagcaacgtcaagtgtgttacgcggctccccaaggagaccaagcggcaggcggtggccatcatattcactgatgactcggcacgtaccttcacctgcgactcagagctagaggcagaggagtggtacaagacactatctgtggagtgtctggggtcccgcctcaacgacatcagtctgggagaacctgacctcctggccccaggggtgcagtgtgaacagacagatcgcttcaatgtcttcctgctgccctgccccaacctggacgtgtatggcgagtgcaagctgcagatcacccacgagaacatctacctctgggacatccacaacccccgtgtgaagctcgtctcgtggsccctctgctyamtgcgccgctatggccgggatgccacacgctttaccttcgaggctggccggatgtgtgatgctggggaaggactctataccttccagacacaagagggggagcagatttaccagcgcgtccacagtgccaccctggccatcgcagagcagcacaagcgggtcctgctggaaatggagaagacgtgaggctgctgaacaagggcacggaacattactcgtatccctgcacacccacgaccatgctgcsgcgcagtgcctactggcaccacatcactggttcccagaacatcgccgaagcctccagctatgctggtgagtcgcttccatgccccacacccacctgccaggaggctttgtggaggatgaggcctgttgggcaggggtcttttgacctagctctgagttctgagcctgcttctgtgcccacaggtgacgggtatggggcaagcccaggccagctcggaaacagacctctcaacagattcatcctgctaaagccaaagcccagccagggggacaagcantgangccaagaccccatcccagtgacacagtgctggcgagcaccgatgactggtggnggctgctgcttgcgggctggcntcn

SEQ ID NO: 1984 - DNA, 748 bp, Homo sapiens
  misc_feature (7)..(7): n equals a,t,g, or c
tacgccnccaggccccggtccggaattcccgggtcgacccacgcgtccgctttaaccagacagctcagacctgtatggaggctgccagtgacaggttaggtttagggcagagaagaagcaagaccatggtggggaagatgtggcctgtgttgtggacactctgtgcagtcagggtgaccgtcgatgccatctctgtggaaactccgcaggacgttcttcgggcttcgcagggaaagagtgtcaccctgccctgcacctaccacacttccacctccagtcgagagggacttattcaatgggataagctcctcctcactcatacggaaagggtggtcatctggccgttttcaaacaaaaactacatccatggtgagctttataagaatcgcgtcagcatatccaacaatgctgagcagtccgatgcctcatcaccattgatcagctgaccatggctgacaacggcacctacgagtgttctgtctcgctgatgtcagacctggagggcaacaccaagtcacgtgtccgcctgttggtcctcgtgccaccctccaaaccagaatgcggcatcgagggagagaccataattgggaacaacatccagctgacctgccaatcaaaggagggctcaccaacccctccagtacagctggaaagargttacaacatcctgaatcargagcagcccctggcccasccacctcaggttcaacctgttctcccttaaaaaatatctcccacagaacacatc

SEQ ID NO: 1985 - DNA, 771 bp, Homo sapiens
ggccacgaggtacgtcccggcgctccgcttggcccaagatggcggcctccgtgtgcagcgggttgctggggccacgggtgctgtcctggagccgagagctgccttgcgcttggcgcgccctgcacacctccccggtctgcgccaagaaccgggcggcccgagtacgcgtaagcaagggggacaagccggtgacctacgaggaggcacacgcgccgcactacatcgcccaccgtaaaggctggctgtcgctgcacacaggtaacctggatggagaggaccatgccgcagagcgaacggtggaggatgttttccttcgcaagttcatgtggggtaccttcccaggctgcctggctgaccagctggttttaaagcgccggggtaaccagttggagatctgtgccgtggtcctgaggcagttgtctccacacaagtactacttcctcgtgggctacagtgaaactttgctgtcctacttttacaaatgtcctgtgcgactccacctccaaactgtgccctcaaaggttgtgtataagtacctctagaacaatccccttttttccatcaagctgtagcctgcagagaatggaaacgtgggaaaggaatggtatgtgggggaaatgcatcccctcagaggactgaggcatagtctctcatctgctattgaataaagaccttctatcttgaaaaaaaaaaaaaaaaaaaaaaaaaaaaaaaaaaaaaaaaaaaaaaaaaaaaaaaaaaaaaaaaaaaaaaaaaaaaaaaaaggggggg

SEQ ID NO: 1986 - DNA, 1712 bp, Homo sapiens
  misc_feature (1688)..(1688): n equals a,t,g, or c
  misc_feature (1692)..(1692): n equals a,t,g, or c
  misc_feature (1697)..(1697): n equals a,t,g, or c
ccgcgcgttggccgattcattaatcagctggcacgacaggtttcccgactggaaagcgggcagtgagcgcaacgcaattaatgtgagttagctcactcattaggcaccccaggctttacactttatgcttccggctcgtatgttgtgtggaattgtgagcggataacaatttcacacaggaaacagctatgaccatgattacgccaagctctaatacgactcactatagggaaagctggtacgcctgcaggtaccggtccggaattcccgggtcgacccacgcgtccggtccctaggagataagagtatcttgcacagcaggtgcaggtttcccagcagctcaggcaagagtccgatgtttgtgccatctgatcctgatgtctggagagatagccatgtgtgagcctgaatttggcaatgacaaggccagggagccgagcgtgggtggcaggtggcgagtgtcctggtacgaacggtttgtgcagccatgtctggtcgaactgctgggctctgctctcttcatcttcatcgggtgcctgtcggtcattgagaatgggacggacactgggctgctgcagccggccctggcccacgggctggctttggggctcgtgattgccacgctggggaatatcagtggtggacacttcaaccctgcggtgtccctggcagccatgctgatcggaggcctcaacctggtgatgctcctcccgtactgggtctcacagctgctcggggggatgctcggggctgccttggccaaggcggtgagtcctgaggagaggttctggaatgcatctggggcggcctttgtgacagtccaggagcaggggcaggtggcaggggcgttggtggcagagatcatcctgacgacgctgctggccctggctgtatgcatgggtgccatcaatgagaagacaaagggccctctggccccgttctccatcggctttgccgtcaccgtggatatcctggctgggggccctgtgtctggaggctgcatgaatcccgcccgtgcttttggacctgcggtggtggccaaccactggaacttccactggatctactggctgggcccactcctggctggcctgcttgttggactgctcattaggtgcttcattggagatgggaagacccgcctcatcctgaaggctcagtgaagcagagctcgtgggattcctgctgctccaggtgtcctcagctcacctgtcccagactgaggacaggggagttcctgcatttcctgccagggcagaggcccagaggagcgaccccctgcttccactgcttgggcctgctttctcagatagactgactgctgaggaggctctaggttcttggaattcctttgtgctcatcagagaccccagcctggggaacacgctgcccgcactgcccagagagcagtgcaaacaccacaacacgagcgtgtttcttgagaggaatgtccccgagttggacaaggaggctgtttctgcacatcagctcatttcccgcaccccatttcttkcttgattgctttgttgggggcctggccacttccttgcttctcaagctgacaattctgcactttgcaataaatagtccagtgtttccttccaaaaaaaaaaaaaaaaaaaaaaaaaaaaaaaaaaaaaaaaaaaaaaaaaaaaaaaaaaaaaaaaaaaaaaaaaaaaaaaaaaaangggnggccnttttaaaggatccaa

SEQ ID NO: 1987 - DNA, 498 bp, Homo sapiens
  misc_feature (476)..(476): n equals a,t,g, or c
atggtgtgactcggccgacgcgagcgccgcgcttcgcttcagctgctagctggcccaagggaggcgaccgcggagggtggcgaggggcggccaggacccgcagccccggggccgggccggtccggaccgccagggagggcaggtcagtgggcagatcgcgtccgcgggattcaatctctgcccgctctgataacagtccttttccctggcgctcacttcgtgcctggcacccggctgggcgcctcaagaccgttgtctcttcgatcgcttctttggacttggcgaccatttcagagatgtcttccagaagtaccaaagatttaattaaaagtaagtggggatcgaagcctagtaactccaaatccgaaactacattagaaaaattaaagggagaaattgcacacttaaagacatcagtggatgaaatcacaagtgggaaaggaaagctgactgataaagagagacagagatttttngagaaaattcgagtccttgagg

SEQ ID NO: 1988 - DNA, 4485 bp, Homo sapiens
gtaacttctcgggaagatgaggcagtttggcatctgtggccgagttgctgttgccgggtgatagttggagcggagacttagcataatggcagaacctgtttctccactgaagcactttgtgctggctaagaaggcgattactgcaatctttgaccagttactggagtttgttactgaaggatcacattttgttgaagcaacatataagaatccggaacttgatcgaatagccactgaagatgatctggtagaaatgcaaggatataaagacaagctttccatcattggtgaggtgctatctcggagacacatgaaggtggcattttttggcaggacaagcagtgggaagagctctgttatcaatgcaatgttgtgggataaagttctccctagtgggattggccatataaccaattgcttcctaagtgttgaaggaactgatggagataaagcctatcttatgacagaaggatcagatgaaaaaaagagtgtgaagacagttaatcaactggcccatgcccttcacatggacaaagatttgaaagctggctgtcttgtacgtgtgtttggccaaaagcaaaatgtgccctcttgagagatgacctggtgttagtagacagtccaggcacagatgtcactacagagctggatagctggattgataagttttgcctagatgctgatgtctttgttttggtcgcaaactctgaatcaacactaatgaatacggaaaaacacttttttcacaaggtgaatgagcggctttccaagcctaatattttcattctcaataatcgttgggatgcctctgcatcagagccagaatatatggaagacgtacgcagacagcacatggaaagatgcctgcatttcttggtggaggagctcaaagttgtaaatgctttagaagcacrgaatcgtatcttctttgtttcagcaaaggaagttcttagtgctagaaagcaaaaagcacaggggatgccagaaagtggtgtggcacttgctgaaggatttcatgcaagattacaggaatttcagaattttgaacaaatctttgaggtaggaattttgtgattgtattgcctaatacaaaactctttctttggttggagaaagcataatcttctatttttatcctttgtctttgtcaataacttttgctgttatttagtttagttactgacacagccagtaaaatgtggaaagtgaagaaaaggagcccctgcaaaatgatttgtaagaattgagaattaaagattgtaatttattccttattcttatttttatgtattttatataaataagaaactgtgtttcaatattgctgtgttgtgcaatgaatgaaattccctgtattcaataatttggaacaagagtaaacaagcgtaattgctgttggaatggataatagagcaaagtaagcattatccttttttactttgtgccgcatgactaatagaagtatacaaaacatgattaatgccatttgacaaaattttattatatttatatactgtgttaccacatgtccattctccatattttgtgccaaacattctaaatgaataattgagtagaaaagagcttcagcgttttcagaaacttctaggaaactattgaagtgcctgagtggtagatggggagggaggctagtttcttatgttgcattgtaagtgtttttattcagagacattaaaactcaccctacatttgactgaatagttctttagatattaaccttctgaacccctattttgccctgtataattcatatcaccttcccacttaggaatgaacacagtgacttcagcattgaagaaacctcagtctgtaattattcttataagtagtaactgctttaatgtaaaggggacatgaatgttgagtatacttggcaggatttttaaaataaaaaatgtgcttactatctctcatctttaatttggtgagagaaaaaaggttattagacagatgaagacaaactggaagaaagcaaatccactgccagctatctcgataagatctaattgttcagaggctactggattatcagtagatgtcctctcaagccaagctataggatacgtgaagtccccgttactcaaagactattgtttgttttttttcttttccttttgctttcaccaaagggttgatgctctcctcacctcttttttctcttaaagaaatgggatctccctctgttatccaggctggagtgcagttgggcaatcatagcgcattgcagcctcgaactcctgggctcaaatggtcctcccacctcagcctcctctcctcactgttatcagttatttcatccatggggaaaatatgtagggagaggatctattctacttccttgtctttatttactgaccttagtatatatgtgttttatgtatgtttatcattgatttcttctaaattatacatttatataatgtataattgtgtaatgttctgttacacatttatactgcttccatattggttcatggtatagcttgtgcttcccaagaatatctcgttgaggaggtgggaatgagaagaataagatatgctgtagggaattggttcataagcctagctgatcatcagaatcacatgacgtgctttagagaaccacaggctcctgacctatcctatccccaaccccagatccagggggttggggttggtctaggaatctatatacatatatattcaaagttccccaagtgattgcaataatcagacagacttaggaactattctttttaaatgtttttagaggaaacttggcagtttatgttttattctaatggtccatttgggattctaaaatttatgtatggaaaaaattgcttatgagcagtagctttttgtttttacttaaagtcatggratgtccagctttagagtttgaaaattttaagtctgaaatatctaaaatgagaatcagttaaaaattatttgaatttttccaaacaatcagctgggcaaaaaatattatgtctgaatgtattaaaaagagacaaaacattttttgttaattaattacattgaaagttttagtcagctttattccaaaactggtatttgttacttcttaagtcagttttggtaatttctgatttcttagaaattggtgtatttctgaacatttataatttagtagcataaaattgtttgttttgaatctcttgtttctcacttctatatttaaatataaatatatatctacatatacatacacacacagacccttaatgggtttgccaatgatttatcatccaaagacacagccccagctcttatgtaatttatcacttaataaatatcatttttggggtttcattcactaagttctttttttttttttttttttttttgagacagagtctcgctctgtcgccgccaggctggaatgagggagtgagtgcagcggcgcgatgtcagctcactacaacctccggctcctgggttcaagggactcttctgcctcagcttccctagtagctgggactacaggggcacaccactacatccggctaatttttgtatttttagtagagacggggttacacagtgttggccaggatggtctcgatctcctgacctcatgatccacccgccttggcctcccaaagtgctgggactacaggcgtgagccaccgtgcctggcctgtgttcgtctttaacattgtttacgttgaagatgcattggtttttgcttattcttaaagaaaagattcaggattgtgaatttgtgactgcagctttaggcgtatcccaaggttttcagtactagtttagtttttgttgtttttgtttctaattatccttttggcatttccttatcaatataagactttttaaaattcaagtgttttgattcattttatccaatttttggttactaatttcttggtttctttgtgttgtggtcacatcatgtggcttttacacacattttctctgttttggggatttgctacttttttttgtagtcgtgcaagattttttgtgaaaagaaaaactgtatcaagttcatcacctttatcaatttgacctgtgccgtgaacttctttagattcatttgattcaaatggatctaagtattttaaacatttagaatactaatttaagcaaggcttgaaaattaaatggagtaaaagcaataaaaaaaatcaatattagcctgggcattggtggctcatgccagtaatgccagtactttgggatgccaaagcaggaagatctcttgagcttaggagattgagatcaggttgggcaaaaacatgaaaagactaaatcacatctctagcaggaaaaaaaaaaaatccagatatgatagctcatgactatagtcacagctaccccagaggctgaggtggaaggccaagaagtttgaggctgtggtgatggtgagctatggaggtaccactgtgctccaacctgtgtgacagagtgagactctcttttctttcaaaaaaaaaaaaaaaa

SEQ ID NO: 1989 - DNA, 2486 bp, Homo sapiens
  misc_feature (1)..(1): n equals a,t,g, or c
  misc_feature (3)..(3): n equals a,t,g, or c
  misc_feature (9)..(9): n equals a,t,g, or c
  misc_feature (21)..(21): n equals a,t,g, or c
  misc_feature (2436)..(2436): n equals a,t,g, or c
  misc_feature (2465)..(2465): n equals a,t,g, or c
  misc_feature (2470)..(2470): n equals a,t,g, or c
ngnacgttnatcttccaaggncccactatagaaggtacgcctgcaggtaccggtccggaattcccggtcgacccacgcgtccgcggacgcgtgggcggacgcgtgggcgcagccccggagcccgggccagggtccacctgtccccgcagcgccggctcgcgccctcctgccgcagccaccgagccgccgtctagcgccccgacctcgccaccatgagagccctgctggcgcgcctgcttctctgcgtcctggtcgtgagcgactccaaaggcagcaatgaacttcatcaagttccatcgaactgtgactgtctaaatggaggaacatgtgtgtccaacaagtacttctccaacattcactggtgcaactgcccaaagaaattcggagggcagcactgtgaaatagataagtcaaaaacctgctatgaggggaatggtcacttttaccgaggaaaggccagcactgacaccatgggccggccctgcctgccctggaactctgccactgtccttcagcaaacgtaccatgcccacagatctgatgctcttcagctgggcctggggaaacataattactgcaggaacccagacaaccggaggcgaccctggtgctatgtgcaggtgggcctaaagccgcttgtccaagagtgcatggtgcatgactgcgcagatggaaaaaagccctcctctcctccagaagaattaaaatttcagtgtggccaaaagactctgaggccccgctttaagattattgggggagaattcaccaccatcgagaaccagccctggtttgcggccatctacaggaggcaccgggggggctctgtcacctacgtgtgtggaggcagcctcatcagcccttgctgggtgatcagcgccacacactgcttcattgattacccaaagaaggaggactacatcgtctacctgggtcgctcaaggcttaactccaacacgcaaggggagatgaagtttgaggtggaaaacctcatcctacacaaggactacagcgctgacacgcttgctcaccacaacgacattgccttgctgaagatccgttccaaggagggcaggtgtgcgcagcatcccggactatacagaccatctgcctgccctcgatgtataacgatccccagtttggcacaagctgtgagatcactggctttggaaaagagaattctaccgactatctctatccggagcagctgaaaatgactgttgtgaagctgatttcccaccgggagtgtcagcagccccactactacggctctgaagtcaccaccaaaatgctgtgtgctgctgacccacagtggaaaacagattcctgccagggagactcagggggacccctcgtctgttccctccaaggccgcatgactttgactggaattgtgagctggggccgtggatgtgccctgaaggacaagccaggcgtctacacgagagtctcacacttcttaccctggatccgcagtcacaccaaggaagagaatggcctggccctctgagggtccccagggaggaaacgggcaccacccgctttcttgctggttgtcatttttgcagtagagtcatctccatcagctgtaagaagagactgggaagataggctctgcacagatggatttgcctgtgccacccaccagggygaacgacaatagctttaccctcaggcataggcctgggtgctggctgcccagacccctctggccaggatggaggggtggtcctgactcaacatgttactgaccagcaacttgtctttttctggactgaagcctgcaggagttaaaaagggcagggcatctcctgtgcatgggtgaagggagagccagctcccccgacggtgggcatttgtgaggcccatggttgagaaatgaataatttcccaattaggaagtgtaacagctgaggtctcttgagggagcttagccaatgtgggagcagcggtttggggagcagagacactaacgacttcagggcagggctctgatattccatgaatgtatcaggaaatatatatgtgtgtgtatgtttgcacacttgtgtgtgggctgtgagtgtaagtgtgagtaagagctggtgtctgattgttaagtctaaatatttccttaaactgtgtggactgtgatgccacacagagtggtctttctggagaggttataggtcactcctggggcctcttgggtcccccacgtgacagtgcctgggaatgtattattctgcagcatgacctgtgaccagcactgtctcagtttcactttcacatagatgtccctttcttggccagttatcccttccttttagcctagttcatccaatcctcactgggtggggtgaggaccactccttacactgaatatttatatttcactatttttatttatatttttgtaattttaaataaaagtgatcaataaaatgtgatttttctganaaaaaaaaaaaaaaaaaaccgaggggggnccggnaccaattcgccctaaa

SEQ ID NO: 1990 - DNA, 915 bp, Homo sapiens
  misc_feature (111)..(111): n equals a,t,g, or c
  misc_feature (172)..(172): n equals a,t,g, or c
  misc_feature (724)..(724): n equals a,t,g, or c
  misc_feature (825)..(825): n equals a,t,g, or c
  misc_feature (845)..(845): n equals a,t,g, or c
  misc_feature (848)..(848): n equals a,t,g, or c
  misc_feature (855)..(855): n equals a,t,g, or c
  misc_feature (886)..(886): n equals a,t,g, or c
ggagcgcaacgcaattaatgtgagttagctcactcattaggcaccccaggctttacactttatgcttccggctcgtatgttgtgtggaattgtgagcggataacaatttcncacaggaaacagctatgaccatgattacgccaagctcgaaattaaccctcactaaagggancaaaagctggagctccaccgcggtggcggccgctctagaactagtggatcccccgkkctgcaggaattcggcacgagaggacataacagaagcaatagagactaccattagtcttgaaacagcacgtgcagaccatccgaagcctgtaactgtgaaaccagtaacaacggaacctcagagtccagatctgaacgatgccgtgtccagtttgcgaagtcctattcccctcctcctgtcgtgtgcctttgttcaggtggggatgtatttcatgtagaaggtggaagaaggctgctatgactctttggatgggagtctggcaagaggaaattggaagataaaataaataataagtgaaataaaaaaaaaaaaaaaaaaaaaaaaaaaaactcgagggggggcccggtacccaattcgccctatagtgagtcgtattacaattcactggccgtcgttttacaacgtcgtgactgggaaaaccctggcgttacccaacttaatcgccttgcagcacatccccctttcgccagctggcgtaatagcgaagaggcccgnaccgatcgccttccaacagttgcgcaacctgaatggcgaatggcaaattgtaaagcgttaatattttggtaaaattcgcggtaaattttggtaaatcaagntcattttttaaccaataggnccnaatcggnaaaatcccttataaatcaaaaggaatttganccgggaatagggttgaatggttgttccaa

SEQ ID NO: 1991 - DNA, 1427 bp, Homo sapiens
  misc_feature (21)..(21): n equals a,t,g, or c
  misc_feature (27)..(27): n equals a,t,g, or c
  misc_feature (36)..(36): n equals a,t,g, or c
ggaaaatcttctgacactatntaaggnacgcctgcnggtaccggtccggaattcccgggtcgacccacgcgtccggggaagctcgtggcgctggtcctgctgggggtcggcctgtccttagtcggggagatgttcctggcgtttagagaaagggtgaatgcctctcgagaagtggagccagtagaacctgaaaactgccaccttattgaggaacttgaaagtggctctgaagatattgatatacttcctagtgggctggcttttatctccagtggattaaaatatccaggcatgccaaactttgcgccagatgaaccaggaaaaatcttcttgatggatctgaatgaacaaaacccaagggcacaagcgctagaaatcagtggtggatttgacaaagaattatttaatccacatgggatcagtattttcatcgacaaagacaatactgtgtatctttatgttgtgaatcatccccacatgaagtccactgtggagatatttaaatttgaggaacaacaacgttctctggtatacctgaaaactataaaacatgaacttctcaaaagtgtgaatgacattgtggttcttggaccagaacagttctatgccaccagagaccactattttaccaactccctcctgtcattttttgagatgatcttggatcttcgctggacttatgttcttttctacagcccaagggaggttaaagtggtggccaaaggattttgtagtgccaatgggatcacagtctcagcagaccagaagtatgtctatgtagctgatgtagcagctaagaacattcacataatggaaaaacatgataactgggatttaactcaactgaaggtgatacagttgggcaccttagtggataacctgactgtcgatcctgccacaggagacattttggcaggatgccatcctaatcctatgaagctactgaactataaccctgaggaccctccaggatcagaagtacttcgcatccagaatgttttgtctgagaagcccagggtgagcaccgtgtatgccaacaatggctctgtgcttcagggcacctctgtggcttctgtgtaccatgggaaaattctcataggcaccgtatttcacaaaactctgtactgtgagctctagactctagatagtaaaaaaaaaaaaaaaaagtctacatattttgtaaaagtaaactgataattgtatgataagtggcactgtaagtaaatagcaaacaccaaccagtgagtgtggcttttcttatggatagaagtaaaggagcagacagagattccttgatagccatcaaattgcaagtcaggttaatgacagtccaacaagaagccaaactttacggatctttgttagcagccccaatgttctttctacaataaaacatgtggactatgtccagtgaggtctccgactca

SEQ ID NO: 1992 - DNA, 711 bp, Homo sapiens
  misc_feature (30)..(30): n equals a,t,g, or c
  misc_feature (561)..(561): n equals a,t,g, or c
  misc_feature (588)..(588): n equals a,t,g, or c
  misc_feature (600)..(600): n equals a,t,g, or c
  misc_feature (626)..(626): n equals a,t,g, or c
  misc_feature (682)..(682): n equals a,t,g, or c
  misc_feature (699)..(699): n equals a,t,g, or c
tgctgatgcaggccatctccctcttctccncagaccgtccaggtgtgctgcagcaccgcgtggtggaccagctgcaggagcaattcgccattactctgaagtcctacattgaatgcaatcggccccagcctgctcataggttcttgttcctgaagatcatggctatgctcaccgagctccgcagcatcaatgctcagcacacccagcggctgctgcgcatccaggacatacacccctttgctacgcccctcatgcaggagttgttcggcatcacaggtagctgagcggctgcccttgggtgacacctccgagaggcagccagacccagagccctctgagccgccactcccgggccaagacagatggacactgccaagagccgacaatgccctgctggcctgtctccctagggaattcctgctatgacagctggctagcattcctcaggaaggacatgggtgccccccacccccagttcagtctgtagggagtgaarccacagactcttacstggagagtgcactgacctgtaggtcaggaccatcagagaggcaaggttgncctttcttttaaaaggccctgtggtcntggggagaaatncctcagatcccactaaaagtgtcaangtgttgaaagggaccaaagccgaccaaaggatagggcattcctgggggtctaatgncccaacaataccccacnttttgggttcgg

SEQ ID NO: 1993 - DNA, 523 bp, Homo sapiens
  misc_feature (313)..(313): n equals a,t,g, or c
  misc_feature (375)..(375): n equals a,t,g, or c
  misc_feature (468)..(468): n equals a,t,g, or c
  misc_feature (504)..(504): n equals a,t,g, or c
aaaasgtmacgcctgacaggtmaccggatccgggaattcccgggtcgacccacggcgtccgcatttgcaataacagaaaaggaattgcatgtatgaagttttcaatcgtgggcttttctttgttgtggggagggggtcgggggatagtttgatttccattttctgaaaacgacagacttggattctgtttgtgtgtgcatattttatccagccttaagttataaagctcatctgtcccgctgcattccctgtgtattttcaggacatggctcgtgggtgtgtgtgttcattgtgtgcgtctgtatgtattttnctgtcatcactgttccctctcctcccgagtgtgcattcagttaatataatcagttgcttgcntctttcaaagtgctttgaaagtctgaactcatgtgtgagcattttatcaactatcccaattgcagttctccatcacaaatctcctattggccngtacccctgagaatagtttagagaatggaataagcngtctggaagatagctagcg

SEQ ID NO: 1994 - DNA, 464 bp, Homo sapiens
  misc_feature (417)..(417): n equals a,t,g, or c
  misc_feature (423)..(423): n equals a,t,g, or c
  misc_feature (460)..(460): n equals a,t,g, or c
atctactaggagtcagggtgtaagcctagagaggatgaaagaaggggaggggatggggagtggtaagaacctaggatttgaattcccagcctggccaacccttgcagccatgtcttggcctcaagtggaacaagggctccttgaggccagcagggttgggggagttggggtgggcctgagcctctttcctgctagagctcttggtcctccctgcctccaccacccatccctgctctgcagaacccctgggtgctgagtggcaggagccccagggttgtcccatctgggtatggctggctgggtcactaacttctgtgatctgcttccttcctttccagattatgcggatcaaacctcaccaaggccagcacataggagagatgagcttcctacagcacaacaaatgtgaatgcagancaaagnaagatagagcaagacaagaaaatccctgtgggccttnctca

SEQ ID NO: 1995 - DNA, 1233 bp, Homo sapiens
  misc_feature (49)..(49): n equals a,t,g, or c
  misc_feature (72)..(72): n equals a,t,g, or c
  misc_feature (93)..(93): n equals a,t,g, or c
  misc_feature (135)..(135): n equals a,t,g, or c
  misc_feature (163)..(163): n equals a,t,g, or c
atggaaaaacgccagcaacgcggcctttttacggttcctggccttttgntggccttttgctcacatgttctntcctgcgttatcccctgattntgtggataaccgtattaccgcctttgagtgagctgataccgntcgccgcagccgaacgaccgagcgcagngagtcagtgagcgaggaagcggaagagcgcccaatacgcaaaccgcctctcccccgcgcgttggccgatttcattaatgcagctggcacgacaggtttcccgactggaaagcgggcagtgagcgcaacgcaattaatgtgagttagctcactcattaggcaccccaggctttacactttatgcttccggctcgtatgttgtgtggaattgtgagcggataacaatttcacacaggaaacagctatgaccatgattacgccaagctcgaaattaaccctcactaaagggaacaaaagctggagctccaccgcggtggcggccgctctagaactagtggatcccccgggctgcaggaattcggcacgagcatggttgttgcaaaactttcttctatttcttctcctcctggtattctcattactctgtttcaccttgtgtagttgtcccacagtcttggatatcatcttctgttcttttcagtgtttcttttctttagttttcgaagtttctgatgataaatcctcaagctcagagattctttactcagctgagtccagtctactaataagccatcagaggtattcttcagttatttaacacattttttaccactacattatgttgaagtttcttacgatgtctgtctttctgattacattacccatctacacttgaatgctgtctacttcattcattagacccttagcatattctccagaggtttaaaaaaatttccaaaatcataactttgtctgcttctgaagcttgctctgttgacacaaattgtatttttttctttttttggattttagtatgccttgcaattttttccctttattctcatgcatgaagcaccccactaaargtgactgytgttagtatagctttartaatgcggtgatgargtgacagggcaggtgatgctctcttagtctctttargctactataacaaaatactttagactgagccsaataaaaaaaaaaaaaaaaaaaaaaaaaaaaaaaaaaaaaaaaaaaaaaaaaactcgagggggggcccgacccaattcgccctactacgtgcgtcga

SEQ ID NO: 1996 - DNA, 1583 bp, Homo sapiens
ctgctggctcacctccgagccacctctgctgcgcaccgcagcctcggacctacagcccaggatactttgggacttgccggcgctcagaaacgcgcccagacggcccctccaccttttgtttgcctagggtcgccgagagcgcccggagggaaccgcctggccttcggggaccaccaattttgtctggaaccaccctcccggcgtatcctactccctgtgccgcgaggccatcgcttcactggaggggtcgatttgtgtgtagtttggtgacaagatttgcattcacctggcccaaaccctttttgtctctttgggtgaccggaaaactccacctcaagttttcttttgtggggctgccccccaagtgtcgtttgttttactgtagggtctcccgcccggcgcccccagtgttttctgagggcggaaatggccaattcgggcctgcagttgctgggcttctccatggccctgctgggctgggtgggtctggtggcctgcaccgccatcccgcagtggcagatgagctcctatgcgggtgacaacatcatcacggcccaggccatgtacaaggggctgtggatggactgcgtcacgcagagcacggggatgatgagctgcaaaatgtacgactcggtgctcgccctgtccgcggccttgcaggccactcgagccctaatggtggtctccctggtgctgggcttcctggccatgtttgtggccacgatgggcatgaagtgcacgcgctgtgggggagacgacaaagtgaagaaggcccgtatagccatgggtggaggcataattttcatcgtggcaggtcttgccgccttggtagcttgctcctggtatggccatcagattgtcacagacttttataaccctttgatccctaccaacattaagtatgagtttggccctgccatctttattggctgggcagggtctgccctagtcatcctgggaggtgcactgctctcctgttcctgtcctgggaatgagagcaaggctgggtaccgtgcaccccgctcttaccctaagtccaactcttccaaggagtatgtgtgacctgggatctccttgccccagcctgacaggctatgggagtgtctagatgcctgaaagggcctggggctgagctcagcctgtgggcagggtgccggacaaaggcctcctggtcactctgtccctgcactccatgtatagtcctcttgggttgggggtgggggggtgccgttggtgggagagacaaaaagagggagagtgtgctttttgtacagtaataaaaaataagtattgggaagcaggcttttttcccttcagggcctctgctttcctcccgtccagatccttgcagggagcttggaaccttagtgcacctacttcagttcagaacacttagcaccccactgactccactgacaattgactaaaagatgcaggtgctcgtatctcgacattcattcccacccccctcttatttaaatagctaccaaagtacttcttttttaataaaaaaataaagatttttattaggtaaaaaaaaaaaaaaaaaaaaaaaaaaaaaaaaaaaaaaaaaaaaaaaaaaa

SEQ ID NO: 1997 - DNA, 521 bp, Homo sapiens
tgaaaaccatccgtctgccacgctggctggcccccagcccccaacctccatcctgcaggagggtccgaagtgcttttcctctaaccagattctgtcttctctccagcagcctcgcccaccaaggagatccaggttaaaaagtacaagtgtggcctcatcaagccctgcccagccaactactttgcgtttaaaatctgcagtggggccgccaacgtcgtgggccctactatgtgctttgaagaccgcatgatcatgagtcctgtgaaaaacaatgtgggcagaggcctaaacatcgccctggtgaatggaaccacgggagctgtgctgggacagaaggcatttgacatgtactctggagatgttatgcacctagtgaaattccttaaagaaattccggggggtgcactggtgctggtggcctcctacgacgatccagggaccaaaatgaacgatgaaagcaggaaactcttctctgacttggggagttcctacgcaaaacaactgggcttcgggacagtggg

SEQ ID NO: 1998 - DNA, 346 bp, Homo sapiens
gcttgagtccagatcttgtactcctctcatatttcttctgaaacatttaaaagtgtacattggttgtcaaatgtcaaacattacttacttcatacttttttcctccaatctttatttcacagttgttcaggggatgaaggaagctcaggaaaggctgacgggtgatgccttcagaaagaaacatcttgaagatgaattgtaacatgaatgtgccccttctttcatcagarttagtgttctggaaggaaagcagcagggaaagggaatattgaggaatcmtctagaacaattaagccgamcaggaaactcatycctacctacctggaaagamgtccccccccccccc

SEQ ID NO: 1999 - DNA, 952 bp, Homo sapiens
  misc_feature (944)..(945): n equals a,t,g, or c
  misc_feature (947)..(947): n equals a,t,g, or c
ggcacgaggccctcgcggcctggccccgccgcgcccggcgcgcccgccgcccggggggatgtcttacaaaccgaacttggccgcgcacatgcccgccgccgccctcaacgccgctgggagtgtccactcgccttccaccagcatggcaacgtcttcacagtaccgccagctgctcagtgactacgggccaccgtccctaggctacacccagggaactgggaacagccaggtgccccaaagcaaatacgcggagctgctggccatcattgaagagctggggaaggagatcagacccacgtacgcagggagcaagagtgccatggagaggctgaagcgcggcatcattcacgctagaggactggttcgggagtgcttggcagaaacggaacggaatgccagatcctagctgccttgttggttttgaaggatttccatctttttacaagatgagaagttacagttcatctcccctgttcagatgaaacccttgttttcaaaatggttacagtttcgtttttcctcccatggttcacttggctctgaacctacagtctcaaagattgagaaaagattttgcagttaattaggatttgcattttaagtagttaggaactgcccaggttttttttgttttttaagcattgatttaaaagatgcacggaaagttatcttacagcaaactgtagtttgcctccaagacaccattgtctccctttaatcttctcttttgtatacatttgttacccatggtgttctttgttccttttcataagctaataccactgtagggattttgttttgaacgcatattgacagcacgctttacttagtagccggttcccatttgccatacaatgtaggttctgcttaatgtaacttcttttttgcttaagcatttgcatgactattagtgcttcwwagtcaattgggccrkgcactttttnntnagagg

SEQ ID NO: 2000 - DNA, 606 bp, Homo sapiens
  misc_feature (3)..(3): n equals a,t,g, or c
  misc_feature (5)..(5): n equals a,t,g, or c
  misc_feature (29)..(29): n equals a,t,g, or c
  misc_feature (33)..(33): n equals a,t,g, or c
  misc_feature (357)..(357): n equals a,t,g, or c
atnanccctcactaaagggaacaaaagcngggngctccaccgcggtgtcggccgctctagaactagtggatcccccgggctgcaggaattcggcacgagtattgggacaggtggctttgcaaaggtcaaacttgcctgccatatccttactggagagatggtagctataaaaatcatggataaaaacacactagggagtgatttgccccggatcaaaacggagattgaggccttgaagaacctgagacatcagcatatatgtcaactctaccatgtgctagagacagccaacaaaatattcatggttcttgagtactgccctggaggagagctgtttgactatataatttcccaggntcgcctgtcagaagaggagacccgggttgtcttccgtcagatagtatctgctgttgcttatgtgcacagccagggctatgctcacagggacctcaagccagaaaatttgctgtttgatgaatatcataaattaaagctgattgactttggtctctgtgcaaaacccaagggtaacaaggattaccatctacagacatgctgtgggagtctggcttatgcagcacctgagttaatacaaggcaaatcata

SEQ ID NO: 2001 - DNA, 1097 bp, Homo sapiens
  misc_feature (905)..(905): n equals a,t,g, or c
  misc_feature (916)..(916): n equals a,t,g, or c
  misc_feature (940)..(940): n equals a,t,g, or c
  misc_feature (1031)..(1031): n equals a,t,g, or c
  misc_feature (1056)..(1056): n equals a,t,g, or c
  misc_feature (1080)..(1080): n equals a,t,g, or c
tcgacccacgcgtccggtgcagtacgagctgtgggccgcgctgcctggcgcctccggggtcgccctggcctgctgcttcgtggcggcggccgtggccctgcgctggtccgggcgccggacggcggtggcgcggtggtccgggcgcgacagaggcagcgagcgggcctggagaacatggacagggcggcgcaccttccggctccagaacccagacctggactcagaggcgctgctagccctgcccctgcctcagctggtgcagaagttacacagtagagagctggcccctgaggccgtgctmttcacctatgtgggaaaggcctgggaagtgaacaaagggaccaactgtgtgacctcctatctggctgactgtgagactcagctgtctcaggccccaaggcagggcctgctctatggcgtccctgtgagcctcaaggagtgcttcacctacaagggccaggactccacgctgggcttgagcctgaatgaaggggtgccggcggagtgcgacagcgtagtggtgcatgtgctgaagctgcagggtgccgtgcccttcgtgcacaccaatgttccacagtccatgttcagctatgactgcagtaaccccctctttggccagaccgtgaacccatggaagtcctccaaaagcccagggggytcctcagggggtgaaggggccctcatcgggtctggaggytyccccctgggyttaggcactgatatcggaggcagcatccgyttcccctcctccttctgcggcatctgcggcctcaagcccacagggaacccgmctcaatgcgtctctccgtgggccccatggcccgggacgtggaaaagcctggcacttgtgcctgcgaaccctgcttgtgccaaggacatgtttccgcttggacccaatgtgcctnccttgcccttnaagaagaggtctacaccaagtttnaacccctgcgtgtggggtactatgagaattgacaactataccatgccttcccggcatgaagcggccctgcttggaaacaaacagagcttangttgggggacacctgcaagctgcanttctaaaacataagctgtcggtgnaattggaattgaacaat

SEQ ID NO: 2002 - DNA, 903 bp, Homo sapiens
  misc_feature (1)..(1): n equals a,t,g, or c
  misc_feature (3)..(3): n equals a,t,g, or c
  misc_feature (52)..(52): n equals a,t,g, or c
  misc_feature (745)..(745): n equals a,t,g, or c
  misc_feature (801)..(801): n equals a,t,g, or c
ncnaaattaaccctcactaaagggaacaaaagctggagctccaccgcggtgncgtccgctctagaactagtggatcccccgggctgcaggaattcggcacgaggcaccttcttcaagatggagctttttgaaggcatgcgagagagcaccaagatttcatctctgttggcagaattggaggcaattcaaagaaattcagcatcccaaaagagtgtcattgtctctcagtggaccaacatgctgaaagttgtagcattgcacctgaagaagcatggactgacttatgccaccatcgatggctctgtcaatcccaagcagagaatggacttggtagaggcatttaaccactccagaggccctcaggtaatgctaatctctctcttggccggagtgttggtctaaacctgactggaggaaatcacctctttcttttggacatgcactggaatccatcacttgaagatcaagcttgtgaccgaatttaccgagtagggcagcagaaagatgttgtcatacacagrtttgtttgtgagggaacagtagaagaaaagatcttacagctccaagaaaaaaagraagatttggccaaacaagttctatcagggtctggagaatctgtcaccaagctcaccttggctgacctcagagtcctttttggcatctaacctcctgtggataagggctcagaatagcaccattgctgtgatgttgcacctgtaaccatctttttatgggtggagcaganagtcaatccctgcagccaccctgcagccagccatctctgcagttctctcagtgcangcagttcttcctctcaggctgaagatcaaggagatgctttgtwcatgaacagatgctgartatctgttatcattgtattgtttartgtcagtgtatcattta

SEQ ID NO: 2003 - DNA, 2999 bp, Homo sapiens
  misc_feature (243)..(243): n equals a,t,g, or c
  misc_feature (2606)..(2606): n equals a,t,g, or c
  misc_feature (2996)..(2996): n equals a,t,g, or c
tttttttttattttttggtttagcatttaataggcacataatcaacatttactgttcaattgaaacaaaattaaaattgggcgctgtctctatctttatttgtgatcggccctaactgcactggcaatcttttccgtttttttgttttctgttttccattcgcatgccccttagcgtacctggggctccggctcctttacaaatgaaacccaaagtgctccgaagcacagccagcgaaagganaaactctgaaacggacaagatggctgccacctcttcgcgcctcttagtcccacccactcagggcggaggtctgcgtcatgtgaccctccccttcttggctccgctcctaccgcagtgcttgacgggaggcggacggggaacgaggccgtcggcattttgtgtctgcttcctgtgggacgtggtggtagccgttgggttgggaaagtgagggatttttggcctcgtttctcctgcttcttttctcctcccttttactttgccggtagaacacagttatgggtcgcaagaagaagaagcagctgaagccgtggtgctggtattgtaatagagattttgatgatgagaagatccttattcagcaccaaaaagcaaagcattttaaatgccatatatgtcacaagaaattgtatacaggacctggcttagctattcattgcatgcaggtacataaagaaacaatagatgccgtaccaaatgcaatacctggaagaacagacatagagttggaaatatatggtatggaaggtattccagaaaaagacatggatgaaagacgacgacttcttgaacagaaaacacaagaaagtcaaaaaaagaagcaacaagatgattctgatgaatatgatgatgacgactctgcagcctcaacttcatttcagccacagcctgttcaacctcagcaaggttatattcctccaatggcacagccaggactgccaccagtaccaggagcaccaggaatgcctccaggcatacctccattaatgccaggtgttcctcctctgatgccaggaatgccaccagttatgccaggcatgccacctggattgcatcatcagagaaaatacacccagtcattttgcggtgaaaacataatgatgccaatgggtggaatgatgccacctggaccaggaataccacctctgatgcctggaatgccaccaggtatgcccccacctgttccacgtcctggaattcctccaatgactcaagcacaggctgtttcagcgccaggtattcttaatagaccacctgcaccaacagcaactgtacctgccccacagcctccagttactaagcctcttttccccagtgctggacaggctcaggcagctgtccaaggacctgttggtacagatttcaaacccttaaatagtacccctgcaacaactacagaacccccaaagcctacattccctgcttatacacagtctacagcttcaacaactagtacaacaaatagtactgcagctaaaccagcggcttcaataacaagtaagcctgctacacttacaacaactagtgcaaccagtaagttgatccatccagatgaggatatatccctggaagagagaagggcacagttacctaagtatcaacgtaatcttcctcggccaggacaggcccccatcggtaatccaccagttggaccaattggaggtatgatgccaccacagccaggcatcccacagcaacaaggaatgagacccccaatgccacctcatggtcagtatggtggtcatcatcaaggcatgccaggataccttcctggtgctatgcccccgtatgggcagggaccgccaatggtgcccccttaccagggtgggcctcctcgacctccgatgggaatgagacctcctgtaatgtcgcaaggtggccgttactgatcttacttcatccagtctaataggtttggagattaaaccttttctcaacttgtgctgtttatatagccaagcttccgtcaataaggcttcattgtgactttaacaaacattatcttcccacataccaggaactattggacatttattttacatgggaaaaattatttggaataataaagcaggaacttttcctgaagttgcaatttatactgtatggcttctttttcatgtttcatctaggtttttagaagtgaagtatagtaaatttggttcgttaaattgtgaaggcgctggaattacatgaacataccaccctagtaaaggcaagttctgtaagcttacattgctatttgtaaagtttgccttcacagcatttcagatgctgttggacttcatgtccccaacctagcttggtgagggctgtaactgtttccaagtacttgtacattggaagtctgaatgtgtaacaatatttaatgtatttagagttcctcatgttgcagggtttaagaaatctgacccaccaaggtcatgtgacttttctgtactgttaaacttcattgtaataaaatgagagaaaaatttatgcctttttattcataacccagctgtggaccactgcctgaaaggtttgtacagatgcatgccacagtagatgtccacataataaaattcatagttaccaatgcagtttanatatatcattggattctgtctttgagttgtaggttatttcttagctgcatgttttaaactgaatttgcatagagttgtatgttaatgtttcagttaagagaaaaacttaagatacatgagtcattacataatgggtatgaaatctttataatcacccttccaccctctatggtgtcagtacacatcacgtgtcatagatacttaaaatgtaaatgttaacacttttccttcctgctgagatgtttagagcctagtgccagacccattcatttccttttgattatttttgagactcagtactagcttcttgtgctgttaatgggttattatatattattctaagtgtaatgctgagaatctaaatgtgtctctgttgggatggttaacagntga

SEQ ID NO: 2004 - DNA, 338 bp, Homo sapiens
  misc_feature (329)..(329): n equals a,t,g, or c
  misc_feature (332)..(332): n equals a,t,g, or c
gcacaccgcgctyagcgccttcactgccatccccgctgtccttgccgcccccgccatgggcctagagctgtttcttgacctggtgtcccagcccagccgcgccgtctacatcttcgccaagaagaatggcatccccttagagctgcgcaccgtggatttggtcaaaggtgggcccagcccgtttccccgcgtgtccacaaacccagtgcamccccaggcccccgcctgctctgccctgagcgtctcgccgccgcacagcccctcacctcctcctgcagcgtctgccaccagagaatgctgtggactgagtggcttggagggatcacagnctntctgaa

SEQ ID NO: 2005 - DNA, 2346 bp, Homo sapiens
  misc_feature (2262)..(2262): n equals a,t,g, or c
  misc_feature (2332)..(2332): n equals a,t,g, or c
  misc_feature (2344)..(2344): n equals a,t,g, or c
ggtgccgtctgcctcccaggtgcgcgcttcgctcccggagccgcggaactcggcggccgccatggcgtccaacatggaccgggagatgatcctggcggattttcaggcatgtactggcattgaaaacattgacgaagctattacattgcttgaacaaaataattgggacttagtggcagctatcaatggtgtaataccacaggaaaatggcattctacaaagtgaatatggaggtgagaccataccaggacctgcatttaatccagcaagtcatccagcttcagctcctacttcctcttcttcttcagcgtttcgacctgtaatgccatccaggcagattgtagaaaggcaacctcggatgctggacttcagggttgaatacagagacagaaatgttgatgtggtacttgaagacacctgtactgttggagagattaaacagattctagaaaatgaacttcagatacctgtgtccaaaatgctgttaaaaggctggaagacgggagatgtggaagacagtacggtcctaaaatctctacacttgccaaaaaacaacagtctttatgtccttacaccagatttgccaccaccttcatcatctagtcatgctggtgccctgcaggagtcattaaatcaaaacttcatgctgatcatcacccaccgagaagtccagcgggagtacaacctgaacttctcaggaagcagtactattcaagaggtaaagagaaatgtgtatgaccttacaagtatccccgttcgccaccaattatgggagggctggccaacttctgctacagacgactcaatgtgtcttgctgaatcagggctctcttatccctgccatcgacttacagtgggaagaagatcttcacctgcacagacccgggaacagtcggaagaacaaatcaccgatgttcatatggttagtgatagcgatggagatgactttgaagatgctacagaatttggggtggatgatggagaagtatttggcatggcgtcatctgccttgagaaaatctccaatgatgccagaaaacgcagaaaatgaaggagatgccttattacaatttacagcagagttttcttcaagatatggtgattgccatcctgtattttttattggctcattagaagctgcttttcaagaggccttctatgtgaaagcccgagatagaaagcttcttgctatctacctccaccatgatgaaagtgtgttaaccaacgtgttctgctcacaaatgctttgtgctgaatccattgtttcttatctgagtcaaaattttataacctgggcttgggatctgacaaaggactccaacagagcaagatttctcactatgtgcaatagacactttggcagtgttgtggcacaaaccattcggactcaaaaaacggatcagtttccgcttttcctgattattatgggaaagcgatcatctaatgaagtgttgaatgtgatacaagggaacacaacagtagatgagttaatgatgagactcatggctgcaatggagatcttcacagcccaacaacaggaagatataaaggacgaggatgaacgtgaagccagagaaaatgtgaagagagagcaagatgaggcctatcgcctttcacttgaggctgacagagcaaagagggaagctcacgagagagagatggcagaacagtttcgtttggagcagattcgcaaagaacaagaagaggaacgtgaggccatccggctgtccttagagcaagccctgcctcctgagccaaaggaagaaaatgctgagcctgtgagcaaactgcggatccggacccccagtggcgagttcttggagcggcgtttcctggccagcaacaagctccagattgtctttgattttgtagcttccaaaggatttccatgggatgagtacaagttactgagcacctttcctaggagagacgtaactcaactggacccaaataaatcattattggaggtaaagttgttccctcaagaaacccttttccttgaagcaaaagagtaaacacggcccagcggtggaaccagccattccttgacaagccagcagcctgcgtcaggagaagggctcctcgccaacccacccacacgctcgtctcactcaattcaatgtcacacttctgcctcttgcaaaattgctggaaaaagtaataataaatatagctacttaagatttcccatccatgagtatatattcccaacccttattacagagaattacaactctggcacccttccctacccctgcacttnacccttcttcaatgacgaatgcattggtcaagtgtgagtgatcactaaatagaaattttaccttttcagngcccatcttttncc

SEQ ID NO: 2006 - DNA, 2021 bp, Homo sapiens
  misc_feature (11)..(11): n equals a,t,g, or c
gcccacgcgtncgcccacgcgtccggcaagaggctgggaagccatcacttaccttgcactgagaaagaagacaaaggccagtatgcacagctttcctccactgctgctgctgctgttctggggtgtggtgtctcacagcttcccagcgactctagaaacacaagagcaagatgtggacttagtccagaaatacctggaaaaatactacaacctgaagaatgatgggaggcaagttgaaaagcggagaaatagtggcccagtggttgaaaaattgaagcaaatgcaggaattctttgggctgaaagtgactgggaaaccagatgctgaaaccctgaaggtgatgaagcagcccagatgtggagtgcctgatgtggctcagtttgtcctcactgaggggaaccctcgctgggagcaaacacatctgacctacaggattgaaaattacacgccagatttgccaagagcagatgtggaccatgccattgagaaagccttccaactctggagtaatgtcacacctctgacattcaccaaggtctctgagggtcaagcagacatcatgatatcttttgtcaggggagatcatcgggacaactctccttttgatggacctggaggaaatcttgctcatgcttttcaaccaggcccaggtattggaggggatgctcattttgatgaagatgaaaggtggaccaacaatttcagagagtacaacttacatcgtgttgcggctcatgaactcggccattctcttggactctcccattctactgatatcggggctttgatgtaccctagctacaccttcagtggtgatgttcagctagctcaggatgacattgatggcatccaagccatatatggacgttcccaaaatcctgtccagcccatcggcccacaaaccccaaaagcgtgtgacagtaagctaacctttgatgctataactacgattcggggagaagtgatgttctttaaagacagattctacatgcgcacaaatcccttctacccggaagttgagctcaatttcatttctgttttctggccacaactgccaaatgggcttgaagctgcttacgaatttgccgacagagatgaagtccggtttttcaaagggaataagtactgggctgttcagggacagaatgtgctacacggataccccaaggacatctacagctcctttggcttccctagaactgtgaagcatatcgatgctgctctttctgaggaaaacactggaaaaacctacttctttgttgctaacaaatactggaggtatgatgaatataaacgatctatggatccaggttatcccaaaatgatagcacatgactttcctggaattggccacaaagttgatgcagttttcatgaaagatggatttttctatttctttcatggaacaagacaatacaaatttgatcctaaaacgaagagaattttgactctccagaaagctaatagctggttcaactgcaggaaaaattgaacattactaatttgaatggaaaacacatggtgtgagtccaaagraggtgttttcctgaagaactgtctattttctcagtcatttttaacctctagagtcactgatacacagaatataatcttatttatacctcagtttgcatatttttttactatttagaatgtagccctttttgtactgatataatttagttccacaaatggtgggtacaaaaagtcaagtttgtggcttatggattcatataggccagagttgcaaagatcttttcyagagtatgcaactctgacgttgatcccagagagcagcttcagtgacaaacatatcctttcaagacagaaagagacaggagacatgagtctttgccggaggaaaagcagctcaagaacacatgtgcagtcactggtgtcaccctggataggcaagggataactcttctaacacaaaataagtgttttatgtttggaataaagtcaaccttgtttctactgttttaaaaaaaaaaaaaaaaaaaaaaaaaaaaaaaaaaaaa

SEQ ID NO: 2007 - DNA, 1955 bp, Homo sapiens
  misc_feature (26)..(26): n equals a,t,g, or c
  misc_feature (40)..(40): n equals a,t,g, or c
  misc_feature (57)..(57): n equals a,t,g, or c
  misc_feature (78)..(78): n equals a,t,g, or c
  misc_feature (98)..(98): n equals a,t,g, or c
ccggcttcccaggcagaagagtcganaaaagctgtctttntctcacgtcacccagcncaggctcattaagttcttcancctcttcccaatcattttcncaatgagcaaattgactaagagaagcaaaggtttcttggggttattaaccagtagtgtggaaatactagttttatgtggccaaggaaaagcaaaggcttttcttttcagtttgtgttatttggaagacagaaaaacatcttgtctacatcctttggctgtttgtaggatcacgttgtccttacgatactgaaactttacagctgctgtaaattttttataaatgaatttcaaaatgttataatgggactgtaggttgtttttctacatcttcattatttggacctaaaaccagtttttaataagaaagtttatctttactctttctgaaattatgactccagaaaaagaaaaaaaaaatacaagtcatggaatcagcaatctggtaagaaatgctgccaagaatgtggcagtagctgtcctgacagactccaactgtctttactatctgaagaatcctaggctccacatgagaggcagaaatggatcagtcttattcttttctagaaatggttatctgtagtttggtagcaaaaaaaaagaaaaaagaatccataattagcagatttcttattaactatttggatctaattgaaatggctttattcttaggattaagaaagatagatgtggatacccagccactcgttccatattggtatcttttaaatcagctctgcctcttaatcaagaacctaaatattccctctttctaatctttgttccttctccctacaccctcatcctctttcactcttccttcataattcctctaagaaaaatatctttgcatcagcagtaatatcttttagaatagcactatcagaatttagcagtaaaccaacatacaggcttcagatttacttctgagtccaaaacaatttgtgctatccagggtagttaactctgggttaaacaagtacagggtatagattccctcttcaggtctacacaggaatttttaccatagggaaaagtggggagagctcaaacgtagttaataaggaaggtaatttgtttttcttttacctaaaagaaaagaaaattccttctgtgactacaggtctctgagaaattatctttcaaaagagatttcattgctcataagagtgttgtggcctattgataaaaacaattttgttcagtttcttgtcttgaaaaaaaagtggccttagctttttgcaatacttgaataaagtgtgtactcgcaaaagaatttctgtagcacagcattagagactcataacttttctgcaagaaatacaaacttacatcttccttttactaccttaagaatactagtgaataaaacattaattcaaagagcaaattatagaaactacaatgacatttaatgcaaattgtaggaatttacatgtttacaaatcatcttcaactggttgtgcagcaattcaataaaatatctttgtattataaaaatgtgaagaaaaaatgtaaactgatgtaaaggaggtactgtcattttaattaacctatgtttaatagcttttccttctggactttgcaaagccttcttggcaaacacattgcaaagcattctctgggaggttcagcctccttgtgtgtactgtactgtgcagacatgaaaaaataaacccgtttactgtgtgcgtgtaaatagcctggtcatcaggccattttcagccaatagtcacatccagtgcaattttgcaccgaacacttaagggtgtggtttgtaagtacgatctgtaaaataactgggatgaattcccatgtatacctgtgtaaatagatttgttaactgaaatatactttaagaaagataaaatctgtaaataaactgatttataaattaaaaaaaaaaaaaaaaaaaaaaa

SEQ ID NO: 2008 - DNA, 1158 bp, Homo sapiens
  misc_feature (264)..(264): n equals a,t,g, or c
aaaaggaacgtggaatctggggaagaagagctggcgtccaagctggaccactacaaagccaaggccacgcggcacatcttcctcatcaggcattcccagtaccacgtggatggctccctggagaaggaccgcactctgaccccgctgggtcgggagcaggctgaactcactgggctccgctggcaagcttggggttgaaagtttaataaaatcgtccattcgtctatgagcgcgccatagagaccaccgatatcatcagccggncacctgccaggcgtctgcaaagtcagcacagatctgctgcgggaaggcgcccccatcgagccagacccgcccgtgtctcattggaagccggaagctgtgcagtattacgaagacggagcccggatcgaggccgccttccggaactacatccaccgcgcagatgccaggcaggaggaggacagttacgagatcttcatctgtcacgccaacgtcatccgctacatcgtgtgcagagcactgcagtttcctcctgaaggctggctccggctctccctcaataatggcagcatcacccacctggtgatccgacccaacggccgagttgcgctcaggaccctcggggacacggggttcatgcctcccgacaagatcactcgatcctgagggctccggcctctccttccctctgtcctccctgcacaggccgcacacacttaacgttttgttcccaaggagaccggcggaaagtagaaacctgcaatgctgcatctgggaactgacttgtgaccaggctgagaaggggagagttgggatcagacagcctgacttctctgcagggttttatacctgaccatgaacccccaggatggcgtggggtttaaggtgaaagcgtctcacgcacaagtcaggcctgttgtggggacttgaaagaggcctgacccagaccaccatgttcgcacccacagctgacccgtgctgagggtccaggctccattggcaaagccggtcaggcacgagggcgactgaggcacgtggatgaggagggcacccaggttctgttcacaactcacttcacttcatacatccttttaatttcttaaaaccctcttgtcccttaaatatttgtcaattaaagattttctggctgggcaaaaaaaaaaaaaaaaaagtttt

SEQ ID NO: 2009 - DNA, 1127 bp, Homo sapiens
  misc_feature (182)..(182): n equals a,t,g, or c
  misc_feature (1090)..(1090): n equals a,t,g, or c
tgtcacagactacttcatcagtcgcttatctggagctgggaccaaggtttctgccaggccttgggatcagctcttgggggtcagagcagccttcccacatcctctggcactgctgaacttttgcagcagctctttcctcctctyttggatgcccttcgagagcccaggttacgacggatttnctgccagcctgcagatcctgcgcctgtcgccctaggtctctgtacccttcagaccaccttgctctggttcctgggcagagctcagcagtacttggcagcatgggacccagcttccttcctgctcctgatccaaaaggacttacctmctmtgwtgcatgasgcagaagctttgtatagcctggcctcagaggaaagcttasctctggaatggagcagcagctgggcctggagatccagaagctgactgcacagatccagctcctgcctgaagagtcactaagtgtcttttctcaagaatgtcataaacaagccatgcaaggtttcaagctctacatgccacggggtcggtactggcggcttcgtctctgtcctggaactcctcatcccagcttctccttccagagttccaaggggaacctcccagtgctcctagtgagtatgctggtttagtggtccgyaccgtactggagcctgtgttgcaaggattgcaagggttgccacctcaagcccaggcccctgcccttggtcaggctctgacggccatcgtgggtgcctggcttgaccacattcttacccatgggattcggttcaggtcaggagtaaaggtggaagtggcagggggtgaatggaactgggaaaaggaaggggataagtgggagaggcaggagggtcaagtggccatactgtacctctgccttcagcctgcagggagcgctgcagctcaaacaagactttggagtggtcagggagttgctggaagaggagcagtggagcctgtcccctgatctccgccagaccctgctcatgctcagcatcttccagcagctggatggggcctgctgtgtctgttgcagmagcccytgcccaagttcaagtccacaggaggccccctgttgctgtgttgtcangagtccagaccacgaaatttcccagcagcgcctcaat

SEQ ID NO: 2010 - DNA, 478 bp, Homo sapiens
  misc_feature (209)..(209): n equals a,t,g, or c
aagaaggagctcagccactatctccccaccgagccagctcagcgggcagggctgggagggagtgggacagattctgggagtscagcgaggaggagtcccggctggsctgagcgcagggagctgcttggmagtgccagagcccaggccccagagccctgctggagaggaggcagactgaggcagcaggccccgccagcaggcgaagaggngagatgtcagactgctacacggagctggagaaggcagtcattgtcctggtggaaaacttctacaaatatgtgtctaagtacagcctggtcaagaacaagatcagcaagagcagcttccgcgagatgctccagaaagagctgaaccacatgctgtcgcattgctgaccctgcttcctccccaggacacagggaaccggaaggctgcggataagctcatccagaacctggatgccaatcatgatgggcgcatcagcttcgatgagtactgg

SEQ ID NO: 2011 - DNA, 1261 bp, Homo sapiens
cccacgcgtccgcccacgcgtccggagctctccccggtctgacagccactccagaggccatgcttcgtttcttgccagatttggctttcagcttcctgttaattctggctttgggccaggcagtccaatttcaagaatatgtctttctccaatttctgggcttagataaggcgccttcaccccagaagttccaacctgtgccttatatcttgaagaaaattttccaggatcgcgaggcagcagcgaccactggggtctcccgagacttatgctacgtaaaggagctgggcgtccgcgggaatgtacttcgctttctcccagaccaaggtttctttctttacccaaagaaaatttcccaagcttcctcctgcctgcagaagctcctctactttaacctgtctgccatcaaagaaagggaacagttgacattggcccagctgggcctggacttggggcccaattcttactataacctgggaccagagctggaactggctctgttcctggttcaggagcctcatgtgtggggccagaccacccctaagccaggtaaaatgtttgtgttgcggtcagtcccatggccacaaggtgctgttcacttcaacctgctggatgtagctaaggattggaatgacaacccccggaaaaatttcgggttattcctggagatactggtcaaagaagatagagactcaggggtgaattttcagcctgaagacacctgtgccagactaagatgctcccttcatgcttccctgctggtggtgactctcaaccctgatcagtgccacccttctcggaaaaggagagcagccatccctgtccccaagctttcttgtaagaacctctgccaccgtcaccagctattcattaacttccgggacctgggttggcacaagtggatcattgcccccaaggggttcatggcaaattactgccatggagagtgtcccttctcactgaccatctctctcaacagctccaattatgctttcatgcaagccctgatgcatgccgttgacccagagatcccccaggctgtgtgtatccccaccaagctgtctcccatttccatgctctaccaggacaataatgacaatgtcattctacgacattatgaagacatggtagtcgatgaatgtgggtgtgggtaggatgtcagaaatgggaatagaaggagtgttcttagggtaaatcttttaataaaactacctatctggtttatgaccacttagatcgaaatgtcaataaaaaaaaaaaa

SEQ ID NO: 2012 - DNA, 1531 bp, Homo sapiens
  misc_feature (1524)..(1524): n equals a,t,g, or c
  misc_feature (1530)..(1530): n equals a,t,g, or c
aaattgcaaaaggtaatattactagtgtttcatacggacattttcagacaccatttttctatatgttttgtgcattttgttttgctctgtatatagtatatataatggacaaatagtcctaatttttcaacatctagtctctagatgttaaagaggttgccagtgtatgacaaaggagtaaaattagcatattttgtacactttgtgttgaaattcgtaggaaaacttgtcttctgtaaagacttttgcataggaatttgtttgaccatctctaagcattacacgtgcctgtacttgtccactggattgaaggcagagaaggaagggaggagggaatgattcaaggccaaaatggccacatttagaagatacctcagatgataaccattgttatgtgtgtgcaattttatttaacagtgctgtgtatgtggtggacaagttatatgaaatatctagtctttctagatatttggaagtgcttgatgtatttaaaagtggtagtagaataacactttgtaaatagcttttaaaaactgatgggaaatgctgtttggaagtggaattgttgaaccacctgggaggtgggagggaagaaattgcaaatggtgttttgccattgtttattagaaaatttcagcttaatccattgtgtatatgttacatgcatttcatttaactttgctatactgtatatattgtatatataacggacaaattagtcccgattttataatatctagtctctagatattaaagaggttgccaatgtatgacagaagtagagttagtaaactaacacattttgtacactttgttaaaatttgtagaaaggctgtcttctgaaaaggacttttggaagtgagataacatcagctctaagtgacacgtgcctatatccatcaggttggtggtggagaggagttggaaggaatgaagggttctagaccagaatgttcgtatttagaagacactatcagatataaccattgttacatgtgtgtagtttattcaaccctactgtgtatatagcggacaaacttaagtccttatttgaaacatctagtctttctagatgtttagaagtgcacaaagtatgttaaaagtagaggtagtaaataacacattttgtagctatccttttgatatgaaatattgtcttggaaattgatcaattctctgagcagtacccattttgatatttgtgctggttcagggggaaggaggagcacaaagtgcaaagggctttctaccagtgtccagtgtgtttatgaggaggcacattgaccattgtcccttatgtctgcattttcatttactgtgctgtgtatatagtgtatataagcggacataggagtcctaatttacgtctagtcgatgttaaaaaggttgccagtatatgacaaaagtagaattagtaaactactacatgrgtacactttgtgttaaaattcmtagggaagacttcttaaaaacaagtgaaattggtaaacccccctaagcttacagtggttawagctggccacnggggtng

SEQ ID NO: 2013 - DNA, 2333 bp, Homo sapiens
  misc_feature (2018)..(2018): n equals a,t,g, or c
  misc_feature (2044)..(2044): n equals a,t,g, or c
  misc_feature (2292)..(2292): n equals a,t,g, or c
  misc_feature (2306)..(2306): n equals a,t,g, or c
  misc_feature (2331)..(2332): n equals a,t,g, or c
cacgcgtccgcattttcgtatccctgctgatttcaaaccttcccatggtttagaagcataacctgtaatgtaatgcaagtcccctaactccctggttgctaacattaacttccttaagtaataatcaatgaaagaaattctatgcatggttttgaaataatgtccttgaaagaggaatcaccattaggaaaggtgagtcagggtcctttgtttaatgtgactagtggctcatcatcaccagtgacctggttgggcctactctccttccagaacctgcattgcttcccagacctccccactgagatgcctctaagagccaaaggagtcaacacttgagcctagggtgggctacaacaaaagattctaatttaccttgcttcatctaggtccaggccccaagtagcttgctgaaggaacttaaaaagtagctgttatttattgtattrtataagctaaaaacatttatttttgttgaatcgaaacaattccatgtagcaatcttttttctgttcacggtgtttgtgatagaaccttaaattccgcaagcatcagttttttgaaaaaatgggaattgaccggatagttacaggcaaagattataaatwgctacaacatcatttaacttttataaacatgccttctctctattgaagacatctgatatttttgctggaaagttggatctatcctcagtaactctgccatggaattcctgkttcctggttccagaaaaagaaaagattacatttctgatcataaagaatgtcttgcatatggggaaatttttcaaaatgaaggggggtattatttatgtgggcatgggaaaacttttgccatggctgtttgtcttagtgggcatcttttgatgamattggatcagatatatgtagatgctgatatatgggacacatgtttaggttttggtgcagttgcacaaaactgtgttagtttatatgttactgtgttgcctttatttattctctccaaagtgtctctttatatttgttttacaatctgtgaaagagtataccataatacagaagtattttcatagtctttacctctggattgtcctgtcagtatagccacgttgatgagattacaccagtgcctttgatcatctttaagtatttgagccctgataaatattttggtaacataatccaaattagagacttagagctctggttagcaatcatgtttaaagagaagcttcttaaagctctgtatgctgggagattcatgattattaccaacgttttgatttcatgaaggtgttctcaaatttaaagcacattttcagtaagaacaaaaatatttaatgtttttatcttagacttaacttgatacatttgcatattactatggaagttattcaccttgtccctgtttttctttaagatattttaaaatcatagttatactacagtccttttttaaatgtatcctgatacattgtaaaatattttaatttcattgtggaaaataatgttggataaggagatatttttcactgttaacttttagcccatgcattttcataatttatttttttcacttgctgctttatatgacatatgtgacatttgattatttaacacttgatgtgatctgcataaacccaagttgcacaaccctcctgctgaagataaaattgaggttaaagataaagatttattttcatatttgtacagtgatcggcttcagtgatggtttttgtgggcatttattgtgtgtgtgtaagaaatttcatatgtatatattaagtaggcctctgagtattgaataattgttttatgattttgatttatatggtttacattttcattgtgtgggccatatttcgtttatactgtttatttctcttcaaaccttaataattataccataaagtgtaatttttatagcaatgcaaatgtctaaggaactacaaatattttctacgttgtaaattcaataaagcttgcttcctttggcaaaaaaaaaaaaaaaaaaaaaaactcgagggggggcccggnacccaattcgccctatagtgagtcgnattacaattcactggccgtcgttttacaacgtcgtgactgggaaaaccctggcgttacccaacttaatcgccttgcagcacatccccctttcgccagctggcgtaatagcgaagaggcccgcaccgatcgcccttcccaacagttgcgcagcctgaatggcgaatggcaaattgtaagcgttaatattttgttaaaattcgcgttaaatttttgctaaatcagctcattttttaaaaccccccccccnaaaaaaaatttttnaaaggggggggggcccccccccccnng

SEQ ID NO: 2014 - DNA, 2399 bp, Homo sapiens
ggcacgaggtagaaaccttgaaattttagaaaacatcaatttcatgcctaatgttttgcctggtataattgttgagcccagagactgtttgtacttgaacagttcaggaagaaaagaagtagaaatgatttttgttgctgccacacttcctacttttttgtatgagcttaaacctatgtcttgaacatttatatcaccattcttgcccctgaacacaaatgaattttttatctttattttatgctacatttctatacaattaaatttatattttcaattgtttgtttgcttgctcccattgggagtcgttaaagtgtaaacagggcatagggactgcaattaaccttgagaacaaaagaacaatttatcactttaccaaacaacaaaattcactcttattgttaataattcataataaaggcagcaactatcaattaagttgagaacagaagtggcaaaacaggcacagtcatcaaatttgcaatagctaactgctctattctgaattatcagcagtagctgagaactacccaaaggtttgctgatggccacagtacagaacgattagtgaattcacggctgcatgtctggtttgctctatttcccaaactgagtaaataaatgagagcttgctaatcaggactattaggggttgctaggaaataaaaaatttgctactatgggctgtctccaacctagcaaggagtttgacacaaaacttctattacacacggttaactagcacttaaaacaaatatatctataagaatttatcagtactggtctgattcgtaggctaccccaaaaccctgcctagccaatgaagtagctggaatagaaggaaaggtaactgttgccaactgattgaacaactttttggttctttttatttgtaacagtgtacccccaaaatctgaggtgtttgagggttacctccctctgccaaacacctagacatttactgaacagacttttactacgaagtgttaatggaagtcagggaccccaaatggagggactggctgaagccatggcagaagaacataaattgtgaagatttcatggacatttattagttccccaaattaatacttttataattttttacatctatctttactgcaatctctgaacataaattgtgaagatttcatggacatttatcacttccctaatcaatactcttgtgatttcctatgcctgtctttactttaatctcttaatcctgtcatcttcataagctgaggatgtatgtcaccataggaccctgtgatgattgtgttaactgcacaaattgktcataactcatgtgtgtttaaacaatatgaaatctgggcaccttgaaaaaagaacaggataacagctatgttcagggaacaagggagataaccattaggtctggctgcctgaragccaggcagaacagaaccatatttctcttctttcaaaagcaaataggagaaatatcgctgaattctttttctcagcaaagaacagcctggagaaagagagtgtgttcctagcaggaggtctctgaaatggctgctctgggaatgtctgtcttatacggatgtagataagggatgaaataagccccagtctcccgtagtgctcccaggcttattaggatgaggacattcccacctaataaattttggtcagaccagttgtctgctctcaaaccctgtctcctgataagatgttatcaatgacgatgcgtgcccagtggaacatgcaacttcattagcatttttaatttcaccccagtcctgtgatctcgccctgsctycatttgccttgtgatattttattaccttatgaagcatgtgatctctgtgacccgacccctttcctgcttttctggagggtaaggacccctgaaccccttgcctccacggcacgagctcgtgccgttttttcctgtttttggattttatgtaaataaacagagtcataaatttgacactctcaaaatatcccccatcagattcatgtaagacttttattttggtgatacttctccacaaccatcgcactacaacttaccttaatccactcaactaacacttacatatttggctttagagatgtatatcaatatcttctgtggtctggagataattcttatcatattagcaccttagatgtaattgccagtattcatgatatgttaaaaaattattaaatgtctactaaatttgctacagcttagctacttcacgagactctaaaattcggttccctgctatactcttaaatttcaaatataaacatatatacctcttcccttgataaaatcttacttccgatctgtatcttttcttgacactttccttctcttgacacttttggttgactgggtctgtatgttgaaatgtctgccttgatagatactcgag

SEQ ID NO: 2015 - DNA, 1916 bp, Homo sapiens
gtgtgagaggcctctctggaagttgtcccgggtgttcgccgctggagcccgggtcgagaggacgaggtgccgctgcctggagaatcctccgctgccgtcggctcccggagcccagccctttcctaacccaacccaacctagcccagtcccagccgccagcgcctgtccctgtcacggaccccagcgttaccatgcatcctgccgtcttcctatccttacccgacctcagatgctcccttctgctcctggtaacttgggtttttactcctgtaacaactgaaataacaagtcttgatacagagaatatagatgaaattttaaacaatgctgatgttgctttagtaaatttttatgctgactggtgtcgtttcagtcagatgttgcatccaatttttgaggaagcttccgatgtcattaaggaagaatttccaaatgaaaatcaagtagtgtttgccagagttgattgtgatcagcactctgacatagcccagagatacaggataagcaaatacccaaccctcaaattgtttcgtaatgggatgatgatgaagagagaatacaggggtcagcgatcagtgaaagcattggcagattacatcaggcaacaaaaaagtgaccccattcaagaaattcgggacttagcagaaatcaccactcttgatcgcagcaaaagaaatatcattggatattttgagcaaaaggactcggacaactatagagtttttgaacgagtagcgaatattttgcatgatgactgtgcctttctttctgcatttggggatgtttcaaaaccggaaagatatagtggcgacaacataatctacaaaccaccagggcattctgctccggatatggtgtacttgggagctatgacaaattttgatgtgacttacaattggattcaagataaatgtgttcctcttgtccgagaaataacatttgaaaatggagaggaattgacagaagaaggactgccttttctcatactctttcacatgaaagaagatacagaaagtttagaaatattccagaatgaagtagctcggcaattaataagtgaaaaaggtacaataaactttttacatgccgattgtgacaaatttagacatcctcttctgcacatacagaaaactccagcagattgtcctgtaatcgctattgacagctttaggcatatgtatgtgtttggagacttcaaagatgtattaattcctggaaaactcaagcaattcgtatttgacttacattctggaaaactgcacagagaattccatcatggacctgacccaactgatacagccccaggagagcaagcccaagatgtagcaagcagtccacctgagagctccttccagaaactagcacccagtgaatataggtatactctattgagggatcgagatgagctttaaaaacttgaaaaacagtttgtaagcctttcaacagcagcatcaacctacgtggtggaaatagtaaacctatattttcataattctatgtgtatttttattttgaataaacagaaagaaattttgggtttttaatttttttctccccgactcaaaatgcattgtcatttaatatagtagcctcttaaaaaaaaaaaaaaacctgctaggatttaaaaataaaaatcagaggcctatctccactttaaatctgtcctgtaaaagttttataaatcaaatgaaaggtgacattgccagaaacttaccattaacttgcactactagggtagggaggacttagggatgtttcctgtgtcgtatgtgcttttctttctttcatatgatcaattctgttggtattttcagtatctcatttctcaaagctaaagagatatacattctggatacttgggaggggaataaattaaagttttcacactgaaaaaaaaaaaaaaaaaaaaactcgta

SEQ ID NO: 2016 - DNA, 1073 bp, Homo sapiens
ctgggacagagccatgtggtgatgactgtaatgggagtatgcctgtctccaacaagagggctgtggctggaaggtcaccttaagaggcacccctgtcctttgatgtcaccctggaggcccagagtaactcttctggaagccccatcatgtccatgcccgacagcgtccattgttcccttttcccagagcccagagctgggtagagctgcaaggacaccgcctgcacagagtcctggggctgggcattgcctgctgcaatgacaacatctggctggatggcagaaagctgatggaccgtcgcgacgtcccagtccagctgggccactgtcaccctggggctgtctaagttggcagagatgtctgcctctaatgagaggccattgagaaggacattccctcagagcttctcgaggacctggctgtgacagtcgctgaagatgtatgcctggaggcggcacatcttgcagatggccaggcctgtgaggctggcgccactgccaagctctaggacagtcctggcgggaggaaaggggaccatgtctgtaactgcaccagggtgagcctgcctcggtgtcctgccgtgcgccccgaggtcacctatgagagaaggctgccgggttctcgatggcccattctgccaggtagagggcagcatctcatgtgaccaggcctgtgatgccattggagatgatggctgtgctctcggagagtgtgactgagcctcccgagggctgcaccaagagagggcgagagagtcagtccagcaatcagaaggcaagtggcttagaagacaagttgccatccaccacatggctgaataaaccatgacaggaccaatcgccactcagcaatgagaagcagctaactgttgacatgccaacagcttgcacgggcctcaagggtgtcacaaggcagccaccccttcatagccacacctggcccctggccaccactgacctgtgctccatcaccagaattccgttgtctcaggaatgttcgatgaatggaatcctgtgtggcctgagatgagtgytcgtgccgaatttctgcaagccccggggggatccaataag

SEQ ID NO: 2017 - DNA, 3711 bp, Homo sapiens
  misc_feature (144)..(144): n equals a,t,g, or c
ttcgaggtcggccgcgtggctggaagacatggccactccagtcggtgttgagcacggcgagcagtctcaggcctttagtgatgatggtgcagtcagcctcagtttccaaagccggaaaaggatcctctagtagccacggtgtgncagctgctctgaaccaggacctggacccggacccaaagtgccatgtctttaatgttagctcccagcgatgccagatgggatcagcacagccctgcctctgctgctaattgttcctctaaagtaatcgccatgcgttcttygggcttcatctttaaaggaatgaagcaactgagattattctggaaaaccttttggcagttagtgaaattagagtacaactaagaacattttcagacctccactgtggatgacctgggtataatctcacaaatcgatgggactgcaaggattgtaaactgaaatgaacatgattatactctgttggaagagcctaagaggaaactgatgccatgagtttcagagagtaatgcttaaccccagttacacaggatgccgtcttgtgtttcctcttgtttagttacccactacagtgattttgtgatctgctaatgggttgccacccacaaccattgctttagcacttttacttcaaatcaatgaaggattgataaaagttctcctggtgtctccgcagagtgccttccaggaacagatctttgcatagaatatcagtggtttccttttttgtttcaaatagtggtcagaaaatacccagtgttgactcaccaaggcaatcagcttcctttttccctttttttgtttttttttaacattttatatttttgctttattttattttattttattttttgagacggagttccactctgtcgccaggctggagtgaagtggtacaatcttggctcactgcaacctccacctcccgggttcaagcaattctcctggctcagcctcctgagtgctgggactacaggcgcgtaccttctttagtagagactgggtttcaccatgttggccaggatggtctctatctcctgaccttgtgatctgcctgcctcagcttcccaaagtgctgagatgacaggtgtgagccatcagacccagcatttttttttttaatttaaatttaaatttttttcatttttttgagaggttttttttgttttgttttgttgttgttgttgttgttgttgtttttgagacagtcttgctctgtcacccaggctgggagtgcagtggcatgatctctgcaacctctacctcccaggttcaagcaattcttgtgcctcagcytcccaagtaactgggactacaggtgcacgctaccacacctggctgattttttttgttttagtagagacagggtttcaaccatgttgcccaggttggtctcaaactcctgagctcaggcaatccacccgccttggcctcccaaagtgctaggattacaggtrtgagccaccacacccagctattttttctttcgttttttaattttaaagttggggggggtctcaatttgttaycctggctgrtctcgaactcccggacttaagcgatcctctggctccaagcccactaccagtctcaggtttctttactaaaagatcactacctttttttctcttatctgctgccatgtgagatgtggctttcaccttccgccatgattgtgaggccttcccagccacgtrgaactgtaagtccaataaacctcttttgtaaattaaaaaaaaaaaatcactatttaagatactaggatggattgtgactgttgaggagtacttacatatcctacatttgactacattatttccaaaccaagtattccatccaaaggaacatactgctatcatagagaccaaggagggactgtttaaggttgccaaggtgaagcgagctgagaggctttgtcctcgtgccagtaactctgaaatctctcttaattcctgctgtccaggcagcagaatgccatggtttccccaagtaggtagctgctttagcagttaaagcccaaatgtctgttctgttgatcagaggtctctgaatttctgaagtggtgtttcgtttctggtgactgagttaatcctttacaatccctcttgtaaagtgtgctaatagaaagaatccacctttcaaagctgcagaaccagaccgtgccctaaattgaccaacgtarctgatgtgcctcaggaagtctcttgccagctgtccctgtgaagaccccctcctcccccccagctgctgccttgcacactgaagcatctcagactgtgcaaagccgtgtagtcatcaagacagtaaatcccagggcttggttaagtgctgtgtgataacttgtttggatgagacttaacttaaaaccacttacaataaacttgggaaactaccgtcagctgagttcaaatttactgacggcatgatatgaggatgaaggtttattacctggtgacatcatcctgttggtgacatcatcctgttggtgacaaggtggtgatacatctctaatgggacttccctcagtggcaggcaggctgccaagcaactaacccccatcaagtgccagaccctcccagtgttctgagagtcatctccatgctaaacagcctgcgttttatatgatttctctacccagccaaaaaaaaaaaatggtccatcatgtacgcagttatctagtcttaagttatattctggcttttttctcccactttattatggagcagaagtaagcctatcatgttcttagaaaggctcttaagaggtgtcctggagtccttgaatcactttagcatctggggtaggatgtgccaccaggaggatttgggctggagcgtgtgtgtttgcctttgacctggactgctgtctgatcttgctgaacactccaccgacatttcctaaagttgctcagtgccaatccagcaaagcagtccattttcccttggccaagattgagatgtattgttttagatacagaagagttcttggatgagccaaggacaagctggggtgtcctatattgaacagacctcgatgaaaatcttgaattcaccccagtgccctctgttggcaagggaaggtgaagattgaaaagttaaaaaagcttttggccacttgagaggatcagggccgcaactcttgaagaagcaaagggctcagtgcattggggtcagcgctggtacagctgaaggatgccggccttgtgcaggtccctccacagggcagcttccagggacagatcgtggtttgcataaaatatcaatggcttcatttttcgttcgaaatagtggtcggaaaatttccagtagttgcttgtgatgaatccataggcactgacctggtcacaggtatgcmaagctgtcagcagcatgagagccccggtactaggcatatataggtctccaaaatgtgtgttaatcaactttgatttcaagaacctttctgtcaggtagctgatgaagtccggatgtagcagcttgaatttactggcagaggcttctggtccaaaataggcgtgcggcctaggacccatgatagaagtggacagagcgcccagagccgtcgtattgcaagggggagatggaggggagggtcagggcgccggagtagccgcggtaccctgagcggtaggagcggggctgtcccctttatctaggccctcagggacaggcacgcccagaatggccgatctcagcatcacatagtcgc

SEQ ID NO: 2018 - DNA, 468 bp, Homo sapiens
  misc_feature (434)..(434): n equals a,t,g, or c
agatttactgtgcgctgctgggctgcatggacgactacaccacggacagcagaggggacgtgggcacctgggtccgcaaggccgccatgaccagtctgatggatctgacacttctgctggctcggagccagcctgagctgatcgaggcccatacctgtgagcgcatcatgtgctgtgtggcccagcaggccagtgagaagattgaccgtttccgtgctcacgccgccagcgtgttcctgacgctcctgcactttgacagccctcccatcccccacgtgccccaccgaggagaactggaaaagctgtttcccaggtccgatgtggcctccgtgaactggagtgcamcttcccaggcyttcccacgcataaccastccttgggtkgccacytacggtwacamgtcctggtgggggtagtcgtgtccttggcggttnaggatgacgatccggattcaccaagcttttataa

SEQ ID NO: 2019 - DNA, 839 bp, Homo sapiens
  misc_feature (726)..(726): n equals a,t,g, or c
  misc_feature (830)..(830): n equals a,t,g, or c
gggtacgggccccccctcgagttttttttttttttttttggtaagcatctaactgtccataaattcatggctacagtagagattcacggcgcaacgactttcatactggttatttttttttttaattctgtcagtgagcagcatttcccagttttacactcccctaatggcagctccattaggcgagactgcaggctgcatctgtgattaggtccatgcagctcgaagatcagttcggcacgcgggagggtcccgaaagctgggtctgtccagtgtcttgcagcascggttgcagggggtctaccagctcgccctgacagcttcgatatcgctaaccmaattctgggccagggcatatcccaaatatctgcagcaatgcatgcctatgaaaataccagcaacgatggttaaattgtcctgcaaccacttctcaaactggggcacacrgcctttcgtgtagrttacaatctgctggtcaacttctggtttttgcctggcatccatagccacactcagtgttgatgacatcttctgcgggatctttagtgcagcaggagaatggaacgccacatcgctctcgacttgcattggaatctgtgcaattgaagtaaatatttaggttccaatcatcagctccaaaagccccacagcactgccaatattcctgggtgaagtctatgaggttttgcaaatcaatgtcatcccgatatgctctgatgttgttgnttataaagaaatacagctggtctttgatccagtctttgaaaacaaatgctagaactccggcagtgagctccaggaatattggcagtgctgtggggcttttgganccccatctc

SEQ ID NO: 2020 - DNA, 813 bp, Homo sapiens
tcgacccacgcgtccggctccccgagccctgccaaccatggtgaacttgggtctgtcccgggtggacgacgccgtggctgccaagcacccgggactcggggagtatgccgcatgccagtcacacgccttcatgaagggcgttttcaccttcgtcacaggcaccggcatggcctttggcttgcagatgttcattcagaggaagtttccataccctttgcagtggagcctcctagtggccgtggttgcaggctctgtggtcagctacggggtgacgagagtggagtcggagaaatgcaacaacctctggctcttcctggagaccgggcagctccccaaagacaggagcacagatcagagaagctaggagagctccagcaggggcacagaggattgggggcaggaggagtctggaacacagccttcatgccccctgaccccaggccgaccctccccacaccctagggtaccccagtcgtatcctctgtccgcatgtgtggccaggcctgacaaacacctgcagatggctgctgccccaacctgggacctgcccaggaggttggagcagaaagggctctccctggggtggtgtttctcctctagggtattgggatgcatgttctgcactgccagcagagagggtgtgtctgggggccaccacctatgggacacggggtcgaaggggcctgtacactctgtcatttcctttctagcccctgcatctccaacaagtccaaggtgacagctggtgctaggggcgtggggttaataaatggcttatccttctctccaaaaaaaaaaaaaaaaaawaaaaaa

SEQ ID NO: 2021 - DNA, 994 bp, Homo sapiens
cggcaagctctaatacgactcactatagaaggtacgcctgcaggtaccggtccggaattcycgggtcgacccacgcgtccggactagttctagatcgcgagcggccgccctttttttttttttttaagagcagctagtttttaatgaatcttagcccagaatacaaagcagggtgtagcagttgccttaatggtgatataattgtaaacaatagctttttcttcccctataaactcgagttataggaagcgtttcagagagaggataacacatttgaatctattttttaaaaatcatcctgaaagctagcagtattgttgtcgtttaaaaggttcctcatatactcttaccctcagccaacccaccatgtttatcaattcaaattctagaactttcttgacccaagagattttgtaggaaaaatttctcttttcagatattcagcacgcaaggatcatttttcttggttttgttgctgatcttgctgaactttccatcaatggctgagggaggaagcttgcatgattcttatgagttcttctgaggcactttgactgtgacagttttcacttcagtgtatgcctgcagcccgtactcgcccaactcccggccactccccgacatcttgtagccaccaaagggtgactgggctccaaacacatcatagcagttgacccacacagtgcccgcctggagggcctgggacaggtaattggccttgtccaaatcctttgtgaagacagctgcggccagcccgtacgtggaattgttggctctcccaacaacctcctctatggtcttgaacttcaggatctgcatcactggcccgaagatctcctccttggcgatcttggctcagggcaaatccctatacgatcgattaatcgaatatggcatacgtttctggggaattgttcgttcaaatccaaacaacaccgagcctaaggtaagctggggcgtaaaagagcaacaataaatggggcctttcgccttt

SEQ ID NO: 2022 - DNA, 1770 bp, Homo sapiens
  misc_feature (2)..(2): n equals a,t,g, or c
  misc_feature (674)..(674): n equals a,t,g, or c
  misc_feature (694)..(694): n equals a,t,g, or c
gnatgaacaccaactggccagcctcggtgcaggtcagcgtcaatgccacgccgctcaccatcgagcgtggcgacaacaagacctcgcacaagccactctacctgaagcatgtgtgccagccaggccgcaacaccatccagatcaccgtcaccgcctgctgctgctcccacctcttcgtgctgcagctagtgcaccgcccatccgtccgctcggtgctgcagggcctcctcaaaaagcgcctcctgcctgctgagcactgcatcaccaagataaagcggaacttcagcagcggcaccatccctggcacccctgggcccaacggagaggacggggtggagcagacagctatcaaggtgtccctgaagtgccccatcaccttccgcaggatccagctccctgcccgaggtcatgactgtcgccacatacagtgctttgacctggagtcgtacctgcagctcaactgtgagcgggggacttggaggtgtcctgtgtgcaacaagacagctttgctggagggcctggaggtggaccagtacatgctgggcatcctgatttacattcagaactctgactatgaggagatcaccatcgaccccacgtgcagctggaagccagtgcccgtgaagcctgacatgcacatcaaggaggagccggatgggccagcactkaagcgntkccgmaccgtgagccccgnccacgtgctyatgcccagcgtgatggagatgatcgccgccctgggycccggcgctgccccctttgcccccctgcagcccccctcagtccctcccccagcgtcccggcagtccttgggccaagcgagcttaggacctacgggtgaactggccttcagtcctgccacaggcgtgatgggsmcccccagcatgtctggagccggggaggccccagaaccagctctggacctgctcccggaactgaccaaccctgatgagctactgtcctacttgggcccacccgacctccctacgaacaacaatgacgacctgctttctctgtttgagaacaactgatcctgtgtttaccccaagcccggcggggacacgctcacagatgtcaccacagccctgcccttcatgcccagccccatgggacacccggtggtctttcccaaacctcccccaaaacacacctggagccagagccttctgccgccagccctgcccctgaattggaagcagccctgtgctcgatgggaggggctcccaggccggcagcccttgccacctccctctgccaagcctgctgctgcagaacggtttttgctgaggtgcccctgcccagccctgtccagccttgtccacacacacatctcacgcccctggtctcacagcctcacaccttgtccttccacccctgcctgcccccacccagcctgcttcttgtccagcattgatccttctgtttcaacaactcctccactgggcagagctgggcatctggcagggctggctctgtcccctgggcctttggctccagtggcccctgtgcccagcagtccagctcttggaacctcgctgaatggcagcctcttgggggcctggagctctggcagcccagccgtgtgtggtgtcaggttcctctccccaccccagcttcaagcagaggcctcggggtgggggagctacaaagcacaacaatgtacatagtgtagaaacaytaacagctgggagaggggagccagctgtccagccagcatgttcctgttgtrymtccygtctgtgccgatctctattaaaggactccctcttgaaa

SEQ ID NO: 2023 - DNA, 707 bp, Homo sapiens
  misc_feature (20)..(20): n equals a,t,g, or c
  misc_feature (31)..(31): n equals a,t,g, or c
  misc_feature (468)..(468): n equals a,t,g, or c
  misc_feature (641)..(641): n equals a,t,g, or c
  misc_feature (686)..(686): n equals a,t,g, or c
  misc_feature (697)..(697): n equals a,t,g, or c
gctgtgctctgcccttcagncccctgccagnaccccacccagccccctggtgcctgctgccccagctgtgacagctgcacctaccacagccaagtgtatgccaatgggcagaacttcacggatgcagacagcccttgccatgcctgccactgtcaggatggaactgtgacatgctccttggttgactgccctyccacgacctgtgccaggccccagagtggaccaggccagtgttgccccaggtgcccagactgcatcctggaggaagaggtgtttgtggacggcgagagcttctcccacccccgagacccctgccaggagtgccgatgccaggaaggccatgcccactgccagcctcgcccctgccccagggccccctgtgcccacccgctgcctgggacctgctgcccgaacgactgcagcggmtgtgcctttggcgggaaagagtaccccagcggagcggacttnccccacccctctgacccctgccgtctgtgtcgctgtctgagcggcaacgtgcagtgcctggcccgccgctgcgtgccgctgccttgtccagagcctgtcctgctgccgggagagtgctgcccggaatggcccaagccgcccagcccccggccggctgcccacgggcccgggcncgggccaacggcccggccaccaaggaagtaccttttttccccggncccgggcgatncccttggccg

SEQ ID NO: 2024 - DNA, 2440 bp, Homo sapiens
  misc_feature (28)..(28): n equals a,t,g, or c
  misc_feature (49)..(49): n equals a,t,g, or c
  misc_feature (93)..(93): n equals a,t,g, or c
  misc_feature (2325)..(2326): n equals a,t,g, or c
  misc_feature (2421)..(2421): n equals a,t,g, or c
gattctgtggaataccggtattaccgcntttgagtaactgataccgctngcgcagccgaacgccgagcgcagcgagcagtagcgaggaagcgnaagagcgcccaatacgcaaaccgcctctccccgcgcgttggccgattcattaatgcagtggcacgacaggtttcccgactggaaagcgggcagtgagcgcaacgcaattaatgtgagttagctcactcattaggcaccccaggctttacactttatgcttccggctcgtatgttgtgtggaattgtgagcggataacaatttcacacaggaaacagctatgaccatgattacgccaagctcgaaattaaccctcactaaagggaacaaaagctggagctccaccgcggtggcggccgctctagaactagtggatcccccgggctgcaggaattcggywcgagctaagctgcagtgatgttgcctatatttaaattttctcaaatggccaagctctgatggtctactttatttgagcaatagttgagacttataattgcctataaataaacaaacaaatgaactatttgtttttttttctcacaacatctggcctatattgtctgtcaggaagccatggctccaatgtaaagtacatagttcttacatacttcaactgcagctggtccctgacctcaccaggtttcagagatgttcttaaaggaagccagctgtggcaggtcacagattcatgggaaatggaaagaaccaaggaatatagctcttgcctcacctttctacccactgcagatatagttcaagccagagtaatggaagaacttaacttactagcctctcaggctgctcctatccctacctcccagtgtacagcccctccccatctctttagtcccctttccctcacttccccttttataatgtcacacaaatcagggacagtaggatcacattataacctactttgtcatagggattcgatttttcttatatcaaatcatgtttcctgaaacccagctggggcatatgcactcaatgtctaatacatacttattaatgtaccggatattggccttgcccctggatatcagcaatatattataaaaggttccagtagatgagacgattgagtctgaatacaattgcagtaaattgtgccaataaagatattgtactgttacggtcttagagttaaagccgcttgaatgcagcatgcacattcatgtaaacagacaatcagggtaggcctagaataaccacaaaaattctattggccttactgcagccacctatatgtagaacaatggaggagatagtttgtggtccattattgtaccctgtttcatccattagcatcagaatctctctttcaggtcatttattaaatatgattgaaatgtttaaaagttcctgaacatgattcatgatgattaaaatatcatacaactgataaaagactttaagaactttatatatttcctgttgcctcaaaatgtaacagaaattattcttagagctttgattttagctatcctaattactgcaaataaatatttgttcttatagttttaaatcaaaaagaaaagtcttgttataaaaccttaagcttgaaatcatattaataaaatatattgtacatagtggaaaattttcagtagctaatttaaaatttcagaaaatgctattaaagaattttgattcaagtatttaaactgtttagttatgcatgcttcttattaaccgaaaatgataataccatttagtttagtgatcagtatgagaagcaatacctaatcctatgttgctattgtattttttcctagttggtgtgcctgctcagaaaaacatatactgtatgtgtatacatacctgtgtatatataaaaggtcaatttatatatttttctataggaaaatggagtaacaagttccctatctcccatatttatttgtccatagtaaaatggccacattgatgataatttctagaactagtttctgagattgtcagccctttgtctaaaataatggcagtattaatgattgacttctgtcactgccatagttacctggattgtcagccttggtagcctttgtctaaagtcctaaagagttccaaaaaaaatgtgttgaaatttaattgctaaatagtggttggtgattctttacagtaggaattgtaataattttcttgcaaataagttatttactgctattgatattgaataatttgtcttttattcagatatatttcaaaaagcatgaatatatgattattcataaattgtatactttaccagtaagttttcagaggaaataaagacttttaaatccttnnaaaaaaaaaaaaaaaaaaaaaaaaaaaaaaaaaaaaaaaaaaaaaaaaaaaaaaaaaaaaaaaaaaaaaaaaaaaaaaaaaaaaaaaaaaccccngggggggccccsgccccca

SEQ ID NO: 2025 - DNA, 3302 bp, Homo sapiens
gcggcacgagcgcccacsygtcctgcrgcactggatgctttgtgagttggggattgttgcgtcccatatctggacccagaagggacttccctgctcggctggctctcggtttctctgctttcctccggagaaataacagcgtcttccgcgccgcgcatggagcctcccggccgccgcgagtgtccctttccttcctggcgctttcctgggttgcttctggcggccatggtgttgctgctgtactccttctccgatgcctgtgaggagccaccaacatttgaagctatggagctcattggtaaaccaaaaccctactatgagattggtgaacgagtagattataagtgtaaaaaaggatacttctatatacctcctcttgccacccatactatttgtgatcggaatcatacatggctacctgtctcagatgacgcctgttatagagaaacatgtccatatatacgggatcctttaaatggccaagcagtccctgcaaatgggacttacgagtttggttatcagatgcactttatttgtaatgagggttattacttaattggtgaagaaattctatattgtgaacttaaaggatcagtagcaatttggagcggtaagcccccaatatgtgaaaaggttttgtgtacaccacctccaaaaataaaaaatggaaaacacacctttagtgaagtagaagtatttgagtatcttgatgcagtaacttatagttgtgatcctgcacctggaccagatccattttcacttattggagagagcacgatttattgtggtgacaattcagtgtggagtcgtgctgctccagagtgtaaagtggtcaaatgtcgatttccagtagtcgaaaatggaaaacagatatcaggatttggaaaaaaattttactacaaagcaacagttatgtttgaatgcgataagggtttttacctcgatggcagcgacacaattgtctgtgacagtaacagtacttgggatcccccagttccaaagtgtcttaaagtgtcgacttcttccactacaaaatctccagcgtccagtgcctcaggtcctaggcctacttacaagcctccagtctcaaattatccaggatatcctaaacctgaggaaggaatacttgacagtttggatgtttgggtcattgctgtgattgttattgccatagttgttggagttgcagtaatttgtgttgtcccgtacagatatcttcaaaggaggaagaagaaagggaaagcagatggtggagctgaatatgccacttaccagactaaatcaaccactccagcagagcagagaggctgaatagattccacaacctggtttgccagttcatcttttgactctattaaaatcttcaatagttgttattctgtagtttcactctcatgagtgcaactgtggcttagctaatattgcaatgtggcttgaatgtaggtagcatcctttgatgcttctttgaaacttgtatgaatttgggtatgaacagattgcctgctttcccttaaataacacttagatttattggaccagtcagcacagcatgcctggttgtattaaagcagggatatgctgtattttataaaattggcaaaattagagaaatatagttcacaatgaaattatattttctttgtaaagaaagtggcttgaaatcttttttgttcaaagattaatgccaactcttaagattattctttcaccaactatagaatgtattttatatatcgttcattgtaaaaagcccttaaaaatatgtgtatactactttggctcttgtgcataaaaacaagaacactgaaaattgggaatatgcacaaacttggcttctttaaccaagaatattattggaaaattctctaaaagttaatagggtaaattctctattttttgtaatgtgttcggtgatttcagaaagctagaaagtgtatgtgtggcatttgttttcactttttaaaacatccctaactgatcgaatatatcagtaatttcagaatcagatgcatcctttcataagaagtgagaggactctgacagccataacaggagtgccacttcatggtgcgaagtgaacactgtagtcttgttgttttcccaaagagaactccgtatgttctcttaggttgagtaacccactctgaattctggttacatgtgtttttctctccctccttaaataaagagaggggttaaacatgccctctaaaagtaggtggttttgaagagaataaattcatcagataacctcaagtcacatgagaatcttagtccatttacattgccttggctagtaaaagccatctatgtatatgtcttacctcatctcctaaaaggcagagtacaaagtaagccatgtatctcaggaaggtaacttcattttgtctatttgctgttgattgtaccaagggatggaagaagtaaatatagctcaggtagcactttatactcaggcagatctcagccctctactgagtcccttagccaagcagtttctttcaaagaagccagcaggcgaaaagcagggactgccactgcatttcatatcacactgttaaaagttgtgttttgaaattttatgtttagttgcacaaattgggccaaagaaacattgccttgaggaagatatgattggaaaatcaagagtgtagaagaataaatactgttttactgtccaaagacatgtttatagtgctctgtaaatgttcctttcctttgtagtctctggcaagatgctttaggaagataaaagtttgaggagaacaaacaggaattctgaattaagcacagagttgaagtttatacccgtttcacatgcttttcaagaatgtcgcaattactaagaagcagataatggtgttttttagaaacctaattgaagtatattcaaccaaatactttaatgtataaaataaatattatacaatatacttgtatagcagtttctgcttcacatttgattttttcaaatttaatatttatattagagatctatatatgtataaatatgtattttgtcaaatttgttacttaaatatatagagaccagttttctctggaagtttgtttaaatgacagaagcgtatatgaattcaagaaaatttaagctgcaaaaatgtatttgctataaaatgagaagtctcactgatagaggttctttattgctcattttttaaaaaatggactcttgaaatctgttaaaataaaattgtacatttggaraaaaaaaaaaaaaaaaaaaaaaaaaaaaaaaaaaaaaaaaaaaaaaaaaaaaaaaaaaaaaaaaaaaaaaaaaaaaa

SEQ ID NO: 2026 - DNA, 379 bp, Homo sapiens
  misc_feature (335)..(335): n equals a,t,g, or c
  misc_feature (338)..(338): n equals a,t,g, or c
caggcaggcaggctgagggcattgccaaggactaaaaccagtagagcaacctctggccatgtcacccctgcagtacagctttatggcggtcatccactttgcggggctcaaggccgtgggcgagtcggtgcagaagcctctggattattacagagttaacctgaccgggaccatccagcttctggagatcatgaaggcccacggggtgaagaacctggtgttcagcagctcagccactgtgtacgggaacccccagtaacctgccccttgatgaggcccaccccacggtgtwtgttaccaaccyttamggsaattccaattyttcatcgaggaanganccgggactgtgccaggcagacaagattggaacgcatcttgg

SEQ ID NO: 2027 - DNA, 2056 bp, Homo sapiens
  misc_feature (2038)..(2038): n equals a,t,g, or c
  misc_feature (2054)..(2054): n equals a,t,g, or c
gccttagctttcagtgtagctgggactacaggtgtgaacacagcttggaaatctcttaaccatgggagttaagtctcaaaattctggtgatacaagtggttgaaacttaaaactgtatttaaaaaataggattcgtgaatttgagatagttcataagtctgcaaaaggctgtataaatacatattttacatttactattattaattttgtagtaaatttgagtacagcactctctttatctgtggaaacttcagactctcccctattactttaatttcagtgagacattattaaatataagtgggcttacacatttgttttgctttactgacaaataatacacaacttggaggcttttttttcctttctattcttcctctaaatgttcaacacttttctgattttgtgatttgaggttgtttaatagcttcctgaggctccattgagaccgtatatacgtgacacttaacagtctagccttcctcggtacatatagatatatgatggtggctttgcctgtagtaaattcatgccaaaacataggctttcagtgcctattacatatggctttcagctctctctactgagggatgtaggagtttatttctgaggtctgagcctcttttcctttacttcctttactctttcctaagccttctttataaaaactatgcatgttctattgttttcctttttgattccctttcttttattatccccagtaggagtgacttgtaattctcatatgttagaaaggcagrtctcctggttgaagaaaagatccacccaagcaagtcagcatgtttaataatttttgagggggatctcaaatgtgggaaggattgttatataagacaaccaaatgatgacatgagacaataaatgctataggaattatggaggaataattagctatttattttcttggttagggaagagatattattagttgtagaagtaattactaacttctacattttttattgtggaaatcaaaaatatatatatgaaaataaaatgttataattgacttcagtgtcccataaaccagcttcaacaattaccaaattgtgaccaatctttacacacatgcacaggtgtccctcagtatctgtggggcattggttctaggaccacttatggataccaacatctatggatgctcaagtccctgatataaaatggtggactatttgcatataacctgtgtacatcccgtattatttaaatcatccctagatcacttataatacgtaatacaatgtaaatgccatgtaaataactgttatactgtattaaggaataacaacaagaaaaatgtacatgttcagtacagacgcaattttttttgtgtgtggaatattttcattccaaggtcagttgaacccatggacataggaggctgactgcgtgtgtgtgtgtgtgtgtgtgtgtgtgtgtgtgtgtgtgtgcatacagacacacatatttctgaaatgtaaatattctctttttaaaaaaattattatcacagctaaacaaattaccagtaattcttttatcctcatatacccggtgttcagattttctagattggctcctaatttttttacagattatttgaatctgattcaattcatgtactgtaatgtttgataacttaagtaccctttataggttctcttttacctcttctttattaaattccttgtaatttgttgtactaaatagattgtcttctagaatttcctgtagtctgaattatgtagtattgtttcacatgttccagtgtcctcttatttcctgtgagttggtagttagatctagaagcttgattaaattcagattttctctctttagatcatcaactttagatcatcaacttggatcatttgtttcattttgcttttgatatgttgttttttagaattacctcttaaaattttgatttaattttataatcatgtaaaatgtttataaatttccaaattcagatcagcaaaacacaataaaatctattcagagaaggcaaaaaaaaaaaaaaaaaaaaaaaaaaaanaaaaaaaaaaaaaaanaa

SEQ ID NO: 2028 - DNA, 1891 bp, Homo sapiens
gcttctcagttgtggacgmkcgtaagttttcggcagtttccggggagactcggggactccgcgtctcgctctctgtgttccaatcgcccggtgcggtggtgcagggtctcgggctagtcatggcgtccccgtctcggagactgcagactaaaccagtcattacttgtttcaagagcgttctgctaatctacacttttattttctggatcactggcgttatccttcttgcagttggcatttggggcaaggtgagcctggagaattacttttctcttttaaatgagaaggccaccaatgtccccttcgtgctcattgctactggtaccgtcattattcttttgggcacctttggttgttttgctacctgccgagcttctgcatggatgctaaaactgtatgcaatgtttctgactctcgtttttttggtcgaactggtcgctgccatcgtaggatttgttttcagacatgagattaagaacagctttaagaataattatgagaaggctttgaagcagtataactctacaggagattatagaagccatgcagtagacaagatccaaaatacgttgcattgttgtggtgtcaccgattatagagattggacagatactaattattactcagaaaaaggatttcctaagagttgctgtaaacttgaagattgtactccacagagagatgcagacaaagtaaacaatgaaggttgttttataaaggtgatgaccattatagagtcagaaatgggagtcgttgcaggaatttcctttggagttgcttgcttccaactgattggaatctttctcgcctactgcctctctcgtgccataacaaataaccagtatgagatagtgtaacccaatgtatctgtgggcctattcctctctacctttaaggacatttagggtcccccctgtgaattagaaagttgcttggctggagaactgacaacactacttactgatagaccaaaaaactacaccagtaggttgattcaatcaagatgtatgtagacctaaaactacaccaataggctgattcaatcaagatccgtgctcgcagtgggctgattcaatcaagatgtatgtttgctatgttctaagtccaccttctatcccattcatgttagatcgttgaaaccctgtatccctctgaaacactggaagagctagtaaattgtaaatgaagtaatactgtgttcctcttgactgttatttttcttagtagggggcctttggaaggcactgtgaatttgctattttgatgtagtgttacaagatggaaaattgattcctctgactttgctattgatgtagtgtgatagaaaattcacccctctgaactggctccttcccagtcaaggttatctggtttgattgtataatttgcaccaagaagttaaaatgttttatgactctctgttctgctgacaggcagagagtcacattgtgtaatttaatttcagtcagtcaatagatggcatccctcatcagggttgccagatggtgataacagtgtaaggccttgggtctaaggcatccacgactggaagggactactgatgttctgtgatacatcaggtttcagcacacaacttacatttctttgcctccaaattgaggcatttattatgatgttcatactttccctcttgtttgaaagtttctaattattaaatggtgtcggaattgttgtattttccttaggaattcagtggaacttatcttcattaaatttagctggtaccaggttgatatgacttgtcaatattatggtcaactttaagtcttagttttcgtttgtgcctttgattaataagtataactcttatacaataaatactgctttcctctaaaaaaaaaaaaaaaaaaaaaaaaagtcgtatcgatgt

SEQ ID NO: 2029 - DNA, 3557 bp, Homo sapiens
  misc_feature (36)..(36): n equals a,t,g, or c
  misc_feature (2779)..(2779): n equals a,t,g, or c
  misc_feature (3522)..(3523): n equals a,t,g, or c
  misc_feature (3557)..(3557): n equals a,t,g, or c
tatgcccgacccgtctacctttagaacactttgctnatccaagatggggagaatccagttcaaatctctttgkactaattttatcatattgtactttaagatcactggtatctaacccctctacattaaggccaaactgaagggcatctcccagctgcagtaagaactcagatgatgagtgaagaattctggggttgggggagtgcaatataagcaagctaacctgtttcaatgaaacagatgatcaatgaagacactgcatcatttgtttccaaaagttaggccttgcagccaaggctttggctttttagagaaaattagctctaaagaccagggcacctaggcaacctagcagagaagaagtttcatgaagtcagagcccaggtgtttgggtgagggtagggagttggggcaaagcaacactgggcttctaaaaaagaaatgtctcccctgagatgaatgacttgttggcacaagtttcaggaaagacaaagctctaaaaatatcattgtaaaattaataatacttctccaaagtaaggactcaactcaaactatccttggatgcaattaaaatggccttggaagaagctttcaggtgcggaggtactcaccagtgtcctgccagcaccttcatctctgaagaagtcatcggagggagccactaccttgattttatgaccacagatgagtttcctttaatccgaaagagattgacttttggcatttttttcttagtttttgtttatttatattcttttaagctttaaaaaaaagtgtcattgctgtgcttcttattcctctggctgactttagaattgaggactgggaatcctgaaaatttgcaaagttatctactatcctcactgccttggaacacccattattccactctgtctaatttctactcatgtttcaagtctaaacaggaagattcctctgtgatcatgcctctccctttctcatgaattaaatgcatatattatgctagtaatgcttctggaatgaatgaataatagaaagaaagaaagtggggggagggaagcagggaaagtaaaatgagaaaggcagccttatctggaaggagctcccaaaagtgtatctcttaacacctatcagaaaaaaaagggccaacaaatatccaggcaacgaaggtatggaccagtaggaagaatctgagggaattacattttggaaaaagcattgctctcccaagattcccttttaaaaatttaaataaaccttgagagtagtgatgcataaatgaatttgatctgtcacagtcccgcctttggaagagggcctcagagcttatgaaagaccctaagtgggggtgggagaagacaaaaggggtgggatgtcagtttcaagtttccagggcattctctgattgtgctctatgtccctgcagactgccagtgtgacctcaccctctccagtcacccctcctcagttccagctatgagttcctgcaacttcacacatgccacctttgtgcttattggtatcccaggattagagaaagcccatttctgggttggcttccccctcctttccatgtatgtagtggcaatgtttggaaactgcatcgtggtcttcatcgtaaggacggaacgcagcctgcacgctccgatgtacctctttctctgcatgcttgcagccattgacctggccttatccacatccaccatgcctaagatccttgcccttttctggtttgattcccgagagattagctttgaggcctgtcttacccagatgttctttattcatgccctctcagccattgaatccaccatcctgctggccatggcctttgaccgttatgtggccatctgccacccactgcgccatgctgcagtgctcaacaatacagtaacagcccagattggcatcgtggctgtggtccgcggatccctcttttttttcccactgcctctgctgatcaagcggctggccttctgccactccaatgtcctctcgcactcctattgtgtccaccaggatgtaatgaagttggcctatgcagacactttgcccaatgtggtatatggtcttactgccattctgctggtcatgggcgtggacgtaatgttcatctccttgtcctattttctgataatacgaacggttctgcaactgccttccaagtcagagcgggccaaggcctttggaacctgtgtgtcacacattggtgtggtactcgccttctatgtgccacttattggcctctcagttgtacaccgctttggaaacagccttcatcccattgtgcgtgttgtcatgggtgacatctacctgctgctgcctcctgtcatcaatcccatcatctatggtgccaaaaccaaacagatcagaacacgggtgctggctatgttcaagatcagctgtgacaaggacttgcaggctgtgggaggcaagtgacccttaacactacacttctccttatctttattggcttgataaacataattatttctaacactagcttatttccagttgcccataagcacatcagtacttttctctggctggaatagtaaactaaagtatggtacatctacctaaaggactattatgtggaataatacatactaatgaagtattacatgatttaaagactacaataaaaccaaacatgcttataacattaagaaaaacaataaagatacatgattgaaaccaagttgaaaaatagcatatgccttggaggaaatgtgctcaaattactaatgatttagtgttgtccctactttctctctcttttttctttctttttnttttattatggttagctgtctcaaagcataaaatggaataacatatcaaatgaaacaggggaaaatgaagctgacaatttatggaagccagggcttgtcacagkctctactgttattatgcattacctgggaatttatataagcccttaataataatgccaatgaacatctcatgtgtgctcacaatgttctggcactattataagtgcttcacaggttttatgtgttcttcgtaactttatggagtaggtaccatttgtgtctctttattataagtgrgagaaatgaagtttatattatcaaggggactaaagtcacacggcttgtgggcactgtgccaagatttaaaattaaatttgatggttgaatacagttacttaatgaccatgttatattgcttcctgtgtaacatctgccatttatttcctcagctgtacaaatcctctgttttctctctgttacacactaacatcaatggctttgtacttgtgatgagagataaccttgccctagttgtgggcaacacatgcagaataatcctgttttacagctgcctttcgtgatcttattgcttgcttttttccagattcagggagaatgttgttgtctatttgtctcttacatctccttgatcatgtcttcattttttaatgtgctctgtacctgtcaaaaattttgaatgtacaccacatgctattgtctgaacttgagtataagataaaataaaattttattttaaattnnaaaaaaaaaaaaaaaaaaaaaaaaaaaactcgan

SEQ ID NO: 2030 - DNA, 1599 bp, Homo sapiens
  misc_feature (376)..(377): n equals a,t,g, or c
gggcgcgggaaggtgcgggttgttggctgaggcaagccgtggctcgggcgacgcggggccaggagggcaggaccgtctgccggcgacagcccataccgtctgccgttgcgcgacacgaaccaccctccgatccgccatccccgcgtcgtcgccgctagtccgcccgcccgccctcgggccccccgctgccgagcccgacctcctaagagctgaaagaaattattgagagtcatagtccatagccccctgcttcgtcccccaaccctcaacgacgaaaaggacttcggtcccctggcccggcgacgcccgggaaggaaaggagagcgacctccgccccgcgctcaggccaccctggagggagaagccgccccgcgcnngsgttagagcgccccgccgccccgtagacccgaagccgcctggagcccaaggctgtacacgtgccctgtgctgattctctgcctaggaaaggaccatgcagctagagatcaaagtggccctgaacttcatccatctcctacttgtacaacaagctgccccggcgccgggcagacctgtttggggaggagctagagcggcttttgaaaargaaatatgaaggccactggtaccctgagaagccactgaaaggctctggcttccgctgtgttcacattggggagatggtggaccccgtggtggagctggccgccaagcggagtggcctggcggtggaagatgtgcgggccaatgtgcctgaggagctgagtgtctggattgatccctttgaggtgtcctaccagattggtgagaagggagctgtgaaagtgctgtacctggatgacagtgagggttgcggtgccccagagctggacaaggagatcaagagcagcttcaaccctgacgcccaggtgttcgtgcccattggcagccaggacagctccctgtccaactccccatcgccatcctttggccagtcacccagccctaccttcattccccgctccgctcagcccatcaccttcaccaccgcctccttcgctgccaccaaatttggctccactaagatgaagaaggggggcggggcagcaagtggtgggggtgtagccagcagtggggcgggtggccagcagccaccacagcagcctcgcatggcccgctcacccaccaacagcctgctgaagcacaagagcctctctctgtctatgcattcactgaacttcatcacggccaacccggcccctcagtcccagctctcacccaatgccaaggagttcgtgtacaacggtggtggctcacccagcctcttctttgatgcggccgatggccagggcagcggcaccccaggcccgtttggaggcagtggggctggcacctgcaacagcagcagctttgacatggcccaggtatttggaggtggtgccaacagcctcttcctggagaagacaccctttgtggaaggcctcagctacaacctgaacaccatgcagtatcccagccagcagttccagcccgtggtgctggccaactgaccatctacctgcccgtggggccaggagcacccaagaccacagaaaagagaaaggaaaggccaaaaaaaaaaaaaaaaaactcgagactagt

SEQ ID NO: 2031 - DNA, 2593 bp, Homo sapiens
  misc_feature (2348)..(2348): n equals a,t,g, or c
ggccactccatctgagggtggctgcgtgtccacataygaggggacagggctgaggatgaggagaaccctggggacccagaagaccgtgccttgcccggaagtcctgcctgtaggcctgaaggacttgccctaacagagcctcaacaactacctggtgattcctacttcagccccttggtgtgagcagcttctcaacatgaactacagcctccacytggccttcgtgtgtctgagtctcttcactgaraggatgtgcatccaggggagtcagttcaacgtcgaggtcggcagaagtgacaagctttccctgcctggctttgagaacctcacagcaggatataacaaatttctcaggcccaattttggtggagaacccgtacagatagcgctgactctggacattgcaagtatctctagcatttcagagagtaacatggactacacagccaccatatacctccgacagcgctggatggaccagcggctggtgtttgaaggcaacaagagcttcactctggatgcccgcctcgtggagttcctctgggtgccagatacttacattgtggagtccaagaagtccttcctccatgaagtcactgtgggaaacaggctcatccgcctcttctccaatggcacggtcctgtatgccctcagaatcacgacaactgttgcatgtaacatggatctgtctaaataccccatggacacacagacatgcaagttgcagctggaaagctggggctatgatggaaatgatgtggagttcacctggctgagagggaacgactctgtgcgtggactggaacacctgcggcttgctcagtacaccatagagcggtatttcaccttagtcaccagatcgcagcaggagacaggaaattacactagattggtcttacagtttgagcttcggaggaatgttctgtatttcattttggaaacctacgttccttccactttcctggtggtgttgtcctgggtttcattttggatctctctcgattcagtccctgcaagaacctgcattggrgtgacraccgtgttatcaatgaccacactgatgatcgggtcccgcacttctcttcccaacaccaactgcttcatcaaggccatcgatgtgtacctggggatctgctttagctttgtgtttggggccttgctagaatatgcagttgctcactacagttccttacagcagatggcagccaaagatagggggacaacaaaggaagtagaagaagtcagtattactaatatcatcaacagctccatctccagctttaaacggaagatcagctttgccagcattgaaatttccagcgacaacgttgactacagtgacttgacaatgaaaaccagcgacaagttcaagtttgtcttccgagaaaagatgggcaggattgttgattatttcacaattcaaaaccccagtaatgttgatcactattccaaactactgtttcctttgatttttatgctagccaatgtattttactgggcatactacatgtatttttgagtcaatgttaaatttcttgcatgccataggtcttcaacaggacaagataatgatgtaaatggtattttaggccaagtgtgcacccacatccaatggtgctacaagtgactgaaataatatttgagtctttctgctcaaagaatgaagctccaaccattgttctaagctgtgtagaagtcctagcattataggatcttgtaatagaaacatcagtccattcctctttcatcttaatcaaggacattcccatggagcccaagattacaaatgtactcagggctgtttattcggtggctccctggtttgcatttacctcatataaagaatgggaaggagaccattgggtaaccctcaagtgtcagaagttgtttctaaagtaactatacatgttttttactaaatctctgcagtgcttataaaatacattgktgcctatttagggagtaacattttctagtttttgtttctggttaaaatgaaatatgggcttatgtcaattcattggaagtcaatgcactaactcaataccaagatgagtttttaaataatgaatattatttaataccacaacagaattatccccaatttccaataagtcctatcattgaaaattcaaatataagtgaagaaaaaattagtagatcaacaatctaaacaaatccctcggttctaagatacaatggattccccatactggaaggactctgaggctttattcccccactatgcatatcttatcattttattattatacacacatccatcctaaactatactaaagcccttttcccatgcatggatggaaatggaagatttttttttaacttgntctagaagtcttaatatgggctgttgccatgaaggcttgcagaattgagtccattttctarctgcctttattcacayagtgayggggtactaaaagtactgggttgactcrragagtygctgtcattctgtcattgctgctactctaacactgagcarcactctcccagtggcagatcccctgkatcattccargaggagcattcatccctttggtctaatgrtcagggaatgratgsttattat

SEQ ID NO: 2032 - DNA, 1688 bp, Homo sapiens
  misc_feature (168)..(168): n equals a,t,g, or c
  misc_feature (235)..(235): n equals a,t,g, or c
  misc_feature (802)..(802): n equals a,t,g, or c
tgccggctggagtccggagtccctggcctactggccgraccgttccgacaccgaggtgcctcctctggacctgggctggacggacactggtttctaccgcggcgtgagccsggtcacgctcttcacccacccgcccaaggacgagaaggcgccgcacctcaagcaggnggtcaggcagatgatccaacaggcccagaaggtcattgctgtggtcatggacctcttcactgatggngatatctttcaagacattgtggatgctgcctgtaagcgccgggtcccagtgtacatcatcctggacgaggcaggagtgaagtatttcctggagatgtgtcaggacctgcagctcactgacttccggattcggaacatccgtgtccgctctgtgacaggcgtcggcttctacatgcccatggggaggatcaaggggaccctgtcatcaaggttcctgatggtggacggtgacaaagtggccactggatcttacaggttcacctggagttcctcccatgtggacagaaacctcctcctgctcctgacaggacagaacgtagagccctttgacacggagttccgggagctgtacgccatctccgaggaggtggacttgtaccggcagctgagcctggcgggcagggttggcctccattactcctccactgtggctcgaaagcttatcaaccccaagtacgccttggtgtcaggctgccgccacccgcctggggagatgatkcgctgggctgcccggcaacagcgggaggcgggcggcaacccggaggggcaggaggagggcgccagcggnggcgagtcggcctggcgcctggagagcttcctgaaagacctggttacggtggagcaggtgctgccccccgtggagcccatccccttgggagagctgagccagaaggatggcaggatggtctctcacatgcacagagacctgaagcccaaatcccgagaggcacccagccgaaayggcatgggagaagcggcccggggggaggccgcccccgccgggcgcttcagcagcaggctcttcagtcgccgagccaagaggcctgcggcgcccaatggcatggccagctctgtctccaccgagacctctgaagtggagtttctgacggggaagaggcccaacgagaattccagtgctgacatctcaggtaaaacaagtcccagttctgccaagcctagcaactgtgtgatttcctgagctgcgggatggtggtgggcaggacgtgtggatgcctgcctgccctgccctgtgctgtggagagcgcaggtcgcacactgcaccagtttgcacatcagacgccaactggccttctgccctgcagcctccgtcctggcctcagggacgctggatcccaaatgagagggtccgaagcatctcagtcacacgcctccaccggactgtcggtggctgggcaggggtcagtgccacggcctccttgtttacatgaagtggaagcttgaccagtgtctgctcgcctttgtgccccaccccctccgctgattgccagatggggtgagggcccattctttaaacctttatggggtggggtgtctggggcagctgcagtggcttctcctttcccaggcttcctggtgcttctgattccccacgccactccccacccaagagattggtggaataaaagggaagagggcagggccctgagactgga

SEQ ID NO: 2033 - DNA, 2543 bp, Homo sapiens
  misc_feature (7)..(7): n equals a,t,g, or c
  misc_feature (10)..(10): n equals a,t,g, or c
  misc_feature (15)..(15): n equals a,t,g, or c
  misc_feature (19)..(19): n equals a,t,g, or c
gacagtnacngtacnggantcccggtcgacccacgcgtccgggctcttctggcgccaaaatgtcgttcgtggcaggggttattcggcggctggacgagacagtggtgaaccgcatcgcggcgggggaagttatccagcggccagctaatgctatcaaagagatgattgagaactgtttagatgcaaaatccacaagtattcaagtgattgttaaagagggaggcctgaagttgattcagatccaagacaatggcaccgggatcaggaaagaagatctggatattgtatgtgaaaggttcactactagtaaactgcagtcctttgaggatttagccagtatttctacctatggctttcgaggtgaggctttggccagcataagccatgtggctcatgttactattacaacgaaaacagctgatggaaagtgtgcatacagagcaagttactcagatggaaaactgaaagcccctcctaaaccatgtgctggcaatcaagggacccagatcacggtggaggaccttttttacaacatagccacgaggagaaaagctttaaaaaatccaagtgaagaatatgggaaaattttggaagttgttggcaggtattcagtacacaatgcaggcattagtttctcagttaaaaaacaaggagagacagtagctgatgttaggacactacccaatgcctcaaccgtggacaatattcgctccatctttggaaatgctgttagtcgagaactgatagaaattggatgtgaggataaaaccctagccttcaaaatgaatggttacatatccaatgcaaactactcagtgaagaagtgcatcttcttactcttcatcaaccatcgtctggtagaatcaacttccttgagaaaagccatagaaacagtgtatgcagcctatttgcccaaaaacacacacccattcctgtacctcagtttagaaatcagtccccagaatgtggatgttaatgtgcaccccacaaagcatgaagttcacttcctgcacgaggagagcatcctggagcgggtgcagcagcacatcgagagcaagctcctgggctccaattcctccaggatgtacttcacccagactttgctaccaggacttgctggcccctctggggagatggttaaatccacaacaagtctgacctcgtcttctacttctggaagtagtgataaggtctatgcccaccagatggttcgtacagattcccgggaacagaagcttgatgcatttctgcagcctctgagcaaacccctgtccagtcagccccaggccattgtcacagaggataagacagatatttctagtggcagggctaggcagcaagatgaggagatgcttgaactcccagcccctgctgaagtggctgccaaaaatcagagcttggagggggatacaacaaaggggacttcagaaatgtcagagaagagaggacctacttccagcaaccccagaaagagacatcgggaagattctgatgtggaaatggtggaagatgattcccgaaaggaaatgactgcagcttgtaccccccggagaaggatcattaacctcactagtgttttgagtctccaggaagaaattaatgagcagggacatgaggttctccgggagatgttgcataaccactccttcgtgggctgtgtgaatcctcagtgggccttggcacagcatcaaaccaagttataccttctcaacaccaccaagcttagtgaagaactgttctaccagatactcatttatgattttgccaattttggtgttctcaggttatcggagccagcaccgctctttgaccttgccatgcttgccttagatagtccagagagtggctggacagaggaagatggtcccaaagaaggacttgctgaatacattgttgagtttctgaagaagaaggctgagatgcttgcagactatttctctttggaaattgatgaggaagggaacctgattggattaccccttctgattgacaactatgtgccccctttggagggactgcctatcttcattcttcgactagccactgaggtgaattgggacgaagaaaaggaatgttttgaaagcctcagtaaagaatgcgctatgttctattccatccggaagcagtacatatctgaggagtcgaccctctcaggccagcagagtgaagtgcctggctccattccaaactcctggaagtggactgtggaacacattgtctataaagccttgcgctcacacattctgcctcctaaacatttcacagaagatggaaatatcctgcagcttgctaacctgcctgatctatacaaagtctttgagaggtgttaaatatggttatttatgcactgtgggatgtgttcttctttctctgtattccgatacaaagtgttgtatcaaagtgtgatatacaaagtgtaccaacataagtgttggtagcacttaagacttatacttgccttctgatagtattcctttatacacagtggattgattataaataaatagatgtgtcttaacataaaaaaaaaaaaaaaaaaaaaa

SEQ ID NO: 2034 - DNA, 504 bp, Homo sapiens
  misc_feature (419)..(419): n equals a,t,g, or c
  misc_feature (447)..(447): n equals a,t,g, or c
  misc_feature (494)..(494): n equals a,t,g, or c
ggcacagcttgtttttccaagcagctgtttggctttccraagcccactttctgtctttaaraggtttaaagaractaccagaccattttccaatgaatgtcttggtaccaccagacccgtagttcctattgattcatcagattttgcattggatattcgcatgcctggggttacacctaaacagtccgatacatacttctgcatgtctatgcgaataccagtggatgaggaagccttcgtgattgacttcaagcctcgagccagcatggatactgtccatcacatgttactttttggatgcaatatgccttcatccactggaakttactggttttgtgatgaaggaacctgtacagataaagccaatgattctgtatgcctgggcgagaaatgcttccccctacccgggctccccaaanggtgttgggattcagagttgggaggagnagactgggaagtaaatacttggtactacaggtgacactaagggggantattaatggc

SEQ ID NO: 2035 - DNA, 780 bp, Homo sapiens
  misc_feature (167)..(167): n equals a,t,g, or c
  misc_feature (170)..(170): n equals a,t,g, or c
  misc_feature (180)..(180): n equals a,t,g, or c
  misc_feature (752)..(752): n equals a,t,g, or c
  misc_feature (778)..(778): n equals a,t,g, or c
gactcctatagggaaagctggtacgcctgcaggtaccggtccggaattcccgggtcgacccacgcgtccggcaaaggattctattcttaccagtcactgcacgagtggttcagggacacggatgcggagtttgttgatatcgatggaaaatcgcatctcatcctgtncanccgctcccangtccccatcatcctccagtggaataaaagctctaagaagtttgtcccccatggtgacatccccaacatggaggacgtactggctgtgaagagcttccgaatgcaaaataccctctacctttcccttacccgcttcatcggggactcccgggtcatgaggtggaacagtaagcagtttgtggagatccaagctcttccatcccggggggccatgaccctgcagcccttttcttttaaagataatcactacctggccctggggagtgactatacattctctcagatataccagtgggataaagagaagcagctattcaaaaagtttaaggagatttacgtgcaggcgcctcgttcattcacagctgtctccaccgacaggagagatttcttttttgcatccagtttcaaagggaaaacaaagatttttgaacatataattgttgacttaagtttgtgaaggtgtggtgggtgaaactaagagaaatgtagcattagctctacaaaagaggaccaagaaaaatcaacaaacaaatcaaagccaggctcagagctctgaaattaaaaagcactganatagttagatggtttcaaacttttancc

SEQ ID NO: 2036 - DNA, 2521 bp, Homo sapiens
  misc_feature (133)..(133): n equals a,t,g, or c
gcttgggaaggccgcgttgcatggccaggagcagcagtctgggccgcgagtgcgggacaccgaggtcaggtctcggaaagggaggacctcctcgtccccaggggccccaggccaggtgcacccttggccgcangtgcacggtctccggaaagtgcaggcgcccacgtcccagctggaccatggcgcctccgcggaacgtggtgaagattgccatccagatgcgtgacgccatcccgcagctcatccagctggaccaggcgaagccctggccgctgtgctgaaggaggtgtgcgacgcgtggagcctgacgcactctgagcgttacgccctgcagtttgcggatgggcaccggagatacatcaccgagaataaccgcgcggagatcaagaatggcagcatcctgtgcctcagcacggccccagaccttgaggctgagcagctcttgggtgggctgcagagtaacagtcctgaagggcgccgggaagccctgargcgccttgttccgctggcctcggacatgatctttgccagggaggtcatcagccgtaatgggctccagatactaggcaccatcattgaagatggggackacctaggagaggtgctggccctcagcctgagggccttctcagagctcatggagcacggcgtggtgtcctgggagactctgagcatcccctttgtgaggaaggtggtgtgctacgtgaacatgaacctcatggatgcctccgtgcctcccctggcccttgggctgctggagagtgtgaccttgagcagcccagccctgggccagctggtcaagagcgaggtgcccctggataggctgctggtgcacctacaggtgatgaaccagcagctgcaaaccaaggccatggccctgctgacagccttgctgcagggggccagccctgtggaacgcaagcacatgcttgactatctttggcagaggaaccttcgccagttcatctataagaacatcatccacagtgcagcaccaatgggcgacgagatggctcatcacctgtacgtactgcaggctctcatgctggggctgctggagccgcgcatgcggacgcccctggacccctacagccaggagcagcgggagcagctgcaggtcctacgccaggctgccttcgaggtggagggggagtcctcgggtgccgggctaagtgctgaccgtcgccgttccctctgtgcccgagagttccgcaaactgggcttttctaacagcaacccagcacaggacctggagcgcgtgccccccggtctgctggccctggacaacatgttgtacttctccagaaacgcgcccagcgcgtacagccggtttgtgttggagaacagcagccgcgaggacaagcacgagtgcccctttgcccggggcagcatccagctgacggtgctgctgtgtgagctgctccgtgttggggagccctgctctgagacagcccaggacttctcacccatgttcttcggccaagaccagagcttccacgagctcttctgtgtgggcatccagctgttgaataagacctggaaggagatgcgggctacacaggaggacttcgacaaggtcatgcaggtggtgcgggagcagctggcccgcactctggccctgaagcccacttccctggagctcttccgaaccaaggtgaatgcgctcacttatggggaggtgctgcggctgcggcagactgaacggctgcaccaggagggcacactggctccccctatactggagctgcgggagaagctgaagccagagctcatgggcctgatccgccagcagcgcttgctccgcctctgtgaggggacgctcttccgcaagatcagcagccggcggcgccaggataagctgtggttctgctgcctgtcccccaaccacaagctgctgcagtacggagacatggaggagggcgccagcccgcctaccctggagagtctgcccgagcaactccctgtggccgacatgagggcactcctgacaggcaaggactgcccccatgtccgggagaagggctccgggaagcagaacaaggacctctatgagttggccttctcaatcagctatgaccgtggggaggaggaagcgtacctcaacttcattgccccctccaagcgggagttctacctgtggacagatgggctcagtgccttgctgggcagtcccatgggcagcgagcagacacggctggacctggagcagctgctgaccatggagaccaagctgcgtctgctggagctggagaacgtgcccatccccgagcggccaccccctgtgcccccaccccccaccaacttcaacttctgctatgactgcagcatcgctgaaccttgacagtgtggctggccatgggccacagctgcggccactgcagcagccatgaagggcagtgggtagaggagtgcaggcaccctgaccagcagagattgctgcagaaataaagtctgcttggctcttgggatatgttgagccagctctgtaaaaaaaaaaaaaaaaaaaaaaaaaaagtcgtat

SEQ ID NO: 2037 - DNA, 2357 bp, Homo sapiens
  misc_feature (2332)..(2332): n equals a,t,g, or c
tctccctttgctgcagsytgagatgtgtataagagacagctatagaaggtacgcctgcaggtaccggtccggaattcccgggtcgacccacgcgtccgcccacgcgtccgcggacgcgtgggctgtgactgaaatcattttcccatatgagcagaccctgtgtgtcaggcctgtttcccatatgagcagagcctgtgtgcaagtctgtttctggcatgtccctcattgaggaagggaagcaaaagctggttattgccaggcctattaacacttaatatgcaaattctatcatcctgaaactggggcatctgaggaaaaggtgaccttgctggatggctttatttgcatggctctgcctgtctgcagtggttgagtcctcatcacctggtatgtgtatgagcaaatgtgtgctgatcgtgatgcccaggcagaaacctcttgaagactgctgcaggcatgctttaaaaatgaccagtcactcatcagagaagctgggtgatctgactccagagggactgaagtcagagaagtcacaagagcacctaggattcaaataaatagcgtcagagtcctatagcaacctccaagtagcaccgtcttacttggctcttgtgagcaaagactgcagtaccttaaattaaggcctctctttaaaacatatgtggaagactaggggatccttggccacctggtctcagagaaatcatatgagagtaacaggcatttccttattgtatttgtactacactcttcctacttttccattcctgaacaccctctaattaccactgttttggggatgctttttttctgaaagaacggggagtacaggggccaaaagggaggtgcttctattacagggcaagttagatcagataagaagatctagcagtgatttaaactccaggaatatgaagagtgcattctggtgtccagacagttgtgaagggctcggcaaatataagagcaccattggctacatggagagcaaaggctgtctttgaagaccccagggaggtcttcacttttgcctaaattcagatttgccgtgaaaattccaaagagagcagatatttggatttgccctcctttgggcatctacctgactgttgtgtgtgtgggaaagtcagtgtgtatgtgtagagtgtgcttaggagtgagtgagtggtcaggcctcctggctaggtgtgttgtccatagttttgttgttgttgttgttgttgttcagagttttgaatcttacgttttctagagctgctcatgttttcccttcctttttgtcgttgtagtatttgacagttgtcttttccatcaaaaacatactggccctaggctggttagagcaaggggttatgcctgttaggcagcatcttacgcccagtgttctcccagatattctgcctaacaggtttaagtaggagattaaatagtcagtttatctaaaccctctatttttccaaactagcttgagaggtcttttcatctatttttactccatgggcctctgatatgctgagatgtgrcacggttatgattatggtatcaccgttacagaggcaaagggataaaggtctaccagggccaacgtaaccagaatgtgaggagagtgaagagtcggtctccgctttgcacagtaccagaatgtgaggttgccactggagagtggagagtcggtctccactttgcacagttggagctgttctcctctaactcctttgctgggttttctgtttgaaattggcccctactcctctccagccctttactgggttttctgtttgaaattggcccctactcctctccagccctttattgggttttctgtttgaaattggcccctactcctctccagtgtctgctttttgaatccttctgttcgtgtgtgtgtgtgtgtgtgtgtgtgttccctatgatactggcagtggcaataattttccacccagagagaagcttgtggtccacaatgctcgaagaatgaatttccaagtatttgccagtggaaacggagcagaggctatgacaagagtgatttagtgttgcactttcagagcaattatctactgcagtaataaattgaaaatatcagcaagaaaaaaaaaaaaaaaaaaaaaaaaaaaaaaaaaaaaaaaaaaaaaaaaaaaaaaaaaaaaagggcggccgctctagaggatccctcgaggggcccaagcttacgcgtgcatgcgacgtcatagctctctccctatagtgagtcgtattataagctaggcactggccgtcgttttacaacgtcgtgactgggagatctgctagcttgggatctttgtgaaggaaccttacttctgtggctgtntcttatacacatctcaacctgcagg

SEQ ID NO: 2038 - DNA, 1783 bp, Homo sapiens
  misc_feature (27)..(27): n equals a,t,g, or c
  misc_feature (94)..(95): n equals a,t,g, or c
  misc_feature (97)..(97): n equals a,t,g, or c
  misc_feature (1576)..(1576): n equals a,t,g, or c
  misc_feature (1692)..(1692): n equals a,t,g, or c
  misc_feature (1694)..(1694): n equals a,t,g, or c
  misc_feature (1733)..(1733): n equals a,t,g, or c
  misc_feature (1747)..(1747): n equals a,t,g, or c
  misc_feature (1772)..(1772): n equals a,t,g, or c
ggtctctgggcaaaacttccctgcttnatcttttctttctgtagatcaaaggttggcaaactttttttgttttgggccagttaataaatatttnngnttgtggggcttcatacagactctgttgcaacgacttaactctgcagttctaatgcaaaagagccatacaaaaacaatagttgtgtctgtgttccaatgaatctgtacttataaaaaagggcagggaatggatttggcccatggaccatagttttcccatgtcagctctagacttctgcagatggctccaattacatgtattccatcacagcagactccaggtggcgctgtcagtcctcaagttcacatcacctagtaaatttagtacttgtaactaactagctctcttccaattccagattcctagggaaaggacttcagttgtgtcaggtgtcactatccaactgtgttgccttaagggcggaaatgtgtggctagcagccctctcagcaggggctgtgggtagtctctcctgagaagaaggagcaaagggtatgggtgatgggcaactcttaaagaaaaaaggtatggggatgggctgggtatgtgccccagggttccccatagatccaggaagatcacctgtttattctgcttttatttcttataatctgtatttttttatgttgaggaacttatttttaacaattaatttgagtatgaactctaataaaaagctgactgtaatgcatagtttaaagtttaaaccttgccgagcaataacaatctctagatgtctgttgtttcactctaatacttactgtggaattacacctgagttgttttccttcttttttatgagcctaggagatcagccataacctaggagtttgctacatatacctgaagcagttcaacaaggcacaagaccagttgcacaatgccctgaatcttaataggcacgatctgacttatataatgctggggaagatccacttgctggagggagacttggacaaggccattgaagtctacaagaaagcagtggagttctcaccagaaaatacagagcttcttacaactttaggattactctacttacagctcggcatttaccagaaggcatttgaacatcttggcaatgcactgacttatgaccctaccaactacaaggccatcttggcagcaggcagcatgatgcagacccacggggactttgatgttgccctcaccaaatacagagttgtggcttgtgctgttccagaaagtcctccactctggaataacattggaatgtgtttctttggcaagaagaaatatgtggcggccatcagctgcctgaaacgagccaactacttggcacccttcgattggaagattctgtataatttgggccttgtccatttgaccatgcagcagtatgcatcagcttttcattttctcagtgcggccatcaacttccagccaaagatgggggagctctacatgctcttggcagtggctctgaccaatctggaagatacagaaaatgccaagagagcctacgcagaagcagtccacctggataagtatgcactttgttgagaatggtactggcggnggttggactcttcaaagccatgaggtggtgccatacatagcattggtgctggctgtgtcagcccagctggtcctctatggcattagtacatagcagacctcagtgtggagggatgngnctcctaagtatgtggtggcttagcaggaaattgacactntgagaaaatggttncaggcctaaactgagtaatcaggangctagagaatg

SEQ ID NO: 2039 - DNA, 4331 bp, Homo sapiens
ttacgccaagctcggaaattaaccctcactaaagggaacaaaagctggagctccaccgcggtggcggccgctctagaactagtggatcccccgggctgcaggaattcggcacgagcaacgatgccgcaagcatggaatctttatatgatctctgggagttctatctaccctatttatattcctgtatatcattgatgggatgtttgttacttctcttgtgtacaccagttggcctttctcgtatgttcacagtgatgggtcacttgctagtgaagccaacaattcttgaagacctggatgaacaaatttatatcattaccttagaggaagaagcactccagagacgactaaatgggctgtcttcatcggtggaatacaacataatggagttggaacaagaacttgaaaatgtaaagactcttaagacaaaattagagaggcgaaaaaaggcttcagcatgggaaagaaatttggtgtatcccgctgttatggttctccttcttattgagacatccatctcggtcctcttggtggcttgtaatattctttgcctattggttgatgaaacagcaatgccaaaaggaacaagggggcctggaataggaaatgcctctctttctacgtttggttttgtgggagctgcgcttgaaatcattttgattttctatcttatggtgtcctctgttgtcggcttctatagccttcgattttttggaaactttactcccaagaaagatgacacaactatgacaaagatcattggaaattgtgtgtccatcttggttttgagctctgctctgcctgtgatgtcgagaacactgggaatcactagatttgatctacttggcgactttggaaggtttaattggctgggaaatttctatattgtattatcctacaatttgctttttgctattgtgacaacattgtgtctggtccgaaaattcacctctgcagttcgagaagaacttttcaaggccctagggcttcataaacttcacttaccaaatacttcaagggattcagaaacagccaagccttctgtaaatgggcatcagaaagcactgtgagacgcacagacggcgtcttctgccaccaagagacccgagaactccagattcacgacattcctgtcccatgtagaagcatttccattcaaccgtggcccctcttcagaacctagacctatcagtgccatttttttttcataatctacgaagaacttggctatggctgatcttttttaaatttaactttctgatggaccctgtagtttccagttaagtgcagattccttacagacatatagaacaagcgcattcttctgtagacatttgctcatgttggtaaatacaatcacccatatgaaaaaattgttttcacctgatatggaaaatgttagaaaaggcaaactccgggacttctaaagatttacttaaatcccattatgtactctattcagaatgtagaagctgacttgaaaggcatccttggtactaagtgaagcttattcagaaaatgcatttttcaaatgcaatggcaactgcttgtagatatcatttttgcagtgtatgttggagctgtaatggttgcaattatgtttcttatttccttaaaagcaaaaagcgtagtttctgatttatgttatagaatgatactgattagactttgagccaaggggaaaatactaaattcttttaaacctggagccttagagagccacaggaatatcttctgttgtacagtctaataagctgtggtaggaagtatcatgtaatcacagtttaatgacagtttatgtatatatataattcagtattccctcgagggggggcccggtacccaattcgccctatagtgagtcgtattattaccttataggctatatgtatactcagttttttaaagcatttttttcagagatcacttaattccccatgcttctgcaatgcccataaaaactataaatgccgaatggtagaaactcctctttccgcttagaggtcccgcgaggggcccaattgcgtatgcgacgtcatagctcctgcttatagtagtctattataagcaagttcacagcatcagcattccatgggtggttaagaacagttttggcaagttattaacaccgaatctgaataatccattcagttatttaaagttggtaaattaattaattggggatggtttcttggctttaagtccactgaataaaaactatgaaattgcactctgtgtcaaccatccactaaggatagaaataccgaaatctgtgcatgcaaaaataggagatgggcccatttgcacacaattcgtagttatgcagtctgctatataaatatgttcacatgcactgtgtgtatgaaaatagatggtctgtgttcagacaaaagtaaaacatttttttcaaattgttacatttaaaggttttctgggagaaatttatgaaacgcaggctgtgtctatttgacatcagaaatttccactttaaaccaaaataataagaaactttaatctgtatatttacaacctttgttgagtacacttcccccttatttatacgtctgcatttccttccgagcttcacatctttacttaaaatgcagcttggttttaaaattaaaaggaacattcattttgtggattctaaacaagcttcagtaaataccaccagtatagtactggtgaatttctcagcataaaatcgacatacctaaaaagttaataaaattcagctcttttccaatttcattgttatgcctattgaagtattaattgccaggtttgatttttagtgaagcttggagtccatactttgagcagaccaagtgaaagggaagaacagaaagaaactcaggagtagagtaatatcacttctcacttacaccacttttcaggcacatccaaagagttcctagatacttggaaaatgtctgaaaatttttaagtaaaatactaaacttttcagtgtttagctcaactttttgttcatttggaagtttctctccatccgaggacttaagccagttttggatttgtaagccctgagtacaatacacttcctggaggcatcctcactgctgttgaagcaaaggatatgcatggggtggaaggacggcttcgaacctgggactcatatgccttgagaacaaatagattgttacagccttgggctgctgcgtaatcacggttcctcgagggggggctcctgtacccaattcgccctatagtgagtccgtatacactgactccaaatgcaggtgcttccattggagctaggtcggaggctgctttatatgacgaactccagaaatggatgccagaatacggaggccaaacgttctgagtcctggtaaggacagtcgctctgggggtcctcattttactgcagttcctgcacgccagtgaaagagaggagatagaccctggaaggcagagctgcagatgctcatcatcaggtcaattctggagctacagttttgtttctgactggatagggatgcaccagtgactgtcacatcaagcagtccttttattctctctcctttagtatcgattttaaagggcattaggcactatggttccagagtttcttggggaaaacttgtcagattcttattaattggttctgcaatacttaaataaattattttacaattatgaagttttcagattataacatttgtattaatttttactgattttccaagatacttcttagatttactatttacgtagctttatgtacattctctgtaaaaatagacctctaaatatgaggctttacatgaaatttgtacacacatacacactaatgttagctccttaaattgctgcactaaggtgctggttagtagagatggacggagcctctcgcgttttgctctcagatgtgttaaaggcgcacgtgtacctgctctcagcggcagtgcggcctccccatctgctgggtgcccatggccctccctgcagcctcagtgattgacctcgtctggccaggggacacaggttttcatccatttacaggctcttatgtgctagttttgttggtagcacgtttatttaatgcataaaaggcagaattcttacaagtttttttttttaatgtgaacatagatgcagcaccgactttttaaacttgaaaaaactggtataatgttaacttttaaaaataacatttggacacactagtaattgatttttgtttacagattgttttgtttacaaattgttagtctttgtttctatgagatacttttagtgtgactttttaaatgtcttagaaattaaaagttgtacaaaaagtgaaaaaaaaaaaaaaaaaaaaaatt

SEQ ID NO: 2040 - DNA, 1234 bp, Homo sapiens
  misc_feature (1058)..(1058): n equals a,t,g, or c
cgccggccgcgcccacgtgaycggtccgggtgcaaacacgcgggtcagctgatccggcccaactgcggcgtcatcccggctataagcgcacggcctcggcgaccctctccgacccggccgccgccgccatgcagccctccagccttctgccgctcgccctctgcctgctggctgcacccgcctccgcgctcgtcaggatcccgctgcacaagttcacgtccatccgccggaccatgtcggaggttgggggctctgtggaggacctgattgccaaaggccccgtctcaaagtactcccaggcggtgccagccgtgaccgaggggcccattcccgaggtgctcaagaactacatggacgcccagtactacggggagattggcatcgggacgcccccccagtgcttcacagtcgtcttcgacacgggctcctccaacctgtgggtcccctccatccactgcaaactgctggacatcgcttgctggatccaccacaagtacaacagcgacaagtccagcacctacgtgaagaatggtacctcgtttgacatccactatggctcgggcagcctctccgggtacctgagccaggacactgtgtcggtgccctgccagtcagcgtcgtcagcctctgccctgggcggtgtcaaagtggagaggcaggtctttggggaggccaccaagcagccaggcatcaccttcatcgcagccaagttcgatggcatcctgggcatggcctacccccgcatctccgtcaacaacgtgctgcccgtcttcgacaacctgatgcagcagaagctggtggaccagaacatcttctccttctacctgagcagggacccagatgcgcagcctgggggtgagctgatgctgggtggcacagactccaagtattacaagggttctctgtcctacctgaatgtcacccgcaaggcctactggcaggtccacctggaccaggtggaggtggccagcgggctgaccctgtgcaaggagggctgtgaggccattgtggacacaggcacttccctcatggtgggcccggtggatgaggtgcgcganctgcagaaggccatcggggccgtgccgctgattcagggcgagtacatgatcccctgtgagaaggtgtccaccctgcccgcgatcacactgaagctgggaggcaaaggctacaagctgtccccagaggactacacgctcaaggtgtcgcaggccgggaagaccytctgcctgagcgg

SEQ ID NO: 2041 - DNA, 1089 bp, Homo sapiens
ccacgcgtccgataagcacccatgtctttgaatatgaatgtatttgtaaaataccacgtttcatgtgtgaatatgtgcttttactgtacatagtgctattgtgcaataggtcttatgctgttttcactcaatgtgtgctaagatctagccccattgactcttctagaaatgcagtattgctttgacctgccatgtggcactccacaatgtcaattgcagtttacacacattgcctaaagtgggggacacctgggtgcccctgaccccttggcaccggatacaggccacgataaacatcctttcgtgtgttcccttctgtgcttgtgtggcatgtgtacccaggatgggcctataggtcacagaggtcagtttctctttggttttccagattttctttagaacggtgactgaccctcctacttgaggccgcccttttctccttatccttgccagcacttgtattgccagactacctaatttttgccagtctcatgggtagatagtggtgcagtgctttaacatacattcatctgatcagcattaatttggggaattttttcacttagcctttctggtttcccttcctgtgcattgcccattttctcatggagtttcttatcttttttggtttattctcaggagttgcttgtacattcttgggcaattgcagataattccaagaatgcatatttgggctgggtatggaggttcactggtaatcccagcactttgggaggcccaggcagaaggatcgctgcagcccaggagttcgagactagcctgggcaacatagcgagacctcgtctctacaaaaaaaaattaaaaagggggctttgggaggccaaggcgggcagatcatgagggcaggagattgagaccctcctggccaacatggtgaaaccccgtctctactaaaatacaaaaaattagctgggcatggtggcgcacacctgtagtcccagctactctggaggctgaggcaggggaatcgcttaaacccaggaggcggagattgcagtgagccaaggttccaccactgcactccagcctggcgacagagcaaggctccactcaaaaaaaaaaaaaaaa

SEQ ID NO: 2042 - DNA, 983 bp, Homo sapiens
  misc_feature (323)..(323): n equals a,t,g, or c
  misc_feature (899)..(899): n equals a,t,g, or c
  misc_feature (920)..(920): n equals a,t,g, or c
  misc_feature (923)..(923): n equals a,t,g, or c
  misc_feature (928)..(928): n equals a,t,g, or c
cgggtcgacccacgcgtccgcagtgtggaagaaaagttaaatattaaatttgaactcaactgaacatggacacaaacaatggtcaccaagtccctgaacaggttgtgtgagccccttgaggcgttcatccagcactgtttcggaggaatctctatttcaatctattcctatacattagttattgaaaaacaacacacaatcgcaaaaacaagttgacctttttgtgttccttgagaccgataatgaagggccctcgtgaccggacctcatgccaaacaactcgttacaaaaagagctagggtcccagctgcgctgaagcttcntgagacctctcctcatctgtgcatggatgagtggccgactytggagcccaggctgttrcttcctrgtctggtggtgaatcctccatagtctgagagtaagatccttgatactggctcagcatggaacatctggcacacagtatgcactgaggaaatacttgttggaataatcagtgaatcatagatgaaaacttaaccttggaattaattatgagactgctcagaggaagagaatgggagacaaaggacctggtgattagacccccaagacactgggctgtctgcttgtgtctcgggtggaacaggcccagcgagagtctttagggccagaactcaagaatttattgagcccttgttctaggcacttgggattcaccagtatacaatggagacaaaaatccctgccctggagcagcttacattctagcatggcaaacaggcagtaaacagcccattctggctgctgtattgagaagagaatgtggtggacagatatagaagcatggaaacctgataggrctattgcaatcactcagaaaagaggcgatggcagcttggacctgttggaagcagtanagtgccctactcttcagcttncangggangagaaaggacctgaaaggttaattttgatcaccaatgggccaatgatgtaatcag

SEQ ID NO: 2043 - DNA, 722 bp, Homo sapiens
  misc_feature (637)..(637): n equals a,t,g, or c
  misc_feature (675)..(675): n equals a,t,g, or c
cgggtcgacccacgcgtccgcccacgcgtscgsccacgcgtccgcggcgcgcggagacgcagcagcggcagcggcagcatgtcggccggcggagcgtcagtcccgccgcccccgaaccccgccgtgtccttcccgccgccccgggtcaccctgcccgccggccccgacatcctgcggacctactcgggcgccttcgtctgcctggagattctgttcgggggtcttgtctggattttggttgcctcctccaatgttcctctacctctactacaaggatgggtcatgtttgtgtccgtgacagcgtttttcttttcgctcctctttctgggcatgttcctctctggcatggtggctcaaattgatgctaactggaacttcctggattttgcctaccattttacagtatttgtcttctattttggagcctttttattggaagcagcagccacatccctgcatgatttgcattgcaatacaaccataaccgggcagccactcctgagtgataaccagtataacataaacgtagcagyctcaatttttgcctttatgacgacagcttgttatggttgcaagtttgggtctggctttacgaagatggcgacccgtaacacttcttaagaaaactggcagtcgnatgttaggtttcactttgctactttatatggtctggancaaattttggaataacccaatttttggtccaagaatgccaaaaaaca

SEQ ID NO: 2044 - DNA, 555 bp, Homo sapiens
  misc_feature (357)..(357): n equals a,t,g, or c
  misc_feature (492)..(492): n equals a,t,g, or c
  misc_feature (528)..(528): n equals a,t,g, or c
  misc_feature (542)..(542): n equals a,t,g, or c
gctggcgcggcggacgggatgaggcgctgcagtctctacgctttcggtaacttccgggccctggcgtmtcgtctccttaccctggggctacccttgcccggtcctactgcccgcggttaacccgccgcgagccgcctctcccctccccgcccgactcaaccctgccctcccccgtgctttgcagacgccgyccgggggcccaggcggctgatgcgtgtgggcctcgcgctgatcttggtgggccacgtgaacctgctgctgggggccgtgctgcatggcaccgtcctgcggcacgtggccaatccccgcggcgctgtcacgccggagtacaccgtagccaatgtcatctctgtcggntcggggctgctgagcgtttccgtgggacttgtggccctcctggcgtcaggaaccttcttcgccctccactgactgggtcctgctggcactagctctggtgaacctgctcttgtcgttgcctgctccctgggcctncttcttgctgtgtcactcactggggccaacggtggnccgcggcttattgntgactggcaccca

SEQ ID NO: 2045 - DNA, 1084 bp, Homo sapiens
  misc_feature (1026)..(1026): n equals a,t,g, or c
ttttttttttttttttttttttttttttttttttttkatgttacacagctctttaataatagtggccatagctgtaataacaatgacaacagtaggtaacggtagtcataccaacagtagggcagtgcattttatattacaactggtttcttgctctagtaggcttggggatgggtgaagacggacagggctggcgcagaccctttccttctcctctccagcccacagtgatctgggcttttacaagacagcctgcttccattcagtagtgtgggaaagttccttcttggcttagcaatacccctgagaccttgttcagtgggctgtgtctctccctgggatgctgggagcaccaagtgtggccgagctagggctgctgacttcctctgggcgcctctgggctgcgagggtctcttayaggaattgaggccctttgctgctccaagaaatgctgaggctgtgggcagaggggtgtacccaaggggactcttgctctgtgtctgactttgggggatccccaggtgggcagggcaggaaggaagcggctcccagcactgcaaaggggcagcagcattacagctcagccttccagacattgtagatccagttgagataggctgagaccttggtgtatactcctggggtgctcgggcccccgcagccatagccccagctaacgatgcccaccacatgccactggtcagattggtacatcaggggcccaccactgtcaccctggcaggtgtccacacccccttccgggatgcctgcacacatcatcttctcggtgacttccccctggtacgcatcgtctgcattgcaccgtgtgctgtcaatgacctggactgacgcctgcagcagtatgtcagacatcttccctccattctgcttcgtaaagccccatccaatgatccagagtggggtggctggagtgagctcctcatcaaagaagggcagacagatgggcctgactgtgcctgagaaagtgagtgggaactgcagcttcatgagggcgatgtcattgtntttggggtacatggggttgaattcaatgatgatgattttggccacagccagggatggc

SEQ ID NO: 2046 - DNA, 345 bp, Homo sapiens
gaaaaaatgcttacaagctattacaggccatttgctagaggggatwtatatatatatatatatatatatatatatatatatatatatatatatatatatatatatatatatatatatatatatgctcacgaacatcagaaaataaataaaccaagatattaatattgtgttcacgtgtgctaggattacagcagactttaaattcgttagattttttctttctttatgttgaatatgcacactttttaaaataaacctttaaacgtaatttacatcaaaacaaccagtaatactgcatatgcaatggtgatggatatggatttttttgagaatattgtaatgttt

SEQ ID NO: 2047 - DNA, 1214 bp, Homo sapiens
  misc_feature (1214)..(1214): n equals a,t,g, or c
tggacgcgtgggtcgacccacgcgtccggtcaaaaytaaccccctaataaaattaattaaccactcattcatcgacctccccaccccatccaacatctccgcatgatgaaacttcggctcactccttggcgcctgcctgatcctccaaatcaccacaggactattcctagccatgcactactcaccagacgcctcaaccgccttttcatcaatcgcccacatcactcgagacgtaaattatggctgaatcatccgctaccttcacgccaatggcgcctcaatattctttatctgcctcttcctacacatcgggcgaggcctatattacggatcatttctctactcagaaacctgaaacatcggcattatcctcctgcttgcaactatagcaacagccttcataggctatgtcctcccgtgaggccaaatatcattctgaggggccacagtaattacaaacttactatccgscatcccatacattgggacagacctagttcaatgaatctgaggaggctactcagtagacagtcccaccctcacacgattctttacctttcacttcatcttgcccttcattattgcagccctagcagcactccacctcctattcttgcacgaaacgggatcaaacaaccccctaggaatcacctcccattccgataaaatcaccttccacccttactacacaatcaaagacgccctcggcttacttctcttccttctctccttaatgacattaacactattctcaccagacctcctaggcgacccagacaattataccctagccaaccccttaaacacccctccccacatcaagcccgaatgatatttcctattcgcctacacaattctccgatccgtccctaacaaactaggaggcgtccttgccctattactatccatcctcatcctagcaataatccccatcctccatatatccaaacaacaaagcataatatttcgcccactaagccaatcactttattgactcctagccgcagacctcctcattctaacctgaatcggaggacaaccagtaagctacccttttaccatcattggacaagtagcatccgtactatacttcacaacaatcctaatcctaataccaactatctccctaattggaaaacaaaatactcaaatgggcctaaaaaaaaaaaaaaaaaacycgggggggggccgggtwcccaatttcccccctaggn

SEQ ID NO: 2048 - DNA, 456 bp, Homo sapiens
  misc_feature (448)..(448): n equals a,t,g, or c
aataatatatccctgtcgttttgttttttctttttaagacttgggccgggtgtggtggctcacgcgtttaatcccaaagtgctgagattacgcccggcctaaatattactttcaaatagaaccatcttcatgggtagcagtttataatacacaagtagaatttgggaaatgtagtcccagtcttccattcttcacagtggatgcttcagccagtttcctgtctctgcacacacactgcccgacagcgggctttcccttctccttcagagcagtagcagttccctttcttcattcccacccatcacagtggcagccccctctgccctcctgtattctgaatcccacccttataatatgcttagattttgcctttctcccagccgttttgtgagcattgttcgtgtgtaccaattttttctcatcctttaaaaaaaaaaaaaaaaaactngggggggg

SEQ ID NO: 2049 - DNA, 594 bp, Homo sapiens
  misc_feature (29)..(30): n equals a,t,g, or c
  misc_feature (577)..(577): n equals a,t,g, or c
  misc_feature (588)..(588): n equals a,t,g, or c
gggtcgacccacgcgtccgaaaaactgtnngggagcttgacaaaggcatgcaggagagacaggagcagccacagccaggagggagagccttccccaagcaaacaatccagagcagctgtgcaaacaacggtgcataaatgaggcctcctggaccatgaagcgagtcctgagctgcgtcccggagcccacggtggtcatggctgccagagcgctctgcatgctggggctggtcctggccttgctgtcctccagctctgctgaggagtacgtgggcctgtctgcaaaccagtgtgccgtgccagccaaggacagggtggactgcggctacccccatgtcacccccaaggagtgcaacaaccggggctgctgctttgactccaggatccctggagtgccttggtgtttcaagcccctgcaggaagcagaatgcaccttctgaggcacctccagctgccccggccgggggatgcgargctcggagcacccttgcccggtgtgattgctgcaggcactgttcatctcactttttgtccttgktccggaagcgcttttgctgaagtcatattggacctgatgnttaacaataangtccat

SEQ ID NO: 2050 - DNA, 653 bp, Homo sapiens
  misc_feature (5)..(5): n equals a,t,g, or c
  misc_feature (18)..(18): n equals a,t,g, or c
  misc_feature (566)..(566): n equals a,t,g, or c
gcttntacgcctgcagcnaccggtccggaattcccgggtcgacccacgcgtcggcgtcccggagcccacggtggtcatggctgccagagcgctctgcatgctggggctggtcctggccttgctgtcctccagctctgctgaggagtacgtgggcctgtctgcaaaccagtgtgccgtgccagccaaggacagggtggactgcggctacccccatgtcacccccaaggagtgcaacaaccggggctgctgctttgactccaggatccctggagtgccttggtgtttcaagcccctgcaggaagcagaatgcaccttctgaggcacctccagctgcccccggccgggggatgcgaggctcggagcacccttgcccggctgtgattgctgccaggcactgttcatctcagcttttctgtccctttgctcccggcaagcgcttctgctgaaagttcatatctggagcctgatgtcttaacgaataaaggtcccatgctccacccgaggacagttcttcgtgcctgagactttctgaggttgtgctttatttctgctgcgtcgtgggasanggcggkagggtgtcaggggagagtctgccaggcctyaagggcaggaaaagactccctaaggagctgcagtgcatgcaaggatatttt

SEQ ID NO: 2051 - DNA, 1916 bp, Homo sapiens
  misc_feature (1766)..(1766): n equals a,t,g, or c
  misc_feature (1883)..(1883): n equals a,t,g, or c
  misc_feature (1911)..(1912): n equals a,t,g, or c
tcccaagacaggattatgaatactccaccagctgttgtgtcagtatatgactgctgctgctcctatgcaagggaacctacattcctcagtacacgcctgtscctccgacagctgtttctattgarggtgttgttgctgatacctctccccagacagtggcaccttcatcccaggacaccagtggtcagcagcaacagatagcagtggacacatccaacgaacatgcacctgcatattcttaccaacagtctaaaccataaacaggactgaagaatgtytgtytgaatctttgccttgaatgaagaaacttcattgaacaagaagttggcttccagtttgcacagacgtcaatggaatgcatttttttgktgktgktgktgttttttttttagtgktataccttacccaatgaaagcaaagtttttatgtgctgtgcaaatggtcttcatgtggtctgacaatttatttttgccatcatttttttaattaaagaaaaaatttccagaagaggaaaaaaaaactacaaaaaacaaaacattgaaggttgatattttatgtggaagaacatttgaattgaattcagaatttttctgaaggtgtagatacttttttttttttttttaacagaaaacctgatgtcaagaggtgggcaatagaaatggaaacaaattgtcttcctcaataattaagctactttctctttttcccttcttgttttaatctagtgggttttttattttattttttcttagaaatatgtaggtaaggtttatcttgaatcttaattgccttaattttaaggacgtcaaaggctctcgaggcaagctgtcaacgtcttgttgaaaacaaaaatcaagaaagaattgaaatactgtgccggctttcactggcacagaagtttaagactatgagtttttagggtgaagaaaaaactgtacagtttaaatgaaaatgtttttcttcatttgaagaaaatttgttgataaaccatggcaactgcaagaattggaaaaatgctgggacttttcatgaactttgtcttaagtgttgacatgaatcattctaaaaggctaaaacattttacagtaaagttattaaggttggtttaaaaacaactgcattagaaataatgcgtgtttggggggcagaatgcagatttttttaatttacaaagcgtgatcgctagcaaaagcattagtgctttttatctgcagtcttttttatgagctttacaaagtttttagtcagctttgcttgtcacattgcaaaacctagcttaagagcattaaaaaaaaaaacttaagtagatagkagcttatggtcaaaaagtgcaaaaaaaaaaaacaaaaaaaaagcaatagatagagaaattgttgacaatttctgtagtctttcctagttgtgatcaaattcagcctatggatggcctattttataccaaagatgaagtgrcaccctattrcagtccagaagatagaggttgttttccatttcttctcttttcttttctttttaagaattttatttgacctacatggccggaccagttcttactttgttgtttgtttaaactaccttccactggtgttttatatactgcaaaacagaacacaacaaaaggtgttttgtttttgtttttgttcctgtttctgtttttgtttatttgttaacatgcatttgttggttctagtagaaaagctgcacttgctgtgttcagcagtttctgccggaagagttckggataccaactgacaaagccaaatggncttttattcaatctgtgagcttttctgggtcctactagctctcttgaaggkgacacctgtgtgggatgggccactgatatgtggagaccctggtttaacaaggtgaaaattcctttnccggtggaacctttggaacctaaaaggnncctt

SEQ ID NO: 2052 - DNA, 1595 bp, Homo sapiens
aaatcttcctacacacatctagackttcaagtttgcaaatcagtttttagcaagaaaacatttttgctatacaaacattttgctaagtctgcccaaagcccccccaatgcattccttcaacaaaatacaatctctgtactttaaagttattttagtcatgaaattttatatgcagagagaaaaagttaccgagacagaaaacaaatctaagggaaaggaatattatgggattaagctgagcaagcaattctggtggaaagtcaaacctgtcagtgctccacaccagggctgtggtcctcccagacatgcataggaatggccacaggtttacactgccttcccagcaattataagcacaccagattcagggagactgaccaccaagggatagtgtaaaaggacattttctcagttgggtccatcagcagtttttcttcctgcatttattgttgaaaactattgtttcatttcttcttttataggccttattactgcttaatccaaatgtgtaccattggtgagacacatacaatgctctgaatacactacgaatttgtattaaacacatcagaatatttccaaatacaacatagtatagtcctgaatatgtacttttaacacaagagagactattcaataaaaactcactgggtctttcatgtctttaagctaagtaagtgttcagaaggttcttttttatattgtcctccacctccatcattttcaataaaagatagggcttttgctcccttgttcttggagggaccattattacatctctgaactacctttgtatccaacatgttttaaatccttaaatgaattgctttctcccaaaaaaagcacaatataaagaaacacaagatttaattatttttctacttggggggaaaaaaagtcctcatgtagaagcacccacttttgcaatgttgttctaagctatctatctawctctcagcccatgataaagttccttaagctggtgattcctaatcaaggacaagccaccctagtgtctcatgtttgtatttggtcccagttgggtacattttaaaatcctgattttggagacttaaaaccaggttaatggctaagaatgggtaacatgactcttgttggattgttattttttgtttgcaatggggaatttataagaagcatcaagtctctttcttaccaaagtcttgttaggtggtttatagttcttttggctaacaaatcattttggaaataaagattttttactacaaaaatgaaatttgtttggacttccacttgagacagtaaagagagtattagacacccagtaaaaactgccatataaagaagttgtaattgtttgttgtgtatgtatttttttcaatgccaaaccagctgtgatccaatttacatccacattttaggtccaacagcaagaagttcagagagagatttcccaaccagacattgggtcactcactggtcaccttgccagtgcattttattagaagggaatctgttgtagcaaatgggaataaacctgggtttctatagacccagaactgaaaaaataaacatcgtgctgtttttaatttgaaaaaaaaaaaaaaaaaaat

SEQ ID NO: 2053 - DNA, 1061 bp, Homo sapiens
ggccgggcaccggggcggcgggttggtctacgctgtgcgcggcggacgtcggaggcagcggggagcggagcggggccgccggggcctctccagggccgcagcggcagcagttgggccccccgccccggccggcggaccgaagaacgcaggaagggggccggggggacccgcccccggccggccgcagccatgaactccaacgtggagaacctacccccgcacatcatccgcctggtgtacaaggaggtgacgacactgaccgcagacccacccgatggcatcaaggtctttcccaacgaggaggacctcaccgacctccaggtcaccatcgagggccctgaggggaccccatatgctggaggtctgttccgcatgaaactcctgctggggaaggacttccctgcctccccacccaagggctacttcctgaccaagatcttccacccgaacgtgggcgccaatggcgagatctgcgtcaacgtgctcaagagggactggacggctgagctgggcatccgacacgtactgctgaccatcaagtgcctgctgatccaccctaaccccgagtctgcactcaacgaggaggcgggccgcctgctcttggagaactacgaggagtatgcagctcgggcccgtctgctcacagagatccacgggggcgccggcgggcccagcggcagggccgaagccggtcgggccctggccagtggcactgaagcttcctccaccgaccctggggccccagggggcccgggaggggctgagggtcccatggccaagaagcatgctggcgagcgcgataagaagctggcggccaagaaaaagacggacaagaagsgggcgctgcggcggctgtagtgggctctcttcctccttccaccgtgaccccaacctctcctgtcccctccctccaactctgtctctaagttatttaaattatggctggggtcggggagggtacagggggcactgggacctggatttgtttttctaaataaagttggaaaagcaaaaaaaaaaaaaaaaaaaaaaaaaaaaaaaaaaaaaaaaagtcgtatcga

SEQ ID NO: 2054 - DNA, 653 bp, Homo sapiens
ggcacgagcggatgctcaacctcactgaccggcaagtcaaaatctggttccagaatcgcaggatgaaagaaaagaaactgaacagagaccgtctgcagtatttcactggaaaccccttattttgagagctccaggaagcgccctcaccccagccccactcacccaccctccttcccaccagcctgctctccgcagcccactgtccttgggtttaatgacgtctcttctctgtggaayttcacgattccttcccacggtcaactcgggacctcccagcgaccactgcagcctgcggacgaggccgggacttggccgagcggatcctaataaggggaaaatggtaaatgcaaacgtcccgttacaattttaccgccagtgtgctgtcgttccccctccccmtctccgagtcctcgtggggacacggcggggtctgtaggaagttgggccgggttgggggttgctagaaggcgctggtgttttgctctgagttttaagagatcccttccttcctcttcggtgaatgcaggttatttaaactttgggaaatgtacttttagtctgtcatatcaaggcatgagtcactgtctttttttgtgtgaataaatggtttctagtaaaatgaaarwaaaaaaaaaaaaaaaaaaaagtcgacc

SEQ ID NO: 2055 - DNA, 356 bp, Homo sapiens
cggggcagaaaggcggcaaaktgttgttaaaaaagcagacatgatcaacrraaatatgactcatcaggtccaagctgagagagatgcactggcactaagcaaaagcccattcattgkccatttgtattattcactgcagtctgcaaacaatgtctacttggtaatggaatatcttattgggggagatgtcaagtctctcctacatatatatggttattttgatgaagagatggctgtgaaatatatttctgaagtagcactggctctagactaccttcacagacatggaatcatccacagggacttgaaaccggacaatatgcttatttctaatgagggtcatattaaactgacgg

SEQ ID NO: 2056 - DNA, 1439 bp, Homo sapiens
tcccagctggccctgcccctctaccctccctgcctgagcacttacctccttagatggaggccgagaccccaagtactgaggtgccacctgacccagagcctggtgtacccctgacacccccatcccaacaccaggaggccggtgctggggacctgtgtgcactttgtggggaacacctctatgtcctggaacgcctctgtgtcaacggccatttcttccaccggagctgcttccgctgccatacctgtgaggccacactgtggccaggtggctaygagcagcacccaggagatggacatttctactgcctccagcacctgccccagacagaccacaaarmggaaggcagcgatagaggccctgagagtccggagctccccacaccaagtgagaatagcatgccaccaggcctctcaactcccacagcctcgcaggagggggccggtcctgttccagatcccagccagcccacccgtcggcagatccgcctctccagcccggagcgccagcggttgtcctcccttaaccttacccctgacccggaaatggagcctccacccaagcctccccgcagctgctccgccttggcccgccacgccctggagagcagctttgtgggctggggcctgccagtccagagccctcaagctcttgtggccatggagaaggaggaaaaagagagtcccttctccagtgaagaggaagaagaagatgtgcctttggactcagatgtggaacaggccctgcagacctttgccaagacctcaggcaccatgaataactacccaacatggcgtcggactctgctgcgccgtgcgaaggaggaggagatgaagaggttctgcaaggcccagaccatccaacggcgactaaatgagattgaggctgccttgagggagctagaggccgagggcgtgaagctggagctggccttgaggcgccagagcagttccccagaacagcaaaagaaactatgggtaggacagctgctacagctcgttgacaagaaaaacagcctggtggctgaggaggccgagctcatgatcacggtgcaggaattgaatctggaggagaaacagtggcagctggaccaggagctacgaggctacatgaaccgggaagaaaacctaaagacagctgctgatcggcaggctgaggaccaggtcctgaggaagctggtggatttggtcaaccagagagatgccctcatccgcttccaggaggagcgcaggctcagcgagctggccttggggacaggggcccagggctagacgagggtgggccgtctgctttcgttcccacaaagaaagcacctcaccccagcacagtgccacccctgttcatctgggctgcctggcagagagccttgctgtttacaattaaaatgtttctgccacaaaaaaaaaaaaaaaaaaaaaaaaaaaaaaaaaaaaaaaaaa

SEQ ID NO: 2057 - DNA, 586 bp, Homo sapiens
  misc_feature (576)..(576): n equals a,t,g, or c
  misc_feature (584)..(586): n equals a,t,g, or c
cctgcaggtaccggtccggaattcccgggtcgacccacgcgtccggaagaatttaaactwagagaatgattaataaagtggaaaatatccaaagagtgtaaaataatttggggagaaagttgcaaaatgtggagtttctttacaacaaatattttcagtccatcagatgtctacatgttttatgatctaaaataccagacaatggtctgtgatatcatgggactaccattagcccagaaaaggttgcttctttcatctgcttgcctaatgaccataggctggtcattactttctctgaacttttattttctcataattctggttgctataagactcaagagagaatgcacatgggaaaggattttaaaaactgatcaatctgtaaaatgtcatgtattggaaaagataaagtaaaattcataccagtatcctaagtctccactaaatgataaaaaccgtacataattatgtctgttgattcccatagtaaccatatgaaacagatattattcctatctcaaatttagggataaaaaccagtaggactgaggacattaagtaaattatcacagctcncsgggggnnn

SEQ ID NO: 2058 - DNA, 895 bp, Homo sapiens
gcctgcaggtaccggtccggaattcccgggtcgacccacgcgtccgcgaaaaatcagttkgcaatatacagtgtgggaactgtactgtgatcattggctaaccaagatgggtgacagtttatgatttcaaagactcaaaggcggcttgagtcctacaatgtcctactcataaaaatggaaagcatggcagcctcaggttgttacagagtactctactccaaagtaaaagttattctctgagaaagtgcttactgccttttctgttctctagtttgcttgtttaaacatttactccacaaaattgctcaaacttacccatctttgaatatctagcctctgggatgagacagatgatctttctccgttttcactttttatagaatacagctacctacccaggcaatatgaagattttatttgtagaacctgccattttccttagtgcatttgctatgactttgaccggtccactgacaacgcaatatgtttatcggagaatatgggaagaaactggcaactacactttttcatctgatagcaatatttctgagtgtgaaaaaaacaaaagcagcccaatttttgcattccaggaggtaagaaattacaatatccatagtatttaataaaatgggaatgtataccgggctttgagtcaaagaggaccgtgaactcatcatccattggtctctctagggcggccatcaaagtcctaaatcccaaacctaatggcctttactgggaactcacctcatttgaagtttcctgacacctttcaaatctgcctcttcttcttaaaacaccctcctgctctgtgacactagctcttctcctttctctcggaaaatttcaccacagtgtcatctcttctgtggctgtctccttgctttgtcctaaa

SEQ ID NO: 2059 - DNA, 143 bp, Homo sapiens
  misc_feature (130)..(130): n equals a,t,g, or c
tttatgatatggaattcaatacaccccttcagtggtataaagacattcctggatttctttaggatagggtcagagttggtttactatctggccttcagtttttaaaaggggcgattctttgatatagcantagcgtcaatttt

SEQ ID NO: 2060 - DNA, 576 bp, Homo sapiens
  misc_feature (573)..(576): n equals a,t,g, or c
gagctccaccgcggtggcggccgctctagaactagtggatcccccgktctgcaggaattcatatgatgccgcccgtcaactcgacaagctttacgtgacggggctatagctcagctgggagagcgcttgcatggcatgcaagaggtcagcggttcgatcccgcttagctccaccaaattttgcacccagcaaacttggtacgtaaacgcatcgtggggctatagctcagctgggagagcgcttgcatggcatgcaagaggtcagcggttcgatcccgcttagctccaccaaatttccaaccctcgctgcaaagsgggggttttttgtctctgctttttgccgcttttgtaatacagtctacgtccgggttagtgccgcctggtgaaagcatcattggatgaaaaatcggcaacaggctggccccctgtttgcttcgcgatgcgaataaacttattatttgtgtgcctgaaaaccccgatcagtgagagtagtgtactcatgtttgtggagcataacctgataaaaaatatcaagatattcacactagcgtttacgctcaccgtgtmcgggggnnnn

SEQ ID NO: 2061 - DNA, 580 bp, Homo sapiens
  misc_feature (577)..(580): n equals a,t,g, or c
gagctccaccgcggtggcggccgctctagaactagtggatcccccggtctgcaggaattcggcacgagtaacaaaccttacctttgtttaaggtgctttttctggctctctgccattaagatctacattttccaccctgtctcctctaggacctgagggttatctctttgatatgcaaatgccagggagattactcaccagaagaagaagaagaaatagagctaattggaaattgagcaaataaaaaaatcttgttttttctcccagaaacagtgaaaagctttagccatcctttagataatcttaacttgttccatctgccagaaacacaatttggattcagaaattctttatgaactgtttttgtattattgtacctggcacatggctacagttttcaaatgaaaactgtgaaatctgcttctgtctgtattttatgtatgtctgtgtatgcatgtatgtgtaatatttttctacctctagagactatcctaaaattaacttataaagagctgtatttaattgccttaaagaaaaagcacttatacaaattaagtattttttaaacycggggggnnnn

SEQ ID NO: 2062 - DNA, 571 bp, Homo sapiens
  misc_feature (487)..(487): n equals a,t,g, or c
  misc_feature (525)..(525): n equals a,t,g, or c
  misc_feature (561)..(561): n equals a,t,g, or c
  misc_feature (571)..(571): n equals a,t,g, or c
gcggccgctctagaactagtggatcccccgggctgcaggaattcggcacgwtggagaaagctcccagtgaggaactggtcttctggagactctgtgtggcatagagtgattcaaccaccttaagaagacctctggctttcctggaacacagatgtcgagacatctcccatggatttgtgatcagcgttgcagctctcccagcagccctggacggtgactctcctctcttggaatgcatcctgaagcagctgaaaaggggtgccccgggcccagcagggagcaaaatctggtgatattgcttctgaacatcccacatgtgccacacacgtgcacccccccacacacacacatgcacactcacatgcacactcacatgcacactcacatgcacactcacatgcacactcacatgcacactcacatgcacactcacatgcacactcacatgcacacacagcctggactctgttccccttatgcccctggnaccacactccatcaaagccattgacctttatatccccntgtgtcttcagtaagaaggtatatcaggccagaccnccgggggggn

SEQ ID NO: 2063 - DNA, 807 bp, Homo sapiens
  misc_feature (57)..(57): n equals a,t,g, or c
gagctccaccgcggtggcggccgctctagaactagtggatcccccgggctgcagganttcggcacgagctcgtgccgaattcggcacgagaaaagatattgtatatgaacttcaactctacaactcagtaaaatgaactgtgatcaggagaataaggaaatgttcagtgtattacttggtggttgtaatcaatggaaacactaaaaacataaaatatgcatgcactatgcttccttaaagtaaaattttcctttaccaggaggagaaaagcaaagagtagcaattgcaagagccattttgaaggaccccccagtcatactctatgatgaagctacttcatcgttagattcgattactgaagagactattcttggtgccatgaaggatgtggtcaaacacagaacttctattttcattgcacacagattgtcaacagtggttgatgcagatgaaatcattgtcttggatcagggtaaggtagccgaacgtggtacccaccatggtttgcttgctaaccctcatagtatctattcagaaatgtggcatacacagagcagccgtgtgcagaaccatgataaccccaaatgggaagcaaagaaagaaaatatatccaaagaggaggaaagaaagaaactacaagaagaaattgtcaatagtgtgaaaggctgtggaaactgttcgtgctaagtcacataagacattttctttttttgttgttttggactacatatttgcactgaagcagaattgttttattaaaaaaatcatacattcccaaaaaaaaaaaaaaaaaaaaaaaaaaaaaaa

SEQ ID NO: 2064 - DNA, 843 bp, Homo sapiens
  misc_feature (48)..(48): n equals a,t,g, or c
cccatcctgatccaagtgcccttattcaaggtgttgctgatattttgnccttcactgcccactcatartgargcaaattaycattttctgkgaacacagctcagattttggctggaatggctatggcttatgcagtggcaacttcttgttgtagtcttwttgcaaactctgattcttcagcaatatcaacgttttaacatgctcacctcagcaaaagttaagacagctgtaaatggactgatctacaaaaaggccttacttttatcaaatgtttctcracaaaagttttccactggggaaattattaacttgatgtcagcaactcatggacttgacagcaaacctcaatctcctctggtctgccccttttcaaatcctaatggccgtatatctcctttggcaagagctgggtccagcagtgttagcaggggtggcagtccttgtgtttgttataccaataaatgctttagctgcaactaaaataaaaaagttaaaggtgtccctggcaaccttgtgtgtctatttcttactggatgaaggaaacattttaacagccactaaagtgttcacatcgatgtctttgtttaatattttaaggattcctctgtttgagttaccaaccgtgatctcagctgtggtccagacaaagatatccctgggccgtttggaagactttctcaacactgaggagcttcttcctcaaagtattgaaacgaactatacaggagatcatgctattgggtttacagatgcttctttctcctgggataaaacaggaatgccagttctaaaagaggctctgtggcttatgkttctcaacaagcctggattcaaaattgccgg

SEQ ID NO: 2065 - DNA, 753 bp, Homo sapiens
gcctgcaggtaccggtccggaattcccgggtcgacccacgcgtccggccaaatgctatcatgaacgtaggaaacttgatttttttgttttgatcatggcctctacatgcacctttccagagtggtctcttctcaggccctttttagtccctttccaaagctgcccccaccaccctgctcctctggcctcagtgcacagtggcccccagcctcggccaggcctgctctgctcagcgcccaccgcccaccacccctcctgcttccccgagcctgaccctgttccgcccactggcaatcagggctgcgcacttccctgtccacggtccccaggccttcctgtcttgtcccttttgatcattattaactcagggtttcagctccaacctcgctgagttggtgcagctccaggtcattcctggggtgggaatcggatcatccctgactcagcttwtaccttaattttatttgcagaggattcttttctcaaaatgctctggcatttggacacacatcacatgtcgatatttgcataggagtcattttcagtggaataacatttttaatgtgtggttttacggttcaaggaactacttgatgattttgaggaaacacttgccagaaactaaattaacgaataaaagatttcagtgcccgaaaaaaaaaaaaaaaaaaaaaaaaaaaaaaaaaaaaaaaaaaaaaaaaaaaaaaaaaaaaaaaaaaaaaaaaaaaaaaaaaaaaaaaaaaaaaaaaaaaa

SEQ ID NO: 2066 - DNA, 4016 bp, Homo sapiens
  misc_feature (2)..(2): n equals a,t,g, or c
  misc_feature (11)..(11): n equals a,t,g, or c
cngacactatntaaggtacgcctgcaggtgaccggtaccggaattcccgggtacgacccacgcgtccgtttctgaagcaatgttaatcctactagccaagcatatcacttagtccccactgtgagatgagggatatgtgcttaaattgtgaaacaaatatatgagtcaggtatttttcctttgagtccaagtggtttatgactttctttcctgtgttctttgtatatgtgggagttttataattttttatcaagaatgaaaggttggcctgtgttcttactggtgcaggctgtcacatttctctctgttgcccagtcaggtgctatggcatgtgctgcttctggcgtagtgtactctgtggatgtaccagcatgttcttcaaggtcatgactgattttccagacctttggaattgagataaatgttaaatttgtagctatctctgaatttcttccagatacttttcttcatttgtttgtttgtagggtaaacatacctgatagcagcaatttaagcatacccttagaatgaccatgtatggccagtgcacctgaatgtgtgttccaaggtagggaatccaggaatggccaactcggagattcattccttactatgataaatatctgagccccctgctcatcctgtggaacatgggcttattggggattaaggccctgagttttaggttaaatgaaggttaccagatggaggtcattagggggagggtgttaaatgaaaatgctttataaactgcatgctgtttgcaagcagttgcagttttcctgcccagcccgcagccactggccatgcagtcatgttgtccagcctgccgccactggaccatttctgtacataaggcagttctcctgtccgcctgccaccagttctccactctctccccatatgtaagcccctagtaaaccccatgtctcatttgctgcctctgggtcttttcttcagcctcttgaacctagtgccttccctgctgaggttaataggggtacagcacaacagtgttgtaacacagaaagtgatatttacagggatatctctctcacaatatctcttaggaaaggtaaataaaatgttcacaacttgtaggtgagtaattccttagataagttgtttcttaacttgggaggagtttgggaaggaacctaagcaggctgcagaggctgggcatgggagcttgtcatggctggaagttgaaatggtcaactccaggcagatctcctggggcaaagcagcctccaccaccagtagcccttcctttctgttgctttcatagccccactgctccatctgaagcctgaaccccttccagaaaattgatggatagattttttttttcggctatatatagttttagaggttagaactagatataatttcaagtctagaagatttctccttccccagaaatgattggtttttgtgcagaggccccgtcaaaatagtaccgggagacttagactgagttcactcatcactaacaattaactttataaacattcaacaagtaggacaactattattactgttactcagaacccttcgctctgtatatacagtttgatttaagatgccacatttacatggcattttcaaccttcaaactctagcagattttaaaactaggtggatgaaaatagaatcattctaataaatgtagtgtgtcagatttgaaaaatcatttggtgagcaggatctctgtaaagttatatgggccacgtatacaagacgtaactgaagaaaattaattcaacagagcatgccgtacttgaacgacatagagatttactcgaactgaactaactcaagctgcagaactccgagcaagcctggattgtaaagtctgggtgaaaatagatggagtatgcctgactgaacctctgtactgccccacatgctatacaggtgggggattggatggctgttaggtgatcattgcattctcttttggatccctattgagaagaaatgataagagagggaaaggatatggggcaagaacagtctgaaaaagaaaggataaagttctcagactctcttcacactctaagaagaactttctgaaaagcttggattaggtctggcaatggatataataagcaaaggactcttggaatgtgttcttggctcttagccccacctctgactttgagcaaatcagctgatttctctgcctgtaaaataatagtccctctgatattaatacttacctcatgaggttatttagaggatagtgttggtaataatgccttgtgtttacatcattcctttcacagagagctcaaagcactttacatgcattgagagagaagcttctcgtgaagagtaaatagaagtgttcactttttggaaatgaacttaggccataagagcctgaatttaatgcattgcaggaagaaatatggtacatagtgatccagtgggtcaactgaattttttgttccactaagagtcccctcctggctccgtgttttgaaaattaaggagaaataagagtgagtccctacacctggatgggaaatcccacatatgcaattggaatggtctctcacgacacatgcagagattgaagaacagtctggacattttttgataacgttctttgggccttggtagtagctgaaagacacctgagaaatcttagctcagagctacagaatgacactaatggatcccagaaatagaaatgtagatgtggagtgttttatctgtttatttcacctcaattcaaccaatactccttgagtgccttttatatacatgattttgagtgatgtggagaattaaaagagcacaacatgctcaggaaagttaaccctggtattagcaaggaaaagaagtaggatttccaaatagataagtgcaccgggtatgtggaagttcagaaaagcatcacagtacttcagcacatctacttgggcaatctcaaacatgtattactcatgtaccaagcagtatgctgttcacagagagatccaatctctgccttagggatccttggggaaaacatgtacaaagagatagttttagcacattctagtaaaggcagtgatcaagggcacctagccttacgtggcaatttagggaaggtaccttggaggatgagacttctcctaaagtcttaagaattgaaaagaacatgggaagggaattccaggctgggagagtagtatgttcatacgccctcagtgtttaaccttctttgaacaaaaaaatggccaactacagaaagtttggtcttattgtagcctaaattgtacttaggggtacgagtgagaaaaagggattaagataaaggacctgttttgctgtcttgtttactgttgaatagtagtatgaagtaggtcctgaaaaactatgtttttggggaaaaaaaaaaaaaaagactgaatgatatgttgggtttaagtccttgcaggcaggctatccaggtaaataaacatggaaggtgatgggaggtaatctgggctggaaatacagatttggaagtcaccccatatcagtggtgtttaaaatcaagagcaaatgaaattgcacaaggagaatatatagaatgaacaaattaccatgggtgaagccttgagtaatacagacatttaagaagcaaacaaaagacaaggaacccatgagggagactggaaaggaaaaaacagagaaataagaaaaaatgagaggagagaattgatacattttcctcaggtgtggcattatggagttcactggtgtctcatcagagaagtttcagtccagtggccagggcagaatgacattgtgtcttgttttaaagtaaatgggtagggtaagaaagttgagaagggttagcacaaacctctctttcaagtcacttgccttagaagagaaggaagggtatggtttctggggtgcaacccaggttcaagaagcaaaaaaaaaaaaaaaagggcggccgctctagaggatccctcgaggggccccagcttacgcgtgcatgcgacgtcatagctctctccctatagtgagtcgta

SEQ ID NO: 2067 - DNA, 587 bp, Homo sapiens
  misc_feature (536)..(536): n equals a,t,g, or c
  misc_feature (540)..(542): n equals a,t,g, or c
agctggtacgcctgcaggtaccggtccggaattcccgggtcgacccacgcgtccggaacagggaaagaaagggacagagatggaaaatcctattttattgttttgactttagacatccagaaagggttactaactttaaaactttaaataaagttgccctgtgttggggaagaaatctggcaatcctagttactttgaagtcacgctaccctttttcactagagtctccctgacccaagagaacagggaagggccggtaggatacacataacagtagctccttttacttggctggatttaggtatgccaggagcagggtgcagtattaggccagaaatctctgttggtctctgcttgcctctcagtgctaatgtggtcagctctccttgactgtagaccatccagccaaatccaagctctgcttttctcttttggactcaggacccattaaactcagtaacctcattaaattctgcctgcacatttctcctttcttttcttttcttttttttttttgagaccatgtctcaaaaaanaaannnaaaatatatatatatatagagagagcgagccgagagagagagaga

SEQ ID NO: 2068 - DNA, 1063 bp, Homo sapiens
ctctagtttctttagcctctcaagagttgcctcaatttsgcacytccactccgccttgttgtgtaggaatgagttacacttgtcagaaggctcgtgtcatttgacatggactccaggattgaaatgatttgcttgaatgatggccgtttcttggcatcagcttcccaacactgatgtaacagttcagcaaaacttctggggcaactgcttggaatggttaatctctcgtttttttccactacaagccaagctacttgtaatccttccaaacctttaaaggggacctcccttgttagcatctcccagagaaccacaccataggaatatgtgtcacaagtttctgacacagggagactctggataacttctggagccatccatgggaaagttccaaccaaggacatgtgtgttgtatggttatggaaccgagaggcaccaaagtcacagatcttcaatactccatcagcagctataacaacgtttcttgacttgaggtctctgtgaatcaccttgacaggagcctccatatgtaaataatgcattcctttggctacatcagtggcccaggtcataatgtgatccatatccatctcctcacttctgttactgttaatgtaatcatagagtgatcccagagaagcatattctgtgacaatgccatagttgggaggttcaagaattactccataaaactggatgatgtttctgtgactgaggacactgagtatttctgcctctttctctattttgaggagcttctttacagccacctccttgtcctgtgatatccatttggctcgataaacactcccaaaacttcctccaccgcagttttcaaaaaactgcaagtcatcaaatttaatttgcacaaaggaggcaccgagagacgacatctcataatgacaaagtattatacttccacaaaatctggctcccgggcggggcgtgagcagcagccgggggcgcggaggccccgcgcgcgacgagggcggcgggggttgggacgacagcggcccgcgcggctcccacgtttccgccgcagttaggagttgaacattccgcc

SEQ ID NO: 2069 - DNA, 2716 bp, Homo sapiens
tcgacccacgcgtccgcggacgcgtgggttttttgaaaatatgcagaaatttgtggtaattatgtatttgtgtcttgtgacaattatgttttatagacctacactagtgccaggtcactattgtaagatgttaaaatctcaagaaaatttcacagagctaaagaaatgatgtcaaattagtcacattaagctatagtagaaggaattggacacttctccagatatttggcttcaaaggagtacctttacttacatgtgctttatggtaagtacattgaattttactttaaatgcattttactacaaagcacaattcatttgtaatgcatatccatcttggattcaatccaaggtgctttagctatcagtagtaccaaaggatctttttacaaggcttcctgtggtattgactctgagaataacacatagtgaagatctgtgggcttttaaaattgttcacagccaatttaagaagacccctcatgaagtctcagttttcagtacagtacatcattcctcctcactaggagcactttgatgtaaaccagaatagctttaaaaagacaaaaaggatcgtagatctgatttttaaatggttggttgctctgacagatctgaacactttgcttcatgactatttcgtcataaaggtatatgtttaaaatctgaatggcagtactagctctatacttttaatactgctttgtattttatatgtaaagtagtattgctgacattttaaaaaaatacaaaatacaaaagaaaccattagaaattaataactgtggctcttccagttgaaataggaattggagagaaaggattagaatattttaattaggggagtagattattgtccaaaggcttttatttagagaaacgggtaattaaaacagcagctttagaatagcttcttactgaatatgcaaaagaataattccttgttatttcctaattgatccaagtctcataaatttagcttttgtcataattccttaccgaaaacaactgaaattgagagtcataaatactgtgggttagaataaaaaccatttgccaaagcaacactctacttagaagcacatgtacatacatggacctcattcagaagtccatgttgtagcagttagaatttgartatcagccatttcattgtagtaacaaaaattgaattgcattttgtgctcagttgtttattgtaattttatttttgttacattaatattagttaagatatggtcacttgaattttttgtatttaagaattttctgttttaatgcatgttatacttttatgtaggattccaaaccttccctctaaatgggatttaacccacatctgcgagatcagcgttatgctaagaggaaatcactgaggccatatctttttacaatctgaaaaaaaagtagtaaaaaggtagttaaaaaaaaaaaaggccgggtggtggctcatacctgtaatcctagcactttgggaggccaaggcaggcagatcacttgaggtcaggggttcaaaaccagcctggccaagatggtgaaaccccatctctgctaaaaatacaaaaaaaaattagccgggcatggtggcacgtgcctgtaatcccagctacttgggagactgaggcaggagaattgcttgaacccgggaggcggagattgcagtgagccaagatcacgccgttgcactccagcctgagcaacagagcaagactccatctcaaaaaaacaaaactactttcattaattacccattatttattttagttacttaattttgagttcataaatggccaccctaatggaaagtttgggtatgatcttaggttttatggagatgttttcaatagagattatttttccctcaccctatttgtgaatatataaattaaagtaagacaatggagtaagtaagagggtagatccaaacacagtatgtctaaattctagcactctactggctgcttagaatacaccaaacctggaagacctttccaagagtaaaatcccagtctgccactatcaaaattgccacagtcacttttactacttgtgttcatagtagactcagcacttctttttcactggacctagtataactgagaaataaataactgtgtgcaaaatattggtatcattaaggacccagagctgcccattttctctttgttctaatagggaagcaattactgatagaaatgtgagattaaaaatagggtcctccctgctgctccaaacaaatgcctaaacacagtatgtatctcagtcctctgttcccagagattccaccctagcccaggaaagaactggcctgtgtaaagcaaaacccaagtcatccccctccagaaatttctctggcagccaagcctgaccctaagggttccactttgctttaaaagctaggagtggcctctagagccaggaacacattaatacaacagttcaacctcagcaccaagtcaggtacgaagcgcttgatacgtggaatttttctctatatcaagtttaaatttctggaaatagactttggttgctaatgacaattacagttataccatagtctgtaatttgagaaaaggtgaaatgtatttaatatatatttagttttaataaaaagataaaattattacagaaataattgagagagagaaaatctattataatttatttgaaaaataaaacattttatccagtaaaaaaaaaaaaaaaaagggcggcc

SEQ ID NO: 2070 - DNA, 2013 bp, Homo sapiens
cttccggctggcggtgagtggggagtgggatccgatcccgtggggctatgtaggggaagttggtggctgcagctgccgtggttttctcctggtgtccagcagaaacggcggcggcgcaaggtgtggctgggccaacccaggatctcccaggaccctccgctctgcgcgacaaggggcccgcgcttgccaaggccgacgggcaggagtgaacgtggcctccgtgggtctgcagccccgataggccaattgtacagaatttaaaccgtctctcagatgtgtacagtagaactcaagaagacagactaccaagggtcatctgaagtcgtgattgggtcactaataacaccaggacaaagttaagggatcactactcaagcataagccccagttttcataagactgctgtgaagatgtttgatataaaggcttgggctgagtatgttgtggaatgggctgcaaaggacccctatggcttccttacaaccgttattttggcccttactccactgttcctagcaagtgctgtactgtcttggaaattggccaagatgattgaggccagggagaaggagcaaaagaagaagcaaaaacgccaagaaaacattgcaaaagctaaacgactaaaaaaggattgaaggactgaacaggctttgcaaccagaggaaaatcatttggaaaattacacagctttggaagaatccactaaagtttcttctttggatttcttgacagtatgatttagtaaatgaaatttgaccaaatggaagaatcatgttagttctgacctcaatactatagtaacttttaggcgtgggtgtagaagtttataggtttctattgacagttattgtaaattagcatttactgtggtacaaattctttataactgacttagtcatttgccgcttagcagtttatatactgaaatgaaaacatcttgtggggaaaagtgactttagattatgaactcaattcaaatgaactctatttaaaatggggtcctattttggacaaaggaaattaagaatgtaaaagtcagaacagtcttgaggtaaaaagtgtgctttggcttaaaagggatacagtatattaattacatcttttattattattgkttatttcttagaatcatttctggctttctcaaaacaaaataatattaatgagtacttctatttgctgcatttttcttattacagcctttgagacagctggtaattataagtcattttccattttttaaaacataattttataaagaattctcttatctcgactatgtagaataccacctactggacagaacaatttttgtactcacaaacactgccattttcttagagatggcttgagaggagtaacactatggtttaaagcttgcagtaaaaatgccaaacactgtagtaccttggaacccagtttattcttgtgctaagcagaactgtaaaatagttaaaatgtcttatcaagtaattcgccgattacaaagacaccatttgttttttatttcattctttgttttaactcatgtggtagtgatatttaatactttctgatcaaacaggttcaaagtaaaacgttaaatttcacatttcttttaaagaactcttaaagtgtaacagttacgccatacttcataagtggtaaagaaaggtataaaatttggaaacattttgttgggcatagtagtgattgggtgaaaaggataaattatatcaaaatgagaatgtgctgtaattggaagtagggagctaaaggatgtttctttcagtttagtagaactggaacgttttactattaaacatggcttttataaatgcatggtccaataattttattcactgttagtatttaattcactgtcagcttattaatgttttctgtacccattaatgaattttaaattacaaaaaattgtctagcagctacagtttaaaaatgaaactagacattaaaataaatttgataattttttataaaaaaaaaaaaaaaaaaaaaaaaaaaaaaaaaaaa

SEQ ID NO: 2071 - DNA, 2595 bp, Homo sapiens
  misc_feature (1009)..(1009): n equals a,t,g, or c
  misc_feature (2456)..(2456): n equals a,t,g, or c
  misc_feature (2466)..(2466): n equals a,t,g, or c
  misc_feature (2471)..(2471): n equals a,t,g, or c
  misc_feature (2507)..(2507): n equals a,t,g, or c
  misc_feature (2533)..(2533): n equals a,t,g, or c
  misc_feature (2535)..(2535): n equals a,t,g, or c
  misc_feature (2593)..(2593): n equals a,t,g, or c
ggcatccctaatctgaaaatccaagattaaatgctccaattagcatttcctttgagcgtcatgttagagttcaaaaagtttcagattttgggttttcagattaggaatacccaacctgtatgtacgtatatttctgtatctatgtatgtatatatatgcatatgcagacatatgtatatggtctggtcagcatatgtgtatgtatgcgtatgtatgtatgtatgtatgccctcagtgcagtggggtttgctgcagaattcactgcatagcaggagatgtaagcagatgagttattttttaagagaatctaatctaattgtttttataaaaattattccctattgaatatttatataatgaggttgtatcaacaatgattaactcctttattatacatacacatgaatgtgcatttttggtaaatgcataaatgagattctataatgtttactgatctttatattacagattttctcttcttttaggattagctcagcttgccccccctttccatctccaccatctatagtgagcctctccataattagtgccaaccattagtctcgttcatatttttacaccaggagtcaacaaactgtggccattggccaaatatggcctcccaactgtttttttaaaataaagttttattggaacacagccatgttcatttggacatgtattgtctgggcttcttttgtgctgcactggcagaattgagtagttttggcggagatcaaatagcccccaagctggaaactgaaaatatctactctctggctctttacagaaaatgtttgccagcacatgatacacacacaaacacacacacatacacacatattactatgttcatcatcatatacctgtgtaagtactctttcattgatttataaaactcagatctcttacgtgtgtggatggtatttttttcattctacaatccatgatggattgtacacacgtgtattctatgaggttgacctgccataatttatttagcccattnccacagtttttgattacttatttcctccccacacacattttttgctaaaaaacggagagggaactgttatcaatacttccgagaagcagaccagcataatcttttaagtgcacaggcccaggagccaggttcctgcatttgattcctggctccactctctaccctctgcatctgctgagcaagttatttggtctcatctattctggtttctcatctacaaaagggagatgatgatagtaccctacccccatgcatttggtgtgagaagtgtgtgtgtgttaaacccttggaactgcatggacagaycaagtgctgatgaattttarcgggcctcgtatccctgagcctgcctggttcccttgtgctgggtgtgggactgtggtgggagatttctgtcagctggaagtcttttccagaagggtgttagagatgggcacccatggctttagtctccataccccttcaaggttgataggggcccacacagctggtcaggaaccagcacagacctcaggctgtgtctaaaacaaggtgactgcacatgcaggagcctgtgctgggccctggagagcaaatctgttctgtgtctcactggcctctccctgtccaggggcgtagtatcagtgaccatgtcccacctcctgagaaaggtggaagagtctcacctggggagtccaggtacaagggctggccggccgtagatgactggtgtggggtggaaaggctgcagaggcctctccatggtggtgaggggtggaaatagtgtgcacctgggtcctgggagtggcaccctgaccagtttcagggaggaaggtggcagggccctaggacaagtgtgttaaaaacttgagcccacagtgtagacacactggttccaaagacccctcaggatgtgcctcccttctcagatctgggctttccctgttcctaagcatcacctggggggatcactctgggtcctcatctccagccacatgttcactcctcacgtgggcctccctaactgtccccctcagggcaagcccttcctccccacttccagaaagctgctcgttccctggccatcccacacctctgacctcgtgccacttccggggcctgttggctttaacaacttagtttcctccctacctcgcaaccccctctgtctagagtgctcacctccctcccagcctctgtctcatactattttttctttcctctcaagtaccaagcgctgggacaagccagtctgtactcaatgcctgtgggataatagacggaggaatctggagtttggttgggtgattaagctttggaattgatgggtcccagggagctatctaaagttttcaagtcacatgagggcatgctcacagatctgtgaaaagatctggtggctcagagaactaagagatgaataaatggtaagtccaatggcctcatcatgagatgagaggcaagaagntttgaggttncaganggagaagctactattctaggcaacttggatgaactnactcggttaattctcacaagcattgnanggaaataatctaacctcataaaccccattttagaggatgagggaacaaggcttagagnaa

SEQ ID NO: 2072 - DNA, 554 bp, Homo sapiens
  misc_feature (527)..(527): n equals a,t,g, or c
ggtacatttgtatattatcaaaatgttcttattgtaacaacttaactaatactaaaatggataaaggaaaagtcaatctcctggtagtacccctccattcttaacctctgaagtaacttgtgttaagtgacaattgtgtatcttactgatatacaactttttcactgtcatacaaacatccccaagggtgtttgtttctgaaaatattacagcattgatattctgcacattccgtagcttgctttaatcactcaatatgttataaacaccccttcgtgttaatagaaataatactaactcatcctttttaataaccaaagtatggktatatcataatctattataccattcaaatgttacttccagttttgggggattttttttttttggtctttttgctgttgktgttcattttttactattccaaaaatgcttcaacaaatattcttttacagattgaatgttgcttatccaaaatacttgggaccagaagtcttggggatttctgattttcagattagggatgntcamcctgtatatacctccttacacac

SEQ ID NO: 2073 - DNA, 1848 bp, Homo sapiens
  misc_feature (27)..(27): n equals a,t,g, or c
  misc_feature (880)..(880): n equals a,t,g, or c
taccgggcccccccccaattttttttntttttttttttttttktgagcaacagagatagtctttattcaaacgcagagagatccataacatggaaacactgacgcttccgaaaccgccccatttattcacttctcaagtggcccccgcttggatgcgccctcgggagagtgggctcagcacagcctagagcaccaggtctgaggtatctgcaaccacgtgggagccaggcccctggacgatgaaggacaatctcctggagcagcaataacttataaggagacataatttagagtagctggagccttggggatgactttatcctgcaggaggaggaggctgagagcagacgggacacgggggcccctaagaagcaaggttgggaaaggaggaggctgtttcccaatgcccgtgccggccaccagagggcccttcagtgcagagatggtcggcgcggcctcaccgcggtcaggagcagcgcgaaaccccctgtgccctcggccgcctgcagcatgagcctgcacaggagcccccgacaccccatggctccggggggccccaggggctgcggggctctggtcttagacgcagttatcagggacgcactcagcctcttcttcgagctcggggcaggggctcccgttgttggcgggctggacccggacgtagcgagtcctgctcttggtcccgagcctcccacagtggcctccgcacagtccccaggacgaccacagggagacctcgcagtccagcggcgtttctggaactgaggcgctgtctacaatctcattgtccctgctgggcaggactggggcgggagggatgaaggccctggggctctgtcgcagccgcascagtgtcaccctggcgatgggaggcagngccttcagccgcgggtagtagaaggagttggccgggtggctgggagaggaggacgttatctcggtcaccgtgtcctgcgggatggtggcgaagttgggggaggagaaggtgaagccgctgtccgtcccggcgtcgtaggggtacaggtccagcgccgcctgttcccgccaacggtccccgtcgcacaggtccaggctgtccacgcccacgaaccagtcggggctgggcacgatgcgcaccacaaacgagaccagcgagtgcctgcgctgcacctccagctccgccgacgtctgcccggtgccgctggggacggcgggcgccgaaaacacckcgtgcacgctctgcagcgcctcccccgccgcctcgatctccttcatcagcgcccaggcctcgccgcgctccgcaaagtcgcgcagcccgttactgacgtactggttcttcctccacatgctgtagtcggagctatgcgcggcccccagcagcgaagaccactgcgcaggggggcggaacagggggtactgcttggggaaggccgtctggctccacttgcccgtgaaggtgatgctgtatttggccggggctctggcggaacagatggactctcccccaagaggctggccggcggcgccgagagtggccaggaggagagcgcagagggccttgcccagggcggcggccgggctggggttttccatcacccggcaggagcagcgggagcgcggccggcagcggtcgggtcccagccagagcccggagctcctatttaagcccgaggccggcgccccgggccggccaatgaggctccagttcctcctgtcttcgatgctgcacggcctttttctatccacgttaagatgtcaagactgcagcaaaaagggcagcataaggacctctgagaattctcatcttcctccaagcagtgaggaaactcacagccggcggttccaaccccacagccggcggttccc

SEQ ID NO: 2074 - DNA, 487 bp, Homo sapiens
  misc_feature (6)..(6): n equals a,t,g, or c
  misc_feature (9)..(9): n equals a,t,g, or c
  misc_feature (17)..(17): n equals a,t,g, or c
  misc_feature (24)..(24): n equals a,t,g, or c
ccaatnggntacggggnccccccnttttttttttttttttttttttttttttgaaggaaaatttgtattatttcaattatttttatgtacagaaaactcaacagtgtacatttaacccagtttagtggcaagttctttagcctttgccttttcgagcttggcgatacgagccacagacttaggacccaggacattgccaccccagtgacggcggatctcatcgtatctgtcattgtaattggtcctgatagcttccaccagcttagccaaagcgcctttgtcttccgagttcacctgtgtgaaggcgacagtggtgcaggtcttcctgtggactagacgtcccagtcttgcctttcccttgataatgcagtaagggacccccattttacgacacagcggacgcgtgggcggacgcgtgggcggacgcgtgggcggacgcgtgggtcgacccgggaattccggaccggtgcccgggcaggcgggccgg

SEQ ID NO: 2075 - DNA, 575 bp, Homo sapiens
  misc_feature (527)..(527): n equals a,t,g, or c
ggcacgaggaggaaactaacgattccctgcccacccccacacccagcaccaccaacaggtgggcaagcttgccgagaaaacgcagagggcatcctgtgagcagcaaacacatctgagcctggaaaagacgcagagaagtaaaagatcaaagtctgattggcaccggctcccattccggctccagcctccaatccgacccccatttcggctgcagcctcggacctagctccggccctcggtctatccggttgcatcctccctccctgttccggatcttatcttgcgccasgcctactccaggatcccgtagccagacctcaagccatggctggtcccttctcccgtctgctgtccgcccgcccgggactcaggctcctggctttggccggagcggggtctctagccgctgggtttctgctccgaccggaacctgtacgagctgccagtgaacgacggaggctgtatcccccgagcgctgagtaaccagaacttccgaaagcacaacaattgcatggccatcacttganccagcatttatgcaaggtttggaaaagacaaaccattggtttgaagta

SEQ ID NO: 2076 - DNA, 786 bp, Homo sapiens
cgacagaagggtacggctgccagaagacgacagaagggtacggctgcgagaagacgacagaagggtacggctgcgagaagacgacagaagggggctcttcctcgtttgcccctcgtgttcatgggagctcgttttcttttcctctaggcagagaagaggcgatggcggcgatggcatctctcggcgccctggcgctgctcctgctgtccagcctctcccgctgctcagccgaggcctgcctggagccccagatcaccccttcctactacaccacttctgacgctgtcatttccactgagaccgtcttcattgtggagatctccctgacatgcaagaacagggtccagaacatggctctctatgctgacgtcggtggaaaacaattccctgtcactcgaggccaggatgtggggcgttatcaggtgtcctggagcctggaccacaagagcgcccacgcaggcacctatgaggttagattcttcgacgaggagtcctacagcctcctcaggaaggctcagaggaataacgaggacatttccatcatcccgcctctgtttacagtcagcgtggaccatcggggcacttggaacgggccctgggtgtccactgaggtgctggctgcggcgatcggccttgtgatctactacttggccttcagtgcgaagagccacatccaggcctgagggcggcaccccagccctgcccttgcttccttcaataaacatcacaggacctgggactgcacaggaaaaaaaaaaaaaaactcgrggggggcccggtacccaa

SEQ ID NO: 2077 - DNA, 2021 bp, Homo sapiens
tacgagttttttttttttttttttttttttttttttttttttttttttttttttttttagaatacctggtttattgggaaaacttcataatgaaaactacaattagctttttccacaacttacaaaataataatctgatatttaaaatgaattggttttcattatgtaagtcgaaatggtaaaaaatcataatgacctatccgatgcatcatatatatgctattcagagaaactcaaatccccgaattctcctgtggcatgttttatatcagacatttaaaatctgtttaccaagaaagaccaggattttaactatatgtaggtttctgcttacagttgcaaactatcagaagcctgtctatatgatagagcccagataaacctgagatttagaaaagcaagtcatttattctcctgaggctgttttagtggcacttttgtgacaagaatgaccctcctaatgctttactacacaacttaaccagatctatcagtcatgataaattagacccagtccatctttcaatccagtctactctggttctgaacatataaacacaaaacactacagatttattaatatagcattttcccacaccctaaccctataaagaactttaaaagagaaaatttcatctaaatatttcacacttaaaggaaagccttaccaactatggcaacaggtttggaccatgaaatagtactttcctagatgacatatcgagtcaacatgaagccttagctgaaatgaatgattcaggatattaatgagaaattctcacaaatgatatgcatttaggaaatgattttgctttccttaaatagttcgaaggcttgaaaataaactttttttttgcatttcttttagaatgtttggtcattaacaacttttaaccttatcttcctcttctccttagcccttaacagaccgagtccattctatttggaaataacaagaacttgatcagattattaaatcttggaaacctcatttttaccttataaagtgttaagtttcacgtgcatattctcttacaaatgtagtataaatgttatggatagatataaggaaatattggcatagtataggtaattagtgaaaagacacaacttcacaaaacataataaaagataaacatgaaactataacactacttaaaaaatattttctcccaaattattttagcatttttgactagtttaataatatgaacactgccaaaaaatgggttcaaagtcgcctggagaaacagtttcttcttctggagtccatctcagcagcagcgattttctcccacattcattcccaagttaggcagatgtgtagaagtacctgggcttggcattgcccagaaggtcatcttcgtagttggggaggcagcagaagaagaaggcacagccratcaggataatcgtggctgcccacccaaagccgtaggcccagttatagatgtaagtgacagcasggttggcatgaagggtgaaggtctgggtgtacttcacggggtaaattaccagggagatgatctggaacacagcagccaaggcaaggagacctccaatcactctcaggaagacaagcatctggggtccacagagggcgaagaaggagaggatgaaacagatcaccaggatgatgaagccacagaagagcatggcagccgctgctctaccccacgcgtactccatgaggctctgacagccctcctcgtaggacccgctgccgccgccctcttgggagcatttccaccacagcgaggacgtctggccgtggtcgctagactgcaaccagccgcggccggccagcgcgatgatgtcgaaggcgatggcgctgagtaggagcaggggcaggatccagcggcagcgctcgcaggccaggccgcagcggatcatgttgacgggcggcgcggggccgagcggagcggagcggagcgggtcggaggagcgcgcgggacgggcgacagcagagagtggcctgcgagcgcgggcgccgccacaaaagcgaagmggmcgcggggagc

SEQ ID NO: 2078 - DNA, 265 bp, Homo sapiens
  misc_feature (263)..(263): n equals a,t,g, or c
gggaatcttcatgggatcctacgggacttctactcaccactggtgcctgacagcatgaaatttgagattggagaggctctttacttgggcattatttcttccctgttctccctgatagctggaatcatcctctgcttttcctgctcatcccagagaaatcgctccaactactacgatgcctaccaagcccaacctcttgccacaaggagctctccaaggcctggtcaacctcccaaagtcaagagtgagttcaattcctacancc

SEQ ID NO: 2079 - DNA, 774 bp, Homo sapiens
  misc_feature (708)..(708): n equals a,t,g, or c
  misc_feature (726)..(726): n equals a,t,g, or c
  misc_feature (743)..(743): n equals a,t,g, or c
  misc_feature (748)..(748): n equals a,t,g, or c
  misc_feature (755)..(755): n equals a,t,g, or c
ctcgagtttttttttttttttttttttaactgctgccaccaccatgaaagagtggccaccacatctttattgcatactcaggtgaataacttattatacaatgaacactcctccattaggagaccatgcccacttacagaatgcagccgtaaatgcggtaaatctatttacagaggttggggtgcaagatgagagaagtatcagccccaggaatttgaagtgagaatgatctacaaattctcctgacaaggagcaaccgggcttgtgctagtgaggtctgaaagaattcctggcagagcgtagggggagattagatctcggaattgacagcaagtttggggacagtgcaagaagagaggggtgacctgtgaattggtgctggggagctgctgaggcccaatgtgaggcagcactagagagatgagtaaatttagggtgatctttagcctctcctacccaggcaagaagggttggggagcgggggtgccagcaagttggcttccagtgtagattcaggccagtgggctgagagaggcttttgctatttttgctcagatatgcaggtctgctctgggccacagagcctcacaaaacccactgtgagttagaggagcaggcccctagagctgtgtgagccagcgtgagctcagatgaccagacctttagtccatggaaaataacagcaagattaagggcctaggctggganctttggctcacgcctgtnaatccccagccactttnggganattgganaattgggaggaatttcctt

SEQ ID NO: 2080 - DNA, 2620 bp, Homo sapiens
  misc_feature (12)..(12): n equals a,t,g, or c
  misc_feature (22)..(22): n equals a,t,g, or c
  misc_feature (2594)..(2595): n equals a,t,g, or c
  misc_feature (2601)..(2601): n equals a,t,g, or c
gaattcccttgncggccgcagnaatttttttttttttttttttttagtttaatcatttttatttcaagtgtatttaaaaaatcataaatggggtttcataatccaaagttgaaacatttattcttcatagcttcagaatttaacaaccaattgtagaccatgctttccaaatccagtcttctttgctatttttcaaaacttctgagatctagtattaaactgctccattctaaatgtatagttttagataagtattgtacacttgttgataagggttttctgaaagcagtctatcaaatataaagaatggtttctatctaagaatcagcagtgagggaagaaatattaaacacctatcaagaaatcaattattcattttaaaaataacagaaccagtgctgctctctgtcataaaagagaacatgtaaaatttatttttatagactttggtaatattttattcccccacagaggccttcaatcctacttaaagatattttacacacrgtaaccatcaggatttactgagtaaaaatctcaggtattaaccatgcccctaaaatgtgctrttccaaagaggaacaggttacttttgaggaaaaaagctgccttggtaacttccctcaaatgtttattttaaataaaaatrgttgatggaartattttttaaamsaactttgggtataatatggcatactgcccatcaaacaaaaaaggaaataaaactttctttccatttataatragttttccacctttactatcaagattacaacttattgaccttttatgcttgcttggtttttttgactgcctaatccaatgtttaaatttttaagtctgcatttcaatgtagtaggagttatttttcaaataatcttcagaacccagaatacagagcaactctcagaataccagagcaacactctcaagtcatacttttgaacccagaataccagaataccagacttcagaacccagaataccagagcaacactctcaagtcatacttttgactacaattaagagatgaaaatggacggatatctgaagataggtattccctctgctctgaaggtgagcaagattttaacatgtgagcaacacagaactccactcctctgragctcctttcaactcagaatgcttcagttcagtaagtcaatatattattcttaaaaattaaagtttggtcactaagaaggactgaacaaaaattattcccctcccgccaaacacaaccagaacagttctaatcaggccctcttctccccacaaaaatagggaagtagctgggctgaagactttaagtgtgacatttcagttcctaaaacatcactgctatttgctcaaagttgtaggtctatgtatttccttctccaatacgtccccatttataagtttatttccatacatacaaacgtgcacatgtgtgcacgtgcacacgcacacacacacactcactctcaagtaagacacttttttgtgtttgttgataaattatgaggattatgaactaggtgtgtacagggtttcataggtgctttgtaaacatcagagtcacttggttcctttcctccacaagcctcaaatcaaattatgcaaccaatgaccactactttcccagacgctgttcacaggctgcatattgacgaagggcagagaaaaagtcctcataactgatgtttagrtgggaaggcaaagagacaatctcagtcaatctgatgtgccagggaagaaagcctmrtgtgctgtccacaggaccgaacttcartactaaatcaggatcaggacaaccatttgaactaagtaaactggctaacgtatctacatccaaatctgtgggtctcytttgcttctgggctactmactggcaaaagtcctgagcagctcttacaatatctgcttttccatcttccggcagacagcaccttcactgccaaatggcaatttaaaacttgatcatctttgtcattactatttgcaaattctggtgagtattttgaacaatctaggcccagaagttcttgctgttgttttaaaatttcatccatcaatctggaattatttcttttgaaaataccttggtggtcgtagacgctaatgtaggagatgcccacggccatacaccacaccacgaggctcgcgatgtccgagaagctgggttcctgctccacctcggtgatcaccaggcccatatgcacaggcagcttctccaaggaacgaccgtccgcgcgccagcgcatccggtggtgtgcggctgccaggcacgaccccccgcgcgggtgccggtggtgacggcggttcctgccgactgccgggggcttgcggagcgtgaagccgagcggcgctaggaccgcggcagaggcggcgcggcagcagcgccgccagatccagttccaggtgccgaaccgaacgcggagccaggaggtgagcgtgcggtgcagacagagcagcgcgtgcagcacccgccacaccagctcgtacagccccgtcatactcttgtggccctcggacaccccggacgcgtgggtcgacccgggaattccggaccggtacctgcaggcgtaccttctatagtgtcacgtaaattnntgcttnatcttcccccccccccccg

SEQ ID NO: 2081 - DNA, 1476 bp, Homo sapiens
  misc_feature (1223)..(1223): n equals a,t,g, or c
atcgacggcacggagggaggctttttttttttttacawtgtatttcatctatgtttttattaggtaaaaattaaccattccatataacaaaatagtaatttttaattacaatcttaaaacagaaggaagttaaacaactcaagtgaagttaataacagcagtttttgacaatattagtccttaaaagaaacagtaaaatatttggtttctataacagtcaaaacaattagactgattaaaccataaaaattaataacttataaaagaatccattatgattcatgcattgtatgtattataccactttaagttataccatattgaattcaaacgtatagttttgaattaagaaataaattctttgctcttatttacttgttatcataacaatttaaactgtgttacaactaaaatggtaaaggcagttgtaataaatacctgaggaagattttgaaagttttcctctctaagaattaacagaattattagagttatttcctaatgcagttggctcaccttatctgtaggttctacatccatggccaagaaattgccgactgaaactctgaagatgtacagactcttttttttcatgtaattattcactaaccagtatggtataacaactacatagcatttacattgtattaagtgttataaataatctagagatgacttaatgtatacaggaggatgtgcatagattatatgcaactactatgccagtttatatcagggacttgagcatctgcagattttggtatctataggggtaactggaaccaatcccccacagacactgagggatgactgtaattattttattaaaaagggagaaaaaaactatattaatataaactagtaattatgagatcagatgccattcttccattgagaataactttttgcaatgaagacagaatctgctttatcttactctgaaatctgttactgctggctggttagggtaatgtgttgaggaatcacaacaaagctcagagatgaagtatgctgtgtggattcaccatgtctataatgggaaaaagaaagtggtggtatctgtgttgagaatatgctaaccttgtttttatagattttcccttaatctcataactatttcctaaaatttactttctgtcatggtgggttcaaatacacaacgtacacaatgacaaaaactcctctgtggtagatacttctctaacaaaactttaatgaaatanggtatattataaaagattattaggtgtgacatttgtaaattatacctaaaataatatattctagttaaatggacataagaagaaaatccacaggttggatctatatagtgattaccatgtaagtgcttgcttatatcaaaatatcagtatagtgatttattcttttattttcccctagaaaatgattactactactgtattaatttcctaaggcctgatcattgtctgagaaatggcaaattccaaaatttta

SEQ ID NO: 2082 - DNA, 2224 bp, Homo sapiens
atagtggactcttgttccaaactggaacaacactcaaccctatctcggtctattcttttgatttataagggattttgccgatttcggcctattggttaaaaaatgagctgatttaacaaaaatttaacgcgaattttaacaaaatattaacgcttacaatttgccattcgccattcaggctgcgcaactgttgggaagggcgatcggtgcgggcctcttcgctattacgccagctggcgaaagggggatgtgctgcaaggcgattaagttgggtaacgccagggttttcccagtcacgacgttgtaaaacgacggccagtgaattgtaatacgactcactatagggcgaattgggtaccgggccccccctcgagtttttttttttttttttyttgccagaagggttgatttttaattatgtgtatatacaaacttctctattttaacattcaacatattcaggattaattctagaaagatgctatagctgatttataaaacaaaatgatttaggatcagaaagaaaataggggcacacaatttcatgtagtctctccctaactacccccaaccatagcatcacaaggttttttttttttcctaatgccacaattgaaacctgtattaacttaaaagttgacactaaaggcaggaattaagaagtcattttttatggcttttaagcacttgaatgctttagaacccccttgaaaatgctagtgaacaggtcttattcctttaaatgttgctttgatttgaatcttggtgaaatctagattccctattaaatagctgcatgctaattttggagaaagtacaatttaaaacctttaacaactactctattgactctgaagaaggggactttagcatgtcgctgtttgggctagagaagcatttcaacacctttctgcaaactaagataaaaaacaatgaatgagagctacaaatagaaatctagtaaggcagttctatcatgtaggaaaatggtttcccaaatgttttctacactgacattttttaaaaaagatatgatacccggttcttccacattcagtgtataaaactcaacttcagacatgtatgtgcggagaagactcgtatgtccaaaaccatccatttgcatggcaatcttgtctttgcattgctttgtgtcattctggcttccctcacccacaggccactggagggctgggaggcccaggagctcagcactctaactcctccatgacttccatgacaatcgtccgtgggcccgtcagaatcagattgttcacggtccggtagtctacatgcaggacattgacataaagctggtagatttccgattgtcatggctctgcttcctcaggcagaagggactgtcatgagtttcctgggaggagggggacttttcattgagcagctccatcagtcttcgcctccgccggaagttcattctgaactggtagagaagattgctgtccacaaatgggtgcttgctggacacatgctggatgatgccatgctccataagccggtggcaaagctgctctgcctctttcctcgtggtggcctcaccttcctgaaccagccagtccaggaattcagatgccatgaaggtgcgctcatacttgaccccttcctcctccctgggctgcaggagtgtgttttcagggctcatcagcttttcatatagcctctgtcctctcataaaggccttcacttcattatccaatgggaaggtgccgtcatcctttctaaagcggtagaagagtttgacatccttgaattccttatgctcatcacacacatggtgaataatgccccggtctgctaatttctgcatgagtttaattgccgtctctctgtcagaagcctctttgtgttcaatcagccagtcaatcagttcttttgcgacaaaacagtttgggtaggtcttgagatgatgacgtctatctttaataaccttttcttcgtgcagcctgagccgtagctgttccccggtgaccaagacctcagccatgcgctccagctccctttgctgcgccccgccactcccgctggtgctgctgtcactgccagcactgccagtgctgccgccctcctccatggttttagggccgtgcggctaccactggctccgctgtccgccgagggtttgggtgctcggatcagtctgccctcacagacgcttcccgcgccatctttgttcggggcagctccggacgcgtgggtcgacccg

SEQ ID NO: 2083 - DNA, 820 bp, Homo sapiens
  misc_feature (10)..(10): n equals a,t,g, or c
  misc_feature (14)..(14): n equals a,t,g, or c
  misc_feature (19)..(19): n equals a,t,g, or c
  misc_feature (38)..(38): n equals a,t,g, or c
  misc_feature (51)..(51): n equals a,t,g, or c
  misc_feature (690)..(690): n equals a,t,g, or c
  misc_feature (812)..(812): n equals a,t,g, or c
  misc_feature (814)..(814): n equals a,t,g, or c
acgggatttntggnatgcnattcccgacactatagatngtacgcctgcagntaccggtccggaattcccgggtcgacccacgcgtccgcccgccccaccagccatggtggtttctggagcgcccccagccctgggtgggggctgtctcggcaccttcacctccctgctgctgctggcgtckacagccatcctcaatgcggccaggatacctgttcccccagcctgtgggaagccccagcagctgaaccgggttgtgggcggcgaggacagcactgacagcgagtggccctggatcgtgagcatccakaagaatgggacccaccactgcgcaggttctctgctcaccagccgctgggtgatcactgctgcccactgtttcaaggacaacctgaacaaaccatacctgttctctgtgctgctgggggcctggcagctggggaaccctggctctcggtcccagaaggtgggtgttgcctgggtggagccccaccctgtgtattcctggaaggaaggtgcctgtgcagacattgccctggtgcgtctcgagcgctccatacagttctcagagcgggtcctgcccatctgcctacctgatgcctctatcmacytccctccaaacacccactgctggatctcaggctgggggagcatccaagatggagttcccttgcccaccctcagaccctgcanaagctgaaggttctatcatcgactcggaagtctgcagcatctgtactgcgggagcaagacaggacccatcactgaggacatgctgtgtgcggtacttggagggaacgggatgcttgctggcnantccggg

SEQ ID NO: 2084 - DNA, 1487 bp, Homo sapiens
  misc_feature (20)..(20): n equals a,t,g, or c
  misc_feature (30)..(31): n equals a,t,g, or c
  misc_feature (1474)..(1474): n equals a,t,g, or c
  misc_feature (1487)..(1487): n equals a,t,g, or c
atgctcgaccttagattgtnctcctgcagnnaccggtccggaattcccgggtcgacccacgcgtccgatttgcgggaacgcagagcggagcgtggagagcggagcgaagctggataacaggggaccgatgatgtggcgaccatcagttctgctgcttctgttgctactgaggcacggggcccaggggaagccatccccagacgcaggccctcatggccaggggagggtgcaccaggcggcccccctgagcgacgctccccatgatgacgcccacgggaacttccagtacgaccatgaggctttcctgggacgggaagtggccaaggaattcgaccaactcaccccagaggaaagccaggcccgtctggggcggatcgtggaccgcatggaccgcgcgggggacggcgacggctgggtgtcgctggccgagcttcgcgcgtggatcgcgcacacgcagcagcggcacatacgggactcggtgaagaatttcatgacgtggaggatgcagagacctacaaaaagatgctggctcgggacgagcggcgtttccgggtggccgaccaggatggggactcgatggccactcgagaggagctgacagccttcctgcaccccgaggagttccctcacatgcgggacatcgtgattgctgaaaccctggaggacctggacagaaacaaagatggctatgtccaggtggaggagtacatcgcggatctgtactcagccgagcctggggaggaggagccggcgtgggtgcagacggagaggcagcagttccgggacttccgggatctgaacaaggatgggcacctggatgggagtgaggtgggccactgggtgctgccccctgcccaggaccagcccctggtggaagccaaccacctgctgcacgagagcgacacggacaaggatgggcggctgagcaaagcggaaatcctgggtaattggaacatgtttgtgggcagtcaggccaccaactatggcgaggacctgacccggcaccacgatgagctgtgagcmccgcgcacctgccacagcctcagaggcccgcacaatgaccggaggaggggccgctgtggtctggccccctccctgtccaggccccgcaggaggcagatgcagtcccaggcatcctcctgcccctgggctctcagggaccccctgggtcggcttctgtccctgtcacacccccaaccccagggaggggctgtcatagtcccagaggataagcaatacctatttctgactgagtctcccagcccagacccagggacccttggccccaagctcagctctaagaaccgccccaacccctccagctccaaatctgagcctccaccacatagactgaaactcccctggccccagccctctcctgcctggcctggcctgggacacctcctctctgccaggaggcaataaaagccagcgccgggaaaaaaaaaaaaaaaaaaaaaaaaaaaaaaaaaanaaaaaaaaaaaan

SEQ ID NO: 2085 - DNA, 2386 bp, Homo sapiens
gacactatagaaggtacgcctgcaggtaccggtccggaattcccgggtcgacccacgcgtccgatcagttatggctaaatcctgtccatctgtgtgtcgctgcgatgcgggtttcatttactgtaatgatcgctttctgacatccattccaacaggaataccagaggatgctacaactctctaccttcagaacaaccaaataaataatgctgggattccttcagatttgaaaaacttgctgaaagtagaaagaatatacctataccacaacagtttagatgaatttcctaccaacctcccaaagtatgtaaaagagttacatttgcaagaaaataacataaggactatcacttatgattcactttcaaaaattccctatctggaagaattacatttagatgacaactctgtctctgcagttagcatagaagagggagcattccgagacagcaactatctccgactgcttttcctgcccgtaatcaccttagcacaattccctggggtttgcccaggactatagaagaactacgcttggatgataatcgcatatccactatttcatcaccatctcttcaaggtctcactagtctaaaacgcctggttctagatggaaacctgttgaacaatcatggtttaggtgacaaagttttcttcaacctagttaatttgacagagctgtccctggtgcggaattccctgactgctgcaccagtaaaccttccaggcacaaacctgaggaagctttatcttcaagataaccacatcaatcgggtgcccccaaatgctttttcttatctaaggcagctctatcgactggatatgtccaataataacctaagtaatttacctcagggtatctttgatgatttggacaatataacacaactgattcttcgcaacaatccctggtattgcgggtgcaagatgaaatgggtacgtgactggttacaatcactacctgtgaaggtcaacgtgcgtgggctcatgtgccaagccccagaaaaggttcgtgggatggctattaaggatctcaatgcagaactgtttgattgtaaggacagtgggattgtaagcaccattcagataaccactgcaatacccaacacagtgtatcctgcccaaggacagtggccagctccagtgaccaaacagccagatattaagaaccccaagctcactaaggatcaacaaaccacagggagtccctcaagaaaaacaattacaattactgtgaagtctgtcacctctgataccattcatatctcttggaaacttgctctacctatgactgctttgagactcagctggcttaaactgggccatagcccggcatttggatctataacagaaacaattgtaacaggggaacgcagtgagtacttggtcacagccctggagcctgattcaccctataaagtatgcatggttcccatggaaaccagcaacctctacctatttgatgaaactcctgtttgtattgagactgaaactgcaccccttcgaatgtacaaccctacaaccaccctcaatcgagagcaagagaaagaaccttacaaaaaccccaatttacctttggctgccatcattggtggggctgtggccctggttaccattgcccttcttgctttagtgtgttggtatgttcataggaatggatcgctcttctcaaggaactgtgcatatagcaaagggaggagaagaaaggatgactatgcagaagctggcactaagaaggacaactctatcctggaaatcagggaaacttcttttcagatgttaccaataagcaatgaacccatctcgaaggaggagtttgtaatacacaccatatttcctcctaatggaatgaatctgtacaaaaacaatcacagtgaaagcagtagtaaccgaagctacagagacagtggtattccagactcagatcactcacactcatgatgctgaaggactcacagcagacttgtgttttgggttttttaaacctaagggaggtgatggtaggaaccctgttctactgcaaaacactggaaaaagagactgaaaaaaagcaatgtactgtacatttgccatataatttatatttaagaactttttattaaaagtttcaaatttcaggttactgctgcgattgatgtagtggagatgcctgaacacaattctatattttagtattttttagtaatttgtactgtattttccttgcaaatattggagttataaaccatttactttgtgttctactgagtaagatgacttgttgactgtgaaagtgaattttcttgctgtgtcgaacaatcaggactgcattcatatgagatccttgtagtataagcacaggccatttttcactttggtattaataaaatgtaaaaaaaaaattggt

SEQ ID NO: 2086 - DNA, 3893 bp, Homo sapiens
  misc_feature (3)..(4): n equals a,t,g, or c
  misc_feature (14)..(14): n equals a,t,g, or c
ccnnacggaactcntacggggactttctaacggaamtctcgtgacactatagaaggtacgcctgcaggtaccggtccggaattcccgggtcgacccacgcgtccgatcccatcagagtctcacccccacattcaattactgaaaagcaatcgggaacttctggtcactcacatccgcaatactcagtgtctggtggacaacttgctgaagaatgactacttctcggccgaagatgcggagattgtgtgtgcctgccccacccagcctgacaaggtccgcaaaattctggacctggtacagagcaagggcgaggaggtgtccgagttcttcctctacttgctccagcaactcgcagatgcctacgtggacctcaggccttggctgctggagatcggcttctccccttccctgctcactcagagcaaagtcgtggtcaacactgacccagtgagcaggtatacccagcagctgcgacaccatctgggccgtgactccaagttcgtgctgtgctatgcccagaaggaggagctgctgctggaggagatctacatggacaccatcatggagctggttggcttcagcaatgagagcctgggcagcctgaacagcctggcctgcctcctggaccacaccaccggcatcctcaatgagcagggacctgctcttcaagcactactgctacccagagcgggaccccgaggaggtgtttgccttcctgctgcgcttcccccacgtggccctcttcaccttcgatggcctggacgagctgcactcggacttggacctgagccgcgtgcctgacagctcctgcccctgggagcctgcccaccccctggtcttgctggccaacctgctcagtgggaagctgctcaagggggctagcaagctgctcacagcccgcacaggcatcgaggtcccgcgccagttcctgcggaagaaggtgcttctccggggcttctcccccagccacctgcgcgcctatgccaggaggatgttccccgagcgggccctgcaggaccgcctgctgagccagctggaggccaaccccaacctctgcagcctgtgctctgtgcccctcttctgctggatcatcttccggtgcttccagcacttccgtgctgcctttgaaggctcaccacagctgcccgactgcacgatgaccctgacagatgtcttcctcctggtcactgaggtccatctgaacaggatgcagcccagcagcctggtgcagcggaacacacgcagcccagtggagaccctccacgccggccgggacactctgtgctcgctggggcaggtggcccaccggggcatggagaagagcctctttgtcttcacccaggaggaggtgcakgcctccgggctgcaggagagagacatgcagctgggcttyctgcgggctttgccggarctgggccccggrggtgaccagcagtyctatgagtttttccacctcaccctccaggccttctttacagccttcttcctcgtgctggacgacagggtgggcactcaggagctgctcaggttcttccaggagtggatgccccctgcgggggcagcgaccacgtcctgctatcctcccttcctcccgttccagtgcctgcagggcagtggtccggcgcgggaagacctcttcaagaacaaggatcacttccagttcaccaacctcttcctgtgcgggctgttgtccaaagccaaacagaaactcctgcggcatctggtgcccgcggcagccctgaggagaaagcgcaaggccctgtgggcacacctgttttccagcctgcggggctacctgaagagcctgccccgcgttcaggtcgaaagcttcaaccaggtgcaggccatgcccacgttcatctggatgctgcgctgcatctacgagacacagagccagaaggtggggcagctggcggccaggggcatctgcgccaactacctcaagctgacctactgcaacgcctgctcggccgactgcagcgccctctccttcgtcctgcatcacttccccaagcggctggccctagacctagacaacaacaatctcaacgactacggcgtgcgggagctgcagccctgcttcagccgcctcactgttctcagactcagcgtaaaccagatcactgacggtggggtaaaggtgctaagcgaagagctgaccaaatacaaaattgtgacctatttgggtttatacaacaaccagatcaccgatgtcggagccaggtacgtcaccaaaatcctggatgaatgcaaaggcctcacgcatcttaaactgggaaaaaacaaaataacaagtgaaggagggaagtatctcgccctggctgtgaagaacagcaaatcaatctctgaggttgggatgtggggcaatcaagttggggatgaaggagcaaaagccttcgcagaggctctgcggaaccaccccagcttgaccaccctgagtcttgcgtccaacggcatctccacagaaggaggaaagagccttgcgagggccctgcagcagaacacgtctctagaaatactgtggctgacccaaaatgaactcaamgatgaaktggcagagagtttggcagaaatgttgaaagtcaaccagacgttaaagcatttatggcttatccagaatcagatcacagctaaggggactgcccagctggcagatgcgttacagagcaacactggcataacagagatttgcctaaatggaaacctgataaaaccagaggaggccaaagtctatgaagatgagaagcggattatctgtttctgagaggatgctttcctgttcaggggtttttgccctggagcctcagcagcaaatgccactctgggcagtcttttgtgtcagtgtcttaaaggggcctgcgcaggcgggactatcaggagtccactgcctccatgatgcaagccagcttcctgtgcagaaggtctggtcggcaaactccctaagtacccgctacaattctgcagraaaagaatgtgtcttgcgagctgttgtagttacagtaaatacactgtgaagagactttattgcctattataattatttttatctgaagctagaggaataaagctgtgagcaaacagaggaggccagcctcacctcattccaacacctgccatagggaccaacgggagcgagttggtcaccgctcttttcattgaagagttgaggatgtggcacaaagttggtgccaagcttcttgaataaaacgtgtttgatggattagtattatacctgaaatattttcttccttctcagcactttcccatgtattgatactggtcccacttcacagctggagacaccggagtatgtgcagtgtgggatttgactcctccaaggttttgtggaaagttaatgtcaaggaaaggatgcaccacgggcttttaattttaatcctggagtctcactgtctgctggcaaagatagagaatgccctcagctcttagctggtctaagaatgacgatgccttcaaaatgctgcttccactcagggcttctcctctgctaggctaccctcctctagaaggctgagtaccatgggctacagtgtctggccttgggaagaagtgattctgtccctccaaagaaatagggcatggcttgcccctgtggccctggcatccaaatggctgcttttgtctcccttacctcgtgaagaggggaagtctcttcctgcctcccaagcagctgaagggtgactaaacgggcgccaagactcaggggatcggctgggaactgggccagcagagcatgttggacaccccccaccatggtgggcttgtggtggctgctccatgagggtgggggtgatactactagatcacttgtcctcttgccagctcatttgttaataaaatactgaaaacacaaaaaaaaaaaaaaaaaaaaaaaa

SEQ ID NO: 2087 - DNA, 3233 bp, Homo sapiens
  misc_feature (3)..(3): n equals a,t,g, or c
  misc_feature (10)..(10): n equals a,t,g, or c
aangaactangtttggacgtcgccacattawwcactaaaattagtttaagcattcagtagcaaatggtttttcttgtaaaactaagtttctttcaccggaaatggcctgaaatattagtcatagccctaaaccatagtacaaaatataactgaagaattctcattttattctaagttaaaccacctaacaataccacttgtatattgccatcatgttattctgtaaagatgtgatatataaaatgctgtaagacctggtaccttttcaatttataaacacagtgaacttcattactgtacatgtactctgcaactacagcttagctgtaaatcctccacacacaatggtatggacattattccccctctatccccgttaaactgtacatcgagacaatacaaatttactgtcccacccacccccttacaaaaaaataatactctaaaagcaaccctactgcaactttttaattaagacgattacatatattttagaccaattgctttaaagcaagaaggcagtataaaccttctaggaaaatttttataaaagaggttaagaaatataagacaatttatacatttaaaaacttacaataaataagagaagagatgcaggcatttttgaatactagatactataatccatacaagaacatcttcatgttctgaagccatatgttgaaattcattgttcctcatgtttcctctccatgcttttaatattcatttaacatgactgggtactatggctcattacttttcacaaatactgtgactggaaaaaaaaaaggttaattttgctacgaaaatgttataatacgttttgtatgatcagtcatcatcctaaagagttcaatagagtcaatgaaaaatagcagggttatagcccctccccccaagtcaaaacaatatttgttgaagtaataagaattagaccccatcacaaatgaccttcactgagaagataattgtaacttaatcctgcagcgaaacatccatttttccttgttcttttcttgcacagttccatcaaatgaagatcacagcatattcataataaagttatataactgattcagcaccacaaaatgaattgggagacatgagcgtctgtcctgggttgcagggtcacaggttagccaggagagtgcattgtactgttccaaaacaaacctgaggacatctgaagtctgatttgagtcaagtgggtgggagtgtttactgtgaagcagctcgtcagattgcactgaaggcacgtggaggtgcaaagaggccttaagaaaaaggggacactgatattgtgcttgaggacatgctgaccagaaccagtcaggtaatggacctgctttggcagttgatacaaagtaaccaagggccaatggttgctgaagaatattaggtacttcctcatgaggttctgttgatagtagccgatcagtactctgacccttgcccgcatcacctccatgggggtaatgagatcctggagaatgtacaggagaaccagttggagaagcaggaaggatattaatgatatcagggtcaagatcatctcctgtgtctaacaaatcaaagatacccattccatctgctccatcattgttgggattgaaagctaaatccaaattttcagtggtataagtagctgaagctacttgcacagaagcagaagtaggaaacacaagtatatgagtacatgatgtatcctgtggggtatttagctgagatgtctgcatatttagagtcgtgcttcttccaaatacagaaccagttgacacagaatctggcataataacaaaagagccttgcggctccattgccaccaagcaagcactgagaatgctaggggagtctgcagcagatatmccacacattctacacatgtctttgagccttttacttagagactgcaagtttcgacgactcagcaaacagctccaatctttcaattctccatgaccaatccttcctagacgaccaattacaactctccatggcaatgaactcatttgtacaagtcctaagcaccactcccaaagtttctgtagaccaaattttctagcagaactttttttccgacgagccctatttggaacatcgatgttaatgatacaagtttctaaaagttctccatatagatctgtgcaagatgcaagaatccacctttgatcatgtgataaacagtatcccacaaaaagaacattatatttctgtccagcttctccaaatgtttctcctagctctgtctgtttgtccttcactggagccagaataaaaggaggtgcataaagtcgaatacactctggtctatcaggacttctaagggcagtttccatggctaaacctggaccaaagccagtcaatgttttcacattggttgatgttggaagtggcctccgacactgggtaaaggccgaaaaagccagggattttaaatgctggggatagatttctctatcttcatgcttcacaggttgcaacaggtactgacaaggaataatctgtacagaaacagtactcttgatatgaggaggaagagtctggaccatttctagaaagcatcgaagtagccccaatgtccacacactagaagagttagtgctctcgtctgtattttcgtatgtaaaaggatcaattatataamcaacaattgcaggtggatacgtgactgcatgtgaatcaccatctgtggggattcccactttatcccgatccatcgtgctttcagacacatcaggatgcggctgagtgggaagtgaagatgattctccagaaatcccagctgtctgtagagctgatgtctgttgccctcctagctgaccactctgaactgtatttgcttgtgtagacatggatcctgcagcattactgttcatactgccaaagggtggaaacgaaggtagtttatttgatgatactccactattcaagttggaggatgatgaagatgaagttgaagctgtggtcaaagttgaattagctgtggcaactgaagtagatatggcaacacctgaagtcactgtcatagtgctgctcgctgcagatgctaaggtggcagatggagtattagcatttccagtatttgtcatctgaggtggagtaatcaaagactgacttgtaggggcaactaaatttggctggraaagtagagagctgtccaatggcagggaagcaagataaggacctaggtcatatctgcagacttgtgcataaagcttgagtggagaaag

SEQ ID NO: 2088 - DNA, 2981 bp, Homo sapiens
  misc_feature (139)..(140): n equals a,t,g, or c
  misc_feature (2817)..(2817): n equals a,t,g, or c
  misc_feature (2916)..(2916): n equals a,t,g, or c
gtcagcctcacgcggcgggaaggaaccggtccgaggccccgggctgccggcgcgggcgcccggcacgtccacaggctgggtcgcgaggtggcgatcgctgagaggcaggagggccgaggcgggcctgggaggcggcccnnggtggggcgccgctggggccggcccgcacggcttcatctgagggcgcacggcccgcgaccgagcgtgcggactggcctcccaagcgtggggcgacaagctgccggagctgcaatgggccgcggctggggattcttgtttggcctcctgggcgccgtgtggctgctcagctcgggccacggagaggagcagcccccggagacagcggcacagaggtgcttctgccaggttagtggttacttggatgattgtacctgtgatgttgaaaccattgatagatttaataactacaggcttttcccaagactacaaaaacttcttgaaagtgactactttaggtattacaaggtaaacctgaagaggccgtgtcctttctggaatgacatcagccagtgtggaagaagggactgtgctgtcaaaccatgtcaatctgatgaagttcctgatggaattaaatctgcgagctacaagtattctgaagaagccaataatctcattgaagaatgtgaacaagctgaacgacttggagcagtggatgaatctctgagtgaggaaacacagaaggctgttcttcagtggaccaagcatgatgattcttcagataacttctgtgaagctgatgacattcagtcccctgaagctgaatatgtagatttgcttcttaatcctgagcgctacactggttacaagggaccagatgcttggaaaatatggaatgtcatctacgaagaaaactgttttaagccacagacaattaaaagacctttaaatcctttggcttctggtcaagggacaagtgaagagaacactttttacagttggctagaaggtctctgtgtagaaaaaagagcattctacagacttatatctggcctacatgcaagcattaatgtgcatttgagtgcaagatatcttttacaagagacctggttagaaaagaaatggggacacaacattacagaatttcaacagcgatttgatggaattttgactgaaggagaaggtccaagaaggcttaagaacttgtattttctctacttaatagaactaagggctttatccaaagtgttaccattcttcgagcgcccagattttcaactctttactggaaataaaattcaggatgaggaaaacaaaatgttacttctggaaatacttcatgaaatcaagtcatttcctttgcattttgatgagaattcattttttgctggggataaaaaagaagcacacaaactaaaggaggactttcgactgcattttagaaatatttcaagaattatggattgtgttggttgttttaaatgtcgtctgtggggaaagcttcagactcagggtttgggcactgctctgaagatcttattttctgagaaattgatagcaaatatgccagaaagtggacctagttatgaattccatctaaccagacaagaaatagtatcattattcaacgcatttggaagaatttctacaagtgtgaaagaattagaaaacttcaggaacttgttacagaatattcattaaagaaaacaagctgatatgtgcctgtttctggacaatggaggcgaaagagtggaatttcattcaaaggcataatagcaatgacagtcttaagccaaacattttatataaagttgcttttgtaaaggagaattatattgttttaagtaaacacatttttaaaaattgtgttaagtctatgtataatactactgtgagtaaaagtaatactttaataatgtggtacaaattttaaagtttaatattgaataaaaggaggattatcaaattcatatatgataaaagtgaatgttctaagtctctcaaactagcgttttatgtaataatatgtaatataaataaaactatggtaaatgtgacaagcatttaataggaaaatgctaaggaggcctcataaatgacccataattaccaacgtagaatttttcagtacatttagggttgctggatttagcaaataaaaataaggattgcccagttagatttgaatttcagataaacaattagttttttaatattttacatggaatatttggaaaatacttatactaaaaaattrtttgtttgaaattcaaatttaactgggagtcttgtattttatctggcaatcctaaaatacattggtatgaaacaaatcacttttagaagtatattgctattttgattgggttgtttttgtgtgtagaaacgtacaataacaactcaaaggcacaggagatttctaaacattgtgaaaagttgaatagattatatatttattctcataatactttcactaatactaaataaaatttggggaacactttttatttttatataatttccaatttacagaaaagtttcaaaaatagtacaaagagctctcttacccagattcactaattgttcatacgtgctttatctttcatgctttctctgtacacacacacacacacacaaatttttcctcaatcatttgaaagtcagttataggcatcatgccccttaaaccctaaatacttcagtgtgtaatactgaataattactaaaaatgattttctcaraaaaaaaaaaytcccacaattctggaactataatactgtaagccttagaataaataatactttcaagttcaatctaaagktctttttgagktttggtgccggtttawgcttgatgggnatagtaatagggtarggctatttwatttwataaaaatttttttwagagacaagggtttgctggggtggccaactggacctggaccgactgggctgaagngatcttccacttagcttccaagtagctgggaaaacaggggctgccccataccaggttcaatttgg

SEQ ID NO: 2089 - DNA, 2458 bp, Homo sapiens
cggccacgaaccgcgtagttgcgcccaccccgggacccgggacccctgcsgagcgccacgccgacggcttggcgctcgccctggagcctgccctggcgtcccccgcgggcgccgccaacttcttggccatggtagacaacctgcagggggactctggccgcggctactacctggagatgctgatcgggacccccccgcagaagctacagattctcgttgacactggaagcagtaactttgccgtggcaggaaccccgcactcctacatagacacgtactttgacacagagaggtctagcacataccgctccaagggctttgacgtcacagtgaagtacacacaaggaagctggacgggcttcgttggggaagacctcgtcaccatccccaaaggcttcaatacttcttttcttgtcaacattgccactatttttgaatcagagaatttctttttgcctgggattaaatggaatggaatacttggcctagcttatgccacacttgccaagccatcaagttctctggagaccttcttcgactccctggtgacacaagcaaacatccccaacgttttctccatgcagatgtgtggagccggcttgcccgttgctggatctgggaccaacggaggtagtcttgtcttgggtggaattgaaccaagtttgtataaaggagacatctggtatacccctattaaggaagagtggtactaccagatagaaattctgaaattggaaattggaggccaaagccttaatctggactgcagagagtataacgcagacaaggccatcgtggacagtggcaccacgctgctgcgcctgccccagaaggtgtttgatgcggtggtggaagctgtggcccgcgcatctctgattccagaattctctgatggtttctggactgggtcccagctggcgtgctggacgaattcggaaacaccttggtcttacttccctaaaatctccatctacctgagagacgagaactccagcaggtcattccgtatcacaatcctgcctcagctttacattcagcccatgatgggggccggcctgaattatgaatgttaccgattcggcatttccccatccacaaatgcgctggtgatcggtgccacggtgatggagggcttctacgtcatcttcgacagagcccagaagagggtgggcttcgcagcgagcccctgtgcagaaattgcaggtgctgcagtgtctgaaatttccgggcctttctcaacagaggatgtagccagcaactgtgtccccgctcagtctttgagcgagcccattttgtggattgtgtcctatgcgctcatgagcgtctgtggagccatcctccttgtcttaatcgtcctgctgctgctgccgttccggtgtcagcgtcgcccccgtgaccctgaggtcgtcaatgatgagtcctctctggtcagacatcgctggaaatgaatagccaggcctgacctcaagcaaccatgaactcagctattaagaaaatcacatttccagggcagcagccgggatcgatggtggcgctttctcctgtgcccacccgtcttcaatctctgttctgctcccagatgccttctagattcactgtcttttgattcttgattttcaagctttcaaatcctccctacttccaagaaaaataattaaaaaaaaaacttcattctaaaccaaaacagagtggattgggctgcaggctctatggggttygttatgccaaagtgtctacatgtgccaccaacataaaacaaaaccaagccttggctcgttctcttctctcttcaatctctggaaaaataagtacatatagttgataacccctcttagcttacaggaagctttttgtattaattgcctttgaggttattttccgccagacctcaacctgggtcaaagtggtacaggaaggcttgcagtatgatggcaggagaatcagcctggggcctggggatgtaaccaagctgtacccttgagacctggaaccagagccacaggccccttttgtgggtttctctgtgctctgaatgggagccagaattcactaggaggtcatcaaccgatggtcctcacaagcctcttctgaagatggaaggccttttgcccgttgaggtagaggggaaggaaatctcctcttttgtacccaatacttatgttgtattgttggtgcgaaagtaaaaacactacctcttttgagactttgcccagggtcctgtgcctggatgggggtgcaggcagccttgaccacggctgttcccctcacccaaaagaattatcatcccaacagccaagacccaacaggtgctgaactgtgcatcaaccaggaagagttctatccccaagctggccactatcacatatgcttactcttgcttaaaattaataaatcatgttttgatgagaaaaaactaaaaaaaaaaaaaaaaaaaaaaaaaaaaaaaaaaaaaaaaaaa

SEQ ID NO: 2090 - DNA, 2650 bp, Homo sapiens
  misc_feature (1)..(1): n equals a,t,g, or c
  misc_feature (3)..(3): n equals a,t,g, or c
  misc_feature (10)..(10): n equals a,t,g, or c
  misc_feature (41)..(41): n equals a,t,g, or c
  misc_feature (549)..(549): n equals a,t,g, or c
ncngacagtnaccggtccgaattcgcggccggtcgaccggncaaggctggagagcgcaggtgttcccggaccccctggcgctgtcggtcctgctggcaaagatggagaggctggagctcagggaccccctggccctgctggtcccgctggcgagagaggtgaacaaggccctgctggctcccccggattccagggtctccctggtcctgctggtcctccaggtgaagcaggcaaacctggtgaacagggtgttcctggagaccttggcgcccctggcccctctggagcaagaggcgagagaggtttccctggcgagcgtggtgtgcaaggtccccctggtcctgctggtccccgaggggccaacggtgctcccggcaacgatggtgctaaggtgatgctggtgcccctggagctcccggtagccagggcgcccctggccttcagggaatgcctggtgaacgtggtgcagctggtcttccaggggcctaagggtgacagaagtgatgctggtcccaaagtgctgatggctctcctggcaaagatggcgtncgtggtctkamcggccccattggtcctcctggccctgctggtgcccctggtgacaagggtgaaagtggtcccagcggccctgctggtcccactggagctcgtggtgcccccggagaccgtggtgagcctggtccccccggccctgctggctttgctggcccccctggtgctgacggccaacctggtgctaaaggcgaacctggtgatgctggtgctaaaggcgatgctggtccccctggccctgccggacccgctggaccccctggccccattggtaatgttggtgctcctggagccaaaggtgctcgcggcagcgctggtccccctggtgctactggtttccctggtgctgctggccgagtcggtcctcctggcccctctggaaatgctggaccccctggccctcctggtcctgctggcaaagaaggcggcaaaggtccccgtggtgagactggccctgctggacgtcctggtgaagttggtccccctggtccccctggccctgctggcgagaaaggatcccctggtgctgatggtcctgctggtgctcctggtactcccgggcctcaaggtattgctggacagcgtggtgtggtcggcctgcctggtcagagaggagagagaggcttccctggtcttcctggcccctctggtgaacctggcaaacaaggtccctctggagcaagtggtgaacgtggtccccctggtcccatgggcccccctggattggctggaccccctggtgaatctggacgtgagggggctcctggtgccgaagttcccctggacgagacggttctcctggcgccaagggtgaccgtggtgagaccggccccgctggaccccctggtgctcctggtgctcctggtgcccctggccccgttggccctgctggcaagagtggtgatcgtggtgagactggtcctgctggtcccgccggtcctgtcggccctgttggcgcccgtggccccgccggaccccaaggcccccgtggtgacaagggtgagacaggcgaacagggcgacagaggcataaagggtcaccgtggcttctctggcctccagggtccccctggccctcctggctctcctggtgaacaaggtccctctggagcctctggtcctgctggtccccgaggtccccctggctctgctggtgctcctggcaaagatggactcaacggtctccctggccccattgggccccctggtcctcgcggtcgcactggtgatgctggtcctgttggtccccccggccctcctggacctcctggtccccctggtcctcccagcgctggtttcgacttcagcttcctgccccagccacctcaagagaaggctcacgatggtggccgctactaccgggctgatgatgccaatgtggttcgtgaccgtgacctcgaggtggacaccaccctcaagagcctgagccagcagatcgagaacatccggagcccagagggcagccgcaagaaccccgcccgcacctgccgtgacctcaagatgtgccactctgactggaagagtggagagtactggattgaccccaaccaaggctgcaacctggatgccatcaaagtcttctgcaacatggagactggtgagacctgcgtgtaccccactcagcccagtgtggcccagaagaactggtacatcagcaagaaccccaaggacaagaggcatgtctggttcggcgagagcatgaccgatggattccagttcgagtatggcggccagggctccgaccctgccgatgtggccatccagctgaccttcctgcgcctgatgtccaccgaggcctcccagaacatcacctaccactgcaagaacagcgtggcctacatggaccagcagactggcaacctcaagaaggccctgctcctccagggctccaacgagatcgagatccgcgccgagggcaacagccgcttcacctacagcgtcactgtcgatggctgcacgagtcacaccggagcctggggcaagacagtgattgaatacaaaaccaccaagacctcccgcctgcccatcatcgatgtggcccccttggacgttggtgccccagaccaggaattcggcttttgagggggttcagtttgggc

SEQ ID NO: 2091 - DNA, 2302 bp, Homo sapiens
  misc_feature (135)..(135): n equals a,t,g, or c
gacgccggagccctctgaccgcacctctgaccacaacaaacccctactccacccgtcttgtttgtcccacccttggtgacgcagagccccagcccagaccccgcccaaagcactcatttaactggtattgcggancacgaggcttctgcttactgcaactcgctccggccgctgggcgtagctgcgactcggcggagtcccggcggcgcgtccttgttctaacccggcgcgccatgaccgtcgcgcggccgagcgtgcccgcggcgctgcccctcctcggggagctgccccggctgctgctgctggtgctgttgtgcctgccggccgtgtggggtgactgtggccttcccccagatgtacctaatgcccagccagctttggaaggccgtacaagttttcccgaggatactgtaataacgtacaaatgtgaagaaagctttgtgaaaattcctggcgagaaggactcagtgatctgccttaagggcagtcaatggtcagatattgaagagttctgcaatcgtagctgcgaggtgccaacaaggctaaattctgcatccctcaaacagccttatatcactcagaattattttccagtcggtactgttgtggaatatgagtgccgtccaggttacagaagagaaccttctctatcaccaaaactaacttgccttcagaatttaaaatggtccacagcagtcgaattttgtaaaaagaaatcatgccctaatccgggagaaatacgaaatggtcagattgatgtaccaggtggcatattatttggtgcaaccatctccttctcatgtaacacagggtacaaattatttggctcgacttctagtttttgtcttatttcaggcagctctgtccagtggagtgacccgttgccagagtgcagagaaatttattgtccagcaccaccacaaattgacaatggaataattcaaggggaacgtgaccattatggatatagacagtctgtaacgtatgcatgtaataaaggattcaccatgattggagagcactctatttattgtactgtgaataatgatgaaggagagtggagtggcccaccacctgaatgcagaggaaaatctctaacttccaaggtcccaccaacagttcagaaacctaccacagtaaatgttccaactacagaagtctcaccaacttctcagaaaaccaccacaaaaaccaccacaccaaatgctcaagcaacacggagtacacctgtttccaggacaaccaagcattttcatgaaacaaccccaaataaaggaagtggaaccacttcaggtactacccgtcttctatctgggcacacgtgtttcacgttgacaggtttgcttgggacgctagtaaccatgggcttgctgacttagccaaagaagagttaagaagaaaatacacacaagtatacagactgttcctagtttcttagacttatctgcatattggataaaataaatgcaattgtgctcttcatttaggatgctttcattgtctttaagatgtgttaggaatgtcaacagagcaaggagaaaaaaggcagtcctggaatcacattcttagcacacctacacctcttgaaaatagaacaacttgcagaattgagagtgattcctttcctaaaagtgtaagaaagcatagagatttgttcgtatttagaatgggatcacgaggaaaagagaaggaaagtgatttttttccacaagatctgtaatgttatttccacttataaaggaaataaaaaatgaaaaacattatttggatatcaaaagcaaataaaaacccaattcagtctcttctaagcaaaattgctaaagagagatgaaccacattataaagtaatctttggctgtaaggcattttcatctttccttcgggttggcaaaatattttaaaggtaaaacatgctggtgaaccaggggtgttgatggtgataagggaggaatatagaatgaaagactgaatcttcctttgttgcacaaatagagtttggaaaaagcctgtgaaaggtgtcttctttgacttaatgtctttaaaagtatccagagatactacaatattaacataagaaaagattatatattatttctgaatcgagatgtccatagtcaaatttgtaaatcttattcttttgtaatatttatttatatttatttatgacagtgaacattctgattttacatgtaaaacaagaaaagttgaagaagatatgtgaagaaaaatgtatttttcctaaatagaaataaatgatcccattttttggtaaaaaaaaaaaaaaaaaaaaaaaaaaaaaaaa

SEQ ID NO: 2092 - DNA, 1958 bp, Homo sapiens
  misc_feature (1724)..(1724): n equals a,t,g, or c
  misc_feature (1843)..(1843): n equals a,t,g, or c
  misc_feature (1850)..(1850): n equals a,t,g, or c
  misc_feature (1864)..(1864): n equals a,t,g, or c
  misc_feature (1875)..(1875): n equals a,t,g, or c
  misc_feature (1907)..(1907): n equals a,t,g, or c
  misc_feature (1911)..(1911): n equals a,t,g, or c
  misc_feature (1936)..(1936): n equals a,t,g, or c
tcaccaaccatgcaaatgtgaatgagggcatsgttcccaytkcgatgctggttgccaacgatcagatggcgctgggcgcaatgcgcgccattaccgagtccgggctgcgcgttggtgcggatatctcggtagtgggatacgacgataccgaagacagctcatgttatatcccgccgttaaccaccatcaaacaggattttcgcctgctggggcaaaccagcgtggaccgcttgctgcaactctctcagggccaggcggtgaagggcaatcagctgttgcccgtctcactggtgaaaagaaaaaccaccctggcgcccaatacgcaaaccgcctctccccgcgcgttggccgattcattaatgcagctggcacgacaggtttcccgactggaaagcgggcagtgagcgcaacgcaattaatgtgagttagctcactcattaggcaccccaggctttacactttatgcttccggctcgtatgttgtgtggaattgtgagcggataacaatttcacacaggaaacagctatgaccatgattacgccaagctctaatacgactcactatagggaaagctggtacgcctgcaggtaccggtccggaattcccgggtcgacccacgcgtccgaccgaaacggacacggactgaatgttacttttcctcctctcctaagtggaaacgacttccaaacagttgaggaaggcagtaatgtgaagttggtttgcaatgtgaaagccaacccccaggctcaaatgatgtggtacaaaaacagtagtctcctcgatttagagaaaagccgtcaccaaatccaacagacaagtgagtcttttcagctgtcaatcaccaaagtcgagaagcctgacaacggaacctacagttgtattgcaaagtcatctctgaaaacggagagcttggactttcacctgattgttaaagataaaactgtgggtgtaccaatagagcccattattgctgcatgtgttgtgatctttctgacattgtgctttggactgattgctagaagaaagaaaataatgaagctctgcatgaaggataaagaccctcacagtgaaacagctctatgagaaagctgagatgccatcgaatacagagagagttttgcatcaggacctccacaatttatgtagtcccatctgtatttattgctattattaaattcactcctgtcactcctgtttcattaatcacttaacagtagttgktaggactaatttgatacacttgtggaacatttttatggaaagagctattaagaatgaaaagtaagattttgttaagtcttctccttgaagtatatgttaattaattgagatttgttccaaataggttggtaatcatttactgtttagtgtgttttttttctaggtaggagatacttgggtctcacaaattggtgcaaagccaaaaaaaaaaaaaaaagggcggccgctctagaggatccaagcttacgtacgcgtgcatgcgacgtcatagctcttctatagtgtcacctaaattcaattcactggccgtcgttttacaacgtcgtgactgggaaaaccctggcgttacccaacttaatcgccttgcagcacatccccctttcgccagctggcgtaatagcgaagaggcccgcaccgatcgcccttcccaacagttgcgcagcctgaatggcgaatgggacgcgccctgtagcggcgcattaagcgcggcgggtgtggtggntacgcgcagcgtgacccgctacacttgccagcgccctagcgcccgtcctttcgctttcttcccttcctttcttgccacgttcgcccggctttccccgtcaagctctaaatcgggggctncctttanggttcccatttagngctttaccggnaccttgaccccaaaaaaacttggattaagggngaanggttcacgtaaatggggcccattgnccctgatagaacgggttttttc

SEQ ID NO: 2093 - DNA, 1247 bp, Homo sapiens
  misc_feature (1244)..(1244): n equals a,t,g, or c
  misc_feature (1247)..(1247): n equals a,t,g, or c
tcgaaattaaccctcactaaagggaacaaaagctggagctccaccgcggtggcggccgctctagaactagtggatcccccgggctgcaggaattcggcacgagccgcgctcctgcctcctgccccagcaggcaggaagaatgggggctgacctctacctcggtgctcaagagagaggccccagctggcagggacccagaagagcctggagatgttggtgctggagaccccaactctgatcagggactccctgtgctgatgactcagggaacagaggacctaaagggcccaggacaaaggtgtgagaatgagccactgctggaccctgttggccctgagcctctggggcctgagagtcagtcagggaagggagacatggtggagatggccacacggtttgggtccaccctgcagctagacctggaaaaggggaaggagagtctgttggagaagaggctggtggcagaggaggaagaggacgaagaggaggtggaagaggatggccccagcagctgctcggaggacgattacagtgagctgctgcaggagatcacagacaacctgacgaagaaggagattcagatagagaagatccatttggacacrtcctccttcrtggaggagctgcctggagagaaggaccttgcccacgtggtagagatctatgactttgaaccagcgctcaagacggaggacctgctggcaacgttttctgagttccaagagaaggggttcaggattcagtgggtggatgatactcacgcactcggcatctttccctgcckggcctcagctgcggaagccctgacccgggagttctcggtgctcaagatccggcccctcacrcagggaaccaagcagtcaaagctcaaagccttgcagaggccaaaactcctgcgtctggtgaaggagaggccacagacaaatgcgactgtggcccggcggctggtggcccgggccctgggactccaacacaaaaagaaagagcggcctgctgtccggggtccgctgccgccctgaggcctggagacccaactggcctggatctgcgtcccgacgtagctggcgcccccaacaccataagccttcacagacgccagagcagccccgcaccaccctcgagcttcaccatggggtgtggtgggctttagtttagtcccagaaatggagaaaaaataaaaactcacgttgttctaatgtgaaaaaaaaaaaaaaaaaaaaaaaaaaaaaaaaaaaagggggggnccn

SEQ ID NO: 2094 - DNA, 2129 bp, Homo sapiens
  misc_feature (1705)..(1705): n equals a,t,g, or c
tagaactagtggatccccccggsctgcaggaattccggtcgtcggtctgtgcattattggctggttctggtttagcccgacgctgtacgttgattcctggaatccgcatcatgcaccgttcttcagtgcggtaggttcttccatcgctatgacgctgtgggcttttcttggtctggagtctgcgtgtgcgaatactgatgtagtggaaaacccggaacgtaatgtgccaatcgcggtactcggcggtacgttaggtgcggcggtgatttatatcgtctccaccaacgtgattgccgggattgtgccaaatatggagctggcaaattcaacggcaccatttggtctggccttcgcgcagatgttcacgccggaagtgggtaaagtcattatggcgctgatggtgatgtcctgctgcggttcgctacttggctggcagttcaccattgcccaggtgtttaaatcttcatctgatgaaggctacttccctaaaattttctcccgtgtaaccaaagtggatgcaccggtgcagggaatgttgaccattgtgattattcagagtggattggcactgatgaccattagcccgtcgctaaacagtcagttcaacgtgctggttaacctggccgtggcttccagcgtttcttcaaggcggttgaaccgaaatgggatctgaaaacggaytggcaaatcatcagtgaaatcgccacccgtatgggttatccgatgcactacaacaacacccaggagatctgggatgagttgcgtcatctgtgcccggatttctacggtgcgacttacgagaaaatgggcgaactgggcttcattcagtggccttgccgcgatacttcagatgccgatcaggggacttcttatctgtttaaagagaagtttgataccccgaacggtctggcgcagttcttcacctgcgactgggtagcgccaatcgacaaactcaccgacgagtacccgatggtactgtcaacggtgcgtgaagttggtcactactcttgccgttcgatgaccggtaactgtgcggyactggcggcgctggctgatgaacctggctacgcacaaatcaataccgaagacgccaaacgtctgggtattgaagatgaggcattggtttgggtgcactcgcgtaaaggcaaaattatcacccgkgcgcaggtcagcgatcgtccgaacaaaggggcgatttacatgacctaccagtggtggattggtgcctgtaacgagctggttaccgaaaacttaagcccgattacgaaaacgccggagtacaaatactgcgccgttcgcgtcgagccgatcgccgatcagcgcgccgccgagcagtacgtgattgacgagtacaacaagttgaaaactcgcctgcgcgaagcggcactggcgtaataccgtcctttctacagcctcctttcggaggctgtttttttatccattcgaactctttatactggttactccctacccaatcgtattatcaaaatgaaaaaaattatcgcattgatgttgtttttgacattctttgcccacgccaacgactccgagcctggcagccagtatttaaaggcagcagaggccggggaccgacgcgcacaatattttcttgccgacagctggtttagctccggcgatttgagcaaagccgaatattgggcacagaaagccgccgacagcggtgatgctgatgcctgcgcgctgntggcgcagatcaaaatcaccaatccggtcagtctggactatccacaagcaaaagttcttgcagagaaagcggcgcaagcgggcagtaaagaaggtgaagtaacgctggcgcatattctggtaaatactcaagcgggtaaaccggattatccaaaggcaatttcgctgttagaaaacgcctcggaagatctggagaacgactctgccgtcgatgcccaaatgctgcttggtttgatttacgccaacggcgtgggcattaaggccgacgatgacaaggcaacctggtatttcaaacgcagctctgcaatttcccgaaccggttattccgagtactgggcgggcccggtacccaattcgccctatagtgagtcgtattacaattcactggccgtcgttttacaacgtcgtgactgggaaaacccagg

SEQ ID NO: 2095 - DNA, 788 bp, Homo sapiens
ccacgcgtccggcatggtggtgtgcacctgtattctcagcctcccaagtagctgggattacagtcaggcaccaccacacccggctaattttgtatttttttagtagagacagggtttctccatgtcggtcagggtagtcccgaactcctgacctcaagtgatctgcctgcctcggcctcccaagtgctgggattacaggcgtgagccactgcacccagcctagaatcttgtataatatgtaattgtagggaaactgctctcataggaaagttttctgctttttaaatacaaaaatacataaaaatacataaaatctgatgatgaatataaaaaagtaaccaacctcattggaacaagtattaacattttggaatatgttttattagttttgtgatgtactgttttacaatttttaccatttttttcagtaattactgtaaaatggtattattggaatgaaactatatttcctcatgtgctgatttgtcttatttttttcatactttcccactggtgctatttttatttccaatggatatttctgtattactagggaggcatttacagtcctctaatgttgattaatatgtgaaaagaaattgtaccaattttactaaattatgcagtttaaaatggatgattttatgttatgtggatttcatttcaataaaaaaaaactcttatcaaaaaaaaaaaaaaaaaaaaaaaaaaaaaaaaaaaaaaaaaaaaaaaaaaaaaaaaaaaaaaaaaaaaaaaaaaaaaaaaaaaaaaaaaaaaaaaaaaaaaaa

SEQ ID NO: 2096 - DNA, 1350 bp, Homo sapiens
agtgggcgggccatttcttgttctctctcccgctctcggaagctttcgtctcgtgggtgcgaaaggtaaccgaagcggctcaggaaggcagctgtcactgagcccctggaacagagcgagagtatcgtaagtaaccaggctcagccggtttctcaggccgctctagtcaaataaaccataaagatcagactcgggcttcttcacttccttctctccgtggtttcgccattagcttccggttccggggaggggccgagttttcttcgaagatttggggctccgcgatacagttaggatggctgtagtacctctgctgttgttggggggtttgtggagcgctgtgggagcgtccagcctgggtgtcgttacttgcggctccgtggtgaagctactcaatacgcgccacaacgtccgactgcactcacacgacgtgcgctatgggtcaggtagtgggcagcagtcagtgacaggtgtaacctctgtggatgacagcaacagttactggaggatacgggggaagagtgccacagtgtgtgagaggggaacccccatcaagtgtggccagcccatccggctgacacatgtcaacactggccgaaacctccatagtcaccacttcacttcacctctttctggaaaccaggaagtgagtgcttttggtgaggaaggtgaaggtgattatctggatgactggacagtgctctgtaatggaccctactgggtgagagatggtgaggtgcggttcaaacactcttccactgaggtactgctgtctgtcacaggagaacaatatggtcgacctatcagtgggcaaaaagaggtgcatggcatggcccagccaagtcagaacaactactggaaagccatggaaggcatcttcatgaagcccagtgagttgttgaaggcagaagcccaccatgcagagctgtgaatctagaggctctgagccactgttaacgcacaatgttcacagacatctgttgctgcctcaccttgggatccctgccacaagttccttgggcagtggccatgtcaccattgagatgaagatatacaacagaaaatagtggctgtgtttggaagcttcagccctgcacatttgaactagtcactctcccagacttgcgtgggtcagttctttctgagtagaggacttgctggtaaaggggcagatgctttttattagtactgataaaacaaactgagggaaacatccctcttagctgggaaacttttactcttcaggagcttggcatcatggactgttaatgtatgtgattttccccctattttctctctccaaaatgataaaaacaataattttaaaaaaaaaaaaaaaaaaactcgagg

SEQ ID NO: 2097 - DNA, 716 bp, Homo sapiens
  misc_feature (563)..(563): n equals a,t,g, or c
  misc_feature (592)..(592): n equals a,t,g, or c
  misc_feature (607)..(607): n equals a,t,g, or c
  misc_feature (610)..(610): n equals a,t,g, or c
  misc_feature (638)..(638): n equals a,t,g, or c
gctctaatacgactcactatagggaaagctggtacgcctgcaggtaccggtccggaattcccgggtcgacccacgcgtccgcccacgcgtccgaagagattgaaaatggagatggtgagaagtggacaggtttgacaaagatttaagaggtaaatctgatctttggcaaaagtacaaagacaattcagtggagaaggaagagtcttcatggtgctggacaaccacatgcaaaaggaaaaataatctatccaacactgaccttttatctttcacaaaagttaactcagaaagtatcacagacctatacatacaattcaaaactgtaaaacttgtagataatgaggaagaaaatcttgtttggcaatatatttgtaaacacagcacgaaaatcatgacccataaagaaaaaattgataaggtagacttcattaaaattgaaaatttttcttctctgtaaaacactgtttaaaaaaaatgaaaagacaagccacagactaggagaaaatatttgtcaaacacatcttataaaggactggtatctaaaatataccaagaactcttancacacaataaagaaaaaatcttaaaaaanagcaaaaaatctgancanatgtatcaccaaagataatagagaaaanaaaaaaacatgaaatggagcttaacaccctatatcactagagaaatgctaattaaaacaatggatactaccacacccc

SEQ ID NO: 2098 - DNA, 1424 bp, Homo sapiens
  misc_feature (1391)..(1391): n equals a,t,g, or c
  misc_feature (1406)..(1406): n equals a,t,g, or c
  misc_feature (1415)..(1415): n equals a,t,g, or c
gaattcggcacgagtggctatatatttcttcacttgcaattgcctcatggggttcttataaggctgaaatccaataacggatacaaaaatactttaaaaagtaggcatggatttctactgacagccatgagagagtttctagaactagacctggatggccccaaacaactagaaaattggacaaaagatataaaaaaaaaactgttttcaaccattggacagtagtcagcataggactcttatctttgagagaaggggcaaaaacaagatgatccctataagcttccttaatttcttttttttctttttttgagacgctgtctccaaaacaaaacaaaagaataggacaatctcgtatttcctctatctagactcaacaattcttaatatttgctttatccctgtctttctacacatgcatacacatacacacacacaggcatacataattgcatatttacagggtgtttttgctgatctatttgaaagtaagtttcagacattatgacacctactcctaattcctcatgttttttctaagaataaggatattatcttacctaacatatcttttatcaaacctacaaaaattaacaattttatatctaatattagttcatgtttaggttttgcctgttttcccccaaatgtcttttacagtacatgtttttaaaaccaggatctaaggagttcacagattatatttggttattatgtctctttagtgtcttttggcatccttgggttttctacttttatcccccatgacactgactattggaagagtccagaccaattttctatttgattgcttccytgtgtgtatcatttaatttgttcctctatctcatgtgtttcttgtaaactgaaagttaggtgtagagattgagtctaaatatttttggcaagtatatgtcgtaggtaacatttgtgctttatactgcatcatattgggagataaataatattatattgccatctctgttagtgcagccattagaaagacattgtgcctatgtctgtctctttgctgtgtttggtatctgttgagagccatatttttataaaaatcttaaagcattgtcctctgtgaagaaaatatattagaaaaattacacttgacagtataagaattgttgatttgaataaatacatgatttttagaagacatatgtatgaccagcaggaatagtagcctaataggcctttgtttgggacagaatacacttcagatcatccagaaatctaaaatcaggcctgtgtgcctttgactggtatcttccatgtggtgttgaagagtttgagaatttaaaagaaaatgaattaatactaagcaagacacacttttttctttgttccttaaaaaaaaaaaaaaaaaaractcgaggggncccttggtacccganctcaagggngcatagtcg

SEQ ID NO: 2099 - DNA, 1226 bp, Homo sapiens
  misc_feature (164)..(164): n equals a,t,g, or c
  misc_feature (1180)..(1180): n equals a,t,g, or c
  misc_feature (1197)..(1197): n equals a,t,g, or c
  misc_feature (1215)..(1215): n equals a,t,g, or c
  misc_feature (1221)..(1221): n equals a,t,g, or c
  misc_feature (1224)..(1224): n equals a,t,g, or c
ggcacgagcggcggtggtcaatgcgttctactccccaaaccgaaaccagattgtattccctgccgggatcctccagccccccttcttcagcaaggagcagccacaggccttgaactttggaggcattgggatggtgatcgggcacgaratcacgcacggctttnacgacaatggccggaacttcgacaagaatggcaacatgatggattggtggagtaacttctccacccagcacttccgggagcagtcagagtgcatgatctaccagtacggcaactactcctgggactggcagacgaacagaacgtgagcgctgccaccagcacccaggctgcgggggtaccggagcccyagccctggccctgagggagagggaagtcagggccggggctgccccaatcctgtctcctgtgcgcagtgaacggattcaacacccttggggaaaacattgctgacaacggaggggtgcggcaagcctataaggcctacctcaagtggatggcagagggtggcaaggaccagcagctgcccggcctggatctcacccatgagcagctcttcttcatcaactatgcccaggtgtggtgcgggtcctaccggcccgagttcgccatccaatccatcaagacagacgtccacagtcccctgaagtacagggtactggggtcgctgcagaacctggccgccttcgcagacacgttccactgtgcccggggcacccccatgcaccccaaggagcgatgccgcgtgtggtagccaaggccctgccgcgctgtgcggcccacgcccacccgctgctcggaggcatctgtgcgaaggtgcagctagcggcgacccagtgtacgtcccgccccggccaaccatgccaagcctgcctgccaggcctctgcgcctggcctagggtgcagccacctgcctgacacccagggatgagcagtgtccagtgcagtacctggaccggagccccctccacagacacccgcggggctcagtgcccccgtcacagctctgtagagacaatcaactgtgtcctgcccaccctccaaggtgcattgtcttccagtatctacagcttcagacttgagctaagtaaatgcttcaaagaaaaaaaaaaaaaaactcgaggggggccggacccaatygccttaggagcgatacattcattggcgcgttwaacgcngactggaaacctgggtnccacttatcgcttgaganatcccnttnca

SEQ ID NO: 2100 - DNA, 1632 bp, Homo sapiens
  misc_feature (14)..(14): n equals a,t,g, or c
  misc_feature (1602)..(1602): n equals a,t,g, or c
  misc_feature (1616)..(1617): n equals a,t,g, or c
  misc_feature (1628)..(1628): n equals a,t,g, or c
ggcctgtggctgtnggccgcgtgcgggtgaccgccgagggccgaracatggttctgcagacgaccaaggggctgcggcttctctttgatggcgatgcccacctcctcatgtccatccccagccccttccgtggacggctctgtggcctctgtgggaacttcaatggcaactggagtgacgactttgtcctgcccaatggctcagcagcgtccagtgtggagaccttcggggctgcatggcgggygcccggctcctccaagggctgtggcgagggctgcgggccccaaggctgcccagtgtgcttggcagaggagactgcaccctatgagagcaacgaggcctgcgggcagctccggaacccccagggccccttcgcgacctgccaggcggtgctgagtccctctgagtacttccgccaatgcgtatacgacctgtgcgcgcaaaagggtgacaaagccttcctgtgccgcagcctggcagcctacacggcggcctgtcaggcagctggcgtggccgtgaagccctggaggacagacagcttctgcccgctccattgccccgcccacagccactactccatctgcactcgcacctgccagggatcctgtgcggctctctccggcctcacgggctgcaccacccgctgttttgagggctgtgagtgcgacgaccgyttcctgctttcccagggtgtctgcatccctgtccaagattgtggctgcacccataatggccgatacttgccggtaaactcctccctgctgacctcagactgcagcgagcgctgttcctgttcctcaagctctggcctgacatgccaggcagctggctgcccaccaggccgtgtatgtgaggtcaaggctgaagcccggaactgctgggccacccgtggtctctgtgtcctgtctgtgggtgccaacctcaccacctttgatggggcccgtggtgccaccacctctcctggtgtctatgagctctcttcccgctgcccaggactacagaataccatcccctggtaccgtgtagttgccgaagtccagatctgccatggcaaaacggaggctgtgggccaggtccacatcttcttccaggatgggatggtgacgttgactccaaacaagggtgtgtgggtgaatggtctccgagtggatctcccagctgagaagttagcatctgtgtccgtgagtcgtacacctgatggctccctgctagtccgccagaaggcaggggtccaggtgtggcttggagccaatgggaaggtggctgtgattgtcagcaatgaccatgctgggaaactgtgtggggcctgtggaaactttgacggggaccagaccaatgattggcatgactcccaggagaagccagcgatggagaaatggagagcgcaggacttctccccatgttatggctgatcagtcatccaccaggaacgaagatttcctgaagaagacctggtccctctggaggttgcrgtggctgaaggatgcatcatgtgctcctaccctgctctaccgcttttctgggtcacagaggccaaatgtgagagcattgaataaatatcttaagctaaaaaaaaaaaaraaaaagggccgataagggcanagggcccttggcanngagattcccgnttcc

SEQ ID NO: 2101 - DNA, 2429 bp, Homo sapiens
  misc_feature (2301)..(2301): n equals a,t,g, or c
  misc_feature (2307)..(2307): n equals a,t,g, or c
  misc_feature (2363)..(2363): n equals a,t,g, or c
  misc_feature (2373)..(2373): n equals a,t,g, or c
  misc_feature (2406)..(2406): n equals a,t,g, or c
tcgccagctcgaaattaaccctcactaaagggaacaaaagctggagctccaccgcggtggcggccgctctagaactagtggatcccccgggctgcaggaattcggcacgagtaactgcaatctggaagatttggataattggacagcacttatatctgcatcgaaagaagggcatgtgcacatcgtagaggaactactgaaatgtggggttaacttggagcaccgtgatatgggaggatggacagctcttatgtgggcatgttacaaaggccgtactgacgtagtagagttgcttctttctcatggtgccaatccaagtgtcactggtctgtacagtgtttacccaatcatttgggcagcagggagaggccatgcagatatagttcatcttttactgcaaaatggtgctaaagtcaactgctctgataagtatggaaccacccctttagtttgggctgcacgaaagggtcatttggaatgtgtgaaacatttattggccatgggagctgatgtggatcaagaaggagctaattcaatgactgcacttattgtggcagtgaaaggaggttacacacagtcagtaaaagaaattttgaagaggaatccaaatgtaaacttaacagataaagatggaaatacagctttgatgattgcatcaaaggagggacatacggagattgtgcaggatctgctcgacgctggaacatatgtgaacatacctgacaggagtggggatactgtgttgattggcgctgtcaraggtggtcatgttgaaattgttcgagcgcttctccaaaaatatgctgatatagacattagaggacaggataataaaactgctttgtattgggctgttgagaaaggaaatgcaacaatggtgagagatatcttacagtgcaatcctgacactgaaatatgcacaaaggatggtgaaacgccacttataaaggctaccaagatgagaaacattgaagtggtggagctgctgctagataaaggtgctaaagtgtctgctgtagataagaaaggagatactyccttgcatattgctattcgtggaaggagccggaaactggcagaactgcttttaagaaatcccaaagatgggcgattactttataggcccaacaaagcaggcgagactccttataatattgactgtagccatcagaagagtattttaactcaaatatttggagccagacacttgtctcctactgaaacagacggtgacatgcttggatatgatttatatagcagtgccctggcagatattctcagtgagcctaccatgcagccacccatttgtgtggggttatatgcacagtggggaagtgggaaatctttcttactcaagaaactagaagacgaaatgaaaaccttcgccggacaacagattgagcctctctttcagttctcatggctcatagtgtttcttaccctgctactttgtggagggcttggtttattgtttgccttcacggtccacccaaatcttggaatagcagtgtcactgagcttcttggctctcttatatatattctttattgtcatttactttggtggacgaagagaaggagagagttggaattgggcctgggtcctcagcactagattggcaagacatattggatatttggaactcctccttaaattgatgtttgtgaatccacctgagttgccagagcagactactaaagctttacctgtgaggtttttgtttacagattacaatagactgtccagtgtaggtggagaaacttctctggctgaaatgattgcaaccctctcggatgcttgtgaaagagagtttggctttttggcaaccaggctttttcgagtattcaagactgaagatactcagggtaaaaaaaaaaaaaaaaactcgagggggggcccggtacccaattcgccctatagtgagtcgtattacaattcactggccgtcgttttacaacgtcgtgactgggaaaaccctggcgttacccaacttaatcgccttgcagcacatccccctttcgccagctggcgtaatagcgaagaggcccgcaccgatcgcccttcccaacagttgcgcagcctgaatggcgaatggcaaattgtaagcgttaatattttgttaaaattcgcgttaaatttttgttaaatcagctcattttttaaccaataggccgaaatcggcaaaatcccttataaatcaaaagaatagaccgagatagggttgagtgttggtccagtttggaacaagagtccactattaaagaacgtggacttcaacgtcaaaagggcgaaaaacccgtntatcanggcgatggcccactacgtggaaccattacccttaatcaaggtttttttgggggtcnaaggtgcccntaaaggcacttaaaatcggggacccccttaaangggagcccccccgattttaaaaa

SEQ ID NO: 2102 - DNA, 902 bp, Homo sapiens
  misc_feature (834)..(834): n equals a,t,g, or c
  misc_feature (864)..(864): n equals a,t,g, or c
  misc_feature (894)..(894): n equals a,t,g, or c
tctaatacgactcactatagggaaagctggtacgcctgcaggtaccggtccggaattcccgggtcgacccacgcgtccgcccaagctcatggtttgcccacgggcacccactgtacacacgcctgccccccagcgccctgcaagttctgtcggcccaggggactcaggcgttgcaggcagcccagaggagcgcccagtgggcaataaaccgagtggcgatggagatccagcacagatcgcacgagtgccgaggatctgggcgccccaggcctcaagctctcctccaggacccacctgagccagggccgtgcggcgagaggcgtccgagcactgccaatgtgacgcgggcccacggccgcatcgtggggggcagcgcggcgccgcccggggcctggccctggctggtgaggctgcagctcggcgggcagcctctgtgcggcggcgtyctggtagcggcctcctgggtgctcacggcagcgcactgctttgtaggcgccccgaatgagcttctgtggactgtgacgctggcagaggggtcccggggggagcaagcggaggaggtgccagtgaaccgcatcctgccccaccccaagtttgacccgcggaccttycacaacgacctggccctggtgcarctgtggacgccggtgacccggggggatcggcgcgccccgtgtgcctgcccaggagccccaggagccccctgccggaaccgsctgsgccatcgcgggctggggcgccctyttcgaagacgggcctkaggctkaagcartgagagaggcccstgttcccctgstcagcaccgacacctgccgaagagccctggggcccggnctgcgccccagcaccatgctctgcgccganacctggcggcgggcgttgactcgtgccagngtgactcg

SEQ ID NO: 2103 - DNA, 1815 bp, Homo sapiens
gcgtggatccaagatggcgacggcgatggattggttgccgtggtctttactgcttttctccctgatgtgtgaaacaagcgccttctatgtgcctggggtcgcgcctatcaacttccaccagaacgatcccgtagaaatcaaggctgtgaagctcaccagctctcgaacccagctaccttatgaatactattcactgcccttctgccagcccagcaagataacctacaaggcagagaatctgggagaggtgctgagaggggaccggattgtcaacacccctttccaggttctcatgaacagcgagaagaagtgtgaagttctgtgcagccagtccaacaagccagtgaccctgacagtggagcagagccgactcgtggccgagcggatcacagaagactactacgtccacctcattgctgacaacctgcctgtggccacccggctggagctctactccaaccgagacagcgatgacaagaagaaggaaagtgatatcaaatgggctctcgctgggacacttacctgaccatgagtgacgtccagatccactggttttctatcattaactccgttgttgtggtcttcttcctgtcaggtatcctgagcatgattatcattcggaccctccggaaggacattgccaactacaacaaggaggatgacattgaagacaccatggaggagtctgggtggaagttggtgcacggcgacgtcttcaggccccccccagtaccccatgatcctcagctccctgctgggctcaggcattcagctgttctgtatgatcctcatcgtcatctttgtagccatgcttgggatgctgtcgccctccagccggggagctctcatgaccacagcctgcttcctcttcatgttcatgggggtgtttggcggattttctgctggccgtctgtaccgcactttaaaaggccatcggtggaagaaaggagccttctgtacggcaactctgtaccctggtgtggtttttggcatctgcttcgtattgaattgcttcatttggggaaagcactcatcaggagcggtgccctttcccaccatggtggctctgctgtgcatgtggttcgggatctccctgcccctcgtctacttgggctactacttcggcttccgaaagcagccatatgacaaccctgtgcgcaccaaccagattccccggcagatccccgagcagcggtggtacatgaaccgatttgtgggcatcctcatggctgggatcttgcccttcggcgccatgttcatcgagctcttcttcatcttcagtgctatctgggagaatcagttctattacctctttggcttcctgktccttgttttcatcatcctggtggtatcctgttcacaaatcagcatcgtcatggtgtacttccagctgtgtgcagaggattaccgctggtggtggagaaatttcctagtctccgggggctctgcattctacgtcctggtttatgccatcttttatttcgttaacaagtgactgcagcgccaagcggcatccaccaagcatcaagttggagaaaagggaacccaagcagtagagagcgatattggagtcttttgttcattcaaatcttggatttttttttttccctaagagattctctttttagggggaatgggaaacggacacctcataaagggttcaaagatcatcaatttttctgactttttaaatcattatcattattatttttaattaaaaaaatgcctgtatgcctttttttggtcggattgtaaataaatataccattgtcctacaaaaaaaaaaaaaaaaaaaaacttctcggccgcaaggaa

SEQ ID NO: 2104 - DNA, 5459 bp, Homo sapiens
  misc_feature (3960)..(3961): n equals a,t,g, or c
accaattcccttcctgggagttgcggcttccctcgctcggccccactcccgtttaccctttccccagctcccgccttagccaggggcttccccgcctgccgctagggctcgggccgaagcgccgctcagcgccagcctgccgctccccgggctccactttcactttcggtcctgggggarctargccggmggcagtggtggtggcggcggcgcaagggtgagggcggccccagaaccccaggtaggtagagcaagaagatggtgtttctgcccctcaaatggtcccttgcaaccatgtcatttctactttcctcactgttggctctcttaactgtgtccactccttcatggtgtcagagcactgaagcatctccaaaacgtagtgatgggacaccatttccttggaataaaatacgacttcctgagtacgtcatcccagttcattatgatctcttgatccatgcaaaccttaccacgctgaccttctggggaaccacgaaagtagaaatcacagccagtcagcccaccagcaccatcatcctgcatagtcaccacctgcagatatctagggccaccctcaggaagggagctggagagaggctatcggaagaacccctgcaggtcctggaacacccccctcaggagcaaattgcactgctggctcccgagcccctccttgtcgggctcccgtacacagttgtcattcactatgctggcaatctttcggagactttccacggattttacaaaagcacctacagaaccaaggaaggggaactgaggatactagcatcaacacaatttgaacccactgcagctagaatggcctttccctgctttgatgaacctgccttcaaagcaagtttctcaatcaaaattagaagagagccaaggcacctagccatctccaatatgccattggtgaaatctgtgactgttgctgaaggactcatagaagaccattttgatgtcactgtgaagatgagcacctatctggtggccttcatcatttcagattttgagtctgtcagcaagataaccaagagtggagtcaaggtttctgtttatgctgtgccagacaagatgaatcaagcagattatgcactggatgctgcggtgactcttctagaattttatgaggattatttcagcataccgtatcccctacccaaacaagatcttgctgctattcccgactttcagtctggtgctatggaaaactggggactgacaacatatagagaatctgctctgttgtttgatgcagaaaagtcttctgcatcaagtaagcttggcatcacaatgactgtggcccatgaactggcccaccagtggtttgggaacctggtcactatggaatggtggaatgatctttggctaaatgaaggatttgccaaatttatggagtttgtgtctgtcagtgtgacccatcctgaactgaaagttggagattatttctttggcaaatgttttgacgcaatggaggtagatgctttaaattcctcacaccctgtgtctacacctgtggaaaatcctgctcagatccgggagatgtttgatgatgtttcttatgataagggagcttgtattctgaatatgctaagggagtatcttagcgctgacgcatttaaaagtggtattgtacagtatctccagaagcatagctataaaaatacaaaaaacgaggacctgtgggatagtatggcaagtatttgccctacagatggtgtaaaagggatggatggcttttgctctagaagtcaacattcatcttcatcctcacattggcatcaggaaggggtggatgtgaaaaccatgatgaacacttggacactgcagaggggttttcccctaataaccatcacagtgagggggaggaatgtacacatgaagcaagagcactacatgaagggctctgacggcgccccggacactgggtacctgtggcatgttccattgacattcatcaccagcaaatccgacatggtccatcgatttttgctaaaaacaaaaacagatgtgctcatcctcccagaagaggtggaatggatcaaatttaatgtgggcatgaatggctattacattgtgcattacgaggatgatggatgggactctttgactggccttttaaaaggaacacacacagcagtcagcagtaatgatcgggcaagtctcattaacaatgcatttcagctcgtcagcattgggaagctgtccattgaaaaggccttggatttatccctgtacttgaaacatgaaactgaaattatgcccgtgtttcaaggtttgaatgagctgattcctatgtataagttaatggagaaaagagatatgaatgaagtggaaactcaattcaaggccttcctcatcaggctgctaagggacctcattgataagcagacatggacagacgagggctcagtctcagagcgaatgctgcggagtgaactactactcctcgcctgtgtgcacaactatcagccgtgcgtacagagggcagaaggctatttcagaaagtggaaggaatccaatggaaacttgagcctgcctgtcgacgtgaccttggcagtgtttgctgtgggggcccagagcacagaaggctgggattttctttatagtaaatatcagttttctttgtccagtactgagaaaagccaaattgaatttgccctctgcagaacccaaaataaggaaaagcttcaatggctactagatgaaagctttaagggagataaaataaaaactcaggagtttccacaaattcttacactcattggcaggaacccagtaggatacccactggcctggcaatttctgaggaaaaactggaacaaacttgtacaaaagtttgaacttggctcatcttccatagcccacatggtaatgggtacaacaaatcaattctccacaagaacacggcttgaagaggtaaaaggattcttcagctctttgaaagaaaatggttctcagctccgttgtgtccaacagacaattgaaaccattgaagaaaacatcggttggatggataagaattttgataaaatcagagtgtggctgcaaagtgaaaagcttgaacgtatgtaaaaattcctcccttgccaggttcctgttatctctaatcaccaacattttgttgagtgtattttcaaactagagatggctgttttggctccaactggagatacttttttcccttcaactcattttttgactatccctgtgaaaagaatagctgttagtttttcatgaatgggctttttcatgaatgggctatcgctaccatgtgttttgttcatcacaggtgttgccctgcaacgtaaacccaagtgttgggttccctgccacagaagaataaagtaccttattcttctcattttatagtttatgcttaagcacccgtgtccaaaaccctgtaccccatgtttatmattcataaactgtttcatcagtctcctcgaaagactctgaatagtcgactactgaacaatgaacacctggatctgagactaagccggacgatgactgggttaaagctctcccggctcacccctccagacccgctgcccatccctcttccttgctccatgcccaggggctgacttgtaaaggccaagtcatcaagctttcttgccctttggatgttggtcagtggggagccggagagctggagctggggtcggaggaggtagtaggtggaggtgttcttccctgattcccttgcgggatgcctcgggctggcctcccctgagggtcttagctccgagaggggaccctcttttccacacagccttctccacctctggattttggtaactgctccctcctcatcccttcaggattagtggcctcagtgggagtctggcttttactagtcctggcggacttgtggtttctacataatgtgctcgcacttttgcaaaaaatctttttatagaaccctcctcagataattctgagtgnntcatctatttccctgactggtacagtatctcttctgaaaaagcagagtgcattcaagtctgtaggaaaacccttttcttagggaggtgattttttttctctctctgcttcttatttggcctactttacaatttctaactaactagttattggcatttactgacagtaaattattgcagtcaccaataaatgatagtacattgtgaaacaaaatatttgctcatattagcaaataggacattctttggctttgaagtctttcttttgtgaagacttcacacacggttgcttcagcacacagttgctgctcaggttttatgtatagatgataataatagaaagcacagtttactaacatggtaaaccaacggagttcaagtcaagtcagttaataccctaagaattagattttatttcttattctgaaaacttgctacacagggacttatctaacccatagtgtgctctgttgctgacttgattcaagttgcagcgtgttttgcgctgactctaaggtgcggaaatcctcacacctggcaaaggagaattcaaactgaactttttgaatataaggcaaaaacttcaagataagggaatatgattgatgattggtacgaaaaatgtcaaaatgtgttcccctaatacacgacaaaatagagtgacttctggacataaatctgccatttattaaaccattcactacaacaaataaataggtataaaagtggaattggaatttttatacttatttgttgtagtgaatggtttaataaaaatagaaatcactggtaatttccaccccaaactaaactatttcccttcttttaaaaaaatacacaaccaagattttaatgtaaaatattttgctttaattgtattttatgccttgattaatgaaacatggaaatattgattttcagttttggtcacctgaggaacctatctttgtttgcttttggaaaagcccattttctaaacagatacaatattgccacaacaatgtgcagaaacctttttgataataaaaaattgttctttgcctctaagtggatatttgcaattattttctctctcctaactagactgtaaaaagggctgctttagatcctgtagcttactccagttattagttattaacaaacacccaagtctcgaagatatttctaattaaaaaagaaggcatattcagagttctttttaaataaatgttgtttacttttataggcatctttaaacttctggattttggtatgccatttaaaaatacttccagatacacatggaaattagtaatactgcagccgtatccttgcaaacacatctgtcagtgtmaaaggtttcaaggtttttcttaaaaaaagaaaacaaaaaagcaarcacctatastgcccaawtggggtggttggtcactggttagaagtccctcgggaaagtgttgtgcctgtctcgttgccgcctaagaatagatagtgaccatttccgtggatagggccagcatt

SEQ ID NO: 2105 - DNA, 2085 bp, Homo sapiens
  misc_feature (2062)..(2062): n equals a,t,g, or c
  misc_feature (2065)..(2065): n equals a,t,g, or c
  misc_feature (2084)..(2084): n equals a,t,g, or c
cgtccgcaacggctcattctgctcccccgggtcggagccccccggagctgcgcgcgggcttgcagcgcctcgcccgcgctgtcctcccggtgtcccgcttctccgcgccccagccgccggctgccagcttttcggggccccgagtcgcacccagcgaagagagcgggcccgggacaagctcgaactccggccgcctcgcccttccccggctccgctccctctgccccctcggggtcgcgcgcccacgatgctgcagggccctggctcgctgctgctgctcttcctcgcctcgcactgctgcctgggctcggcgcgcgggctcttcctctttggccagcccgacttctcctacaagcgcagcaattgcaagcccatcccggycaacctgcagctgtgccacggcatcgaataccagaacatgcggctgcccaacctgctgggccacgagaccatgaaggaggtgctggagcaggccggcgcttggatcccgctggtcatgaagcagtgccacccggacaccaagaagttcctgtgctcgctcttcgcccccgtctgcctcgatgacctagacgagaccatccagccatgccactcgctctgcgtgcaggtgaaggaccgctgcgccccggtcatgtccgccttcggcttcccctggcccgacatgcttgagtgcgaccgtttcccccaggacaacgacctttgcatccccctcgctagcagcgaccacctcctgccagccaccgaggaagctccaaaggtatgtgaagcctgcaaaaataaaaatgatgatgacaacgacataatggaaacgctttgtaaaaatgattttgcactgaaaataaaagtgaaggagataacctacatcaaccgagataccaaaatcatcctggagaccaagagcaagaccatttacaagctgaacggtgtgtccgaaagggacctgaagaaatcggtgctgtggctcaaagacagcttgcagtgcacctgtgaggagatgaacgacatcaacgcgccctatctggtcatgggacagaaacagggtggggagctggtgatcacctcggtgaagcggtggcagaaggggcagagagagttcaagcgcatctcccgcagcatccgcaagctgcagtgctagtcccggcatcctgatggctccgacaggcctgctccagagcacggctgaccatttctgctccgggatctcagctcccgttccccaagcacactcctagctgctccagtctcagcctgggcagcttccccctgccttttgcacgtttgcatccccagcatttcctgagttataaggccacaggagtggatagctgttttcacctaaaggaaaagcccacccgaatcttgtagaaatattcaaactaataaaatcatgaatatttttatgaagtttaaaaatagctcactttaaagctagttttgaataggtgcaactgtgacttgggtctggttggttgttgtttgttgttttgagtcagctgattttcacttcccactgaggttgtcataacatgcaaattgcttcaattttctctgtggcccaaacttgtgggtcacaaaccctgttgagataaagctggctgttatctcaacatcttcatcagctccagactgagactcagtgtctaagtcttacaacaattcatcattttataccttcaatgggaacttaaactgttacatgtatcacattccagctacaatacttccatttattagaagcacattaaccatttctatagcatgatttcttcaagtaaaaggcaaaagatataaattttataattgacttgagtactttaagccttgtttaaaacatttcttacttaacttttgcaaattaaacccattgtagcttacctgtaatatacatagtagtttacctttaaaagttgtaaaaatattgctttaaccaacactgtaaatatttcagataaacattatattcttgtatataaactttacatcctgttttacctaaaaaaaaaaaaaaaaaaaaaaaaaaaaaaaaaaaaaaaaaaaaaaaaaaaaaaaaaaaaaaaaaaanaanaaaaaaaaaaaaaaaaaana

SEQ ID NO: 2106 - DNA, 1781 bp, Homo sapiens
ggcacgmgccgcgcctcccggcgctccctccccgactcctaagtccttcggccgccaccatgtccgcctcggctgtcttcattctggacgttaagggcaagccattgatcagccgcaactacaagggcgatgtggccatgagcaagattgagcacttcatgcctttgctggtacagcgggaggaggaaggcgccctggccccgctgctgagccacggccaggtccacttcctatggatcaaacacagcaacctctacttggtggccaccacatcgaagaatgccaatgcctccctggtgtactccttcctgtataagacaatagaggtattctgcgaatacttcaaggagctggaggaggagagcatccgggacaactttgtcatcgtctacgagttgctggacgagctcatggactttggcttcccgcagascaccgacagcaagatcctgcaggagtacatcactcagcagagcaacaagctggagacgggcaagtcacgggtgccacccactgtcaccaacgctgtgtcctggcgctccgagggtatcaagtataagaagaacgaggtcttcattgatgtcatagagtctgtcaacctgctggtcaatgccaacggcagcgtccttctgagcgaaatcgtcggtaccatcaagctcaaggtgtttctgtcaggaatgccagagctgcggctgggcctcaatgaccgcgtgctcttcgagctcactggccgcagcaagaacaaatcagtagagctggaggatgtaaaattccaccagtgcgtgcggctctctcgctttgacaacgaccgcaccatctccttcatcccgcctgatggtgactttgagctcatgtcataccgcctcagcacccaggtcaagccactgatctggattgagtctgtcattgagaagttctcccacagccgcgtggagatcatggtcaaggccaaggggcagtttaagaaacagtcagtggccaacggtgtggagatatctgtgcctgtacccagcgatgccgactcccccagattcaagaccagtgtgggcagcgccaagtatgtgccggagagaaacgtcgtgatttggagtattaagtctttcccggggggcaaggagtacttgatgcgagcccactttggcctccccagtgtggaaaaggaagaggtggagggccggccccccatcggggtcaagtttgagatcccctacttcaccgtctctgggatccaggtccgatacatgaagatcattgagaaaagtggttaccaggccctgccctgggttcgctacatcacccagagtggcgattaccaacttcgtaccagctagaagggagaagagatgggggcttgaacacggggcttccttacagccccggatgcagattttagagggagggcaggtgcgggctgtgtgtgtctgtgtgagggcaggtcctggacttggcagtttcttgctcccagcacccgccccttcctcacctcttccttattccataggctgggagagaaactctctctgcttccctcgcccttggagctttccccatccccctgattttatatgaagaaatagaagaggggcttgaagtccccctcgcgagtgccttcttgcaattacctgccttagcgggtgttgcgggtccctccttcacagccgctgagcccagaggtcccgctggcccctcctctgaattttaggatgtcattaaaaagatgaatctaaaaaaaaaaaaaaaaaaaaaaaaaaaaaaaaaaaaaaaaaaaaaaaaaaaaaagg

SEQ ID NO: 2107 - DNA, 3095 bp, Homo sapiens
  misc_feature (24)..(24): n equals a,t,g, or c
  misc_feature (47)..(47): n equals a,t,g, or c
gggggaaagggcttttgacttcgncatgccacgcgtaaagcttgggnccccctcggagggatcctctaagagcggctctcctttttttttttttttttttttttttwtyaacaggaaattaattttatttttaaatccaaggggccagaacaaatgagacacctacccttggaggacaaactcaagtggccaaggttgggggaggggatgacagcaaggggctgggcaggaacgcgtccaaacacagcagatggagaggacgacctcttcactccggcgcagcctccatcaaatacccattctccggagccaggtagccgtcgccgccctcagactccatgtacatgtctcggctgtcgttgcccagaccctccagcccgttgtcctggccaccgcccccacctcgggcctcatccctgccccgctcactgccccgctccccccgtttgtgctcgcggtcacggtcacggtcacgatcccggtcccggcgccgctcgcgctcgctccggtggctccgccgtcgctcccggtcacgatcccggcccttttcctctggaccgtcagggccgtcaggcccgagctcccctggaggcccatcatcagggggcgcgtcacccgcctcggagggctccgccatgtcgccaccgccrccacgcagctcctccttgcgctcccgctcccgccgggcccgctcccgactccggctgcttcgccgcttccggtcccggtccttgtccttgctccgctccctggagcgcctccgctcctccttgtcgcgactccgtgagcgcctccgccggtcccgggagcgggagcgtcgccgttctcgctccttgtctcgctcccggctccgctctctgcgctcccgctcacggtcccggtcccggtccctgtgcggaagcggggaggggccgggcctctcatcgtagcgggaggtgtcatcgcggcctgaatgccggatgttcacatcagcccctcctcttctggtaccaccgaggcctcctcctagccgccggggcctccagcccttcacggttcggcccctctccacgtccacaaggaccctcctgccatcaatcttcttgccatctgcgtgtttgtaagcggctgtaacagatgtggggagggggaggggagaggagtccccagagggtcctctagtcaggacaggcccagctctacagaatccccgccccgtgtccccatcatcacgcacacgcacacgcccaacagacagccaggcaactgacagccagaccaaccctctcccaaaccggtgaagggcctgctccatctcagcgtctgcttcctctcagcgccccaaccactcctggtcgggggagacgtccaccctcacccgccaccccctaggctccccggcccttcctctcccacatgatggaacagccccctcccgccagggcggccaaaatcgctgcaaagaaactgaaggttaactccacgctggactctgctgtgggggagggggctcctccacaaccccaagcatgcaccctgagacaccaagccggggcaggaggcccagctgggacgctccgcaccccagaccacaccggttttttctgtttttgttttttttggaggggggtgagtgtggggggaacagacatcagaacagaaaatgaaccagaagggggtgggagaaatcttcaggaaatggcagggagcagagaggcgggttatacactcccagggggcctggcggggcccctgcagcaggggagaggggcagtggaggaagcatggggagccgtgcggtgctactgaaaatccctgccttacctgagacgactgactctgcctccccccagccctgccccatctcgccctccacacccccggctcaacacgtgctgggagcgcaccccagcctgagcctgccaggaaaggggagtcgtagaggggagacgggggagaggctcactgctgctctcgggcagcgcgtagcagaaggcaagcctgaggccctggcctgtgatcaacgtggggctgtcatgaaggccaaaaagtccccgttcccccacccagccctggcctagggggctgtcctcaaccaaccgtaataccctgccccgcccmagcccgctcccccccaaataacaaccagaggaagagaaaaaggtgccatttaccgatgccggccttgcgggtgtccaaaccgagcgggatggggggggctcggcaactcctgggggcctggcgaggaggcgggcttcccgggggggggacacgggaccgcttacctggagcccccaagcttacctgagcacgcgcacagaccccacacccaccaccacggggtcagctaaagctacagggaggggaagtggggggttctagggagccaggagagggagaggaaccacatctcctgtaccacctggagacaggcagaggacgtggtagaccccaaagaaatctcaaggaggccttagagtgggggagacgaggattatcatccaagctgggcgctggaaagccctggactatctcgtgtgaatttacaaagaaggctagggaggcctcagaaacctgtccgccctcaccaatccccgagtcacactgaactaggcacacagcccaccccctccgaggaccaggagtgacttctccacctccaaatccatgctccctcccaccagctgcgtctgcagaggctggcacacaggggtccaggagacggtgctgcccgtgctctgaggaggggccgcttggcccctgaacccacgggaggggagtggggaaaggcatttaaggaccaggatcaaagtcaagcgaaggaaccccgctcgggttcagagtcccaaaccccaaaacaggcccatcccgggaggaacagcaaagaaaacatgtgattgtgttcgtctaggcctctctctctctttccctctctcaagtctctagacagtggaaggttctttagtaaaaacctacgacaccttcagctgctagcagcctaccccttggtccctcccacaccccaagccccaattccatgcactttagggagctcctgaccacctctggagagctgctggacaccacagccagccccctcgggaggcctcaaccac

SEQ ID NO: 2108 - DNA, 1414 bp, Homo sapiens
tatagaagtacgctgcagtaccgttccggaattcccggtcgacccacggkccggctggcgtcccctttccggccggtccccatggaggcgctggggaagctgaagcagttcgatgcctaccccaagactttggaggacttccgggtcaagacctgcgggggcgccaccgtgaccattgtcagtggccttctcatgctgctactgttcctgtccgagctgcagtattacctcaccacggaggtgcatcctgagctctacgtggacaagtcgcggggagataaactgaagatcaacatcgatgtactttttccgcacatgccttgtgcctatctgagtattgatgccatggatgtggccggagaacagcagctggatgtggaacacaacctgttcaagcaacgactagataaagatggcatccccgtgagctcagaggctgagcggcatgagcttgggaaagtcgaggtgacggtgtttgaccctgactccctggaccctgatcgctgtgagagctgctatggtgctgaggcagaagatatcaagtgctgtaacacctgtgaagatgtgcgggaggcatatcgccgtagaggctgggccttcaagaacccagatactattgagcagtgccggcgagagggcttcagccagaagatgcaggagcagaagaatgaaggctgccaggtgtatggcttcttggaagtcaataaggtggccggaaacttccactttgcccctgggaagagcttccagcagtcccatgtgcacgtccatgacttgcagagctttggccttgacaacatcaacatgacccactacatccagcacctgtcatttggggaggactatccaggcattgtgaaccccctggaccacaccaatgtcactgcgccccaagcctccatgatgttccagtactttgtgaaggtggtgcccactgtgtacatgaaggtggacggagaggtactgaggacaaatcagttctctgtgaccagacatgagaaggttgccaatgggctgttgggcgaccaaggccttcccggagtcttcgtcctctatgagctctcgcccatgatggtgaagctgacggagaagcacaggtccttcacccacttcctgacaggtgtgtgcgccatcattgggggcatgttcacagtggctggactcatcgattcgctcatctaccactcagcacgagccatccagaagaaaattgatctagggaagacaacgtagtcaccctcggtgcttcctctgtctcctctttctccctggcctgtggttgtcccccagcctctgccaccctccacctcctcggtcagccccagccccaggttgataaatctattgattgattgtgatagtaaaaaaaaaaaaaaaaaaaaaaaaaaaaaaaaaaaaaaaaaaaaaaaaaaaa

SEQ ID NO: 2109 - DNA, 2171 bp, Homo sapiens
  misc_feature (6)..(6): n equals a,t,g, or c
  misc_feature (17)..(17): n equals a,t,g, or c
  misc_feature (21)..(21): n equals a,t,g, or c
  misc_feature (24)..(24): n equals a,t,g, or c
  misc_feature (33)..(33): n equals a,t,g, or c
  misc_feature (2093)..(2093): n equals a,t,g, or c
ggatancaattttcacncagnaancagctatgnccatgattacgccaagctttaatacgactcactatagggaaagctggtacgcctgcaggtaccggtccggaattcccgggtcgacccacgcgtccgccagcaccacagtgccaggccttagtgaggaatctaccaccttctacagcagcccaggctcaactgaaaccacagcgttttctcacagcaacacaatgtccattcatagtcaacaatctacacccttccctgacagcccaggcttcactcacacagtgttacctgccaccctcacaaccacagacattggtcaggaatcaacagccttccacagcagctcagacgcaactggaacaacacccttacctgcccgctccacagcctcagaccttgttggagaacctacaactttctacatcagcccatcccctacttacacaacactctttcctgcgagttccagcacatcaggcctcactgaggaatctaccaccttccacaccagtccaagcttcacttctacaattgtgtctactgaaagcctggaaaccttagcaccagggttgtgccaggaaggacaaatttggaatggaaaacaatgcgtctgtccccaaggctacgttggttaccagtgcttgtcccctctggaatccttccctgtagaaaccccggaaaaactcaacgccactttaggtatgacagtgaaagtgacttacagaaatttcacagaaaagatgaatgacgcatcctcccaggaataccagaacttcagtaccctcttcaagaatcggatggatgtcgttttgaagggcgacaatcttcctcagtatagaggggtgaacattcggagattgctcaacggtagcatcgtggtcaagaacgatgtcatcctggaggcagactacactttagagtatgaggaactgtttgaaaacctggcagagattgtaaaggccaagattatgaatgaaactagaacaactcttcttgatcctgattcctgcagaaaggccatactgtgctatagtgaagaggacactttcgtggattcatcggtgactccgggctttgacttccaggagcaatgcacccagaaggctgccgaaggatatacccagttctactatgtggatgtcttggatgggaagctggcctgtgtgaacaagtgcaccaaaggaacgaagtcgcaaatgaactgtaacctgggcacatgtcagctgcaacgcagtggcccccgctgcctgtgcccaaatacgaacacacactggtactggggagagacctgtgaattcaacatcgccaagagcctcgtgtatgggatcgtgggggctgtgatggcggtgctgctgctcgcattgatcatcctaatcatcttattcagcctatcccagagaaaacggcacagggaacagtatgatgtgcctcaagagtggcgaaaggaaggcacccctggcatcttccagaagacggccatctgggaagaccagaatctgagggagagcagattcggccttgagaacgcctacaacaacttccggcccaccctggagactgttgactctggcacagagctccacatccagaggccggagatggtagcatccactgtgtgagccaacgggggcctcccaccctcatctagctctgttcaggagagctgcaaacacagagcccaccacaagcctccggggcgggtcaagaggagaccgaagtcaggccctgaagccggtcctgctctgagctgacagacttggccagtcccctgcctgtgctcctgctggggaaggctgggggctgtaagcctctccatccgggagcttccagactcccagaagcctcggcacccctgtctcctcctgggtggctccccactctggaatttccctaccaataaaagcaaatctgaaagctcaaaaaaaaaaaaaaagggcggccgctctagaggatccaagcttacgtacgcgtgcatgcgacgtcatagctcttctatagtgtcacctaaattcaattcactggccgtcgttttacaacgtctgactgggaaaaccctggcgttacccaacttaatcgccttgcagcacatncccctttygccagctgcgtaatagcraagaggsccgsaccgatcgcccttccaacagttgcgcagcctgaatggcgaa

SEQ ID NO: 2110 - DNA, 1186 bp, Homo sapiens
gcggacgcgtgggcagcccgggcggctgcccttgggtgctcccttccctgcccgacacccagaccgaccttgaccgcccacctggcaggagcaggacaggacggccggacgcggccatggccgagctcccggggccctttctctgcggggccctgctaggcttcctgtgcctgagtgggctggccgtggaggtgaaggtacccacagagccgctgagcacgcccctggggaagacagccgagctgacctgcacctacagcacgtcggtgggagacagcttcgccctggagtggagctttgtgcagcctgggaaacccatctctgagtcccatccaatcctgtacttcaccaatggccatctgtatccaactggttctaagtcaaagcgggtcagcctgcttcagaacccccccacagtgggggtggccacactgaaactgactgacgtccacccctcagatactggaacctacctctgccaagtcaacaacccaccagatttctacaccaatgggttggggctaatcaaccttactgtgctggttccccccagtaatcccttatgcagtcagagtggacaaacctctgtgggaggctctactgcactgagatgcagctcttccgagggggctcctaagccagtgtacaactgggtgcgtcttggaacttttcctacaccttctcctggcagcatggttcaagatgaggtgtctggccagctcattctcaccaacctctccctgacctcctcgggcacctaccgctgtgtggccaccaaccagatgggcagtgcatcctgtgagctgaccctctctgtgaccgaaccctcccaaggccgagtggccggagctctgattggggtgctcctgggcgtgctgttgctgtcagttgctgcgttctgcctggtcaggttccagaaagagagggggaagaagcccaaggagacatatgggggtagtgaccttcgggaggatgccatcgctcctgggatctctgagcacacttgtatgagggctgattctagcaaggggttcctggaaagaccctcgtctgccagcaccgtgacgaccaccaagtccaagctccctatggtcgtgtgacttctcccgatccctgagggcggtgagggggaatatcaataattaaagtctgtgggtaccaaaaaaaaaaaaaaaaaagtcgacgc

SEQ ID NO: 2111 - DNA, 3109 bp, Homo sapiens
gtggcggccgctctagaactagtggatcccccgggctgcaggaattcggcacgaggtgacccasgcatctctgtatctgtttgaagctacaggaaagcgattttatttcaaaaatgttgccattttgattcctgaaacatggaagacaaaggctgactatgtgagaccaaaacttgagacctacaaaaatgctgatgttctggttgctgagtctactcctccaggtaatgatgaaccctacactgagcagatgggcaactgtggagagaagggtgaaaggatccacctcactcctgatttcattgcaggaaaaaagttagctgaatatggaccacaaggtagggcatttgtccatgagtgggctcatctacgatggggagtatttgacgagtacaataatgatgagaaattctacttatccaatggaagaatacaagcagtaagatgttcagcaggtattactggtacaaatgtagtaaagaagtgtcagggaggcagctgttacaccaaaagatgcacattcaataaagtwacaggactctatgaaaaaggatgtgagtttgttctccaatcccgccagacggagaaggcttctataatgtttgcacaacatgttgattctatagttgaattctgtacagaacaaaaccacaacaaagaagctccaaacaagcaaaatcaaaaatgcaatctccgaagcacatgggaagtgatccgtgattctgaggactttaagaaaaccactcctatgacaacacagccaccaaatcccaccttctcattgctgcagattggacaaagaattgtgtgtttagtccttgacaaatctggaagcatggcgactggtaaccgcctcaatcgactgaatcaagcaggccagcttttcctgctgcagacagttgagctggggtcctgggttgggatggtgacatttgacagtgctgcccatgtacaaagtgaactcatacagataaacagtggcagtgacagggacacactcgccaaaagattacctgcagcagcttcaggagggacgtccatctgcagcgggcttcgatcggcatttactgtgattaggaagaaatatccaactgatggatctgaaattgtgctgctgacggatggggaagacaacactataagtgggtgctttaacgaggtcaaacaaagtggtgccatcatccacacagtcgctttggggccctctgcagctcaagaactagaggagctgtccaaaatgacaggaggtttacagacatatgcttcagatcaagttcagaacaatggcctcattgatgcttttggggccctttcatcaggaaatggagctgtctctcagcgctccatccagcttgagagtaagggattaaccctccagaacagccagtggatgaatggcacagtgatcgtggacagcaccgtgggaaaggacactttgtttcttatcacctggacaacgcagcctccccaaatccttctctgggatcccagtggacagaagcaaggtggctttgtagtggacaaaaacaccaaaatggcctacctccaaatcccaggcattgctaaggttggcacttggaaatacagtctgcaagcaagctcacaaaccttgaccctgactgtcacgtcccgtgcgtccaatgctaccctgcctccaattacagtgacttccaaaacgaacaaggacaccagcaaattccccagccctctggtagtttatgcaaatattcgccaaggagcctccccaattctcagggccagtgtcacagccctgattgaatcagtgaatggaaaaacagttaccttggaactactggataatggagcaggtgctgatgctactaaggatgacggtgtctactcaaggtatttcacaacttatgacacgaatggtagatacagtgtaaaagtgcgggctctgggaggagttaacgcagccagacggagagtgataccccagcagagtggagcactgtacatacctggctggattgagaatgatgaaatacaatggaatccaccaagacctgaaattaataaggatgatgttcaacacaagcaagtgtgtttcagcagaacatcctcgggaggctcatttgtggcttctgatgtcccaaatgctcccatacctgatctcttcccacctggccaaatcaccgacctgaaggcggaaattcacgggggcagtctcattaatctgacttggacagctcctggggatgattatgaccatggaacagctcacaagtatatcattcgaataagtacaagtattcttgatctcagagacaagttcaatgaatctcttcaagtgaatactactgctctcatcccaaaggaagccaactctgaggaagtctttttgtttaaaccagaaaacattacttttgaaaatggcacagatcttttcattgctattcaggctgttgataaggtcgatctgaaatcagaaatatccaacattgcacgagtatctttgtttattcctccacagactccgccagagacacctagtcctgatgaaacgtctgctccttgtcctaatattcatatcaacagcaccattcctggcattcacattttaaaaattatgtggaagtggataggagaactgcagctgtcaatagcctagggctgaatttttgtcagataaataaaataaatcattcatccttttttttgattataaaattttctaaaatgtattttagacttcctgtagggggcgatatactaaatgtatatagtacatttatactaaatgtattcctgtagggggcgatatactaaatgtattttagacttcctgtagggggcgataaaataaaatgctaaacaactgggtatacatgcataaaaactatccattcaaacccaaaatttaawaatcattgagtcttttattaatgaatttgaatactagaaagaaacagggcttgcatcaataaatggaagtatgtttttatttgttttaaggagctttgccagttaaaaacaacatgcaattgcagaaatctaacagagttgctaaaagttggttgatttcttttggtgaagaaaagccaatctaaattatttaaatataaaagacatgacttggtttaaaaaa

SEQ ID NO: 2112 - DNA, 1438 bp, Homo sapiens
acccacgcgtccgcactctagcgggtatctgcccaccatggccctggtgctgatcctccagctgctgaccctctggcctctgtgtcacacagacatcactccgtctgtccccccagcttcataccaccctaagccatggctgggagctcagccggctacagttgtgacccctggggtcaacgtgaccttgagatgccgggcaccccaacccgcttggagatttggacttttcaagcctggagagatcgctccccttctcttccgggatgtgtcctccgagctggcagaattctttctggaggaggtgactccagcccaagggggaagttaccgctgctgctaccgaaggccagactgggggccgggtgtctggtcccagcccagcgatgtcctggagctgctggtgacagaggagctgccgcggccgtcgctggtggcgctgcccgggccggtggtgggtcctggcgccaacgtgagcctgcgctgcgcgggccgcctgcggaacatgagcttcgtgctgtaccgcgagggcgtggcggccccgctgcagtaccgccactccgcgcagccctgggccgacttcacgctgctgggcgcccgcgcccccggcacctacagctgctactatcacacgccctccgcgccctacgtgctgtcgcagcgcagcgaggtgctggtcatcagctgggaagactctggctcctccgactacacccgggggaacctagtccgcctggggctggccgggctggtcctcatctccctgggcgcgctggtcacttttgactggcgcagtcagaaccgcgctcctgctggtatccgcccctgagccccaggagcactgcagcccgagacttccaacctgagtggcggagaagctgggaccctgggctggactgtcctttcctgcagccccacagtcctgctggctgagctccgcggaacggtccttagaccccgctgtgccctgtgctgtagcttctttccaggcctttcccaaggagtagctgaaaggaagacgcgattagtggttaagacttccaagccagaagacagagggttcgaatcccagcactgccgtctactcactgtagtagtagcagctacagaaaggtagtagtgagacgtgaagccagctggacttcctgggttgaatggggacctggagaacttttctgtcttacaagaggattgtaaaatggaccaatcagcactctgtaagatggaccaatcagcgctctgtaaaatggaccaatcagcaggacatgggcggggacaataagggaataaaagctggcgagcgcggcaccccaccagagtctgcttccacgctgtgggagctttgttctcttgctctacacaataaatcttgctgctgctaaaaaaaaaaaaaaaaaaaaaaaaaaaaaaagggsggccgctctagaggatccctcga

SEQ ID NO: 2113 - DNA, 2443 bp, Homo sapiens
ggagcagctgctgcagcaggagcagagcaggagacgcgtaccgccgtcgccgccgccgggggatgtggccggcgcctgcctctagccgcgccgcctcttgagtaccagccgccgctgcagccgccgccgccgmctagccgtgcggtgccaggccgcgccctccccgggcgcccgccggctcgcatgccgaggggctccggggcgtactgcgcgcccggcgccgcctccgggctccttcggccmcgccatgggctgctgcagctccgcctcctccgccgcgcagagctccaaacgagaatggaagccgctggaggaccgtagctgcacagacataccatggctgctgctcttcatcctcttctgcattgggatgggatttatttgtggcttttcaatagcaacaggtgcagcagcaagactagtgtcaggatacgacagctatggaaatatctgtgggcagaaaaatacaaagttggaagcaataccaaacagtggcatggaccacacccagcggaagtatgtattctttttggatccatgcaacctggacttgataaaccggaagattaagtctgtagcactgtgtgtagcagcgtgtccaaggcaagaactgaaaactctgagtgatgttcagaagtttgcagagataaatggttcagccctatgtagctacaacctaaagccttctgaatacactacatctccaaaatcttctgttctctgccccaaactaccagttccagcgagtgcacctattccattcttccatcgctgtgctcctgtgaacatttcctgctatgccaagtttgcagaggccctgatcacctttgtcagtgacaatagtgtcttacacaggctgattagtggagtaatgaccagcaaagaaattatattgggactttgcttgttatcactagttctatccatgattttgatggtgataatcaggtatatatcaagagtacttgtgtggatcttaacgattctggtcatactcggttcacttggaggcacaggtgtactatggtggctgtatgcaaagcaaagaaggtctcccaaagaaactgttactcctgagcagcttcagatagctgaagacaatcttcgggccctcctcatttatgccatttcagctacagtgttcacagtgatcttattcctgataatgttggttatgcgcaaacgtgttgctcttaccatcgccttgttccacgtagctggcaaggtcttcattcacttgccactgctagtcttccaacccttctggactttctttgctcttgtcttgttttgggtgtactggatcatgacacttctttttcttggcactaccggcagtcctgttcagaatgagcaaggctttgtggagttcaaaatttctgggcctctgcagtacatgtggtggtaccatgtggtgggcctgatttggatcagtgaatttattctagcatgtcagcagatgacagtggcaggagctgtggtaacatactattttactagggataaaaggaatttgccatttacacctattttggcatcagtaaatcgccttattcgttaccacctaggtacggtggcaaaaggatctttcattatcacattagtcaaaattccgcgaatgatccttatgtatattcacagtcagctcaaaggaaaggaaaatgcttgtgcacgatgtgtgctgaaatcttgcatttgttgcctttggtgtcttgaaaagtgcctaaattatttaaatcagaatgcatacacagccacagctatcaacagcaccaacttctgcacctcagcaaaggatgcctttgtcattctggtggagaatgctttgcgagtggctaccatcaacacagtaggagattttatgttattccttggcaaggtgctgatagtctgcagcacaggtttagctgggattatgctgctcaactaccagcaggactacacagtatgggtgctgcctctgatcatcgtctgcctctttgctttcctagtcgctcattgcttcctgtctatttatgaaatggtagtggatgtattattcttgtgttttgccattgatacaaaatacaatgatgggagccctggcagagaattctatatggataaagtgctgatggagtttgtggaaaacagtaggaaagcaatgaaagaagctggtaagggaggcgtcgctgattccagagagctaaagccgatgctgaagaaaaggtgactggtctcatgagccctgaagaatgaactcagaggaggttgtttacatgaggttctcccactcaccagctgttgagagtctgcgattatgaagagcaggatcttattacttcaatgaaagcatgtaacaagtttctcaaaccaccaacagccaagtggatttggtacagtgcggctgtctaataaataatcaaaagcatttgatagaaaaaaaaaaaaaaagggcggccgc

SEQ ID NO: 2114 - DNA, 2519 bp, Homo sapiens
  misc_feature (1349)..(1349): n equals a,t,g, or c
  misc_feature (2519)..(2519): n equals a,t,g, or c
ggcagagcacttcctggccaggaaacctgagcggtgagactcccagctgcctacatcaaggccccaggacatgcagaaccttcctctagaacccgacccaccaccatgaggtcctgcctgtggagatgcaggcacctgagccaaggcgtccagtggtccttgcttctggctgtcctggtcttctttctcttcgccttgccctcttttattaaggagcctcaaacaaagccttccaggcatcaacgcacagagaacattaaagaaaggtctctacagtccctggcaaagcctaagtcccaggcacccacaagggcaaggaggacaaccatctatgcagagccagygccagagaacaatgccctcaacacacaaacccagcccaaggcccacaccaccggagacagaggaaaggaggccaaccaggcaccgccggaggagcaggacaaggtgccccacacagcacagagggcagcatggaagagcccagaaaaagagaaaaccatggtgaacacactgtcacccagagggcaagatgcagggatggcctctggcaggacagaggcacaatcatggaagagccaggacacaaagacgacccaaggaaatgggggccagaccaggaagctgacggcctccaggacggtgtcagagaagcaccagggcaaagcggcaaccacagccaagacgctcattyccaaaagtcagcacagaatgctggctyccacaggagcagtgtcaacaaggacgagacagaaaggagtgaccacagcagtcatcccacctaaggagaagaaacctcaggccaccccaccccctgcccctttccagagccccacgacgcagagaaaccaaagactgaaggscgscaacttcaaatctgagcctcggtgggattttgaggaaaaatacagcttcgaaataggaggccttcagacgacttgccctgactctgtgaagatcaaagcctccaagtcgctgtggctccagaaactctttctgcccaacctcactctcttcctggactccagacacttcaaccagagtgagtgggaccgcctggaacactttgcaccaccctttggcttcatggagctcaactactccttggtgcagaaggtcgtgacacgcttccctccagtgccccagcagcagctgctcctggccagcctccccgctgggagcctccggtgcatcacctgtgccgtggtgggcaacgggggcatcctgaacaactcccacatgggccaggagatagacagtcacgactacgtgttccgattgagcggagctctcattaaaggctacgaacaggatgtggggactcggacatccttctacggctttaccgncttctccctgacccagtcactccttatattgggcaatcggggtttcaagaacgtgcctcttgggaaggacgtccgctacttgcacttcctggaaggcacccgggactatgagtggctggaagcactgcttatgaatcagacggtgatgtcaaaaaaccttttctggttcaggcacagaccccaggaagcttttcgggaagccctgcacatggacaggtacctgttgctgcacccagactttctccgatacatgaagaacaggtttctgaggtctaagaccctggatggtgcccactggaggatataccgccccaccactggggccctcctgctgctcactgcccttcagctctgtgaccaggtgagtgcttatggcttcatcactgagggccatgagcgcttttctgatcactactatgatacatcatggaagcggctgatcttttacataaaccatgacttcaagctggagagagaagtctggaagcggctacacgatgaagggataatccggctgtaccagcgtcctggtcccggaactgccaaagccaagaactgaccggggccagggctgccatggtctccttgcctgctccaaggcacaggatacagtgggaatcttgagactctttggccatttcccatggctcagactaagctccaagcccttcargagttccaagggaacacttgaaccatggacaagactctctcaagatggcaaatggctaattgaggttctgaagttcttcagtacattgctgtaggtcctgaggccagggatttttaattaaatggggtgatgggtggccaataccacaattcctgctgaaaaacactcttccagtccaaaagcttcttgatacagaaaaaagagcctggatttacagaaacatatagatctggtttgaattccagatcgagtttacagttgtgaaatcttgaaggtattacttaacttcactacagattgtctagaagacctttctaggagttatctgattctagaagggtctatacttgtccttgtctttaagctatttgacaactctacgtgttgtagaaaactgataataatacaaatgattgttgtccatggaaaggcaaataaattttctacagtgaagcaaaaaaaaaaaaaaaaaaaaaaaaaaaaaaaaaaaaaaaaan

SEQ ID NO: 2115 - DNA, 1312 bp, Homo sapiens
gctctgcgagcgttatttcaaaagaagttgagaaccaragaaaccracctaaggggattytcccatttggcccgtcctaccctaaagtmaccacctgctgcttttytggagcgcttaccagtgaccaagaggaacagaacacagagcagcctggcagtgtccaagcaacaagcctccgctcctccttcctgcaccctggggctcctgaaactcacatgggtaaaaaagatacagtaaagacataaataccacatttgacaaatggaaaaaaaggagtgtccagaaaagagtagcagcagtgaggaagagctgccgagacgggtatacagggagctaccctgtgtttctgagaccctctgtgacatctcacattttttccaagaagatgatgagacagaggcagagccattattgttccgtgctgttcctgagtgtcaactatctgggggggacattcccagtgtatcagaagagcaggaatcttcagagggacaagattcaggagacatttgctcagaagagaatcaaatagtttcctcttatgcttctaaagtctgttttgagatcgaagaagattataaaaatcgtcagtttctggggcctgaaggaaatgtggatgttgagttgattgataagagcacaaacagatacagcgtttggttccccactgctggctggtatctgtggtcagccacaggcctcggcttcctggtaagggatgaggtcacagtgacgattgcgtttggttcctggagtcagcacctggccctggacctgcagcaccatgaacagtggctggtgggcggccccttgtttgatgtcactgcagagccagaggaggctgtcgccgaaatccacctcccccacttcatctccctccaagcaggtgaggtggacgtctcctggtttctcgttgcccattttaagaatgaagggatggtcctggagcatccagcccgggtggagcctttctatgctgtcctggaaagccccagcttctctctgatgggcatcctgctgcggatcgccagtgggactcgcctctccatccccatcacttccaacacattgatctattatcacccccaccccgaagatattaagttccacttgtaccttgtccccagcgacgccttgctaacaaagacactattttagaggctgaggatacatcagtgaacaaaagaggcaaaaacatgacaaccaaagatattacatggaatgctataggaaaaatatatgtgcatatgataagaactataacaaataaagaaggttaagaaaattaaaaaaaaaaaaaaagggcggccgc

SEQ ID NO: 2116 - DNA, 1871 bp, Homo sapiens
taatcaaagctcaggaggagagctgcattccactgtttcacagatgctgtgagggtgacaaagatgcagggcacccactggaaacacagacggcactctgcgaaagaggaaggggcgccaggagcttgggtgagcaaggttggaggtgattctgcccctctccccaggctttctgtattagaaaactgaagcttcaagaacagacttgcctaacaacaggaaacttgtatgtctcgaagtggcaattcacacataaggctccatgactcctgaactctcacaaatattagttggctcttttcatggttttactgaagttgctagaagtttacagaaaaggaagtgcaggaacatttcacaaatctacaatctgtgagtatcacatcctgtatagctgtaaacactggaataaggaagggctgatgactttcagaagatgaaggtaagtagaaaccgttgatgggactgagaaaccagagttaaaacctctttggagcttctgaggactcagctggaaccaacgggcacagttggcaacaccatcatgacatcacaacctgttcccaatgagaccatcatagtgctcccatcaaatgtcatcaacttctcccaagcagagaaacccgaacccaccaaccaggggcaggatagcctgaagaaacatctacacgcagaaatcaaagttattgggactatccagatcttgtgtggcatgatggtattgagcttggggatcattttggcatctgcttccttctctccaaattttacccaagtgacttctacactgttgaactctgcttacccattcataggaccctttttttttatcatctctggctctctatcaatcgccacagagaaaaggttraccaagcttttggtgcatagcagcctggttggaagcattctgagtgctctgtctgccctggtgggtttcattatcctgtctgtcaaacaggccaccttaaatcctgcctcactgcagtgtgagttggacaaaaataatataccaacaagaagttatgtttcttacttttatcatgattcactttataccacggactgctatacagccaaagccagtctggctggawctctctctctgatgctgatttgcactctgctggaattctgcctagctgtgctcactgctgtgctgcggtggaaacaggcttactctgacttccctgggagtgtacttttcctgcctcacagttacattggtaattctggcatgtcctcaaaaatgactcatgactgtggatatgaagaactattgacttcttaagaaaaaagggagaaatattaatcagaaagttgattcttatgataatatggaaaagttaaccattatagaaaagcaaagcttgagtttcctaaatgtaagcttttaaagtaatgaacattaaaaaaaaccattatttcactgtcatttaagatatgtgttcattggggatctcttgatttgcctgacattgacttcagcaaaagcacggggctgtaaattaccatttactagattagccaaatagtctgaatttccagaaaacaaggcagaatgatcattcccagaaacatttcccagaaaatgtttcccagaaaactagacagmatgatcattcaatggatcacagtgaagcaaaggacacaactttttattgtaccccttaattgtcaacaggagttaactgatttgttgtggtgctcagacttttttatacaggtgctagtgttttatcctatgtattttaactcattagtgcataaaggcaagccccatataatgaagtctcagggtatatgaaagtagctggcttcaaaataaaatttttgagtgcaaaaaaaaaaaaaaataaaaaaaaaaaaaa

SEQ ID NO: 2117 - DNA, 1309 bp, Homo sapiens
gaattcggcacgagaagatataaaagctccagaaacgttgactgggaccactggagacactgaagaaggcaggggcccttagagtcttggttgccaaacagatttgcagatcaaggagaacccaggagtttcaaagaagcgctagtaaggtctctgagatccttgcactagctacatcctcagggtaggaggaagatggcttccagaagcatgcggctgctcctattgctgagctgcctggccaaaacaggagtcctgggtgatatcatcatgagacccagctgtgctcctggatggttttaccacaagtccaattgctatggttacttcaggaagctgaggaactggtctgatgccgagctcgagtgtcagtcttacggaaacggagcccacctggcatctatcctgagtttaaaggaagccagcaccatagcagagtacataagtggctatcagagaagccagccgatatggattggcctgcacgacccacagaagaggcagcagtggcagtggattgatggggccatgtatctgtacagatcctggtctggcaagtccatgggtgggaacaagcactgtgctgagatgagctccaataacaactttttaacttggagcagcaacgaatgcaacaagcgccaacacttcctgtgcaagtaccgaccatagagcaagaatcaagattctgctaactcctgcacagccccgtcctcttcctttctgctagcctggctaaatctgctcattatttcagaggggaaacctagcaaactaagagtgataagggccctactacactggcttttttaggcttagagacagaaactttagcattggcccagtagtggcttctagctctaaatgtttgccccgccatccctttccacagtatccttcttccctcctcccctgtctctggctgtctcgagcagtctagaagagtgcatctccagcctatgaaacagctgggtctttggccataagaagtaaagatttgaagacagaaggaagaaactcaggagtaagcttctagaccccttcagcttctacacccttctgccctctctccattgcctgcaccccaccccagccactcaactcctgcttgtttttcctttggccataggaaggtttaccagtagaatccttgctaggttgatgtgggccatacattcctttaataaaccattgtgtacataaaaaaaaaaaaaaaaaaaaaaaaaaaaaaaaaaaaaaaaaaaaaaaaaaaaaaaaaaaaaactcgagggggggcccgtacccaatcgcctgatcatgatcgtataca

SEQ ID NO: 2118 - DNA, 943 bp, Homo sapiens
  misc_feature (2)..(2): n equals a,t,g, or c
  misc_feature (866)..(866): n equals a,t,g, or c
antcccgggtcgcacsagcgkcacgccgcatcctagccgccgactcacacaaggcaggtgggtgaggaaatccagagttgccatggagaaaattccagtgtcagcattcttgctccttgtggccctctcctacactctggccagagataccacagtcaaacctggagccaaaaaggacacaaaggactctcgacccaaactgccccagaccctctccagaggttggggtgaccaactcatctggactcagacatatgaagaagctctatataaatccaagacaagcaacaaacccttgatgattattcatcacttggatgagtgcccacacagtcaagctttaaagaaagtgtttgctgaaaataaagaaatccagaaattggcagagcagtttgtcctcctcaatctggtttatgaaacaactgacaaacacctttctcctgatggccagtatgtccccaggattatgtttgttgacccatctctgacagttagagccgatatcactggaagatattcaaaycgtctctatgcttacgaacctgcagatacagctctgttgcttgacaacatgaagaaagctctcaagttgctgaagactgaattgtaaagaaaaaaaatctccaagcccttctgtctgtcaggccttgagacttgaaaccagaagaagtgtgagaagactggctagtgtggaagcatagtgaacacactgattaggttatggtttaatgttacaacaactattttttaagaaaaacaagttttagaaatttggtttcaagtgtacatgtgtgaaaacaatattgtatactaccatagtgagccatgattttctaaaaaaaaaaataaatgttttgggggtgttntaaaaaaaaaaaaaaaaagtgagtgaactaacaaaaaaaaagttttgcccccaaggggacgggttacaattgggggg

SEQ ID NO: 2119 - DNA, 1377 bp, Homo sapiens
ggcacgagaaaaccttgaggtgattcatcttccaggctctccttccatcaagtctctcctccctagcgctctgggtccttaatggcagcagccgccgctaccaagatccttctgtgcctcccgcttctgctcctgctgtccggctggtcccgggctgggcgagccgaccctcactctctttgctatgacatcaccgtcatccctaagttcagacctggaccacggtggtgtgcggttcaaggccaggtggatgaaaagacttttcttcactatgactgtggcaacaagacagtcacacctgtcagtcccctggggaagaaactaaatgtcacaacggcctggaaagcacagaacccagtactgagagaggtggtggacatacttacagagcaactgcgtgacattcagctggagaattacacacccaaggaacccctcaccctgcaggccaggatgtcttgtgagcagaaagctgaaggacacagcagtggatcttggcagttcagtttcgatgggcagatcttcctcctctttgactcagagaagagaatgtggacaacggttcatcctggagccagaaagatgaaagaaaagtgggagaatgacaaggttgtggccatgtccttccattacttctcaatgggagactgtataggatggcttgaggacttcttgatgggcatggacagcaccctggagccaagtgcaggagcaccactcgccatgtcctcaggcacaacccaactcagggccacagccaccaccctcatcctttgctgcctcctcatcatcctcccctgcttcatcctccctggcatctgaggagagtcctttagagtgacaggttaaagctgataccaaaaggctcctgtgagcacggtcttgatcaaactcgcccttctgtctggccagctgcccacgacctacggtgtatgtccagtggcctccagcagatcatgatgacatcatggacccaatagctcattcactgccttgattccttttgccaacaattttaccagcagttatacctaacatattatgcaattttctcttggtgctacctgatggaattcctgcacttaaagttctggctgactaaacaagatatatcattttctttcttctctttttgtttggaaaatcaagtacttctttgaatgatgatctctttcttgcaaatgatattgtcagtaaaataatcacgttagacttcagacctctggggattctttccgtgtcctgaaagagaatttttaaattatttaataagaaaaaatttatattaatgattgtttcctttagtaatttattgttctgtactgatatttaaataaagagttctatttcccaaaaaaaaaaaaaaaaaaaaaaaaa

SEQ ID NO: 2120 - DNA, 788 bp, Homo sapiens
gcgcgacccgccccgtcccgtccagtctggcctgggcgccgcgggaacgctgtcctggctgccgccacccgaacagcctgtcctggtgccccggctccctgccccgcgcccagtcatgaccctgcgcccctcactcctcccgctccatctgctgctgctgctgctgctcagtgcggcggtgtgccgggctgaggctgggctcgaaaccgaaagtcccgtccggaccctccaagtggagaccctggtggagcccccagaaccatgtgccgagcccgctgcttttggagacacgcttcacatacactacacgggaagcttggtagatggacgtattattgacacctccctgaccagagaccctctggttatagaacttggccaaaagcaggtgattccaggtctggagcagagtcttctcgacatgtgtgtgggagagaagcgaagggcaatcattccttctcacttggcctatggaaaacggggatttccaccatctgtcccagcggatgcagtggtgcagtatgacgtggagctgattgcactaatccgagccaactactggctaaagctggtgaagggcattttgcctctggtagggatggccatggtgccascctcctgggcctcattgggtatcacctatacagaaaggccaatagacccaaagtctccaaaaagaagctcaaggaagagaaacgaaacaagagcaaaaagaaataataaataataaattttaaaaaacttaaaaaaaaaaaaaraaaaaaaaaaaaaaaaaaaaaaaaaaaaaa

SEQ ID NO: 2121 - DNA, 1019 bp, Homo sapiens
agggattcttgctccaccctgtgtacctgctccgagtgtctttccccctccccaccccagcaggccagtcctgggccccagctccagagcactcacgggctgccagggtgagcaggctagaaactcacgacaccaaggagatccaggttaaaaagtacaagtgtggcctcatcaagccctgcccagccaactactttgcgtttaaaatctgcagtggggccgccaacgtcgtgggccctactatgtgctttgaagaccgcatgatcatgagtcctgtgaaaaacaatgtgggcagaggcctaaacatcgccctggtgaatggaaccacgggagctgtgctgggacagaaggcatttgacatgtactctggagatgttatgcacctagtgaaattccttaaagaaattccggggggtgcactggtgctggtggcctcctacgacgatccagggaccaaaatgaacgatgaaagcaggaaactcttctctgacttggggagttcctacgcaaaacaactgggcttccgggacagctgggtcttcataggagccaaagacctcaggggtaaaagcccctttgagcagttcttaaagaacagcccagacacaaacaaatacgagggatggccagagctgctggagatggagggctgcatgcccccgaagccattttagggtggctgtggctcttcctcagccaggggcctgaagaagctcctgcctgacttaggagtcagagcccggcaggggctgaggaggaggagcagggggtgctgcgtggaaggtgctgcaggtccttgcacgctgtgtcgcgcctctcctcctcggaaacagaaccctcccacagcacatcctacccggaagaccagcctcagagggtccttctggaaccagctgtctgtggagagaatggggtgctttcgtcagggactgctgacggctggtcctgaggaaggacaaactgcccagacttgagcccaattaaattttatttttgctggttttgaaaaaaaaaaaaaa

SEQ ID NO: 2122 - DNA, 975 bp, Homo sapiens
tccgggytcagacgtcgccttccacttcaatccgcggtttgacggctgggacaaggtggtcttcaacacgttgcagggcgggaagtggggcagcgaggagaggaagaggagcatgcccttcaaaaagggtgccgcctttgagctggtcttcatagtcctggctgagcactacaaggtggtggtaaatggaaatcccttctatgagtacgggcaccggcttcccctacagatggtcacccacctgcaagtggatggggatctgcaacttcaatcaatcaacttcatcggaggccagcccctccggccccagggacccccgatgatgccaccttaccctggtcccggacattgccatcaacagctgaacagcctgcccaccatggaaggacccccaaccttcaacccgcctgtgccatatttcgggaggctgcaaggagggctcacagctcgaagaaccatcatcatcaagggctatgtgcctcccacaggcaagagctttgctatcaacttcaaggtgggctcctcaggggacatagctctgcacattaatccccgcatgggcaacggtaccgtggtccggaacagccttctgaatggctcgtggggatccgaggagaagaagatcacccacaacccatttggtcccggacagttctttgatctgtccattcgctgtggcttggatcgcttcaaggtttacgccaatggccagcacctctttgactttgcccatcgcctctcggccttccagagggtggacacattggaaatccagggtgatgtcaccttgtcctatgtccagatctaatctattcctggggccataactcatgggaaaacagaattatcccctaggactcctttctaagcccctaataaaatgtctgagggtgtctcaaaaaaaaaaaaaaaaaaaaaaaaaaaaaaaaaaaaaaaaaaaaaaaaaaaaaaaaaaaaaaaaaaaaaaaaaaaaaa

SEQ ID NO: 2123 - DNA, 1173 bp, Homo sapiens
gcccacgcgtccgcccacgcgtccgctggacggcagctatgcgactcaccgtgctgtgtgctgtgtgcctgctgcctggcagcctggccctgccgctgcctcaggaggcgggaggcatgagtgagctacagtgggaacaggctcaggactatctcaagagattttatctctatgactcagaaacaaaaaatgccaacagtttagaagccaaactcaaggagatgcaaaaattctttggcctacctataactggaatgttaaactcccgcgtcatagaaataatgcagaagcccagatgtggagtgccagatgttgcagaatactcactatttccaaatagcccaaaatggacttccaaagtggtcacctacaggatcgtatcatatactcgagacttaccgcatattacagtggatcgattagtgtcaaaggctttaaacatgtggggcaaagagatccccctgcatttcaggaaagttgtatggggaactgctgacatcatgattggctttgcgcgaggagctcatggggactcctacccatttgatgggccaggaaacacgctggctcatgcctttgcgcctgggacaggtctcggaggagatgctcacttcgatgaggatgaacgctggacggatggtagcagtctagggattaacttcctgtatgctgcaactcatgaacttggccattctttgggtatgggacattcctctgatcctaatgcagtgatgtatccaacctatggaaatggagatccccaaaattttaaactttcccaggatgatattaaaggcattcagaaactatatggaaagagaagtaattcaagaaagaaatagaaacttcaggcagaacatccattcattcattcattggattgtatatcattgttgcacaatcagaattgataagcactgttcctccactccatttagcaattatgtcacccttttttattgcagttggtttttgaatgtctttcactccttttaaggataaactcctttatggtgtgactgtgtcttattcatctatacttgcagtgggtagatgtcaataaatgttacatacacaaataaataaaatgtttattccatggtaaatttaaaaaaaaaaaaaaaaaaaaaaaaaaaaaaaaaaaaaaaaaaaaaaaaaaaaaaaaaaaaaata

SEQ ID NO: 2124 - DNA, 1708 bp, Homo sapiens
  misc_feature (1109)..(1109): n equals a,t,g, or c
acttcagttctcgagagaagaggcgggagtggacctggtcagccctaccccactgaccccaccggacccaggcgcggcctccgccacagccacagcccctgcccctgctgcggcgcggcgaggcgaggcgatggccaaggtgtcggtgctgaacgtggcggtcctggagaacccgagccctttccacagccccttccggttcgagatcagcttcgagtgcagtgaagccctggcggacgacctggagtggaagatcatttatgttggctcggctgagagtgaggaatttgatcagatcctagactcggtgctggtgggccctgtgccagcagggagacacatgtttgtctttcaggccgacgcccccaacccatccctcatcccagagactgatgccgtgggtgtgactgtggtcctcatcacctgcacctaccatggacaggagttcatccgagtgggctactacgtcaacaacgagtacctcaaccctgagctgcgtgagaacccgcccatgaagccagatttctcccagctccagcggaacatcttggcctcgaacccccgggtgacccgcttccatatcaactgggacaacaacatggacaggctggaggccatagagacccaggacccctccctgggctgcggcctcccactcaactgcactcctatcaagggcttggggctccctggctgcatccctggcctcctccctgagaactccatggactgcatctaactgcaggaacccagagtgtcccagcacgccgggaggggcaaccaggcctcccagcgagtcctgcagggcccatctagaggactttgggggccatcagctgcaatccaggtctgtcaaactcagcccctaggaaagaacaggccttgggtctcccctagtcctggccagaaggatgatctcgcttttcctctacaggcctataagaagcaggtacttcagttctaaattctgacttgtgttcttttcgtcttcataaattctaactaaggccactgtgccactgtgcacccttgagtaccattgatccaaagctttcccacagacctccctggcccacctagaggctttcttggtcagtgcctgtcaaggntccagtcctgctgagccaaaggctttgtcattcctttctcttcctgtacatctgagcagacccactccagctttctggtgtcacaggcgggaatgttagttagtaggtagacttagatcccatttctgtcctgctcccaggaagattcttaggtcctcttcaatccagcagcccctcccagaggtgtgatcagcaggatgctgaggaaccatgttgcctttcctgtcaatcacagccaccttcctgttatctcctaaatggatctggcttttcctggaggctgccatggttggaagatggtatcagagggcctgcctgggcagtctgtctccgggccagggtcagggaccctctgcctctggcagccttaacctgtcctctgctaggaccagggtgatttcaagccagggaagcaactgggaccctgaaaactgtccctccccagcccgctccccctctctgtgccctggtccccttgctgccatgtggatgctgttgtgattgctgtttgtatattatcaaaatgtttttatattaaaaatgtttggtctgaaaattaaaagcacttcatttagaaaaaaaaaaaaaaaaaaaaaaaa

SEQ ID NO: 2125 - DNA, 1877 bp, Homo sapiens
cctgaagggagagcagggagagagaggacagtggccagagagggctctgggcactggagggacgctcttcttcctgcccaggggtccctgggccgatgggatcacgcagaagaatgcgagagaagcagcctttgagaagggaagtcactatcccagagcccagactgagcggatggagttgaggaagtacggccctggaagactggcggggacagttataggaggagctgctcagagtaaatcacagactaaatcagactcaatcacaaaagagttcctgccaggcctttacacagccccttcctccccgttcccgccctcacaggtgagtgaccaccaagtgctaaatgacgccgaggttgccgccctcctggagaacttcagctcttcctatgactatggagaaaacgagagtgamtcgtgctgtacctccccgccctgcccacaggacttcagcctgaacttcgaccgggccttcctgccagccctcwacagcctcctctttctgctggggctgctgggcaacggcgcggtggcagccgtgctgctgagccggcggacagccctgagcagcaccgacaccttcctgctccacctagctgtagcagacacrctgctggtgctgacactgccgctctgggcagtggacgctgccgtccagtgggtctttggctctggcctctgcaaagtggcaggtgccctcttcaacatcaacttctacgcaggagccctcctgctggcctgcatcagctttgaccgctacctgaacatagttcatgccacccagctctaccgccgggggcccccggcccgcgtgaccctcacctgcctggctgtctgggggctctgcctgcttttcgccctcccagacttcatcttcctgtcggcccaccacgacgagcgcctcaacgccacccactgccaatacaacttcccacaggtgggccgcacggctctgcgggtgctgcagctggtggctggctttctgctgcccctgctggtcatggcctactgctatgcccacatcctggccgtgctgctggtttccaggggccagcggcgcctgcgggccatgcggctggtggtggtggtcgtggtggcctttgccctctgctggaccccctatcacctggtggtgctggtggacatcctcatggacctgggcgctttggcccgcaactgtggccgagaaagcagggtagacgtggccaagtcggtcacctcaggcctgggctacatgcactgctgcctcaacccgctgctctatgcctttgtaggggtcaagttccgggagcggatgtggatgctgctcttgcgcctgggctgccccaaccagagagggctccagaggcagccatcgtcttcccgccgggattcatcctggtctgagacctcagaggcctcctactcgggcttgtgaggccggaatccgggctcccctttcgcccacagtctgacttccccgcattccaggctcctccctccctctgccggctctggctctccccaatatcctcgctcccgggactcactggcagccccagcaccaccaggtctcccgggaagccaccctcccagctctgaggactgcaccattgctgctccttagctgccaagccccatcctgccgcccgaggtggctgcctggagccccactgcccttctcatttggaaactaaaacttcatcttccccaagtgcggggagtacaaggcatggcgtagagggtgctgccccatgaagccacagcccaggcctccagctcagcagtgactgtggccatggtccccaagacctctatatttgctcttttatttttatgtctaaaatcctgcttaaaacttttcaataaacaagatcgtcaggaaaaaaaaaaaa

SEQ ID NO: 2126 - DNA, 828 bp, Homo sapiens
  misc_feature (787)..(787): n equals a,t,g, or c
  misc_feature (819)..(819): n equals a,t,g, or c
  misc_feature (827)..(827): n equals a,t,g, or c
ggcacgagagatggcggcgcaacagcgggactgcgggggtgctgcgcagctggcggggccggcggcggaggctgaccccctaggacgcttcacgtgtcccgtgtgcttagaggtgtacgagaagccggtacaggtgccctgcggacacgtcttttgctctgcatgcctgcaggaatgtctgaagccgaagaagcctgtctgtggggtgtgtcgcagcgctctggcacctggcgtccgagccgtggagctcgagcggcagatcgagagcacagagacttcttgccatggctgccgtaagaatttcttcctgtccaagatccggtcccacgtggctacttgttccaaataccagaattacatcatggaaggtgtgaaggccaccattaaggatgcatctcttcagccaaggaatgttccaaaccgttacacctttccttgtccttactgtcctgagaagaactttgatcaggaaggacttgtggaacactgcaaattattccatagcacggataccaaatctgtggtttgtccgatatgtgcctcgatgccctggggagaccccaactaccgcagcgccaacttcagagagcacatccagcgccggcaccggttttcttatgacacttttgtggattatgatgttgatgaagaggacatgatgaatcaggtgttgcagcgctccatcatcgaccagtgagcagagtccgtgcttgctatctgtctcatgttacagagcttccattacatattaaacgtgaaatctatgaaaaaaaaaaagggggggggncccggttaccccaatttcggccctattaggtnaagtcgtna

SEQ ID NO: 2127 - DNA, 2520 bp, Homo sapiens
  misc_feature (2520)..(2520): n equals a,t,g, or c
ggcacgagcacttcctggccaggaaacctgagcggtgagactcccagctgcctacatcaaggccccaggacatgcagaaccttcctctagaacccgacccaccaccatgaggtcctgcctgtggagatgcaggcacctgagccaaggcgtccagtggtccttgcttctggctgtcctggtcttctttctcttcgccttgccctcttttattaaggagcctcaaacaaagccttccaggcatcaacgcacagagaacattaaagaaaggtctctacagtccctggcaaagcctaagtcccaggcacccacaagggcaaggaggacaaccatctatgcagagccagtgccagagaacaatgccctcaacacacaaacccagcccaaggcccacaccaccggagacagaggaaaggaggccaaccaggcaccgccggaggagcaggacaaggtgccccacacagcacagagggcagcatggaagagcccagaaaaagagaaaaccatggtgaacacactgtcacccagagggcaagatgcagggatggcctctggcaggacagaggcacaatcatggaagagccaggacacaaagacgacccaaggaaatgggggccagaccaggaagctgacggcctccaggacggtgtcagagaagcaccagggcaaagcggcaaccacagccaagacgctcattcccaaaagtcagcacagaatgctggctcccacaggagcagtgtcaacaaggacgagacagaaaggagtgaccacagcagtcatcccacctaaggagaagaaacctcaggccaccccaccccctgcccctttccagagccccacgacgcagagaaaccaaagactgaaggccgccaacttcaaatctgagcctcggtgggattttgaggaaaaatacagcttcgaaataggaggccttcagacgacttgccctgactctgtgaagatcaaagcctccaagtcgctgtggctccagaaactctttctgcccaacctcactctcttcctggactccagacacttcaaccagagtgagtgggaccgcctggaacactttgcaccaccctttggcttcatggagctcaactactccttggtgcagaaggtcgtgacacgcttccctccagtgccccagcagcagctgctcctggccagcctccccgctgggagcctccggtgcatcacctgtgccgtggtgggcaacgggggcatcctgaacaactcccacatgggccaggagatagacagtcacgactacgtgttccgattgagcggagctctcattaaaggctacgaacaggatgtggggactcggacatccttctacggctttaccgccttctccctgacccagtcactccttatattgggcaatcggggtttcaagaacgtgcctcttgggaaggacgtccgctacttgcacttcctggaaggcacccgggactatgagtggctggaagcactgcttatgaatcagacggtgatgtcaaaaaaccttttctggttcaggcacagaccccaggaagcttttcgggaagccctgcacatggacaggtacctgttgctgcacccagactttctccgatacatgaagaacaggtttctgaggtctaagaccctggatggtgcccactggaggatataccgccccaccactggggccctcctgctgctcactgcccttcagctctgtgaccaggtgagtgcttatggcttcatcactgagggccatgagcgcttttctgatcactactatgatacatcatggaagcggctgatcttttacataaaccatgacttcaagctggagagagaagtctggaagcggctacacgatgaagggataatccggctgtaccagcgtcctggtcccggaactgccaaagccaagaactgaccggggccagggctgccatggtctccttgcctgctccaaggcacaggatacagtgggaatcttgagactctttggccatttcccatggctcagactaagctccaagcccttcaggagttccaagggaacacttgaaccatggacaagactctctcaagatggcaaatggctaattgaggttctgaagttcttcagtacattgctgtaggtcctgaggccagggatttttaattaaatggggtgatgggtggccaataccacaattcctgctgaaaaacactcttccagtccaaaagcttcttgatacagaaaaaagagcctggatttacagaaacatatagatctggtttgaattccagatcgagtttacagttgtgaaatcttgaaggtattacttaacttcactacagattgtctagaagacctttctaggagttatctgattctagaagggtctatacttgtccttgtctttaagctatttgacaactctacgtgttgtagaaaactgataataatacaaatgattgttgtccatggaaaggcaaataaattttctacagtgaagatgcaaaaaaaaaaaaaaaaaaaaaaaaaaaaaaaaaaaaaan

SEQ ID NO: 2128 - DNA, 692 bp, Homo sapiens
  misc_feature (3)..(3): n equals a,t,g, or c
  misc_feature (7)..(7): n equals a,t,g, or c
  misc_feature (11)..(11): n equals a,t,g, or c
  misc_feature (14)..(14): n equals a,t,g, or c
  misc_feature (57)..(57): n equals a,t,g, or c
  misc_feature (575)..(575): n equals a,t,g, or c
  misc_feature (602)..(602): n equals a,t,g, or c
  misc_feature (627)..(627): n equals a,t,g, or c
ggntagncaantcnctcccatgattacgccaagctctaatacgactcactatagggntttgttggtacgcctgcaggtaccggtccggaattcccgggtcgacccacgcgtccgattttcttcagacaaaactgctcttgtgcaatattttatgctcagtgagcaaattgtgtatttatgtttatcaatttgttctcaaggtggctgtctacagacatttgaccaagacatacatctgatttaccttgtgttttttttttattgttgtttttttttaagacagagattcagtctgtcacccaggctggagtgctgtggtgtgatcttagctcactgcaacctccgcctcccaggttcaagcaattttcctgcctcagcctcccgagtacctgggactatatgtgcgcaccaccacgcctggctaattttttgtatttttagtagagatggggtttcaccatgttggctgggctggtctcgaactcctaacctcaagtgatccacccgcctcagcctcccaaagtgctgggattacaggtgtgagccactgcacccagcctaccttggctgtttgngtctgggaggtttttttttttctattnttattttttcatgaaaattattggngggccactgaaagtccccacacacaaaagcctttattctatataatttataaacacaaattcatg

SEQ ID NO: 2129 - DNA, 474 bp, Homo sapiens
  misc_feature (10)..(10): n equals a,t,g, or c
  misc_feature (254)..(254): n equals a,t,g, or c
  misc_feature (293)..(293): n equals a,t,g, or c
  misc_feature (341)..(341): n equals a,t,g, or c
  misc_feature (349)..(349): n equals a,t,g, or c
  misc_feature (363)..(363): n equals a,t,g, or c
  misc_feature (374)..(374): n equals a,t,g, or c
  misc_feature (423)..(423): n equals a,t,g, or c
  misc_feature (444)..(444): n equals a,t,g, or c
  misc_feature (451)..(451): n equals a,t,g, or c
  misc_feature (457)..(457): n equals a,t,g, or c
  misc_feature (474)..(474): n equals a,t,g, or c
gggcatggtngtgcatgcctgtaattccagctactcgggaggctgaggcaggagaattgcttgaacccgggagacggaggttgcagtgacccgagatcatgccagtgcactccagcctgggtgacagagtgagactctgtctcaaaaaaataaaaaataaataataaataataataataataaaataaaaataactgcaacaagcccctagattgacttgaagcctctgtctgaactgctggcgggatccccancttcccccatgtgcctgttcatggcatgcagaggtcagncccttgcttcaagcctcggaccagagtgggccatctcggttagcatangacacaangacagaagcattgncctcaagtttnctgagacatgtttgcccctggaagcggtgattttggccatcattgctgnaagacttgtcatcggggcagnatcttancatcangcatttgctgtcgcggn

SEQ ID NO: 2130 - DNA, 204 bp, Homo sapiens
  misc_feature (19)..(19): n equals a,t,g, or c
  misc_feature (22)..(22): n equals a,t,g, or c
  misc_feature (39)..(39): n equals a,t,g, or c
  misc_feature (61)..(62): n equals a,t,g, or c
  misc_feature (104)..(104): n equals a,t,g, or c
  misc_feature (107)..(107): n equals a,t,g, or c
  misc_feature (110)..(110): n equals a,t,g, or c
  misc_feature (163)..(163): n equals a,t,g, or c
  misc_feature (175)..(175): n equals a,t,g, or c
  misc_feature (201)..(201): n equals a,t,g, or c
tataccacaaatgcagccnggnggagtacaagctcctgntatacaacaggtgctggctccnnttcctggagggatttcaccacagacaggtggcatcatccagnctnagnaaatctaatttacaggaaataaagactcaagatatacctacgacagtggcagnacctacaccagnccaaagcacagataactgcaactggncag

SEQ ID NO: 2131 - DNA, 367 bp, Homo sapiens
  misc_feature (317)..(317): n equals a,t,g, or c
  misc_feature (337)..(337): n equals a,t,g, or c
  misc_feature (346)..(346): n equals a,t,g, or c
  misc_feature (367)..(367): n equals a,t,g, or c
aattcggcagagttgtgggccgaagaatatgctcatgtggtgttgaggaaagcagacattgacctcaccaagagggcgggagaactcactgaggatgaggtggaacgtgtgatcaccattatgcagaatccacgccatacaagatcccagactggttcttgaacagacagaaggatgtaaaggatggaaaatacagccagccttcgtgtccgaggccagcacaccaagaccactggccgccgtggccgcaccgtgggtttgtccaagaggaattaagtttttaggccttgtctgttaataaatagtttatatacctnaaaaaaaaaaaaaaaatttnggggggggnccccgtacccatttgcccttn

SEQ ID NO: 2132 - DNA, 243 bp, Homo sapiens
  misc_feature (229)..(229): n equals a,t,g, or c
  misc_feature (234)..(234): n equals a,t,g, or c
  misc_feature (240)..(242): n equals a,t,g, or c
gggggtgcctgtaccccccagcctggctggcatcatgcagaggaccttcgcctggctgttggaccgcgtgcagcacctgggtgcccctgtcacccttcgcgcctcttatctggagatctacaatgagcaggtctcagccgtcgaaggaactcagcccacaccctgaaccaggcctccagccgaagccatgccctgctcaccctttacatcagctccaaaaaaaaaaatnaattntttatnnnc

SEQ ID NO: 2133 - DNA, 317 bp, Homo sapiens
  misc_feature (260)..(260): n equals a,t,g, or c
  misc_feature (268)..(268): n equals a,t,g, or c
  misc_feature (293)..(293): n equals a,t,g, or c
ggaaagatagatcctgaccagacagtaatcagagctgagtctttggatggtggtgacaccagttctacagttgtagaatctcaagaggggctttctggcactcatgtcccagagtcttctgattgttgtgaaggttttattaatactttttcaagcaatgatatggatgggcaagacttagattactttaatattgatgaacgcgcaaaaatggcccactaattagtgatgctgaacttgatgcctttctgacagaacantatcttcngaccactaacataaatcttttgaanaaaatgttaaatgactctaaatcg

SEQ ID NO: 2134 - DNA, 305 bp, Homo sapiens
  misc_feature (8)..(9): n equals a,t,g, or c
  misc_feature (19)..(19): n equals a,t,g, or c
  misc_feature (31)..(31): n equals a,t,g, or c
  misc_feature (43)..(43): n equals a,t,g, or c
  misc_feature (116)..(116): n equals a,t,g, or c
  misc_feature (160)..(160): n equals a,t,g, or c
  misc_feature (164)..(164): n equals a,t,g, or c
  misc_feature (193)..(193): n equals a,t,g, or c
  misc_feature (232)..(233): n equals a,t,g, or c
  misc_feature (259)..(259): n equals a,t,g, or c
  misc_feature (272)..(272): n equals a,t,g, or c
  misc_feature (294)..(294): n equals a,t,g, or c
gaatcctnntggaaaaccnctcactatagtnaaagctggtacncctgcaggtaccggtccggaattcccgggtcgacccacgcgtccgcaccgggcacttccaccaacggcaaagncctggctgccactgcacccactcctggcatccccatcctgcagnctgnaccctccgccccaccccccaaagcccagncagtttctcccgtgcaggccccgcccccgggtggctcannccagctgctgcctgggaaggtcctantgcctctggccgnccctagcatgtcagtgcggggnggaggggccgg

SEQ ID NO: 2135 - DNA, 330 bp, Homo sapiens
  misc_feature (68)..(68): n equals a,t,g, or c
  misc_feature (70)..(70): n equals a,t,g, or c
  misc_feature (164)..(164): n equals a,t,g, or c
  misc_feature (225)..(225): n equals a,t,g, or c
  misc_feature (237)..(237): n equals a,t,g, or c
  misc_feature (257)..(257): n equals a,t,g, or c
  misc_feature (272)..(272): n equals a,t,g, or c
  misc_feature (279)..(279): n equals a,t,g, or c
  misc_feature (288)..(288): n equals a,t,g, or c
gggcaactattatctcaagttcagtgtggtgagtgacaagaatcatatgcactttggggctatcactngngccatgggtattcgcttcaagtcttactgctccaaccttgttcgcactttgatggttgatccttctcaagaagttcaggaaaattataactttntgctccagcttcaagaggagctgctgaaggaattaagacatggtgagaagatatgtgacgngtataacgctgncatggacgtggttaaaaagnagaagccagaactgntgaacanaaattaccnaaaacctagggttagggatgggaattgaatcccgtgaaggct

SEQ ID NO: 2136 - DNA, 333 bp, Homo sapiens
  misc_feature (131)..(131): n equals a,t,g, or c
  misc_feature (224)..(224): n equals a,t,g, or c
  misc_feature (293)..(293): n equals a,t,g, or c
  misc_feature (304)..(304): n equals a,t,g, or c
  misc_feature (317)..(318): n equals a,t,g, or c
  misc_feature (324)..(324): n equals a,t,g, or c
ggcacgagctcgtgccgaattcggcacgagcccaaacggagccacgtgaggacgtctttggggatgtgtctccaagaaaagtgtgggctgccttcctcaccctggatgcctgtgggctgccttcctcaccntggatgcctgtgggctgccttcctcaccctggatgcctgtgggcagccttcctcaccctggatgcctgtgggctgccttctcaccctggatgnctgtgggctgccttcctcaacctggatgctgtgggcagctttctcaacctggatgctgtgggctgcttnctcaacctggntgactgtgggcannctttcntaacctgga

SEQ ID NO: 2137 - DNA, 264 bp, Homo sapiens
  misc_feature (203)..(203): n equals a,t,g, or c
  misc_feature (229)..(229): n equals a,t,g, or c
  misc_feature (253)..(253): n equals a,t,g, or c
  misc_feature (262)..(262): n equals a,t,g, or c
  misc_feature (264)..(264): n equals a,t,g, or c
gttgaggacccgctgcggagctgctgcctggtggccgcggacgcccaggagcccgagggcgcgggcagcgactcgggggacagcccggccagcagctgcagcagtagcgaggactcagagcagcggggagtcggcgccgggggtcccgaggagggcgcgccccctgccacctcggccgagaggactaatgggggtgcggaccncgcctgggcttttctgacattcactncaactctcgcaacacgttccaggntgagccgcngn

SEQ ID NO: 2138 - DNA, 667 bp, Homo sapiens
  misc_feature (309)..(309): n equals a,t,g, or c
  misc_feature (336)..(336): n equals a,t,g, or c
  misc_feature (413)..(413): n equals a,t,g, or c
  misc_feature (459)..(459): n equals a,t,g, or c
  misc_feature (519)..(519): n equals a,t,g, or c
  misc_feature (522)..(522): n equals a,t,g, or c
  misc_feature (553)..(553): n equals a,t,g, or c
  misc_feature (584)..(584): n equals a,t,g, or c
  misc_feature (613)..(613): n equals a,t,g, or c
  misc_feature (624)..(624): n equals a,t,g, or c
  misc_feature (631)..(631): n equals a,t,g, or c
  misc_feature (666)..(666): n equals a,t,g, or c
gcaaatattcattatttgttctactggaaataaaaatactaattcaatggatttgagtttatgtaataatttacagagtttttcaatgtgttttttcagaatggacatgtaaaatttagttacattccagggaattttcaggtgaaaattagtagatagttaacatgaaaattttatatgaattcatattttttcttggacaatatgctaatatttattgatttcacaaatttacagcatatgggtgattttggaagcattcatagacccggaattgttgttgactatcaaaacaaatccaccaatgtnacagttgctgctgcaagaggaataaanagaaaaatgatgcagccatttaataagcccagtggaacctttatcaagaacccaaactagcaaaacctatggagaanataagcctcagcaaatcaccacaaaaactgatcctaaaaattgaanaagaaaaaaaacggcaattgaggtccgcaaaaaaaacaaaggccccaaaaaaaaaaacgnganaattcggaaatggatccgaatggctttaatnttcttttgtaatttcaactttaaaaaaaaanttgactgctcggaaattctcctccgaacnttgatctttcnaaacacntattgaaaatttttggatttgcctatttttggaana

SEQ ID NO: 2139 - DNA, 384 bp, Homo sapiens
  misc_feature (2)..(2): n equals a,t,g, or c
  misc_feature (10)..(10): n equals a,t,g, or c
  misc_feature (38)..(38): n equals a,t,g, or c
  misc_feature (41)..(41): n equals a,t,g, or c
  misc_feature (56)..(56): n equals a,t,g, or c
  misc_feature (122)..(123): n equals a,t,g, or c
  misc_feature (161)..(161): n equals a,t,g, or c
  misc_feature (321)..(322): n equals a,t,g, or c
  misc_feature (330)..(330): n equals a,t,g, or c
  misc_feature (350)..(350): n equals a,t,g, or c
  misc_feature (355)..(355): n equals a,t,g, or c
tngaatagtnaacataacatttacggtctttatgattnaanagtagtgtgctagtntacaatcatagaaagcattattacagttttaacaaaaaagcagtgaaagcctttttgagatctttnntatctgattggaatagcaagtattttttgttttgattncatttttatacatacttttatgataataactttaagcattatctcagattaccttacggaaaagtgtggaatcagcattaagacagttagaaagagaaaaggcgcttcttcagcacaaaaatgcagaatatcagaggaaagctgatcatgaagcagacannaaacgaantttggaaaatgatggtttgnggtgnagaatattaaatactcatcaagaaaaaaa

SEQ ID NO: 2140 - DNA, 415 bp, Homo sapiens
  misc_feature (273)..(273): n equals a,t,g, or c
  misc_feature (332)..(332): n equals a,t,g, or c
  misc_feature (360)..(360): n equals a,t,g, or c
  misc_feature (398)..(398): n equals a,t,g, or c
  misc_feature (414)..(415): n equals a,t,g, or c
gcgtcagtctcagcttgctcaggatgagcgtgtgtcccgctcttacctcgccctggccaccgaaaccgtggacatgttccacatcctcccccaaagcaatgtgagtcccagagcccgcttttgctcgatgaaagtctggagtctctgaagcgaatccatgaagtgcaggaagagatgaagaacaaagaacagtgggaccagttgccccgggatcagcagcaggctcgtcagtctcagcttgctcaggatgagccgtgtgtccgctcttacctngcctgccaccgaaaccgtggacatgttccacatcttccccaaagcaatgtgagtcccanagcccgcttttggtctttcccacaattncattactaagaaacacatcaaataaactgacttttttncccccaaaaaaaaaann

SEQ ID NO: 2141 - DNA, 499 bp, Homo sapiens
  misc_feature (143)..(143): n equals a,t,g, or c
  misc_feature (352)..(352): n equals a,t,g, or c
  misc_feature (365)..(365): n equals a,t,g, or c
  misc_feature (373)..(373): n equals a,t,g, or c
  misc_feature (384)..(384): n equals a,t,g, or c
  misc_feature (388)..(388): n equals a,t,g, or c
  misc_feature (408)..(408): n equals a,t,g, or c
  misc_feature (416)..(416): n equals a,t,g, or c
  misc_feature (420)..(420): n equals a,t,g, or c
  misc_feature (448)..(448): n equals a,t,g, or c
  misc_feature (453)..(453): n equals a,t,g, or c
  misc_feature (476)..(476): n equals a,t,g, or c
  misc_feature (481)..(481): n equals a,t,g, or c
  misc_feature (490)..(490): n equals a,t,g, or c
  misc_feature (498)..(499): n equals a,t,g, or c
cggcacgagcatggatgtcatcagcattgacaagacgggagagaatttccgtctgatctatgacaccaagggtcgctttgctgtacatcgtattacacctgaggaggccaagtacaagttgtgcaaagtgagaaagatctttntgggcacaaaaggaatccctcatctggtgactcatgatgcccgcaccatccgctaccccgatcccctcatcaaggtgaatgataccattcagattgatttagagactggcaagattactgatttcatcaagttcgacactggtaacctgtgtatggtgacttggaggtgctaacctagggaggatttggtgttgttaccaccagggggnggcaccctgggtnttttacgngggttcagggnaaanatgccattggaacagttttnccctgggntttncaaatttttttttttggaagggaacaanctggnttttttcccggggaagggtttcngcttnccttttttngggggggnn

SEQ ID NO: 2142 - DNA, 297 bp, Homo sapiens
  misc_feature (1)..(1): n equals a,t,g, or c
  misc_feature (3)..(3): n equals a,t,g, or c
  misc_feature (5)..(5): n equals a,t,g, or c
  misc_feature (21)..(21): n equals a,t,g, or c
  misc_feature (120)..(120): n equals a,t,g, or c
  misc_feature (233)..(233): n equals a,t,g, or c
  misc_feature (283)..(283): n equals a,t,g, or c
  misc_feature (292)..(292): n equals a,t,g, or c
nangnacgctgtgtaaataanatgctttgggggctcccctggccacagaaggagaaaactggagccttctaatttcctgttgtttactttccaaaggctggagttgggtaggaaacctgngcataccggcacactggcttgtgggtgaacttctctccctgctgtatttcccggacaggtgaggcggaccctgttcatcacaggactccccagagatgccaggaaggagactntggagagccacttccgggacgcgtatcccacgtgtaaggtggttgatgtncagttgtgntacaa

SEQ ID NO: 2143 - DNA, 575 bp, Homo sapiens
  misc_feature (14)..(14): n equals a,t,g, or c
  misc_feature (361)..(361): n equals a,t,g, or c
  misc_feature (470)..(470): n equals a,t,g, or c
  misc_feature (511)..(511): n equals a,t,g, or c
  misc_feature (527)..(527): n equals a,t,g, or c
  misc_feature (539)..(539): n equals a,t,g, or c
  misc_feature (544)..(544): n equals a,t,g, or c
  misc_feature (573)..(573): n equals a,t,g, or c
ggccgtgagattcncaggagtttccacttggtgatcagcactgaacacagaccaccaaccatggagtttgggcctagctgggttttccttgttgctattttaaaaggtgtccactgtgaggtgcagctggtggagtctgggggaggcttggtacagccagggcggtccctgagactctcctgtacaacttctggattcacctttggagattattctatgagctgggtccgccaggctccagggaaggggctggagtgggtaggtttcattagaagcaaagcgcatggtgggacaacagaatacgccgcgtctgtgaaaaggcagattcaccatctcaaagagatgattccacaggcatcgnctatctggcaaatgaacagcctgaaaccgaggacacagacattattactgtctagacatgactacaggcacacccctggctactgggggcagggaaccctggtcaccgncttctctggcttccaccaagggccatcgtcttccccctggngcccttgttccaggancacttccgaaanccagnggcctgggcttgctgggcaagggctcttncc

SEQ ID NO: 2144 - DNA, 557 bp, Homo sapiens
  misc_feature (52)..(52): n equals a,t,g, or c
  misc_feature (521)..(521): n equals a,t,g, or c
gcgctcaaccctcactaagggaacaaaagctggagctccaccgcggtggcgnccgctctagaactagtggatcccccgggctgcaggaattcggcacgagggagttttcagatcaaaaactggttaccattttttgtcagagtgtctgatgcggccactcattcggctccccagaattcctagactgggttaatagggtcatattgtgaatgtctcactacaaaatgacttgagtccagtgaaatctcattagggtttaagaatatttcagggatccttaatgttttgatttttgttttctgaaattggattttattttattttatcttataatttcagttcatctaaattgtgtgttctgtacatgtgatgtttgactgtaccattgactgttatggaagttcagcgttgtatgtctctctctacactgtggtgcacttaacttgtggaatttttatactaaaaatgtaggataaagactattttgaaggtttgaataaagtgatgaagttgcattacanctcactgcaaggattctttacttagcttgtttttag

SEQ ID NO: 2145 - DNA, 552 bp, Homo sapiens
  misc_feature (1)..(1): n equals a,t,g, or c
  misc_feature (5)..(8): n equals a,t,g, or c
  misc_feature (14)..(14): n equals a,t,g, or c
  misc_feature (61)..(61): n equals a,t,g, or c
  misc_feature (341)..(341): n equals a,t,g, or c
  misc_feature (354)..(354): n equals a,t,g, or c
  misc_feature (470)..(470): n equals a,t,g, or c
ncaannnngacacnaaccctcactaaagggaacaaaagctggagctccacctgcggtgcgnccgctctagaactagtggatcccccgggctgcaggaattcggcacgaggaggagccccagtcatgctcagcacgctacagatgtgttgtttgtcacactgagattgctgaatgtcgtggctgttggctgccgagcctcagctgctggcatttccttctgctgtttgctgcttttgtgcctcccccactttccatcacctctggagtcccgtctggacgtcccttcctgctacaggaataatgaggcgtgggctgcctcccgctaggcctcctgctccctntaggtagtttctngctgaggcttgctaattggggatgcttcttagagcatcttccacatcaactcccctggctgctggctaccgattaaattcattagtgtgaaagaggtgggagtgaggttttctggnctgaagcagtctgcactgaaaggtacccaagtggcctgaaacagtgtagggaaagacctgggaaacactggaccaaaaaagc

SEQ ID NO: 2146 - DNA, 618 bp, Homo sapiens
  misc_feature (44)..(44): n equals a,t,g, or c
  misc_feature (83)..(83): n equals a,t,g, or c
  misc_feature (105)..(105): n equals a,t,g, or c
aaccctcactaaagggaacaaaagctggagctccaccgcggtgncggccgctctagaactagtggatcccccgggctgcaggnattcggcacgagcggcggcggncggcccgctccagccatgccgaataaaaacaagaaggagaaagaatcaccaaaagcagggaagagtggaaaaagttcaaaagaaggacaagacacagtagaatcagagtgctactgtctaagagctggagctacagagcttgaaattaccactgaaaacactgaaatgttgggcccttcactgcttcctcataaggataccagaggcaacctggcatattaagcttgacacttggcagatcactgtgtaaattgtttttcaggaatacaagttgggacacttctgttcatttgacctttgagttgacccttaaattttattattgttttttttcccctcagtcttcagctcactgcttcacttctagttccacccacttaccaaatatgattgactcatgcaggtgaattaaaccattattgcacactttttccctctcctctctctcagtattactcttaacttgaatattttaacctgaacaatttaaataggcttgacattcccatgctg

(The sequence listing continues in the following parts.)
